United States Patent Application Publication US 2011/0214205 A1 - sequence listing, part 11

SEQ ID NO: 37185 - DNA, 2661 bp, Setaria italica
  misc_feature (2642)..(2661): n is a, c, g, or t
  Peptide Sequence Number=SeqID_103159
cccattcccttcctcctcttctccacccactccaccgatccccctctctcgctctgaattctctctcgtcttgctcaccgtaccatctattctgctgcgtcgctcttggaatcaatccgttcttgtttcctccgtctgttgggttgattctctctctttctctccgtggagaggatcaagaaacaggacagagggggagtttaaagaggagaaatccaaacactttcgttgttcatcctggattgcgattcttgcgagttggtcagaaactctgggacagtttctggtcttttaaaccactacttgaaagaccagccatctgagatgcaacggccacacatcaattgagatctcgctgctgtagttgggccacaatgcaagggcagaggaattccatggagcattttgctgatgtttttggattcgacgttgcatctagttcaggcaacccagtgatggatcagcaggcatattggaacaatgttctcggatcagtagaatcacagaatcttcaaggctatcagatgaatcatagtgatgccaccatcccctatggaaatgagccacagcaagatggcacatttcttggtttctgggaagcaggcgaagctagttcaagtggcagtgcactaaactatggcagctctagcaatgccaaaacagagcatcttaacatcggcggtggcctgaggattggtgaaaggcgactggtagctgacaatgacctttctctggatgtggacatcaacctcaatgccaacgttaatgatctatgcggtcaaagttcaaatgctaattgtgcctctcaagatcctgagcagtacggtggctgtaatcgtaatggtataaatgctcagccatccaacctgaggttacatccgtataggacattcctactaggtgcagagcaaacagacttcttttactttgaatcctagtgtaaaacctttgccagggagttccctggatggtcgccggctagcatgcaaggaactacggtgatttttcattaatgcaagaaggcattgatcaaagaccagggagttccctggatggtcgccggctagcatgcaagagaaaaaatattgaaggagccaacgggcagggttcagcaggtgctagcacaagttattcccacaggaatgataatgccttccataacattgcttcttcaagttacaatcctgctcctatcagaaattcgtcctctccaaattgcttgctggttccaagttctattgaggatcaactcccacgttatggaactaatgcaggactgtcatctggtagctatgatcttaatggagggatcaacaatgctgggaattcacagagaagtttccgggcaagaaccaccacagctcaacagattgctccctgtactgtatggccctcttcaaatgctgtcagactttctaattcatggaatcaccagccacctcatctgcagagtacatttgatgacccccaggaggttattcctgtggttagtagcctgaacttgcaataccaacatccagtgaatgttcctggtgccccacaagctgcaaaccgtttcactggtcatggagcttcatcgtcacgagctggcagtttggagaatcgagttattggtagtgaagaggttcttaggaggaatgtggtgcctaccaactactctgatttagtcccccctgctgcagtagacctgaggcgtttggttccagaaccatctaattggagttctgatggccgaggcactgcagtatcaggaactattcctcctgtatcaagagctaataccagttcagcagttaacccaccagcaggattctctcaccaaaacctcaatagacgccatcctcgaaatttgtcagaggagattggtcgcctatctggagcactccgtggtcatcaacccccacgcttaaggtcaggttttctgttggagcgccaaggcgatggtgtttggggtgttcctttatcaatgaggggtagggaaggaagaagattaatggagattcggaatgcacttgaaatgattgaaaggggagagaatgtaaggcttgagtctatcatctatggtggcgtcgacactcatgacagacacagggacatgcgtttagacatagacaatatgtcctatgaggagctattagcacttgaggaaagaataggaaatgttagcactggcctaagcgaggaagcagtgataaagctgctcaagcaaaggaaattttcatcatggagactaaaagcatctttggaccatgagccatgttgtatttgccaggaggagtatgttgatggagacaatcttgggagacttgactgcgggcacgacttccatgttggctgcatcaagcaatggctggtgctgaagaatgtgtgccccatctgcaaaagcaccgcgctgaagacctgaaactgaaccgaggctcgtcagaggacacccatgttctatgttcattcgatcgcaagatcatttaccgattcatattgctgtgctttttggttgggaaattttgccactcaccttcgattgggaaaggaattttttttttaaaaaaggagagaaatggtccctgtaaactgctggtgcagtaaataatccctggaatatgtctccctgcatttaaccaaatatttatggctaggtaaannnnnnnnnnnnnnnnnnnn

SEQ ID NO: 37186 - DNA, 473 bp, Setaria italica
  Peptide Sequence Number=SeqID_103160
accctgcgcggccggcccggggctgtggctacgcaccctgcgctggtagccgacttggatctgcggtggcggatctgcaacgtcgagagccacgccggcgaccgcggcgccctcgcacgctgctcgggcgactacgccgtcgtcatcagccagaacacaacggcaccaccagttccgagaggacctaatttgctgggagaaggtagccatgtgcatattgattctgtttaaagcattgcccaggttgaggatcagatgcagctaggaacaagcagttggaacagatagggaatttgaatgactaatagttttggttgcttgagaactctatttttcccttctgaaatggcttgtatctgatttgattccgtaagtgggttggcttctctgaattctgaaaaatgggttgaaaatgggctgaaaaccggcccaactttggtgggctgaatttttatgggctgctagtggtctag

SEQ ID NO: 37187 - DNA, 273 bp, Setaria italica
  Peptide Sequence Number=SeqID_103161
gtcctcctatctaaatatttaagagtttagtggctgtgtttatattagctgttgaagaagctgtaaattatcctcccaagttatatttatcctcccctcaagagatatttatcctcaagagatatttatcctcccaagttatctaaaattcaacgatgaatcccaagttatatttatcctcccctcaagagatactgcgatcaacatagactacagcaatgaacaaattcagtatctttccccttcatatagattttcagttagacaaatgca

SEQ ID NO: 37188 - DNA, 1658 bp, Setaria italica
  Peptide Sequence Number=SeqID_103162
gactgatgacatggaaatgaaccaccttcagctgaactaatactatgcattgcaaatgtgatagcattggcatccatcaatcaacggaattggactataagaattatgtcgcatgctgaaactccgaacatcccaacttgatttcaaatatgtacgagatggaattcacataaaccgaatgaaaatatcctctcagccgggtcatttcctgtttctcgcccctcaaattgtcacagttcacggcgcagcccggcttaatttaatacaatgggtttcccatcgtttcttacaagcaactcaggtttccaaattaacttggattctcagcagcagggtctacatccgaggtgagtgcaattgccgatatgaagagccctcgggcgatctgttttctggagatgacctgccaacaccgagccattgcccaaatagtctccttggtgccgatgcgggctcggatgtgctgtgcgactgctgtgaggtccaccagctcgtctcacagtccacgggcatcaatgggtatggcgcaaaacggtcgcgctcccaggcatagaaccggcttcctcccacatcatcagtctccattgaattatggccagacgaacctggcgggaacaaggaaaaagtgggattctctggtagaggtgctggggcaggtcgcatgcctcctgacctatgagccccagcaaatagactagatgatgaattctgctggtactgttcattgatgctgccatgagccctcatgaactgaggcataagtggaggaacattgggagctctagatctagaaccagacccattactgaagtatgatggagaaacaacagatgctcgacgctggctatcaccatcaacccgtgcagcccttgtcccaaaagggatccctggctgttcattattgctgttgggctgggcataggaatggggcatgtgagcccaatggttatgatggaaatcagcaggttgcactgattgcatgggcctaacatctgatggcccagccagggggttccaatgatcatggtatgcaggacgatccattgttctctcagggacatgggagcttgacgatgacgtcaacggtggaagaggatgcaagtatgccacatatgggcaaggatgagttgtccctggtgcagcagaaacagctacttgctccgtgaagacatgctgtcccatgaagtcatgaaaagtaactggcggtgatgattctccttcctcaaataaagatggaagttgtgctaagcgaccaaatggacaccaatggaagcgaaatggcatttctgagtagctaacatcataaaggtcttcatcatgagcccactcctccatgttaacatcatgtgcagatcgggaaccgtttgcataaagccaattccctttctcaattttgcggcaattggggcattgcataacccctttggcattaaatgctgatccaatacagtctaggtggaactcgtggccgcactgcagcctggcggtggctctctccccgccggcggcgagcaccgcgtcgaggcagatcgagcaggacaccgcggccgccttctcctccttgccgcccgccccctcctccgccgccgcagccccggcggccgccgcctcctccttgggctccgcaccgacgcccatcccctcccccttcccctctt

SEQ ID NO: 37189 - DNA, 501 bp, Setaria italica
  Peptide Sequence Number=SeqID_103163
tttttttatgtaactggaaatttaattggcctggtaatcaagcagttgaactacaaatctacaagctagtagtaatgatctgctagactatactccttcctatataagtgatgatgaggtggacatgacgatgaccatcaactccatctctcttacattatattgaggacgggccgggtgatggtagatgatgatgcagcaaccaacacgctaagaaaccaaaatgatatcgtcctcctcctcatcagctcactaatccgtcgacgctgctagtacattctaactacaaggaggactggaggagaaggagcatgagcaatcgctggctgaatagcagtttgcagcagcaggggtggccggagacgacgaatctgcaggcgaggcggcggtgctgagcgccacgagcaggtccacgaaggcgccgacgatgagcccgtgcgtgctcttgccgttggccctcaggtaccatcccaacatctcctccagccagaaccagtcctt

SEQ ID NO: 37190 - DNA, 345 bp, Setaria italica
  Peptide Sequence Number=SeqID_103164
cgctctcctcccgcacgactgcacgagtgctcgacccttgcttgaaccctcctctctgacgctcctcgtctcctgcggcggcgccggcaaccaccggagcggagcggagcggagatgaagaagatcttcggcgctaaaaaggacaaggggccgccgccctccatccaagacgccaccgagcgaataaacaagcggggcgagacggtggacgagaagatcaagaagctggacgaggagctggcaaggtacaaggagcagatccgcaaagacccgccccggcccgtcccaggaggccatcaaggcgcgcgccatccgactcctcaagcacaagcgcatgtatgagga

SEQ ID NO: 37191 - DNA, 490 bp, Setaria italica
  Peptide Sequence Number=SeqID_103165
actctcatgtaatagggcgaggagctgaaaaggatgataggcgcagctgcatacatcgaatgcagctccaagacgcaacaggtatgttgtggacatggactgatcactactggttggtagcagtagtactttagtagtctgatgatgcagggaaaacattattgatgttgttagcagtttagtacagctacattacattcatccgtacaccatagcgtatagcttttgttggtgtaaagacgattagagaagaaaggaagcaacggagaccaaatgcaaactataaaaacgttgaatatctgtgctgtcctgaccaaagtttgcaaaagcatccgaaaacgggagaaatcgaatatgttagaacaaaatgccagactgattctgctgtttgaaaccagctttaactggattttaatctatcacatctggttgtaacgatgattttctccatggatggaacagaatgtgaaggcggtgttcgactccgcgc

SEQ ID NO: 37192 - DNA, 262 bp, Setaria italica
  Peptide Sequence Number=SeqID_103166
tgaggacgaggctggagttggcgcggtactcgtactgcttgaagcgcgcgtgcgcctcggcgccgccgccgaggttcgccatgggtgctgcagaatcggcacgacgagttatcaaatctttggagcggcgggtagaggcggagtcctcctggcggtctcccggcgggggaggatccgcgtctcgtcggcctcccgtcgcggcgtcggggggcgagcgagactgctagggatttgcttcgcttcagtgttggattgattttcg

SEQ ID NO: 37193 - DNA, 572 bp, Setaria italica
  Peptide Sequence Number=SeqID_103167
accgaagactagactagctggatgacgctgagcagggcctcgtaggcggcgcgcgtctccttggtctggggcttgtagacgacgtcgtcggtgagggagaggacgctgacgtcctgggtggaggcggcgcggcgcctgcgcttggcgtcgcgtcgggggatgtcggggtcggcggcgtcgcgcttggtcttcttggtgcgcgccttggtgagcttctcctcgagctcgggcggcctgttctggacggcgcggtcgccgaaggacctggggtcgatgcggccatagagcgtctcgggctcgccggtgggctcgtgggtgtcgcgggggcgggagtcggtggtgaggacgaggctggagttggcgcggtactcgtactgcttgaagcgcgcgtgcgcctcggcgccgccgccgaggttcgccatgggtgctttggagcggcgggtagaggcggagtcctcctggcggtctcccggcgggggaggatccgcgtctcgtcggcctcccgtcgcggcgtcggggggcgagcgagactgctagggatttgcttcgcttcagtgttggattgattttcg

SEQ ID NO: 37194 - DNA, 826 bp, Setaria italica
  Peptide Sequence Number=SeqID_103168
ctcatcactgagatcaagaaaacagctaaagaaggccagatgggagctgtcaaagtaatggccaaagatcttattcgtacccggcatcagataacaaagttctaccaacttaaatctcagctccaaggagtttctctaagagttcagacgctaaaatcaactcaagctatgggtgatgccatgaagggtgttacaaaagcaatggctcaaatgaacaggcagctaaatctgccaggattgcagaagataatgcaagagtttgagcggcaaaatgagaggatggagatggtgagcgaggtgatgggggatgccatagatgatgctttggaaggagacgaggaggaagaagaaacagaggagcttgtgaatcaagtacttgatgaaattggcattgatatcaaccaagagcttgttggagccccgtcggccgctgttgctcagccagcttccgccggaaaggttgcccaggctgaaagtgctggggccgctgatggcggaatcgacgccgatttgcaggcaaggctggacaatctaaggagaatgtaattggtgcccgatgctgcgttaaaaagaagagtagtgccttgtagcaccttttcctgtgaatgtggatgaatacaacctaccgaaacaaagtttacaagccagcgtgtatgttgaaacgaatgaagtgttcaatatgccggtaataataacaaatgtatatctgcgagtatgttgtgcttggaaagtccatgatcaattgtcgaatgcaacttcgtcccctctagaaataccaatagaaaggaattagttagtagacgaactaaaaaaaaaaaaaaaaaaa

SEQ ID NO: 37195 - DNA, 632 bp, Setaria italica
  Peptide Sequence Number=SeqID_103169
gttggcatcagggaaaggcggagggggaggggaaaggggggcggcgatccaatcatcactccaccggcttccctgagaggcgaggagcatacctccgatccgaccgagttctcggggggagatttcctcgcatatcgctccaatcggaaccctagtagccgtcacgaacaggaggatccaagatgagtttcttgttcgggaagcggaagacgcccgccgagctcttgagagagaacaagagaatgttggatcgatccatcagggaaattgagcgagagaggcaaggattgcaggcccaggagaagaagctcatcactgagatcaagaaaacagctaaagaaggcccagatgggagctgtcaaagtaatggccaaagatcttattcgtacccggcatcagataacaaagttctaccaacttaaatctcagctccaaggagtttctctaagagttcagacgctaaaatcaactcaagctatgggtgatgccatgaagggtgttacaaaagcaatggctcaaatgaacaggcagctaaatctgccaggattgcagaagataatgcacaaagaagtttagaagacggacaaaaatagaagaaggaataggaagaataaggtaagaaaagaaacaaa

SEQ ID NO: 37196 - DNA, 474 bp, Setaria italica
  Peptide Sequence Number=SeqID_103170
gccagtactcccatccacgattagtccaactagatgaggctcatatgtcctataacaatcctgtggaagggatctgaagtacagcagagatatgcaccgccaatatatactatgaacctcatgatccacataacctcccctgtgagatcccaaggctctagtcttttttcaacagaagtggcacaagctggcgccggcgaacacagtccaatctgaactgcaaaatattccgaatgcacccagatttgagagatttaaccaaaaggcacttccaacaaccaaacatattgcataggtcatctttgctgtggtcgatgccatcaggaaaagcttcaccacaaaccaaagcatcttagcaattcatcactccaagatgtgccatttttactattaagctcggttgaagcctttgcacctttcaaatgtgcatttcgcttgctagagcgaattatagtctttgcatgagtctccacg

SEQ ID NO: 37197 - DNA, 346 bp, Setaria italica
  Peptide Sequence Number=SeqID_103171
tccgaacgaatcctcacctttcctcgcgtcgcgtccaccctccgcgcctccgcttcgtccctccaggtccgggcggcgccggggcggagagaatggcctccgcgccatcggcgccggtgttcgagagggtggccgggatccgagccatcgccgagtccggccgctttaaggcctggttcctggaccagtttggcgtccttcacgatggcaagaagccgtaccccggcgccattttggcattggagaagctcgcggggaatggggcgaagatggtgataatcagcaattcctctaggcggtcgtctgtgacaattgagaagctgcagagcctggggttcgacacatt

SEQ ID NO: 37198 - DNA, 662 bp, Setaria italica
  Peptide Sequence Number=SeqID_103172
tttactttccgatgttctggtacttgtacaacctggcacacaacacgtagtacccgaagttgacggccaccagcacggtgagcagccagtagaggttctccagcctggacgcgttcatgttgtccggcagccacgccgtggcacgccgaacgacgccgatgagggccgtgctgaggtagaacccgagcgcgacgatcatggcgaccatgcccgtcgcggtgttcttgagcgacgggggaaactcctggtagtagagcgtcacctgcccggggaagtgcagagcctcgccggctccggacagcgcgaacggcaggagcagccacatcgccgacagcggcgacacccacgccgggttgccctcctcgccgtgcgcgcgcacggtgtccatgcgccgccgctcgatgacggcggacgcggccatgctggcgatggtgacgacgtggccggcgccgatgcgctgcagcggcgtcaggtcgtgccgggtgacgcgccgccagagcgggaggagcacgcgatcgaggaggccgagggagatgacgacggcgatgaggcagccgacgatcatggagcccgccgggatggtgaagcggccggcggcgcggtccatggccagcgcctgcaggatggtgaagttgatctgcacgccgatggcgatgctgagg

SEQ ID NO: 37199 - DNA, 439 bp, Setaria italica
  Peptide Sequence Number=SeqID_103173
tgccgggtgcagaatttcatactaagatacaggataacatttatctaaagaatttcaacaatcaaagaagaccacttcacacaaaacatctaacagggaatgtaaaattaatatcttcaaaaacatctaaagaataagcaacatagaagataatcatgtcaaagttggcaaatccaacacttcacacaaaacaaacaaatccaactgttcctaacctccatagaatgatagtattggatatacctaatccatggaattgcaaaaaagtgacacttatgattcattttacctcggagtcaagagtgcaggatttcttaacaaattatgcaacgaaaagtatccaaactttgtggcacccattaacttgtaaattgacccctgttataaagataactggaactgaaaacagataattttacttggtgataacttgatgctg

SEQ ID NO: 37200 - DNA, 254 bp, Setaria italica
  Peptide Sequence Number=SeqID_103174
ccaaccccggtgttgttaattctttctttagccttcgtcgtccgtcttctgctggtgatgttaccatgatgatccaatcagctatcggtaactattattaattggtcgaaatagaatgctagtagcagtagcagtaagcagcaaagtgactcgtatcaagttgttatctttagcaaaagtacgtaagggatatttggtcgtctggtgcgtgctgggtattggcaccttgatggtacatttctccaatgttaatg

SEQ ID NO: 37201 - DNA, 296 bp, Setaria italica
  misc_feature (225)..(225): n is a, c, g, or t
  Peptide Sequence Number=SeqID_103175
agggactcgagccggcgcgcgagctcgcggcggctggcgtagccgcgcgggtcggagagcgcgagggacgcgaagcggaaggtgatctcgagcgcctgcagcgccggcttgacgaggccctcgcccgcccaatccgggaagcacctgggcttccacagcgccgacagctccggcaggcgcaggtactgctcgtacgcctccgccgcggacgcgtcctgcaccctnaggacagccgacgacgacgacgacggtgactgcgcgcacggcttgtccgtcccgccgcaccgggcgaacgg

SEQ ID NO: 37202 - DNA, 407 bp, Setaria italica
  Peptide Sequence Number=SeqID_103176
cgtgaattggatgccgttacaattgtggagtttgaagatggtggaatgcctaaactcgagcggctgcaagctgccggttggagcaaactgaacgaattcttggggctagggtatctcaagaggctcaaggaaattcagctggatcccaagttcagtgacgaattcattggaaatgtacgtcgccaaaaggaggagcatcctaacaatttcagtttgaagctgaagtcagagcagtctacaatggttcgtgacttggaggactagtcctaatcagttgtaactcgtgacttccacgatctgtttctacatctcaaattctcaatatatccatgcatctccatcccaaaatacaggctcagctgacttagactactaggtacttaattaacctaaccgtaacctaacta

SEQ ID NO: 37203 - DNA, 410 bp, Setaria italica
  Peptide Sequence Number=SeqID_103177
aaaccaaactaattaatactcattgacactacaaggtagaagcatcaataatcaccctgtagtgtcaatgagtataatagttggttctgttgaagaagatgttgtgacttcttcgagatcacagagcatgtgcccagcaacactagaatgagctttgatctgagaagaaatggaacaataacatggggaaaatgagaattcaaagaataagaatcagaaccaggttaccgaaccagtaccgcataaaataaggttacaccttgttattataaagttctttagatgaccaattcataatgtgctcgtgcattctgtactggacagtgagcatggatgtgatttcctctccgttaggcttcagtaagccgttcaaagagtgtctttcccatccccttcttttcagcctcaac

SEQ ID NO: 37204 - DNA, 1153 bp, Setaria italica
  Peptide Sequence Number=SeqID_103178
tagcaggctaagatattttgcgttagctccaaatacagctaatagcgggctaaatgaagctatagcggtcaataacagctaaattgtacataggagcaaatagcgattctctcctaatcagctatagcggaagatggcggagactatagccgactatttaaaacattggtttcacatcgagctcctatctactcgctccatggacatggggtatgcggaagcgatgctagaacacgtagggtagtagcatcggtttcgctgagccactcgaatttgcgcaggagaagcgcaggtaccgtctcttgtcacaccagtcagctgctctggtattccgaagcgctcaagtactccccgttctcctcgaagtactcgaccaagcgtttcaggaacttgtcgctgctcacggtctccacgtcgcacaccaggcagcactgcctcctggctcgtgtcaccgcgacgttcatccgcctgtgatccctcaagaaccccacctctttctttgagttagaccggaccattgaaatgatgatggcttccttttcccttccttggaacccatcaactgtcgatatctctaaatctttcagtttagcatctttgtttctcatcatcttcaggcaggttacctgtgcagaataaggtgtaataattccaatatcagatgcatgaacaccactctcaacaagcaacttggcatgcgcgatggatactgctgcctcgccctcgttcatagtgctctcctcttcgtcttttacttcttccatatcacaccctgtagtgtcaatgagtataatagttggttctgttgaagaagatgttgtgacttcttcgagatcacagagcatgtgcccagcaacactagaatgagctttgatcttgttattataaagttctttagatgaccaattcataatgtgctcgtgcattctgtactggacagtgagcatggatgtgatttcctctccgtaggcttcagtaagccgttcaaagagtgtctttcccatccccttcttttcagcctcaacactttgaattgttggaggaagttgaagatggtctccagcaagaatacaccttggccctttcaacaaggctatccagcatgccacctcaagtgcctgagcagcttcatcaataacaaccaaatcaaatg

SEQ ID NO: 37205 - DNA, 704 bp, Setaria italica
  Peptide Sequence Number=SeqID_103179
gtaaagtcctcaagaagccaaccacaaatttgtaacatgcagacgaattacaagttgaaggttgcaagaaaaaatcttcacaaggtcaaaggattatggagccatgtcaattcttccaaccaccaaagatgatgtaagagagacagaaggggggtggggagggggaactgtaggcaggcatcctatattaaaccttagcagtgcaagcataaaagacatgaagatgaagcaacaaatgccagtagaagggccccaaagccaaaggaggtcatggggatcagacagaagagttattcaacagaagattaagttggtaccgcaaccatgactggcaaactggtttaatattattttgaggacaattaaggtgcatgaggaccaaaaacctgtgcagaataaggtgtaataattccaatatcagatgcatgaacaccactctcaacaagcaacttggcatgcgcgatggatactgctgcctcgccctcgttcatagtgctctcctcttcgtcttttacttcttccatatcacacctaagagtatttgaaaaaacgttagaagcattatatgaaaagcatatagaggggtttcatctgttagggagaaaaacaagcatctttctcaaccaaccaaaggatggtcctacattggaaaagttaaacttctgactaagcattttcttcaaatatgaagtatctttctgcag

SEQ ID NO: 37206 - DNA, 353 bp, Setaria italica
  Peptide Sequence Number=SeqID_103180
ggcggtacagcgggggtgggcggtgggtgggcagctcagcgaggagctcggcgacctcggcctcgtcggcggaggaaggggcttgcttggacctccggcacctatggcacgagaaggaggtgtggacgccgcggacgtagcgtgcgcaccgcgtatgcacccacacgctgcactcgtcgcagctgaccatctcctcgccgtcgtcgaacgtgacgccgcaggagcagtccaccgtccacgagccggcgacccagtcatcagcgggaaatcccgctggggctggggtcgccgccgccgccgccgtggcgagatgagcctgcggcggctccggacggcgaaggcggccgcccttc

SEQ ID NO: 37207 - DNA, 540 bp, Setaria italica
  Peptide Sequence Number=SeqID_103181
atttgcagctcgtcttatgtgggatgctgttgtaattttctgtggtgctgaatgcactgttctgttcttttccaaggatattttgttctgaatttagttacttatgttgcagtatgatgagactgaggcaaggagggaaagagctaaaaactctcttgagagatatatgcattactatgagcgctgggcatccaatcagacatcaaggcagaaggcccaagcggatctgcataaagcggaaaggaacaactgcaaagttaactgacatttttgggataccagagacccaattgaagtttatagttgaagcttggtcacagattatagaatgcaggcgggtcctgaaatggacatatgcttatggctattatctagatgataaggtcaagagtgaatttttcgagtacctgaaggtgctgtagtttcgttgctatcaggtttcaaagaaggcaaaaatgctagcaagtctttctcagcacactgatgtagacgttccaaaccagactcagcttctacctttgtctaaggttaactttctta

SEQ ID NO: 37208 - DNA, 632 bp, Setaria italica
  Peptide Sequence Number=SeqID_103182
tagtaattagtagttggttttgacaagaatagaaagaaaaagtaccgaccaataaccgttaggacttaacttttagaaatggaaatgaccgtcctcgctcgaggaagttaacttgtggaatatgttttgaagggtattcttctgatatgatgagctctgctggttgtgctcatttctattgccatgaatgttgggaaggctatattagcgctgcaataagtggtggtccaggatgtttgtcgttgcggtgtcctgatccatcatgtggtgctatggttcttcaaaggatgattaataaattagccaaagaggaagataaagagaaatatgcacgatttctcttacgtacatacgttgaaggtagcaagaagactaaatggtgtccagctcctgattgtacttgtgcagtggagtttcttggtgatgagaactacgatgtctcatgcaattgcaagttcaacttttgttggaattgcaccgaggaagctcatcgaccagtgaactgtgagactgtttctaagtggatactgaagaacagtgcggaatctgagaacatgaactggatactggctaattcattaatcatcctttgaagaaccatagcaccacatgatggatcaggacaccgcaac

SEQ ID NO: 37209 - DNA, 376 bp, Setaria italica
  Peptide Sequence Number=SeqID_103183
gtcttgtgtttctgaagaaaaaatatattaggcacaagcagacaaggctttgtttaacagaaacctggcaatgccaacatatatcaataatgtttacatgccattcagatagtgtgttaatatcatgcttagctgttaattgtgttccttatggtcttacaagttgcatgaaaaggtttatcatgctatgttcgatcttttcaggatactggctaattctaagccctgtccaaaatgcaaacggcctatagagaaaaaccagggatgtatgcatatgacttgcacccctccttgcaaattcgagttctgctggttatgtctgggtgcattggttcagtattctattggtagtagtagtaacttggttggtctttta

SEQ ID NO: 37210 - DNA, 2526 bp, Setaria italica
  Peptide Sequence Number=SeqID_103184
ttagttaacctttgtttctaagtcttttggtaagtcttgggtttggtaggtattgttcctacgtcgggcacgcaactccgccgatctccgcccaccacaatcccccctccccccctaccccgacccgccccgcctcgccggaaccctagcttccccccaccccgtcccccctccgccggaccccccgatcgccgggcgcgatggactccgacgtcgagatgaacgccgccagcgacgaggaggtgatggacgacgaggactactacgactactgctacagcgacgtgggcgacgacgaggacgacggcggcggcggtgatagcgacggggagctggtgggcgcggactacgacgagggcctcgaggccgaggggagcgacgtcgtggtgtccaggcgcgagcagacattcgcggttttaagagaagaagatatatctgaacgtcaagaggaagacataagcaaggtatcttccgtgttatcaattgcaagggaagaggcatgtgttctccttcatcactataaatggaacatcagcaagttgagtgatgagtggtttgcagatgaagaaaaagtccgccataccgttggcttacttttgaatggaaatgaccgtcctcgctcgaggaagttaacttgtggaatatgttttgaagggtattcttctgatatgatgagctctgctggttgtgctcatttctattgccatgaatgttgggaaggctatattagcgctgcaataagtggtggtccaggatgtttgtcgttgcggtgtcctgatccatcatgtggtgctatggttcttcaaaggatgattaataaattagccaaagaggaagataaagagaaatatgcacgatttctcttacgtacatacgttgaaggtagcaagaagactaaatggtgtccagctcctgattgtacttgtgcagtggagtttcttggtgatgagaactacgatgtctcatgcaattgcaagttcaacttttgttggaattgcaccgaggaagctcatcgaccagtgaactgtgagactgtttctaagtggatactgaagaacagtgcggaatctgagaacatgaactggatactggctaattctaagccctgtccaaaatgcaaacggcctatagagaaaaaccagggatgtatgcatatgacttgcacccctccttgcaaattcgagttctgctggttatgtctgggtgcatggtcagatcatggagagagaactggtggcttttatgcctgcaatcgttatgaatcggcgaagaaagagggagtttatgatgagactgaggcaaggagggaaagagctaaaaactctcttgagagatatatgcattactatgagcgctgggcatccaatcagacatcaaggcagaaggcccaagcggatctgcataaagcggaaaaggaacaacttgcaaagttaactgacatttttgggataccagagacccaattgaagtttatagttgaagcttggtcacagattatagaatgcaggcgggtcctgaaatggacatatgcttatggctattatctagatgataaggtcaagagtgaatttttcgagtacctgcaaggtgaagctgagtctggtttggaacgtctacatcagtgtgctgagaaagacttgctagcatttttgccttctttgaaacctgatagcaacgaaactacagcaccttcagtggcggaatttggtgatttccgcgtgaagcttgctgggctcacaagtgttactcggaattactttgagaaccttgttcaagctttggaagctgggttggaggatgtccacgctactggccaggcagctgctacatccagcactgcaaccagttccaagaaaggaggaactaaatccaagaagaagcatgctaaaccatcatcggaccacactgatgatggctggccctgtgagcgctgcacatatcttaatcctccttcagtggatgtgtgcagtatctgcgaaaaaagtaggtaccagacttgagaatagctcaagggggaggcaccccaagaaaagctcaaagctcatgagaagaggggcgcgctttccatcctgcgctggatgctgaaaagatgagcttccagctgctgcactggtgtatagagtcaacgaagggtctcagttgcaaatggaatggaagctgaaaaatgcgcgtgtgggttcatttggtttgctagcctgtgtctgttgttccttgtaaatattagttgtgaggtggtgatctgtgttttatgtgttgggttttgcctgactgtctgactgacctgtgaaaaaaaactgggaggacctgtgaaaaaaaactgggaggtagctctatttattcccccaaaatattactgcactcttgttacagactagaatacaatacggaaccaacaaattctagttcaagtggaatagtagtagacaagtaaataactaagaaacgaacaatcaaaggcaagaaaggaccccaaagacggaatactagacaataaaaagacggaaaaaggaaacaaacttagacaaa

SEQ ID NO: 37211 - DNA, 271 bp, Setaria italica
  Peptide Sequence Number=SeqID_103185
ggccggccagctacgactgagctgagaggagcagcagtagatcggcggcagcggcggcgagctagggttccggcgaggcttcccgatggcctccgaggcggcgcggcggcggcaggagctggcggcggaggggcagcggcacctggaggagaccatcgcagcggcgttccagatcctcgtctccatgaacgacgagctctgcaacgctgggctctggtcctcctcctcagtctccgccgcggccgctgccgcggccgccgtagggcccacg

SEQ ID NO: 37212 - DNA, 1216 bp, Setaria italica
  Peptide Sequence Number=SeqID_103186
ccgggactccccgacgcttcccgacgggagtgcagggagtgtgccgttgatgttgttgaggctgaggtcgagagattcgagcctggtgcagttggtgattgactccgggatcgtgccggagaggtagttgttctggaggtacagcatgcggaggctggagttggggtcttggcagagggaggaagggatggtgccggagaaagcgttggagctgaggtcgagcacgtcgagctccggcagcgcggccaaggagtccgggatggtgccgttgaagtggttgaaggagagggcgagcaccttgagctgctgcagccccgtgaaagcgtcggcggggagctcgctggagaagttgttgtttgacaggttgagagcggcaagcgaggtgaggccggcgacgtccggtgggaacgcgccgacgaggtggttgccggagaggttgagcgtgctcaggccgcggcagtcggagagggtcccaccggccacctcgccggtgatgaggttgccggagaggtcgaggtactccagcccggagcagttggtgaactccgggagcccggagatcttgttcccggagaggtccaggcgccggaccgcgccgacgcctgcacccaccatccaccggaggtcaccgtcgccggagatcttgttgtcggagaggtcgagagcgtcgagcccgaatccggagccgccaccgccgccagacctcggcccaccaaccgaatcgccggagaggttgagcgcctttaggccgccgcaggatgcggcgagcgcctccacgtcggcgacggagccccgcaggccggcattcccggacaggtcgagcgactggagcttggccccgcacctcggcgcggcggccagcgcgccgctgacgttggcgccgcggaggctgagcgtctcgaggctgcccagctgcagcagcgtggccgcgacggcgcggaagtcggcattgagcggcacgccggcgagcgacagcgacgtgagcctgccgcccctgcaggccgcgccggggaacctgcaggcgccgtcggcggcgctccacccgcggacgcccgctgcagggctttgcgcctccgacttgaactgctccagcagctgggcgtcgtcggcggcggcaaccaccgcgacgacgaggagagccagcaccgcgagcagccccggagattccatgaactagcgcgcgctaccttaaaaccattaaagtagcgggtcggcg

SEQ ID NO: 37213 - DNA, 620 bp, Setaria italica
  Peptide Sequence Number=SeqID_103187
caaatctggttccagcagtaaactctaatgtttgtacattagctgatgcacaaagattgatagcccatgagaaatcccgagcttccagagaatgatcagtgtaggatcagcacaaaacagtatggctaaaagcatggaaatggtccaacagcaatctcttctacatggcactgcattcaggggttccattgaagtacctgagaaacagttcagtttggtaacagaagaatgcacacagttgccagtgcagcgacataatgttactgcaagacttggaagtcatcaactccagtctttgggaggtaacatggtttcaggttcagacttaccagctaaactgcacgagcattgcatttctccgcaagatgaaactcagaacagtgtctgcattgctcctcctgatgagcttggccgaagcatcaatgtggagcattttaggtctcctggcactcaaattaactcatcaacaggtaaaagcactccgagaacagagattcatcatccggagatttctgcggaaattattaggacccctaccaatccaacaaatccaataacaagtaatgatgttctgaggactgagaataatcaagtaaaagaaaacctttgcaagctaaaac

SEQ ID NO: 37214 - DNA, 528 bp, Setaria italica
  Peptide Sequence Number=SeqID_103188
cgcacgatgtgggagatggccggttggtactggtgggcctccgcctccacccacgcgtccaccatcgcggcctcctcgaggttgccttccctcagcaggtccgcgccgccggcggcgttgctgtacttgcggagcacgtaccgcgagatcgcacgtgattctaggagggggggaaatagcagcccattttcattgataataatcgaaaccatgctttatctatgtcagaaattaattcggaactgtgtgtgaatcattcagtgatgatgacatgcccaacgcttagcttaattttggtagctcttaccaaacagcgtgaggtctccgtcctccaaggcggggatcctgccgaacgggttgcgggcgaggtggtgcggcgccttctgctcgcacgccgccatgtcgagggggacgacctcgtaggcggcgccgacctcctccaggcacaccagcaccgtcgccacgaacggcgacgccgtcgcgccgtacaccttcacgacgccgcccgccatggcgtctctgtcgcct

SEQ ID NO: 37215 - DNA, 846 bp, Setaria italica
  Peptide Sequence Number=SeqID_103189
ttttgaatgaaacagggagaggccaaacaggtgtccggtgatgaggttggtggcggcaagccaatcccgataactcaatgaattttacaatcgacatggcacaaacttatgtcaaattcatgtctgaaatctgaattgaacaccgccctttgtcaggactcggttcaccagtcggtgggcatgagcgcggccaccttcttcaccgccggcctcgccgagaggcggccccaccacgccctgacgttggggcgctcctccaccagcgccgcgtactcggtgcgcatgaggtagtgcgtgaagccgaagtgggcgaggtcggcgaggctgacgaactccccggcgaggtaggcgcgctcgcccagccgcgcgtcgtacacccgcagcacctccctcagcttggtggcgtgctcgtcgacgacgcgctggtcgcgggcgccgccgatcatcggcaggatcacgcactgccgcacgatgtgggagatggccggttggtactggtgggcctccgcctccacccacgcgtccaccatcgcggcctcctcgaggttgccttccctcagcaggtccgcgccgccggcggcgttgctgtacttgcggagcacgtaccgcgagatcgcacgtgattcaaacagcgtgaggtctccgtcctccaaggcggggatcctgccgaacgggttgcgggcgaggtggtgcggcgccttctgctcgcacgccgccatgtcgagggggacgacctcgtaggcggcgccgacctcctccaggcacaccagcaccgtcgccacgaacggcgacgccgtcgcgccgtacaccttcacgacgccgcccgccatggcgtctctgtcgcct

SEQ ID NO: 37216 - DNA, 398 bp, Setaria italica
  Peptide Sequence Number=SeqID_103190
aataggatggtggaccactagccaaactcttggatatgtttcaattgcaggacaatacattgattctgactggaagctgcaccgaagaatgctcaacttcgtgatggccccttggtcttgttcagggaatgcagttagtgaagctatcagcagaagcctttctcagtggaacatgacagacaaactattcaccattactggggattatgagtcctcacatgacatctacagtgtgaatctgagagatgacctctcaaaaaaagagcattccaatgcttagggggcagtttttggttgtgaggtgctatgcccatatactgaatgcagctgcaagtgatgtcactgcttcagtacaaagtgtcatttacaaaatccgtgaaagtataaagttcattaat

SEQ ID NO: 37217 - DNA, 359 bp, Setaria italica
  Peptide Sequence Number=SeqID_103191
cttctattgcatgaatattttgagtcctgcagagaggcatgggttaatacaactgtccaaggcttcagggagctgagctgctgttaagatattcagactttttaggatgatgccttttgagctctccttgaaatcttagccaaaaattcagatactccctcaaaatccaaatgttggtcattttagaattctagtcggccaaacttcttaattggactcaccaatatatagaaagttacatatatttacatcatatggttaatttactagatttgccatggacaatactttcataatatataactttctctatttacaaaaaattatgcttactaaaaaaaattgcaattcatcattag

SEQ ID NO: 37218 - DNA, 381 bp, Setaria italica
  Peptide Sequence Number=SeqID_103192
cgaagccgtcgggcgactcggagatccgcgtgccggtggagaggaccggcatcaggtagttgttgaggaagtcgttggagccgacggtgacggagaagatggcctttcttctcaggaactccttggccttgtccctgccaagcaggtcgtccagctgcttcctcgtgatgttgaagtaatccacctggatgtccatgccaatccggttcacgaagattttgcctgtggcgttgagtatccccgcgcctcccgacgcgtagttgacgccgttgaggatcgcgccgccggtggtgttgggggcgaggaacggcggcgagtagtccgcctggcccagcatctcgccgatgatgtcggcgatggtcctgccgttggtgaagcggg

SEQ ID NO: 37219 - DNA, 382 bp, Setaria italica
  Peptide Sequence Number=SeqID_103193
gggtagttgaagaagggcggcagcctgaaatcccccagcctctgcatctccactcctgtgcttgctcaaaaaccaggtgctgcagccattcaagggtttatttagaaataatccacagcaaaccaaggaaaatcaacacccaccaccgaatcccctcgcaggtatgggttgagagagctggatcgcaggacagcaggtggttgacccagggtatgccgtatgcctagccaaaactccaatgtgcaatatggtatatatagacttgtcacctaggtgataaggcatacccaaggcaccacaagacgccttatcaccttaagaaccatgccatacacaattaggtaaacaatatttggtattcatgcctcagttttctaacgac

SEQ ID NO: 37220 - DNA, 441 bp, Setaria italica
  misc_feature (430)..(430): n is a, c, g, or t
  Peptide Sequence Number=SeqID_103194
ccgttgtcgtcgaggtggacgccacggagaggggatccgtgttggggtgggacctcgccgtccggcactggaacgtcatgtccatggccaaggagcactcttcgtcaggggaagaggaggacgacgatgacgaggaatacgaagacgaggaggagtacgaggatgatgacgaggagtatgaggatgacgaggaataggaagatgatgattaatttaaggggctagttgtaatttaaatcacttgctccgtccgttccaaattgcaggttgttttaatttttctagacatatattatatgcataataatatatatgaatctagaaaagttaaaatgatcaaaaatttagaacggagggagtagtttttagagacatggggaataataagggttccaatttcacttttgagtagtaaaaaaaaaaaaaaaanaaaaaaaaaaa

SEQ ID NO: 37221 - DNA, 328 bp, Setaria italica
  Peptide Sequence Number=SeqID_103195
atttcctttagccttagggagagtggaaggatgaaagcgccaaaaagttacgaacccagtatgttctcaacaattcaaacagttttatcaaaaccagctaagataaccggcgatcatcctttcccccccaatcccctcgaagtaacccggaactcccaagaagagaggctcaagctccgcaatcgctgggccacaaaccaagaaggcgcggatgagccgcttgagtgtgagccagcgagcgacaggctaaccgccggtcgcagaaataaagcccgttttttacccctatccttttccatgatccaagaacaaggaacgcccaccccca

SEQ ID NO: 37222 - DNA, 255 bp, Setaria italica
  Peptide Sequence Number=SeqID_103196
cgtgtctgtaaatgtctgatcagagatgcagagcaagaggaggagtgtcggtgatggccggcgatcacctgccagaggatgggggagaggatggcggcgatgggctccggcgggggctcgggcgtctcctcggggaggacgtagagctcgggcgggcagtagtccgggtcgagcagggcgcggtcggggacgtagttcttgccgatgcggaggtcggtggcggcgccgaagtctatgagcttcacctgcccgcgg

SEQ ID NO: 37223 - DNA, 611 bp, Setaria italica
  misc_feature (1)..(87): n is a, c, g, or t
  Peptide Sequence Number=SeqID_103197
nnnnnnnnnnnnnnnnnnnnnnnnnnnnnnnnnnnnnnnnnnnnnnnnnnnnnnnnnnnnnnnnnnnnnnnnnnnnnnnnnnnnnnntttttttttttttttttttgtttctgaaactctgcaccacattgttcaagcaatcccatacagaacagaaaattgtaacaccagtcaccagatgcctccctcttgatccctcccatagtcccatgagtggttacacagcaaaaaatgccaatgacattgctgaacaccgtatgccaaggactcaacaatgcgtaatgtacaccgacgaaccgatcagaggattccaatgatccaatgtgtatagagcctgtacgtacccagccatgagccatggacggatgctatttgatgagcgagagcttggacagcacggccgcggcctgatctccacccaggagaaaatatgggtgccgtagcgccgcggcggcggagagcctgcccccgccgttggcgcccctctccgagatgagcttggtggcgaggtcccagcctcgcccggagtcgaggtccaggatctgcaggtcgggcctccgccgcgtgctctgccgccacctgttgaggtcgtagccggcggacctgagctc

SEQ ID NO: 37224 - DNA, 1634 bp, Setaria italica
  Peptide Sequence Number=SeqID_103198
aaccaggaagatctccagaagaagttcgatccatactgccaggagaaatgttaggtgaccatttcgtctgtcaggatagcatcaggacgagcatgaccaaacacctgatcggctgaaacgggaacagctcagaatttcgcaaccagtcgacgagctctctgggagtctgcatctgcgtagtttggaggaactgaccagcggaagtaggatttccagccatgagccatggacggatgctatttgatgagcgagagcttggacagcacggccgcggcctgatctccacccaggagaaaatatgggtgccgtagcgccgcggcggcggagagcctgcccccgccgttggcgcccctctccgagatgagcttggtggcgaggtcccagcctcgcccggagtcgaggtccaggatctgcaggtcgggcctccgccgcgtgctctgccgccacctgttgaggtcgtagccggcggacctgagctcggcgttgaagttcttgagccccgactgcgtccgcagcgtcggtatggccatctgcatcagcacgatccccgccgagtacatgtcgaacaggtccgggttgttcagctgccagaggatgggggagaggatggcggcgatgggctccggcgggggctcgggcgtctcctcggggaggacgtagagctcgggcgggcagtagtccgggtcgagcagggcgcggtcggggacgtagttcttgccgatgcggaggtcggtggcggcgccgaagtctatgagcttcacctgcccgcgccgggtgacgacgaggttggagggcttgatgtcgcggtgcacgatgcccgtgccatggatgcgcttcagcgacgtgaccagctgtcgcatcacttgcttcaccaccagcgcgtcgcgctccagcgtgccaagcccacgcagcgcgcgcccgaacatgagctgctccaggttggacgggaacgcccggtcgcccaggtagtccgccagcgtccgatctccctcaaacttccatacgagccacttgccgcccttgatgaactccgacttggtcttgtcggcgacgaagctcccgaggaagtcggcgcacgactccggcgccgccctggccatgcggtagttgaaccactcctcgtagtcgccgcactccttcgcccccaccgtgccaaccttgatcttcttgaggatgaccttctccttgtatctgtcgtcgttctggaggctcgtccgggccctgcctgaccgctcctccacgacggcgccgttcttcggcacaacggcgccggcgtacaccaccccgaacgagccctctccgatgcgctcgccgaccacgaagtcgctcatcttcaggctccgccggcccagcacgctgtccagcgccagctgcagcggcgccagcacgtacgtgtccacggcgccgctcaacacccccggccgcgccgtcaggtatagccatgtcacgcccaggaacccgagcagcgcccaccgctgcgcgtccgacagccccgccgtgagcgcatccagggcgggacagcgcgccgcccgccgcgcgcaccgcagggttcgacgcgtccaggtgcagcacgctcaggagcccgtccgggatggagtcgctgctggcagccgcaccggacgcgtccacgccca

SEQ ID NO: 37225 - DNA, 657 bp, Setaria italica
  Peptide Sequence Number=SeqID_103199
aaattaataagctaattatcaaactcccttaatttagccctaagtactatgcatttagaaagcatggcctggttaagagtgccttgaatcacatgaatacctgtgatactcacatcatggtcgaaccgactgatgcaaacagattacctcaaaaatagaggcagaacgagaatggacaatcttttgtgcaagagataccatgaccagcaggcaatacgatcagaaaatggtaagtcgaattgattcattatacttcttgcatgattcattattgatcaggcacctatgtaatgcaatagccactacacagtataactagcaataggagattgatccatgaaactatgaaaggtacaaagccactgtgcttatatgcttaaattgcttgaatgaacgcatcacaaattcagacagctgatattactaatgcccaaattacacaacttcaaagatcggtgaaatgccttttctttaagataaaagggccataccaggggttttgttaccaagaaccaagtaatacagataataaatgtccagtttctacatcatcatcattagctgtttaaaactttattaaactcccccaaatgtgcagtccaatatccaatattcttagccatggaaccaactataaactggttagattagcaatct

SEQ ID NO: 37226 - DNA, 447 bp, Setaria italica
  Peptide Sequence Number=SeqID_103200
tctaaaccaactctcttgaaaaaactagttttgttcttggatcctgtttctacagacagtttaacggttaggtgaaaaatgcactccagtaattttaatccatcctttgcaaatttcacttcaccaatccacaagctccaaagcttcgccatccatgggagtggccgcctctaacctgccattagcatttagtaaaggcgccaaagctcggattagcgctggtcctggcgtcatcaaggtggcattattgtctgagatttgctcgatatcccccgcgttggctttttgctttccctgaggcacgagtattaggtttggcatttaatccgggcggatttgagctctccgtcctcgatgaggcgccacgttaatggcggatggcgaccccgctccagaaaccagacaagcgcgcgagaaaacagcgcgtgcttgctcgtagcggccgtg

SEQ ID NO: 37227 - DNA, 647 bp, Setaria italica
  Peptide Sequence Number=SeqID_103201
gttgcctagttgatttacaatagttttgtccccaaatttacaactatgatatgaacatcaacaatctatacagctggccatcattaactgtagcatttttagagcattccttgtaaaccaaaattatagctctataccaattgcaaaataagaacttaaatcttattagtggtgcaccatgcacccgctagatcacatccagaggtcagagtagagggagctctggataaaaatcgactacaattggtgctgcaaactaaaagacctgatgccaagccaaggatcataagtataagccaacccagaataagattcataattagaaaatgaacaggctgtccaagttcaaacccaggccctccaagttcaaaccctctgaacgtgccactattaaacaactttcctctagattttctaaccaacccacctaatgggcctactgtttgagaaagtaagcaattttcatcagaagaatatataaataattcctccacaaaagagacagaatgcttaattagaacctttattgcctaatgaagtacattgttttgcctattttagaaccacattatttcctaattagaaccatattattgcggtattgcctaaccagtaatactagtgcaatatacacggtcaatgtattt

SEQ ID NO: 37228 - DNA, 1132 bp, Setaria italica
  misc_feature (63)..(63): n is a, c, g, or t
  Peptide Sequence Number=SeqID_103202
agctagtgttgctcgaattgttccttatgcagctttacattatatggcctatgaagaataccnccggtggatcattctggttttcctaatgttgagcaagggcctgttcttgatctcatggccggatcaatagctggaggaacagctgtcatatgtacataccctcttgatctagtccgcacaaagttggcttatcaggtaaaaggtgcagtgaatgtcggttttagtgaatgtatgccctctgaacaagtttacaaagggatcagggattgtgtcaaaacaatatacagacaaaatggattgaaaggcctataccgtggcatggctccatcactatatggaatcttcccttactctggtcttaaattctacttttatgagacgatgaagagtcatgttcctgaagagcataggaaagctatcatagcaaaacttggttgtggatcagttgccggtttgctaggacagacaataacataccccattgatgttgttaggcggcaaatgcaggttcaggccctttcatcatctagccttgtggggagaggaacatttgaaagcctagttatgatagtgaaacagcaaggttggcgacaactattctcaggactatctatcaactatttgaaggtggtgccatcagtagccataggatttactgtttacgactcaatgaaggtttggcttaaagttccatcaagggaggaaactgctgttgctgtcttgacagaagaacgaagtaactcagctcctatcccctccagttagaatgagtttaacccttgcggtgctgtgatgctccttgctgccttagcattcataaggcatgtaggatagcattcttttttggagctgcatcaccatagctgctaggcttctccaacgcaatggagacaaataattggatcatcaataaacgcattagcaagtcgtcgacgccaagaagaaccttggcatattaacaggaggaatagaattccttgcagattaccgattctttgtggaattccaccctgtacagactctgtatatagttgaatagcttgttccaaacggagaggttacttaggaaaaatcaaaaactcaaattttcagagcaaacacggtagtgcttctacctgtttagttaacc

SEQ ID NO: 37229 - DNA, 149 bp, Setaria italica
  Peptide Sequence Number=SeqID_103203
gctctcctcgatgtacaaacgaaacatccaaaggctgacccagacctacttaactctgtcacttgaagatatttctttgagcagtggcagatgtatacttcggaaatgatgggacctgtccatatttctttgagcagtggcagatgtat

SEQ ID NO: 37230 - DNA, 1420 bp, Setaria italica
  misc_feature (431)..(431): n is a, c, g, or t
  misc_feature (1412)..(1412): n is a, c, g, or t
  misc_feature (1418)..(1418): n is a, c, g, or t
  Peptide Sequence Number=SeqID_103204
aagtaggtctggtcagccttggatgtttcgtttgtacatcgaggagagcacttgcttcgccaaccctaggttgttgtcggattgaaacactgctgcatttgattcaacaaatgtctctaagtcagtgtagcgaccgttgccatagcatgtagaaacgaaacatccaaaggctgacccagacctacttaactctgtcacttgaagatattgctagatctgttcaacttgacacaccaagggatgctgaaatgcacgtacttcgcatgattgaagatggagagatccatgcaaccataaaccagaaggatggcatggtcagctttcatgaagatcctgaacaatataaaagtgttgagatggtggagcatatcgacacttctattcagaggttgacggctttgtccaagagttggcttcaattgatgagaacntggcttgcgatcctacatatatactttggacaaggtcccatcatttccgaagtatacatctgccactgctcaaagaaatatgaaaaatcatgcccagatttatgttgagctttctacatgctatggcaacggtcgctacactgacttagagacatttgttgaatcaaatgcagcagtgtttcaatccgacaacaacctagggttggcgaagcaagtgctctcctcgatgtacaaacgaaacatccaaaggctgacccagacctacttaactctgtcacttgaagatattgctagatctgttcaacttgacacaccaagggatgctgaaatgcacgtacttcgcatgattgaagatggagagatccatgcaaccataaaccagaaggatggcatggtcagctttcatgaagatcctgaacaatataaaagtgttgagatggtggagcatatcgacacttctattcagaggttgacggctttgtccaagaagttggcttcaattgatgagaacatggcttgcgatcctgcatatttactgaagacagggcgggataaccggagattcgactacgacgacttcgactccgttccacacaagtatttttgagatgatttaagccttttgtgactggaaaagtacaatcgccaagctaggggccattccttaaggttactggtagtttgatggggatctatggcttttgaaaattgagatgctgtaaatttttggtttaaagaacgggtccgtcagagaaggcagatattactattcgcagtcaatagaaatttgtcgtgttcacgatgtttgcgggggctgtttcatcggcatctcagcatctgcatgctgtgtgctgcattctgtggaaatagtcttctttgcgaacaccttttgctcggaaccaaaaaaaaaaaaaaaaaaaaaaaaaaaaaaaaaaaaaaaaaaaaaaaaaaaaaaaaaaaaaaaaaaaaaaaaaaaaaaanaaaaanaa

SEQ ID NO: 37231 - DNA, 1226 bp, Setaria italica
  Peptide Sequence Number=SeqID_103205
tgaccatgccatccttctggtttatggttgcatggatctctttgtcttcaatcatgcgaagtacgtgcatttcagcatcccttggtgtgtcaagttgaacagatctagcaatatcttcaagtgacagagttaagtaggtctgggtcagcctttggatgtttcgtttgtacatcgaggagagcacttgcttcgccaaccctaggttgttgtcggattgaaacactgctgcatttgattcaacaaatgtctctaagtcagtgtagcgaccgttgccatagcatgtagaaagctcaacataaatctgggcatgatttttcatatttctttgagcagtggcagatgtatacttcggaaatgatgggacctgtccattctgaatgagcgaaacaaggatgtacttcttgtaggcttccacagcaatcgcattcaacgatgacattggggcagtaacagcattgtgaagaagctccgaagctttaggaaacttcttgagcccaatgtatatcatccctccgtagtagcagtagaggaacaggtcctttggctgatcgacttcgaatatgtcatcctccaggacgctcaggccagccttgtactgcttcgccagcaggcacaggagaaggtactcggcgtggaccggggtcagctgctcgggcgaagcctggatcttacggactgccgcacgcagtggggcgatccccctgatcggggtgttgagcagcatgacctgatccttgaacaccctgcacacattcaggaatttgtcgggcgccaggcgtatctggtccgccgagcacgcggtgaggaaatcggccacggtgacgaggaagtccgcgccgagattggctcccgaggtcgcgcacgcctccaggaggtagaggtagccgagggagtgggcctcggggctgaggtgcgcgaggaaggggacgagcgcggcggcgtgggagcgcagggagtcaccgtccgcctgcttgaggaggctgtggaggtgggccacctcctcggggctgccggagagcccctggatgtgcgccacgagggcctccagggactccatcagcgtcgtcgtcgccgccgccgccgccgttgtgcccgccctcgccgtcgccgcggccgccgccgaggggtggggtgggagggggaggggggtcgcgggcgttcgccgacacgttcggtgcgtccctaaaaccgaaaacctaaaacgttaaaagggtttaaaacgaaaa

SEQ ID NO: 37232 - DNA, 900 bp, Setaria italica
  Peptide Sequence Number=SeqID_103206
aactacatcttctttcatttaatttttaataattctatggggtgtcttttagttccagtgatatagatatatttggttcttcatatcgaaactttttgcagcgttacccctaccagattccatggagcactgtcttcttgtgatcctacactaccctttagtggttgatattggaagtggaaatggtttgtttctttttcaaatggctaaaaagttatgaaagttcaaatttccttgggcttgagatgaacgaaaagcttgttataaggtgcctccagggtatggcttgggatgagaaaggaacctacattttgtagcaacgaatgcaacgtccacattccactccatagtttcaagttatcctggacggttgactcttgtcacaatacagtgcccaaatcctgacttcaacaaagagcaaaataggtggagaatggtgcgaagaatgctcattgaagctgttgctgatcttcttcagaccaatggacaggtttatctgcagtctgacgtggaatccgttctgctgggaatgaaagagcagttcctctcatacggcaagggccagcttgtcgtggacggtgatgattgcggccacgggatggacaacccgttcggtgtggtgtccgactgggagcgccatgtcctcgctcgcggagctcccatgtacaggacaatgctaaggaaagtgtgattccatcgtctggctctgaagtctgaacattgcattctttgcttcaaacatggaagacattgccgaacaatgttcacggccaaaatcgtaaattcattgggtccactgcagcaaatcctagacaagcttgacgtggccacgatttctgcggccaatgaaacatcacatctattccctattgctaagtacttaaaaaaaaaaaaaaaaaa

SEQ ID NO: 37233 - DNA, 768 bp, Setaria italica
  Peptide Sequence Number=SeqID_103207
taaaggaagaaaaagagagagacctttgggatgcggagaagaaagtttccattgataggtcaaggctgaaccagacgaagcaggaccttgatcagagagaggaagacatcatcaaagcgtattcaagacaacatgaaatggagaaatcactgatgaaggcgagtagggatttatctttacaggttaggcagatcaataacctgaagcttctggtcgaggaacaagacaagaaaattattagttcacaagatgcgctttctaagaaggtgattgaagtggataagcttaaacaagatatgctgaagaagaacgaggaagcagacttgatgcgctcagagattgagtccaaggaacaagagcttcttgtagccaatcaggcccttgcacggcaagaagcaacaattagggagctccaaagtgaaattaaaagaaaggaaactgagattgccagctcaaatgaattgaggaaagctaatgaagagaaactgaaggttgtagaaaaggaacttgagaagcagaatttaggatggatagcagcacagcaagagttaaaggaactggcacaaatggcatccaaggataaggataatatcaaggatactatcgatgacttcaaacgcgtgaggtctttgctggacgctgtgcgttccgaactaatggcttcttggtggccttcacttctcgtgcaggcaaattgaagaccaagcggcacagttgagtaagcaggtgcaggaactcgcagaccaaaagcattgcttatttcttata

SEQ ID NO: 37234 - DNA, 439 bp, Setaria italica
  Peptide Sequence Number=SeqID_103208
cgtacccagatgattccagacaactgaatcatttgaatcaagctctacagcttgtaggtaacaatgaagagcattatcataaactccaaaccttgttgaaggaaaacagatgcaagatttttcaatgtcaaaaaccttagctgcagcaaatgctgatcactgccaatgttatcaacctgaatgtttgatattagcgggtccttcagaacatcctcgagaagttcgcgagcttttgaatagtctttttgttgcaacttgagaagtccctcgtgatacttctgagagagcgcaaattcctgagcttccttggtgggcgcgagcggctcccattggccgccggtgtcgctctcgttgatggctgcgatggagaacatggccggcgacgagggttccggcagcgagtggcgctcgccgccgcccgggaaacggtgaaagtgcg

SEQ ID NO: 37235 - DNA, 557 bp, Setaria italica
  Peptide Sequence Number=SeqID_103209
cgagcggacgatggatcaccctttcgtttttggttttgtggggatgttcaagtttttatcctcccttttcttttcgtttggtttttcccctctccggtgggtgatttggtttgcctgttgggttgaggacagtgaagatcgtatctattggtctcgttcgtcgtaaccggcatctgtttgccttgccgaccatcctgatatatcaccacccatattccgagtcctcatctcagccacagtcaccagtcccatcgtgtgtttattttgttgcttcgcgcgtctattttaagatctgttatgttttgtggccgatgattaaatcaaaaaaatagacaagcatatgtctgaatctttctgtgtggaaaagcctaatcttctctatgaggtcaactgtatcttttttatttgtctttatttttttattattttggatctagacttggatcttggattttgactccattggggcctaggatgaaccatttggatgttctatttgtatgattttgatgattacaaaaccattactgccttccttctgtaggtccttctttcgt

SEQ ID NO: 37236 - DNA, 871 bp, Setaria italica
  Peptide Sequence Number=SeqID_103210
aattgctcctgcttcagcaatgcatatcctgttgttgacatttctcttcgcaagcaaacgtatctcaccagcagcagcccgctgctcatcttggttcccacccctcagccttgtcatcagtgagactagaccagcatggtcatagtcagagctttttgctgctttcttatcttgggaatttgctttgttcttcggaagctcaatgccgttggcttcacaccactgagctattaggcttttgaggacaaagtttggtgtcagtgaagtatgtgagaggggctgctgcgtcttagggcatgtcttgtgtccagaatcaagccatttctggatgcacggtcgctcatatgtctgcccactagaaacgatgacagggtcttgcatgagctcaagggatatcgggcatctgaattcatcggggatgataggagatctgtgatttatggaggcaaagctggcaccgagcgcctctggtgcgggaggttcagtgatgacacagtctttgagcttcttgagcaaggaagacatctcctcaacacatccatcaggttcgccgccactggagatgaccatctcatgcagggcgacggattctttcttgatatcggccatagtctgcagttgcaacttctctgagatccttgtgaagaccagagggtcaaaggtcttgtcagcgagagcggaggatatatcctttgagagctgcgcgtctggtggatccattctggttgcagcccttttgaactgagaatgcacaagcgcgacctgctcctgcacttcttcaggcatgtcgaaggtgtggtagggcaaggcatccagggccagctgaatctggctgttgacgcttgcgaagcgatcgagcatgccatcccct

SEQ ID NO: 37237 - DNA, 1105 bp, Setaria italica
  misc_feature (120)..(120): n is a, c, g, or t
  Peptide Sequence Number=SeqID_103211
ctgactttcaatattatacaaccaatttacatgtttacagaaaattcttaaaatcttaacacatctgcctacagatatatctcaaatgtcaacactattcagaggcatttagatttatgngtacaatatagcaaagccacaacctcaattccagcaaatctactatggtcagcttcatgcttcttcagcttgccgcatgagttccagaatgctagaagattttctctttgcacggtccgtgccagactccgacagttccttgagtgcatcctctgctccagcaacttttgcagcctttgtttgctcaacatcagcacaacaaagcgaccacagaatggctgcagcgttctctctattgcgaggagactctgttttaattacctccacaagtggggggattggatccgactgcgcaattacagccctggcttcagggttaccagcaagaatagccaaaagagtgagcgcctcatcagtcattcccccagtaggatccaccaagaagttcatcaaatggatgacgattccagcttttactgcccggatcttatttccctggtatatgcacagattaaaaattgccgttgctgcatctttcttgcctcgtgggctcccatcgcacagaagattaatgagtggaggtattgcgccagcaccaccaattgtaaccttgttttcatctacaactgacaagctgaatagtgtggcggctgcgttctctctggcttccatgctcccagttttgagcacttccacaatcttagggatagcatgagagcccacaatgcttgccttgttgttctcatggatggagaggttaaggagcgctgtgacagcatgttcctgcgttcttggatccgaagaggagagtagattgacaagcaagggaattgctcctgcttcagcaatgcatatcctgttgttgacatttctcttcgcaagcaaacgtatctcaccagcagcagcccgctgctcatcttggttcccacccctcagccttgtcatcagtgagactagaccagcatggtcatagtcagagcttttggctgagaccttagtacaatacaagtagaagaactaagaaccaagacaataggtacaataa

SEQ ID NO: 37238 - DNA, 290 bp, Setaria italica
  Peptide Sequence Number=SeqID_103212
ccctggtacatttacaagctccagctttaagagatctggatccttggagtctactaccagttttcgtactcgtccacaccgagatactaaaggaaacttgtgtagtaggaaagtttgtccatccaccgataccgttacatcctctgcgacatctgaaaatatcctcctatggctgatggggttgcggaagcgcggggacgtcgtggtggtagcgaagggaaacacggcgttgtcgcttccccactccccattgctttgccgccgattcttcttccttctcttcctctccc

SEQ ID NO: 37239 - DNA, 373 bp, Setaria italica
  Peptide Sequence Number=SeqID_103213
aatatttacagctgccaacagatcgatgagtgtttcgactatcattctttgatcatctccgacaaagggacctgagtcccatacatggcgtctttcaacaccctttagcaatgtctgggcatagtgtgtaatagaggtgccaatactctctggcctcaccccatttctcctcattgcagcaatcacacgccgatagtggtcgattctcagtgcagaaaggtcttcaacccaccaatcctgggagtgcatacgcaactttccagatcccacattacattccaagtgcgccaagcctgaaaccagctgctccttgcttgcattcatcgcaattgcatcaacacacctatctacaagcccaacttcctccaccatc

SEQ ID NO: 37240 - DNA, 1828 bp, Setaria italica
  Peptide Sequence Number=SeqID_103214
tcgatgagtgtttcgactatcattctttgatcgtctccgacaaagggacctgagtcccatacatggcgtctttcaacaccctttagcgatgtctgggcatagtgtgtaatagaggtgccaatactctctggcctcaccccatttctcctcattgcctcttctccgccgccgtcggcccaccgaacattgttatccgcccaaaccctctcgacagggacgccaggaacgccctgccgtgctccccgggccgcccgtccccgccgcggatcccctgctgcttcatcagcccctgctcccgctccagctccgtcagccgcacccgcatccgcgagatctccagcttcagctcccggttctcccgccgcagcgacgcgtagttgtcacgctgcggggacacgcacgagctcggcacgccactgctgcagatgaaccgctgcgacaagccgccgtcgccgcatccgccggagccgccgcccgagaaggacgacttcaaccggagctgctcgaagtagagcacgcgcaccaccatctggatcgggaggcggtcgttctgcgccgcgtggctcgacgcgtcctgcgacagcttctggcagtcgatcagcttgcacagcttcttgcactccgattccgtcagagacgggtgtgcctaaacagaggatatggtcaggtatatgtcgatggcacgatatagtccatcatcaacaatgcgtgcgtaatccggcaatagttcaataagagccatgaacttctgcagcttcagatatggatctggagctatctctgctagatagccatccattagtcttccaaccttcaagactgaactgtgacttggagacttcagtccatctgaattatatccacaaggtgacaactctcctgaatcatcttcgtcgatcctttgcaagaagttcaccaatatgcgatgcacagtatcaacgtcaaacattgagtcacttgtttgcgtcgaggggatcaggagatcgtctagtgatgccatctcaagctggagaccaatccttttctcgacttcgattctacaatctagacttgcatcaacttcaattgccatcctcagcatgccaaacaagaatgacaagcaatcacacgccgatagtggtcgattctcagtgcagaaaggtcttcaacccaccaatcctgggagtgcatacgcaactttccagatcccacattacattccaagtgcgccaagcctgaaaccagctgctccttgcttgcattcatcgcaattgcatcaacacacctatctacaagcccaacttcctccaccatcgggtccaatccatcacatttacaaagaacttccagggatttatcaaggttcttgagcacaatctcgtttaagtaggtctctgtcctaaaaatgaggttctcctgttgaaagtcctctgtcatttccaagtactctgcaacgcatcggagatgagccacatttgctgtggttatttcaaaattgctaccataacagaacttggcagcaagttcgaatgcaaaagctccccctggcacatttacaagctccagctttaagagatctggatccttggagtctactaccatttttcgtactcgtccacaccgagatactaaaggaaactgcaaaacaagtacaggggcttcagtttatgtagtctagtagtcaacatggactatgcagggtcttcagtatgatgaaaagcataaaactttgcttcagttaatgtaagcgttagtcaacaaaaatttccatagtttttgaaaggtcaacaagcatttgtaacataattgaaaaaataaatataaaaaggtggattccctgatagttttt

SEQ ID NO: 37241 - DNA, 2105 bp, Setaria italica
  Peptide Sequence Number=SeqID_103215
ggcgcgcgcgtcgtccggcgcccgaacccgccgttcctgttgaacaagccagcggaggttgccaggagtgtaatcggcgccgtggatttcgctgttcctagcggcgggagcaagctcggggaggagctctgggagtcgaaggcggcgggcaacttcttcggctgcagcaacgcgaccaagaaattcgccgatgccaaggctgtgacgaagtcggaccgttacctgatgatcgcgacgagcggcggactgaatcagcagcgaacagggatcatagatgctgttgttgcagcccgcatactgaatgcaacacttgtcattccaaagctggatgaagaatccttctggaaagacgcgagtgacttcgcagagatatttgatgtcgattcattcatatcctcactctcgaatgatgtaaaggtcatacgacaattacctgataggaatgggaaaacacgttcaccgtataagatgcgtattcctagaaagtgtactccaaaatgctacgagaaccgagtgctacctgctcttctaaaaaacatgttgttcaattgacaaaatttgactacagagtgtccaataggctagagactgatcttcaaaaacttaggtgtagagtcaattatcatgcactgcagttcacagatcctatcctaaaaatgggcgaattgcttgtccgaagaatgagggcgagaagtgggcgcttcattgctcttcacctaagatttgagcctgacatgcttgctttctctggttgctactatgggggtggagacattgagagaagagaactcggtgagattcgtaagaggtggaaaaccctgcatgcaagtaacccagacagagaacgacggcatggtaagtgccctctaacaccagaggaagtcggcctcatgcttagagcactgggattcgggaaggacgtacatgtatatgttgcatcaggagatgtatatggaggcgaggaaacattggcacctctgaaagcactgttcccaaactttcactcaaaggagactctagcaagcaaggaggagttggcacctttcttaccatattcatctcgcatggctgctcttgattttattgtgtgtgataggagcgatgtttttgtgacaaacaacaatggcaacatggccagaatgttggctggtcgaaggaggtattttgggcacaggaggaccataaggcccaatgctaagaaactgtactcactatttctgaatcgaaccagcatgagttgggacagattcgcatccaaagttcagacattccaaaagggattcatgggggagcccaatgagattaaaccaggaaggggcgaattccatgagcatcctatggattgcatttgtgcaaaatcaaagggaaaaactggacagagcaggcctcaccaaagtaaacgtgctggagaagctgtggagaacctttctagtgatggagacctcgactggagggatttggactatgtagagcatacaccattgggcaaggatacatctaatgaatccgaatcagatgatattcgtgttggtggatcagacattcccgaattggaggacatgatgtcagactagatacttacagatagatatttataaataggtttgtttttcttttcatagggcttggtgataaattatttggttgacagaaggtgctgcatagtttatcttttctcctgtttatttcttggggacttctagaagacagtatgagttttttgctggcccgacaaagaagaaaggccagtgagggcttcctgcagaaaagacaggggaagccttcagttgagtatgaggaaaacaactgtacagtgtttgattggtcctcaagtaatgaagtaatgctgattggtaaattaaaagactttttccctcatggttcttcttccttatagtttgtaccgtaaatagatgctacagaagtagcctctttaagcgtttactgtgtagcgttataactagtagaatttgctgggttttagtatttattcttgtccttttttatgacagaataaatgtctgttatcaattttgctgtccttcattgaaatctgtatatataacttgtaacatgagaatgaaaaaggagattttgccgttaag

SEQ ID NO: 37242 - DNA, 422 bp, Setaria italica
  Peptide Sequence Number=SeqID_103216
caaatccgtcgctgctcatcctcgtgattctgctcgagtagccggcggcggcggccacgccggaggtcgggacgatgaatcccctgactcaggtgaagcggacgcaggtgatcaaccagaaggaggcgctccttggcatcggcgaggacgcgtcgtggcacgccaagttcaaggactccgcctacgtcttcgtcggcggcattcccttcgacctcaccgagggcgacctcctcgccatcttcgcacagtacggtgaggtggtagacgtgaacctcgtgcgcgacaagggcacgggaaaatccaagggcttcgcgttcctcgcgtacgaggaccagaggagcacgattctcgctgtagacaatttgaatggagctaaagttcttgggaggatcataagggttgaccatgtaagcaagtacaag

SEQ ID NO: 37243 - DNA, 255 bp, Setaria italica
  Peptide Sequence Number=SeqID_103217
ctcgtttgtaatgtctgttaactggtctgccttctcatcataaacaaacataaataaaccataatcacctttctcaagacagacacattcttctcttcaagctcaaggcctaataactttcttgatttctccatcagtgccttcctgtccttaagaacctcaaaagcagcaggtagatcattgcacgacatgttcaaccaatgctcacgcagtctcctatgttcatcctctaataaagctccatatggttttaca

SEQ ID NO: 37244 - DNA, 447 bp, Setaria italica
  Peptide Sequence Number=SeqID_103218
gtcaaccatgttggaatagactaattaagcaagttaacacgatatgccttctcatccttttttattgttgcttctcctttataagtatggcatccggatgaatatcaccatagcaaagagaagatgaccagctgaggaaaggatttccaaagtgatgattttttcctgtaagcaacaaatgtacattttcttctgcatcagtctcacttggaagaaattgtttgagaaactttctctcagtttctgtcagacatgtagaccatacctcataggatagcacacctctcaggctctcgagagaaaaagtttctggaggaacatatgtaacatcagcaaggccggaacaatgttcctggttttctatgaaaggagccaagtctgaccacaaaattccaacttgttccttttctggcacaactctccctgaagaactagacccattttaag

SEQ ID NO: 37245 - DNA, 575 bp, Setaria italica
  Peptide Sequence Number=SeqID_103219
gttagtgacttgtattattgatggagttgatcccttgactctctgagctattattgttgttaatggttgtacctttgcagctgatttcttggatatcttcactgttaacacccaggccatctttacgcaatttgatatccgtgagatcttcattctgcttgtcagggttgttggcacagcaggaagtgctttcatctacacagctgacaccattacgatcttgcacatcagagttttgctcactctcactagtaatatctgtgcccctgactaccatgagatcatgatcttccacattccgactgtcaatattaaaaatacatgtttccatatacttagtctgctcatcatcctgatcttgaagagtggtgctctgaccatccccaccttgaaacatactttgaggtgagtgttctacctggccattttgcaaaattgggctaccatcattttcgctagcaccaggttgtcctagctcgtttgtaatgtctgttaactggtctgcctttctcaagacagacacattcttctcttcaagctcaaggcctaataactttccttgatttctccatcag

SEQ ID NO: 37246 - DNA, 1157 bp, Setaria italica
  Peptide Sequence Number=SeqID_103220
gtatagtttcttaagaaatgacaatgaccttatacaaataagatagcactacagagcaattcaccattcataatgaaatactacctagttctttcatactagatgcctctattacaaattcagtatctttactgtcatggtattctcatctatagcattaacattgaataggaattctgctgcactggtgaatgatatacattgtaaaatggcaagatacataacagaagtaagcatggactgatatcatccactgtattttttttatacattcaagtataggacctctctcgggcacaaaactaagacttaagaataagaactgaaggacaagtcacagcacctttctcaagacagacacattcttctcttcaagctcaaggcctaataactttcttgatttctccatcagtgccttcctgtccttaagaacctcaaaagcagcaggtagatcattgcacgacatgttcaaccaatgctcacgcagtctcctatgttcatcctctaataaagctccatatggttttacatgggatttatcaaggccaccaattacacgtgaaacatgcttggtctgaatgccatccccagattgcttcagtctcttgatatggtttagttgtgttctactaaccttgatgtatgacataaactttgaaacatcaactctttgtgcaaccttcatgggcattccacccttagtagctttctgctgcatagctacttgcttctgattaccagggttatccctgaacaaattctctatatcaccgcagtttagccatctcttcttccatttcttcaaggtgtcaaccatgttggaatgataattaagcaagttaacacgatatgccttctcatccttttttatgtgcttctccttgttaagtatggcatccggatgaatatcaccatagcaaagagaagatgaccagctgaggaaaggatttccaaagtgatgattttttcctgtaagcaacaaatgtacattttcttctgcatcagtctcacttggaagaaattgtttgagaaactttctctcagtttctgtcagacatgtagaccatacctcataggatagcacacctctcagacgctcgagaacctctgtttctctcgagagaaaaagtttctggaggaacatatgtaacatcagc

SEQ ID NO: 37247 - DNA, 393 bp, Setaria italica
  Peptide Sequence Number=SeqID_103221
cgaatccgaccgatggtgtcactcgtgctgatccttcaaagggcagaataatgcttgttgatggaacctcagtgatgtacagatcctactacaagatattggcacaactgcagcatggccagttggagcatgctgatggaaatggagattgggttttgactatattcaaagctctatccctggtaagtaggattgttccatgatcaaacgaactctttcctaagaatccctgatccatagtgaaaactatacccttaaatttctatatatttttacagctttgttttctaattcattgtcacaaatagagtaaatggactgtgagcatcaaccctgtccactctctgtagcaaaactcttatgatgttacagaattgtggaatagatagggtg

SEQ ID NO: 37248 - DNA, 615 bp, Setaria italica
  misc_feature (521)..(521): n is a, c, g, or t
  Peptide Sequence Number=SeqID_103222
aactaaaaccgttaactaacaaaggaaagggacgtttacaagggacaagtacaagttctgccactcacagactcgattgagagttttcaaggaccatcagtgcagaatactccacggattccactgtatgatgacagcataccctcaggcatattggacacattgtcgaatccgaccgatggtgtcactcgtgctgatccttcaaagggcagaataatgcttgttgatggaacctcagtgatgtacagatcctactacaagatattggcacaactgcagcatggccagttggagcatgctgatggaaatggagattgggttttgactatattcaaagctctatccctgcttcttgacatgctggagttcattccatctcatgctgcggtcgtgtttgaccatgatggtaagctgtgcccaggataattcttatactgagtatacacattctgtttaattttttagtattcatgccacttgttgatcactctccgcagcacacacttgcctacttttttaancaataagcattgaatccttgtcataatatgatgtttgcattgttcagtctttattgagtcttagtcactgcactagaccaagatattgatatgc

SEQ ID NO: 37249 - DNA, 1344 bp, Setaria italica
  Peptide Sequence Number=SeqID_103223
aaggaacagaacagcagcagccccaccaagcgccgacctgtcggggatggcggctgcggcggcgccggcggcgggggcggggaaggggaagcggaagcgccccctctccgaggacgacgtctacctcctcctccacaggtacgcgcctgggacgatcctgacggcgctgcaggaggtggcgcagcacgcggagggcggcaggcgcatcgactggaaggcggtggtggggaaatcggccacggggatcacctccgcgcgcgaataccagatgctctggcgccacttcgcgtacaaccacgacctcgacgagaccgtcgacgccggcgaccagcctctgggcgatgacagtgacctggaattggagcctgaaccagttcccaacccgagcaaggaagctttatctgaggcctctgcattagccaaggcactaatatccggatcttcacgtgagcaagcatctggtcaacgtgttaatttggatgctcctgtgctgaactccccaaatgaaaagatagtgcgggttccatctgagaaacagcttgctcagggtcaccgtataacaaacgttacaggtcctgtttccaactcaaaacaggcatcccatttagggccctctcctggttctttggatccaaatggaccttctaaaaagaaaaagaagcctaaagcatggtctaaagaggaggatgcagatctagcagctggtgtacagaagtttggtgaaggaaattgggattatatttccaataagtgtaaatttgatagaacccctgatcagttgtctcagagatgggcgctaatttgcaagcgtccaggaggatcaaccaagcctgctagcactaagcatggcactgtcgctagctcggaggaaagaaaggatgctctcaaggcactttcgatggctgttggtcctatccgtagatcatctatgctaaggccaggagcctatcaacaaggcattcagcataagtctgcagtgtttgctcctaagatacctgaagtaagacccgcagcagccccttcaccagcactggcgcttccggtcccagtgccggtcccagtgccagttcctgtgcctttgcctgtgaaagtacaagtcaattcaccacttcctcaggggcaacaagcacctgtccaacgtgcacctccaaaattggcaaatgcttcaaataaggctcgtaagaagcaacctgcccaaccaaatcctcctgttggtccttcctcaataaaagaagcagcttttgctgctggtggacgacttgccccagctgaagcggccgcagacttcttaaaagtcacgcagtaactaattaaagtaattacttacttaaagtttaaacttaa

SEQ ID NO: 37250 - DNA, 385 bp, Setaria italica
  Peptide Sequence Number=SeqID_103224
ttctccgcgggacacgaccctggccgcggcattcgcccgagggaacctccgctcccgcaaggcttccctctctccgtccctggatccccccgagctgcccccagggtgcaagatctcgtccgcgatccgaaggctccaccgtctgttttccctctgatcttgctcgatcttggagcaaggctcgagcttttcttccccccatgggcggcggcggcggcggattccggggcagctgccgggttggggctgtgctgctcttctccgcctgggtcgcgcttgcggcgctcagcaggctgctgcggccggtgcccaacggctgcgtcatgacatacatgtacccgacctacatccccatcgccggcgcgccaggatgtctcctccgaca

SEQ ID NO: 37251 - DNA, 401 bp, Setaria italica
  Peptide Sequence Number=SeqID_103225
tggaaccctcatgctgctttagcttcttgtctagatctatgaaatagctcttctgaatcatattggcctgaatgatagaagcatcttttcaggaactcctccattttctcactacagtttcccttttatctattctgcaagtcagcgttttgctgaccatgttcctcagttcagaatcggtcatcttgctccgtgcataaccaaagatggtaaaatgcttgggaaggcaatcttcgtagtagagagcaaaaagggcaggaaatatcttcttcttggcaaggtcaccagatgctccaactacagttatgctaacagtagaatcatcattcttggatagtaaactcaagctgagactgcaattacaataccggaagtagaatttactagaaaggggaagacca

SEQ ID NO: 37252 - DNA, 812 bp, Setaria italica
  Peptide Sequence Number=SeqID_103226
gccgtggacctgttggtgcccactatcttgccgcgaagtataacgtcagatggggtagagctcaggagctatccgcttctcttccagctccttcaaaagaggcgtgaacagcgaccatgcagcatccaactcatctgagcggatgaaaagcctgcgctctccttcgatggcatcaagcaagagcctctcataagcatccggtatctcctttgagtacctaagacatgttatagaacacttaataggcaacttagggatactgtgacaagaaactaaccacttcagacaaggagtgacgaatacaagcatgaattgatgaattcattggcaaatatatttgtgtctgcagaaaggtctgggaaaccgctcaagaccctgtaaaccagagtttggccctgctagaatgtagtcccatttgatcccctaatacgccgaaacattacatgctccagacaaataggtattagatggtttctaatagatttgccaagaataatttaaagattgaaaagaaaaaaaagaatgggtagaaaataaaaaccactgcagaaataagaaaacaaagatctggcgatagcatctgagagaaaatggttgaaccagttttaggatttaggaaccatgaactgtagagtgcagacgcaaacattgctaacctactaggacaagcatgattaaggaagacaaacatcagatgactgaaaaaggctatatataatcactagatgaaaaccatattattagttgtcattaaaaagactacctcaatattataattttattagaatacaatcatatacattgtaaaagtt

SEQ ID NO: 37253 - DNA, 2487 bp, Setaria italica
  misc_feature (1)..(26): n is a, c, g, or t
  Peptide Sequence Number=SeqID_103227
nnnnnnnnnnnnnnnnnnnnnnnnnncctcagtcaattttgaacaagcaaataacatgtcagtcaattttgaacaaccaaataacatgtcaggcagattgccattgcaactacttgtcaaaatggttttgttacagtacaaatttccaccagttcaagttcaagccaaatctgacacgtcaagtaaccaaaaggcgacggcaccaccgcaccagtcatgcaacatctggtcaacagtatctttccctcagagatacgcggcgctagtatgacagcccagcttcattaatgactactcaatacattgagatcaacatagcagatcttccagttattccttgtgagaagccagatttttttacggctatgttattccaaacaaagctattcatagtctaataccttgtacatgcttctaaacctcatgagccggcccgccttattctcatctgttttctctgtcatctatcttactagcagggcgtgcaaccttacagaaatggaatagcaagaacatcacaaagatgtagtcatatttgtttcatgccttgtagtgctccgcgctcaagtcaccccatctgacgttatacttcgcggcaagatagtgggcaccaacaggtccacggcttccataagggtagagctcaggagctatccgcttctcttccagctccttcaaaagaggcgtgaacagcgaccatgcagcatccaactcatctgagcggatgaaaagcctgcgctctccttcgatggcatcaagcaagagcctctcataagcatccggtatctcctttgagtaccttgctgcataatggagattcaagttactcctatctagtcgcataccgagaccaggaatcttgttgttaatctttaggtaaatagcttcatccggttgcacacgtatcacaagctcattggtggccctatcaagatctgtgccaaaactccccttgtagagatttccaggaacatgtcggaactgtaccctaatctcagctcgttttgtatgcaaagctttcccagctttcataagaaagggaactccatcccatctagcattatttatgaaaagtgcagcagcagcaaacgtcggagtcacactatccttgggcactgtgttatcatcagtatatccagggtaggtagtaccaccttttgtgtggcttttatactgtcctattaccacatcttccagttgcaacggcttcatggaacgcaaaactttaaccttctcatttcgtatatcctctgcttccaagctaataggagtttccattgcaaataaggctagtatctgaaggagatgattctgcattatgtctcgaataataccgtagccatcgaagtatcctccacgtccttcagtaccgaagtcttctgagaatataagttgcacatttcttatatattgccttgaccaaagaggctcaaacacgagatttgagaagcgaaggacagataaattctccaccagttcctttcccaagtaatggtcaatcctgaaaatttggtcctctacaaggtattgcttcagacctcttgttaatgcagcagaagactctgagtcacggccgaagggcttctcaacaattacccttgtccaaccattcaacgaagatgctgatttgcttgcacattttacaacatccaagaatatattaggaggtattgacaagtagaaaaggcggttagaaactctggaaccctcatgctgctttagcttcttgtctagatctatgaaatgctcttctgaatcatattggcctgaatgatagaagcatcttttcaggaactcctccattttctcactacagttttcccttttatctattctgcaagtcagcgttttgctgaccatgttcctcagttcagaatcggtcatcttgctccgtgcataaccaaagatggtaaaatgcttgggacaaaaatacttgggaagggcaatcttcgtagtagagagcaaaaagggcaggaaatatcttcttcttggcaaggtcaccagatgctccaactacagttatgctaacagtagaatcatcattcttggatagtaaactcaagtcctcaaattcatccggagtgatttctgaaggggagccattttccacctttggtggggtagtaagtgtgactgcattcttcacatcggcatcgatgggagctttcactccctgcggggcaacggcctggatgcgccaacactcaacggcggcggacttcccgaagccgcatctggcgaaggagaccgcggccgccggggcctgtggcggcgcggcggcgcgtcgggtggagaccgcggcggcgcccgcggggcacctcatgcaggagagcgccatggattgggtttcctcagcgcggcttactttggaggagacgaagtggggatggaggggatgaccagctggagaggggcggctcggggttttatcggggatatcgaagggggacgagggggctgaggaacagatgcgacggggctcttgag

SEQ ID NO: 37254 - DNA, 347 bp, Setaria italica
  Peptide Sequence Number=SeqID_103228
tcttgttcattgcgcaccagagagaggcagggaaatctcaaaaattgagacacatatggtgcaaaagacttcaatgggtgaagacaatttttgtccacctctgatttgcagaagctccaagcgagtactgcacctaatagatggtagggacgaacgccttgagcgacgccgggtactcgctgccgaacttctgcaagtaccagcggcggtggtcccttgccctcggcccgaggttggagcaggtgtagaggaagaaggcccacgcggcgggcgtccacgccaccacggcgaagcccagccacttccacggtctcgccgaagtaattggggcaggtgacgaggtacga

SEQ ID NO: 37255 - DNA, 298 bp, Setaria italica
  misc_feature (295)..(295): n is a, c, g, or t
  Peptide Sequence Number=SeqID_103229
actcaacttgagctggaccagctgagctaacccaactatccaataatctacattgaagtgacgtagtattggagtattcattttttttcattaggtgtatatttgaattgcaaaactataggattttgggcgtttatagggttttaaagtacagatgttgcatttatccacaatgttgcaaagcatgtttgctatgttgccgtgattctcaaatttttggacatccataatttaactgtgtatgattgtatgatccgttgtggtgttcaatttgttgctgacctgattcacaganata

SEQ ID NO: 37256 - DNA, 253 bp, Setaria italica
  Peptide Sequence Number=SeqID_103230
aactgtaagcttcaggagctaccactcaactttgaatcacttctcttgaatttgtatgttaactaatatttaactgttttgattttcgtactaaaatagaccgctacatggcccctgaagttttcaagcatcggaaatatgacaagaaagttgatatcttctcttttgccatgatactatatgagatgctggaaggcgatcctcctttctccaactatgaaccttatgaggctgctaagtatgtcgcagaagg

SEQ ID NO: 37257 - DNA, 345 bp, Setaria italica
  Peptide Sequence Number=SeqID_103231
tcggggaggctgggcgtcggggaagttggggtcgggcccgacgacgtggtacttgccgacggccatggagttgaccttgatctcatcggagatgcacttggtgtggccggactcgaggtcgaaccggagggctcgcgccggccgcggggccgagaggagcgcgaaggcgacaaggaggagcagcgcggacgggcgcggccacatggaggcgggggatccggggcgccgcgcggccatcgccggagatcggggaggtcacgggcgagggactcgcgtttggcttgtggggaggggaaggttgatgtgctcgtggacgcttggaccttgtgagcgcgactagttgaa

SEQ ID NO: 37258 - DNA, 447 bp, Setaria italica
  Peptide Sequence Number=SeqID_103232
tgtcgcagttcaactatcattttgtgtgtaacataaattaaccattcacacaaaaaagttacacctgttcgctctagtgctgtgtactatcgtgaataattggggaactacaatagcttctttctctcgaagtaagtcttcaggtgccacagctgcaagcccgccactgataagcagatgccgagcgagaggaacccgagccaagccatcctcgagtgtgttcgcctgttcaggtcctgcatttcctcctcctactttcgcggagataaaatatttcttcatgtatatttttgatgatttcctctagcttcttcagctctaattccatcatctgcagcatacaagcaacaacacatgcataaacagaggtactagctataagaaacaacatgcaaaaagctctgtaggcaccattctcacaagacaaatatgtcaattcgaagaaat

SEQ ID NO: 37259 - DNA, 917 bp, Setaria italica
  misc_feature (1)..(26): n is a, c, g, or t
  Peptide Sequence Number=SeqID_103233
nnnnnnnnnnnnnnnnnnnnnnnnnnttttttttttttttttgttctagccaagattttaagcatgaagtcaacttgctaatgaagctgagacatcctaatattgtccagttccttggagcagttacagaaaccaagcctctaatgctagttactgagtttctacgagtatgtattttgtgtcgcagttcaactatcattttgtgtgtaacataaattaaccattcacacaaaaaagttacacctgttcgctctagtgctgtgtactatcgtgaataattggggaactacaatagcttctttctctcgaagtaagtcttcaggtgccacagctgcaagcccgccactgataagcagatgccgagcgagaggaacccgagccaagccatcctcgagtgtgttcgcctgttcaggtcctgcatttcctcctccctggacacatgacatggccacaatgtgatacaggaaatgctttgccaacgttagtttcaatgttgccagtcatagtcgatactacgtactactttcgcggagataaaatatttcttcatgtatattttttgatgatttcctctagcttcttcagctctaattccatcatctgcagcatacaagcaacaacacatgcataaacagaggtactagctataagaaacaacatgcaaaaagctctgtaggcaccattctcacaagacaaatatgtcaattcgaagaaatgattacgagatcctataagtagtgttggcacagctaacagcgaacctgaggagcaaagactagatgatatagcaatataaatgaggcaaaagatgcccttctgtatctatattcccttctaatattacataaacaattgtgtgaaaaaggaaatgtacaatatacctcttaaggccctcctcgatccctgctgggttaaca

SEQ ID NO: 37260 - DNA, 746 bp, Setaria italica
  Peptide Sequence Number=SeqID_103234
agctgctcgaggaggacgccacgctcgtcaacgcccacgactacgacagccgcacgccgctccacgtcgccgcgctccacggctggcacgacgtcgccgagtgcctcatcgccaagggcgtcgacgtcaacgcgcaggaccgctggcagaacacgccactagctgatgcggagggagctaagaggcaggctatgattgagctgctcaaggagcatggcggattgacatatgggaaaactggaagccattttgaaccgaagacaattccgccacctctaacaaacaaggctgactgggagattaacccacttgaattggacttcacaaaagcagttgtcattggaaagggctctttcggtgaaattctgaaagcaaattggcgaggaacacctattgctgtcaagcgcattcttccatccctatctgatgacaggctggtgatccaagattttaagcatgaagtcaacttgctaataaagctgagacatccaaatattgtccagttccttggagcagttacagaaaccaagcctctaatgctagttactgagtttctacgaggaggcgaccttcatcaatatctgaaggagaaaggtgcactcggcccacttgtcgcagttaattttgctctagacattgcaaggggaatggcataccttcacaatgaacctaacgttgtgattcaccgagacttaaaaccaagaaacattcttctggtgaattctgctgccaaccatttgaaggtt

SEQ ID NO: 37261 - DNA, 1718 bp, Setaria italica
  Peptide Sequence Number=SeqID_103235
cgggcggggggaggcagcggcgcggggtcgtcgggggggcggggagcggcggcggagggggcgcgcggcgagggaggttcgacgacaagggcctcgtggcgcggacctcgctgatcctctggcacacgcaccagaacgacgtcggcgccgtgcgcaagctgctcgaggaggacgccacgctcgtcaacgcccacgactacgacagccgcacgccgctccacgtcgccgcgctccacggctggcacgacgtcgccgagtgcctcatcgccaacggcgccgacgtcaacgcgcaggaccgctggcagaacacgccactagctgatgcggagggagctaagaggcaggctatgattgagctgctcaaggagcatggcggattgacatatgggaaaactggaagccattttgaaccgaagacaattccgccacctctaacaaacaaggctgactgggagattaacccacttgaattggacttcacaaaagcagttgtcattggaaagggctctttcggtgaaattctgaaagcaaattggcgaggaacacctattgctgtcaagccgcattccaatatgtccagttccttggagcagttacagaaaccaagcctctaatgctagttactgagtttctacgaggaggcgaccttcatcaatatctgaaggagaaaggtgcactcggcccacttgtcgcagttaattttgctctagacattgcaaggggaatggcataccttcacaatgaacctaacgttgtgattcaccgagacttaaaaccaagaaacattcttctggtgaattctgctgccaaccatttgaaggttggagattttggtcttagcaagatcatcaaagctcagcatgccaatgatgtatacaagatgactggggagacaggaagctaccgctacatggcccctgaagttttcaagcatcggaaatatgacaagaaagttgatatcttctcttttgccatgatactatatgagatgctggaaggcgatcctcctttctccaactatgaaccttatgaggctgctaagtatgtcgcagaagggcatcgcccggctttccgtaaaggacatactaatgaactgaaggatttggttgagctatgttggtctggggatatcaacctgagaccttctttcttggagatcctcaagaggctcgagaagctcaaggagcaattttcacacgagacccactggcatttgttccagtaacagtgcatatatacattcattactacaggtggtgttttgaatagggttttcttgggagatctgacattgatgaatgtacaaaattaggtgcctcgagaaagctccactgagacggtgaaattttcttgctgttttacttcgatgctatttctgttaaagaaaacagaaaccttgtttgtactgcagcattacctctttttctttagatttcgctctgcttcagctaaaattgtgaaaaatcttgagagctattagatcatagttctgcagcatataggtggatgtggccatgtggggttctatagatcagaaagtttcctgctattttctgtttcaagatctttagtttgttgatgagaattgcttcgctgcctttggaaagtgattcctcgtgcatattctataagtgtcaaaacaatttactgtaaacttataaagagaaatattgttggattacaaagttttgaaaagtaaaaaaaaaaaaaactaaaag

SEQ ID NO: 37262 - DNA, 935 bp, Setaria italica
  Peptide Sequence Number=SeqID_103236
ggttgccccccaaattacaacatgaattatagaccggaacacatttgagtttttcttacaacttttttttttgaatttcgactgaacagactaaagcacagtgaagcacatttctcaagtatgacacacatcgtttcttacatgggttcacgctctgtaacatagattaaccgttcacacaaaaaagttacacctgtccgctctagtgctgtgtgctatcgtgaataattggggaactacagcagcttctttctctcgaagaaagtcttcaggtgccacagctgcaagcccgccactgataagcagatgccgagcgagaggaacccgagccaagccatcctcgagtttgttcgcctgttcaggtcctgcatttcctcctccctttcacggagataaaacatttcttcatgtatatttttgatggtttcctctagcttcttcagctctaattccatcatatcgaccttgcccttcttggcaacgctgggccaatccttggccgagacgccgctcctccagtcaaactcgaagccgatggtgaccggcggcttgtggtcgggcgcccagaagcaggcgaggtagtcgcccgcctccgtcgccgtgaaggcaaagtgccccgactgcacgttctccgcgtagtgcatgctgttcccgtacggcgacgtcaccctgagggagatgcggtgcgattcggggagctgggcgtcggggaagttggggtcgggcccgacgacgtggtacttgccgacggccatggagttgaccttgatctcatcggagatgcacttggtgtggccggactcgaggtcgaaccggagggctcgcgccggccgcggggccgagaggagcgcgaaggcgacaaggaggagcagcgcggactagttcgtcccgtccttccgttcgtccgttgtaaggtctaagttgtccccgtactt

SEQ ID NO: 37263 - DNA, 329 bp, Setaria italica
  Peptide Sequence Number=SeqID_103237
gaagggtgagggagctctattctacgaacctcctcggttcccaggtgtggatgtcccatttatcagttgcgatcttgtaacttctgctgatctgcaagaatttagtccccttgggattcggcagtggatgcggtcaaccatgaatgtccccactcctttaagattatggggatccccaacacatgatgaaagcccagatgcgctaaagactgctgccgaaagcttcccatgcacaccatcaataatgaaaaaaagacacagaggtctattatctcctactccagataaaagaattgagaagaaatctgggattgcaaaggagatgacag

SEQ ID NO: 37264 - DNA, 377 bp, Setaria italica
  Peptide Sequence Number=SeqID_103238
caatggtcacagtaactgggaaaggaagaaaacagaatatggaatatgctactgcaaatatgtttgtagttttctttattttattttatggataactctgaaatagtaataatgcacttgataatcttctaatctcgagcaaaggtggaagaataaactcagacattagaaattttcctctgatgtggccttataaaatcattgtcactgcaattttggttcagtagtctgttgccttttttattcattttatggtggcattgtgctttacaccaagtaatcaggtgataagtaatgacacccttggggaaaccaagtaaaatcttgtcttagttattttcctgaatttattagagcttagaatttcttacagcggc

SEQ ID NO: 37265 - DNA, 552 bp, Setaria italica
  Peptide Sequence Number=SeqID_103239
atgatgccttcttggtcatgtctgccaagagctccagaatagccaaccatccacccatgtcacacagtctgctcgtcacagtattgcttgcaacaacagcagcacatcaatttaactctgacgttactgcttttataaaaagtgttaaaaaaagcctccttatcgttcctagaacgacagtcatagattggttacaatataggacattgtgacatttggatggtgttgatctggctcttgtatgttgagggtttacgcttctcttttatgttcagcaagcatcatcattgtcagcattgtaatcgatggccattccacttgattgcccgacttctaacattctctcaaagaaatcatcatcttcgtcttcactggaaacttcgaaatcatcctcgctgtcatcccttagtgcttcaagtacctcttgatcatagcttgcaccatcaggttctttgaactgatattgaggttctgacatttgagcttgctgccactcagcccattcctgcattgaggacaatttgtgacagtagattgttgaaccttctgtgg

SEQ ID NO: 37266 - DNA, 342 bp, Setaria italica
  Peptide Sequence Number=SeqID_103240
gacggcggcgtgggacctccacgtcagacctcaggtccagtcctcgtccgtgaagatatcccacggcgaggagagccggcggagggggccccactcgccgtcctccaaccagaaggtccgcggccgcagcttcacgtccatgaccagcagcacgaagctggcatcggcgacgtcgatggcgaggaaggcgcaccggtagatgtagcagccgtcgtcgcgaccgacggataggccgctgggaggaggaagggaggtgacgtggccggtgaaggtgttgcagacgcgcaggtcgccgtcctcggcgggatgccagtttgggggccctaggtggcagccacgcac

SEQ ID NO: 37267 - DNA, 235 bp, Setaria italica
  Peptide Sequence Number=SeqID_103241
aacttaacccaatggcagatccttgtcattttacctctggataactaaaggtacatatgctggacattcaatggatcaccaaatctatatttttacaaaaatacaattcattaaaaagaatcaaaagttactcctttgagctataggttacacaaagtgaaacccagtacgaatattctgtatgagcacaagtaaaaaaataatttagtcatggtagtgactagcaataatatca

SEQ ID NO: 37268 - DNA, 692 bp, Setaria italica
  misc_feature (1)..(33): n is a, c, g, or t
  Peptide Sequence Number=SeqID_103242
nnnnnnnnnnnnnnnnnnnnnnnnnnnnnnnnnaaatttgtatctattcaaacgaatcacgctggccacggatgtatggccacaggtccaacgacgcccagcgttccggaacagctctgcaagctgctcctcctgccggtcatgcaagaataacatgattacatcacgggtggacagttccggctgcgaaaccagactagtaatctaatcttacagaaactaagcgaccgatcatacatagacgatacaccaaccaggtcgccgcgagcgacgggtaacaaatgtgaccagctttctactactctaccggagctcaagctctcagctcccggatgtagttagggctcatctggttggcggctttgggcgacaacatgccggcgaggtgtgcgtcctttacgaccgagttcagcttgctttccagcgggctgaacggcatgtgatccaccgtcggcttcttggctgcccgcaggcaggccaggtagctgtttggctggttgttccagtgaggcaacttgctaatctgcaccgaagcttccttctcccttgacaccggtccaccagaaggatccccgaggaggaggaaagtgaactgctgctgctgtttgctgcctgcttcttcaaagtgagcctctatgagcttcctcaattctgaaaggcacgagttcggcagtaactttgcctttgatcag

SEQ ID NO: 37269 - DNA, 876 bp, Setaria italica
  Peptide Sequence Number=SeqID_103243
tagactactagaacaaataaggttacaataccaacaaacttaggacaataacaaattaggtagacgtagctgctgctgtttgctgcctgcttcttcaaagtgagcctctatgagcttcctcaattctgaaaggcacgagttcggcagtaactttagccctttgatcagatttccggactcccacttgatgtatacttccaacaggccatcctgctccttctgtcctgcaacactgttctccttgttctgatcactttcttgcaccgtactgcataattttagctgctctgacaatggttcatccacaacttggcatacaattggtgaaagctgtgaagatactgggctgtcagttactttgacgtcgcacataggggtgtccatggttccccatgctgatggctccttgttttcatctccaaaaacttgctttgccggtgacttcttcacatctccaaaaactttctttgctggtgacttgttctgatctccaaacacttcctttgctggtgactgaacctttggtttcttagctagttcccgatggttcccgcagagcctgaatatgttctcaatccgatgcttccttgttgcaggatcatctgggtcagccagcgcatcttgtgttatgtcaaccttgaagctctcctctacaacctccttgcacacctcctcttcaagaccatttcccccttctgcatcctcatcatctccctcctcgaatacagtgcttaggacaaccttttccggatacccagatagcctaacatcatcttcttggaccacagcaccggtgcaaacacctgctgtcgctgtgtgattccatatgtggccctggtggcgagtatcctcctttattaccttgacatcttgtgg

SEQ ID NO: 37270 - DNA, 1061 bp, Setaria italica
  Peptide Sequence Number=SeqID_103244
tttttttttttcgccatgaaaagaagttttgcatagccattgaagaagaagcttaagcaaagctcagtctatagacagatgaaacaccacccccaaagctgtagagttagccatctgatgagtaaaacacccagcggccactagttgaccccaaaaaaacaaagctaaaatcaaggtcgtcgtcttcgtcgtcgtcacgaccatatcatcatatacccccaaagcatgttatcatgtaccactaattaaactgcaagaagaggagcgttaatcaggtcggtcgccaaaacccacacctgactcaaagcagccggcgccggcgcgcagaacggcacgaagcacgtcgcggcgcgcgcggcctgccgtcgccgcgtgtctccgtcacgggaggttgaggaacaggccggcggggtccggatcggcaaacccggcgctgccccagcacgcgccgcccaggtcgaacgccgccggccactcgaacgagtccggctccaagtccagcgccttccccgcggccgggaagtcggaggtgccgagccccagcgccacgtccggctgcagcaggtgggcgagggagtcctcctcctccgccgcggggaccacgagctcggtggtgatctcgctcgccgcgtcggtcgtcgtcggtgtcgccgtcgtggccgtcgtctcgttcgtcgtcgtggtcgttgtctcgttcgtcgtcgtcttggcggagtcggcagccggggcagcgacgagggtaggggcggcgacaggggcggcgacggggtcctggggcgcgacgacgacgacgcggcgcttcttcttggagggcttcttgggcttgttggcgttggcggcggccgcgtaggacgatggcggcgacgatgagggcttcttgcgggtgccgccgccgacgggtacgttgcggagcgtgccgcccttggtccagtagcgccggcagcccttgcagaagtggcgcggctgggaggtgttgtagttgttgtagtagcagaacttggtatcccgcgactcgcaccgcgggcacgggtccccctccgcgggcgccggcaccgcgtacc

SEQ ID NO: 37271 - DNA, 335 bp, Setaria italica
  Peptide Sequence Number=SeqID_103245
cgtccatggcgtctgcctctacatcaaccggacctggtacaagcagacgacatggatgtaccttgccatccctctcctgctgtacgccggcgagcggcttctccgggcgctgaggtcccatggcctgacgacggtgaggatcgagaaggtggccgtgtacccggggaacgtgatcgccatccacatgagcaagccgtgcgggttcagctacaagagcggccagtacatctacgtcaactgcggcgaggtctcaccgttcgagtggcacccgttcaccttcacctcggcgcccggcgacgactacctgagcatgcacatccggtgccgcggcgact

SEQ ID NO: 37272 - DNA, 535 bp, Setaria italica
  Peptide Sequence Number=SeqID_103246
atcccgactcgccggcggccgccacgaaaccctcgccgccgccgactgtaggaatcgcacatctcccccctccccctggaaacagaagaattccttgtcttcacccgcgggactcatcgtattcgtccggcggaaccttgttgggacttcagcgccggcctggagaccccgcgatgggggcgaacgccgacccctctgggtcccttggcgggccccaccgccgcctctcctccccggtgcccgcgccggcgccgctgccgctgccgcaacatcagcatggcgtagcggcgaatactgtggccgcgctgcggcacgacccagggctcgccgcgcggtggtcgcccgaggagcaggtcctgctcgacaagggcctggccaagtttgtggcagatgcacctgtagttcgctacgcaaaaattgcgatgactctgccggacaagacagtgcgagatgtggcccttcgctgcagatggatggactaaaaaagagtgtagcaagaaaaggaaggaggaattatctaagaaagcaaagaaag

SEQ ID NO: 37273 - DNA, 390 bp, Setaria italica
  Peptide Sequence Number=SeqID_103247
cgcgaggcggtagtccacggacatgacggcgcagcccgcccgcgcggcgagctgcgcgaggaactcgtggtagcagctccaggccgcggagccgacgcagaacccgccgccgtggaagtacaccacgacggggagcctggccccagtcgtcgccgccgccatcggcgcgtacagccgcgcccacacgcccgtggcgcggtcgaccaccgcgtccctcgccacgacgccgcccggtgcgccgggcgccgtggctccccacgtgcagggcacgtcggggatcgccgggaggcgctcgacgtggccgtccttgtagacgcgtatgaggccgtggatctcctcgacgacggcgccgtggccgttcttgccgccgccgccggcggcggcggtggg

SEQ ID NO: 37274 - DNA, 757 bp, Setaria italica
  misc_feature (731)..(757): n is a, c, g, or t
  Peptide Sequence Number=SeqID_103248
tctcgcaagccaccaggtcgaggaagcaagacaaagcaaccgcacccaaaccctagccgacggtccctcctcctccagcagactcttcctccgtgccggtgccatggcgctgcgctctccctccagcactcctccgcgggttctgggccccggcgattcgccgccggcggactctccgcctcccacctctcagtgtggatgcggcaatggagctagagctgatgttgctaggaagacgaaggaggttgaacatatgctggcaaatttagaaaaagagggagtggagatagatggcaagatagctagtattattgatgatgaggtagctagaattaaagctgaagctgccagggagaagctgagaatgaacaagctgaaaaggaaaggggttatgttactgatcagtattatatctgttgcttatggtttcttgttgggagtggactggtatgaggatcagctctatacgaaagtggccaggataatctgttatggtgaagaatagcttagggcttgcaggtccactctgtttatggtatgtaaaaccaggtaggttaccatggtatgcagaacctatttatgttgtctagtagttgtgctatgctgtggtttttggcacatacattgtaactctaacttgcaacactgcatggagcagacagcaggtgctcggttatactgctggttaattagtcattgctaattgaatctggtgtgtgcggtgatcaaannnnnnnnnnnnnnnnnnnnnnnnnnn

SEQ ID NO: 37275 - DNA, 392 bp, Setaria italica
  Peptide Sequence Number=SeqID_103249
cccagcataagacccatcacctccattggtacaccagccctcccgtgcttgagcatcttgaggagtgcaagggaggaaatgtagacctgctcggatgaatcgagcagcggcgagtccgatggtggctgtcccattccagaggcgccgaagatcctctgcaggcgctccatgctgatgtgctatcaagagaccggaaagcttctcagctgcttgtgtttttcttgtgtggctcttttttggggattggctgtttgctgcggacccctggaggaggcctccggtggagatgcgctcgtcggcgacggggaagctcccggcggtggagttgtcgccgcgatggggacgcacgcgagcggacggtgacgggaacgagatggaatcggagcttcctt

SEQ ID NO: 37276 - DNA, 602 bp, Setaria italica
  misc_feature (1)..(6): n is a, c, g, or t
  Peptide Sequence Number=SeqID_103250
nnnnnntttttttttttttctttcaaattcaaatcaaaacttaacaccaagcaacagaagaatgcattcataaacaaaccttagaaccaaaatgtatctggcgtaaggtcattgcacatgtcaggcctccataaacttaaagtgggtatgtgtagacagttaggtacaacaagagtgacaacctaaaagacaaccgtgtcaagcatggttcctagggtctgaactatgtttgatgacattaaattcgacacatgctcttccaaatgcttcttcgcatcttgccgaccaacatttgctatcgcgagtttctcaggtggcagctcatcctcctcttgcactgccttgttgtacttgacggctaggttcagcatttcctggacagtctgctcattggttttcgagtgagtgtcaaacctcttcaaaattagtccatcggtccatttctttttgtgcaagttcagcaacattttctcctcaagctcgtttttccggtaattgattgcaattgagtagtaatgtctgttcagcccatggataagagcctgaatagacggcttatttaggtgcccaacattagacgttgtctgtcgtggctcctggcc

SEQ ID NO: 37277 - DNA, 1196 bp, Setaria italica
  Peptide Sequence Number=SeqID_103251
aagcgacaatctaaatgtttgatgcccatacagaaccacaccgaagatggtgctacagtagattataaaaattcttaaaatatgatctgtccaaacacaatcgtaactagtatttggctcactgcattatggcaactttgataaacataaagccaaataaacataaagataatttcagtgctgcattcattgaggacacgctactaccaaactaaaagacaaccgtgtcgagcatggtccctagggtctgaactatgtttgaagacatcaaattagagacgtgctcctccaaatgcttcttcgcatcctggcgtcccacgttcgcaatcgccagtttctctggtggcagctcatcctcctcttgcaccgccttgttatacttcacagctaggttcagcatttcctgcacagtctgctcgttggtttttgaatgagtgtcaaacctcttcaaaatcaacccatcagtccacttctttttgtgcaagttcagcaacattttctcctcgagctcattctttcggtagttgattgcaatggagtagtagtgcctgttcagcccatggataagagcctgaatagatggcttatttaggtgcccaacattagatgttgtctgtcgtggctcctggccaagcatcatggtctgaggattaatgaggcggaatgcatcaataaccaccttccccttgacactctggatggggtctatcacaacagcaaccgccctggggttcaaagcttcaaaactctgttgagtattgatatcaactcctgagagccagcaaccgaagccaggatgcgagtgataccagcctacaaccatttctggtctgccggtctgcttgagcatgtcaagcatgttcgtctggaagacgtggtcgacggcctcgacgctaaccccggtcccgctctgcggcatggcgaagacgtcgacgaccctgacggtgtagtcgtcgacgaactcgccgagcatgaggcccatgacctccatgggcacgcccgccctcccgtgcttgagcatcttgaggagcgcgagggaggagatgtagacctgctcggaggagtcgagcagcggcgagtccgtcggcggctgccccatcccggaggcgccgaagatccgctgcagccgctccatcgccggttccgccgcctccttgccttgctctctgctctcgcttcggctcggttcgttcgat

SEQ ID NO: 37278 - DNA, 1867 bp, Setaria italica
  misc_feature (1804)..(1867): n is a, c, g, or t
  Peptide Sequence Number=SeqID_103252
cattccccactccccaccccaaccccccccaaccccaacagtcgccgtcccaccgaaccctacctcaccaacagaccgcaggagaaagggggaagaaaaatcctgtcgaggagaccacgccgccatggccggcgatcccccgacggccgcggagaaggaggccctggtctcctccttcctcgagatcgccgccggccagacccccgagactgccacccagttcctccagatgacgagctggcacctcgaggaggcgctgcagctgttctacatcgacggcgagtccgccctcgcggcgcgtccggcggccccatcggccgcggcggcgatggcggcggcagccggggtggaggaggcgttgaggttcgctccacccccagcggctgcactgggcgatccgatgctgcagggacttggggttggggaggacgacgacgtccgcgcgccgctgcctgtgaagcgggagactctctacggcgacggccctgtgtccgtccttcgacctagtacaacggttgcattccgtaacttcgaacaggaagcaagacagtccgctgtttgggattccgatcagaatgctacttctagttctcgtgataaccttgcttctttataccgtccgcctttttctttgatgttcaatggaccctttgacaaggcaaagttagaggcttcttgtctggacaagtggctgctaattaatttgcagtcaacagaggagtttagctctcacatgcttaatcgagatacttggggaaatgaagcagtggcgcagttaattcggtcaaatttcattttctggcaggtgtatcatgacaccagtgaggggagaaaagtatgcacctactacaatttggtgtccgttcctgctattcttctaattgaccccattactggacaaaaaatgcgtggttggaacggaatggttcacccagaccgtttgcttgaggatttgctgccttacctggataaaggtccaaaggagcaccatgcagctcaacctcaaaagcgcccaaggaaagttgatcaggaatcttctatggccaaacaaggcaaaccaactgtggaggatgaagatgaagaactagcacgggcagtagcagcttccctagaggggagcaaagaagttgctgaagaatcaggtgctactgatgacatggctgaagctgaacctgaggaagacaatgagcccagcttaaatatcaagcttgattatcctcctctccctgaagaacctactggaagcagggaccttctctgcagggttgcgattcggctaccgaacaaccggaggatccaaagaaattttcttcacacagatcctattaagctcctgtggtcattctgcgctcctgaggttgaggagggggagaagagggctttccactttgtgcagcccattcctggagcatcccagaagctggagttcgcaagcgatctcactttcaaagaagccaggttggcgaactccatgatcaacctgttgtgggactgagagcctgcctccatcttgcactttgaagccgcgccgtatttcagcgtgggcttgaagatggtttagttattttctttcgcttaggattaactctcatcttttgctgtactggagcttggagccgaggacaaatttgtcgtctgggttatgtgtggaaatgctccttttgccgttggttcctgtgtctgtaaacatcccaggtaggactcagctctatttaatgcacatatttatcataccctggtgctagtactactaaacactgatgcaggccactatgcatgcatggcctggtgcttgctttaaccnnnnnnnnnnnnnnnnnnnnnnnnnnnnnnnnnnnnnnnnnnnnnnnnnnnnnnnnnnnnnnnn

SEQ ID NO: 37279 - DNA, 615 bp, Setaria italica
  Peptide Sequence Number=SeqID_103253
tgtaattgaaatacagtgaaaaccctgcatggtgatatcagtgatctaaggcaggcctttgacgaatccagaatttctttttaacaggtcagattgtgatcatttccaacttcttgctgctgaacgggctcagaagataaacaaccttgaaccgtatataaaggatttggaaaaaagagagagctttctagttcacagtgtggaagacctcactctagagatgaaagcagtagaacaggaggctacaagatggagggaagcatgtgaacaggaggtagaagctggaaaatctgccatcaaagaactcaaccaggagattgccttgctcagagaagaactgggaagggtaaaagcagacttggagactgcaaacagtaagctacagctaaaggagaaattagcagccagtgcaatggtagcacaagcagctgcagatgcatgcctcaagcttgcagacaggagatctgctgggctgcaacggaggatagaagagttgacgagacaaatagagcaagaagatgcacatggaagaaaggagagaggaagtactcgcagaagattaaggttaggggcagcgtctacagaacctaacgccggtaaagggggaaagtaggt

SEQ ID NO: 37280 - DNA, 358 bp, Setaria italica
  Peptide Sequence Number=SeqID_103254
taactttaagtaacttactttagaataaataacaaacatatgcatgatcgttaaaatcgtgcgcattagtgcatcttattacaaggacaaactgaagtaaacattatacagttcaagaagtcgtccagaagaagaaacatgttctttatgtggtgctcctgacttctgactattctaatcactgtcccgtgacggtctcttcacatgcatgttaatgtagggatatgaccattttctctgcagactgcaggatttgtgaagtctgaacattcagatgcagcgtcttccccctgcatctctgatcggatgtttggcagcagcggattgttaccgccaccattgctgctgatgttgccat

SEQ ID NO: 37281 - DNA, 1688 bp, Setaria italica
  Peptide Sequence Number=SeqID_103255
gcggctacaactccatgtctcaaccattccacatcaaccatggatagtattgaagcaccgaaaaatgcctgggtaaatgaactaagatctgaagatcatgcaaatatatctgaagacattttgtgttgctagatcatggcatggattctttcttcacaatttctaacgcattttggtagcttgagataactttcacaatcaaactctgatgtataaattttccaaacaaatacaactgtcaaccatatatacatgttagcaaaaataaacggataactacaaggcctatttgcatgatcttgttctatgaaacgtgaaagcagaagggtgaggactatcaaactagcttccttgtgatattcaaaggaaagaatgttagtctactagtacagtacttggagaatatttgcgaaatcacttcctttaaaggacaggaggccctagtcaggttttgtgtattcaagcagcatatgtggtgatctgtatatgtttaccaatgtccaatataggacttcttccacttctaactcgccttcagctcttgctgcataaatgccttcacagatgtcgagtagcctgtcacaagatggaagattctcatatggtattctcattctcaagtctgagcactgcagcctaataaatcttgcaacagctaaaacaaaagtaatgtataaactccatatgctaaatttgctgagtgtttcaccaataatgccctgaggtgtctcctcagacacaactatggccatgggaccattcaacccttgacagcctgccaaatctgaggggtttgtatagaatgaccaccaagaagtaccattattcaatagcagttcaccacttactgaatctatcgctgcttctagtcgtcgaacttcacctgatccagtaacccgaaagtacctagggtaagcatcaattatgctgaagctgtttgtagttccattaagcacttgtttaacatcatctacactcgggcagtgttcaataggggattcatatcgcactaattccttcccttttggtcgagctctgagaaaatcccaatttaaaataagttccatcttttcaaaaagtgtttctctcccaagggattggataaatctgctttggactggaggaggtatcaaccacattgttgatgcatcaggttgacagcaaatcagctgaatgtcatcgacattatatgcccctaggtaacctagaggatcaacatcaccgtaggccttcaagtacttccagggtatttttcacaagcggtggtcttaaacaaggttaatcttccaccaagtgcctttatatcaatcttaatacttacatcaataacagggttggcaatatttgtaggattaccgctactgtaaatcaacataggagcccaaataacacaaataagtacaaagaataagcatatcccactacagaactttgtcagttttgtttgcttttctccttgtcgatgatttgctctattcaaaattgcatcgcatttcacaagaaacaagcttgcatatatgtcctccaactttagccaatcatacatggttaatgatgtggttgtgcaagaccaatcaagcacacaccgcaattcatacaagaatggtaaagctcgatacagccggaagcccaagtaattcacttgtgttactttgctagtcaagaattgtctatataagttgctcttg

SEQ ID NO: 37282 - DNA, 422 bp, Setaria italica
  Peptide Sequence Number=SeqID_103256
ccagaaaacagaattatgttctgacgtaatagaagaataatgatacgacaaacttaagcgcattgcaagtgatgaaaagcaggaacaattcaggcaaatgtaataacttcatggtttcacacatagttttacagcaaatacaaaacacattagtgttagtctgatcacatacacaaggaagatactcttgtcaataaaatattagacattttgccaccccttgatgagcaaacatttttttgtcttaaaatgatgataaccttgatggttgattgctggtccataggctgctatatctagctcatgccaataccttaaaacttctttaaaacctcatgaaagataataaccatgacctgactacctgaccatcatgctgccattctattgaagctgtcaagtgtcaacacacacatccagaa

SEQ ID NO: 37283 - DNA, 851 bp, Setaria italica
  Peptide Sequence Number=SeqID_103257
cctcccctgaccccgtacccgacgttttggttcgccatgatcgtccgcgcgatggcccggcgtagctggagctgctcgaagaagagcacctgcacgaccgtccgcagcggcagccgctcgttctgcgcggcgtgcgtgcacgcctccagcgtcagcttgcgcccgtccaccacgccgctcaccttctccttctcttcttcggtcagcccaggatgagccttgaggtagatgtcgacagcccggtaaaggccatcgtcgtacacgcgggcgccgtccggcaacgcccaggcgaggtcgcagaacttgtccggcttcaggtttgcatccgtcgcgatctcccccaagtacgcatcgaccagccgccccacggccagcatggctcgtcggctagcctctctgcccggcgtctccgcctcgctgccctcgtcgtcctcgttgccctcctcggcgacgccgcggccttccaggaagtaccgcaccacgcgctcgacgcagtccacgtcgtagagcgtctccacgaggtacgagtagctcgggacgagcaggtcatcgacggcggcgtccggcagccgcgcggcgatgcgccgctcgagcgtgtcgcgggacgcctccgacgcgtgcaggatgctcgccgtgcgcaggaggccgaagaggacgcgcgccgcggtggcgccgacggcggtgccggtgtgggcgctgctcttgacggtttcctccgggaggttggcgatgacggtctcgagaagcgccttctggtccccatccgacgacgccggggccgaggccgccgcggcagccgcggcgccaccgccgccgacatgccggccggttcgcgacagaccggggatgga

SEQ ID NO: 37284 - DNA, 542 bp, Setaria italica
  Peptide Sequence Number=SeqID_103258
cgccagctttgacttgggtagttgggtttcctcttcttcggttcttccccacctccacccttgttgggatttcgttggctcttcttgggttttgaggcgagcggcggcggcggcggcctcgagttcttgctttgagttggtccgtttgggagggtttgccgggggaggggtgggatttctgtcgaattccgccttggttccgtcgaatttgggagttttcctgaggaatcgaggcggcgtgcggtgattgcaaggggggaaagggaaaggaggaagctttttggttgtagttttattgccggagatgggcaagccgtcgctgaagaagaagagggcctccagcggcggcggcggcaagtccggcgagcacgggggcaagccggcgctggagcgctccggctccaaggtcctcgacggcgacgagacgatcttcacggacatggcgcaggagcacaaggaggagggcaacaagctcttccagcgccgggactacgaccgcgcgctgctcaactacgacaaggccatcaatctgctcccccggg

SEQ ID NO: 37285 - DNA, 273 bp, Setaria italica
  Peptide Sequence Number=SeqID_103259
tttttacccttattttacggtaagactaatttttaggggaaatttttagttacatcatgtttgcgcccgaatctcgtggttttggttgaagagaaatgttgctacgaccttagggagcatctctgatatgatctccctccaaatcccacatggattcggccggattttgagtttttcccaaatcgtgttccttgcgtagggttttcggtttttctccaaatccgcgatgaatacttgagcgttttgagattctttttcatggatcttatttcg

SEQ ID NO: 37286 - DNA, 694 bp, Setaria italica
  misc_feature (665)..(665): n is a, c, g, or t
  misc_feature (672)..(672): n is a, c, g, or t
  Peptide Sequence Number=SeqID_103260
agatgcaacatatgacatgactcattatcattaaacaattcaatcaatacatagatatatcacgctgatatttaaggaactaatttagcgctccacctttatggtccatagcttatagaattttattgataatggacctcactttagttaatacttatctatactagcttataccggtttgtagcttttgcattgctaatttccctcgaggctagcaggggcgtgcagcaccatggtctcgattgtgattcccggcccgaatgccatcatcactccccactccggtgcttcaccgtccagcttggccacccgacggtggcgcagctcatcgagcacgaagatcaccgtcgtgccgctcatgttgccgaactcgctcagcacgtgccggctcgccgccagcttcccgtcgtccaggccgagcactccctcgatgtggtccaggatcgcacggccgccggggtggatggcccagaaaagctcgttccacttggcactgacgccaagcgcgccgaacgcgtcgatcaggcagcgttcaacattgcacccaagcagccgtggcaccttgttggagatgtggtattccatgccgactttgttgatctccatggagatgtcatcctcggttcccggtatcgtggtctgcgaggcgaaggccatctcgaacnggggccnctccgacgggggccgacggggg

SEQ ID NO: 37287 - DNA, 465 bp, Setaria italica
  Peptide Sequence Number=SeqID_103261
tgggtattgttaaggtctttcggtccgtaaccttcgttctaactaaagtattagttgttcttccgtttgttcgttctgtgatcgtgcaagttcgtctcggtagattcaattgacgttaccactggtggagattagcaggcggctcgtcgccatgaaggctaattttctaacactttctttaaattcttagttgattttgttgtctatttatgtctgatagacaagacggaaaaaatggatgatacgtagagaatgaataaatttcaaagataaggtgtattacaagtttacaattatgcaagcttatcacaatttttcatgataaggttttgagaacaaatcttcagcttgattttcatatccaagccattgtacatgaattatttgtgaataaaaaattattggacatgaatgctaaccccattgcgtgacacataacatggtcacacagccaccattaagtga

SEQ ID NO: 37288 - DNA, 1066 bp, Setaria italica
  Peptide Sequence Number=SeqID_103262
cgcttgtcaaagatatcatcaggtcaacaaggctgagccatgagactctagcttgatacggcgtgcagcctgtatcacttgagttactttcttgaagaagctcgatctgcttaggaaatatctcttttgccaaatatgtagacaatgcaatgacaattcctgaaatccactcctctctgcaactatacccaataagtttggccatatccacaaggggctgcagaatctcatccatcgaatcaacaaaatctctaattatcttataagcaagagcaaaaacaaattctggcttgtcattccattttgagaaatggtgttgtgctgctgtagatattggatttacaagctcttcaattacccataatggttgacgtagttgattgcccacattatgccctttcagttgtcgagcttttctgcgtttctgcagttcctgcaagttgcatagtgaaagaaagctctcagaatacttgctcttaaggtcaccagccattgaaaacaatgggttcacaatctctgcttgtttccctgaatcaatacttgaaaattttgagccagagagtgaaggaggccagccaagggatgacagaagagctcgatgatcaacaatggcttgtggtcttaatatagctaaagatcggtccactctgtgatccacagcagatagaagatgagtccattgtggtctagtcgcggttaccaaagctaaaaggtcttctatgtttttaagatatccaatcgtgacatgatgtgttttctctgaattgtctctaacagatttaagttttcctgtaacagaagaagagacggcatcttctacatcacccaccaaactgtcaagctttagagccatttcggcatactctctgaccatctccactctcgccacctcggaggctagagcagggagttgctcaaactgcatctgctccgttcccacctccacctcttctccagcccctaaaatcgcaggataccacggaattacagaagcaatctacttggtacgccctaagtttgagaacctcgtgagtgtgtgttggagatacctggtggagatgggagg

SEQ ID NO: 37289 - DNA, 246 bp, Setaria italica
  Peptide Sequence Number=SeqID_103263
ctcccggtgcataaccttttccttctttaggaaatcttttaggttgttcatatgagaaggatggaagccaggcagatctatcagcctgagtggctgtgcctcttgacaaggggctcacttctctagatgtggcatcaatggctacctttgtcactgaagaaggctttttcttgttctctggtgaaacctgatcctcgctgtctgtttcttccttgtcatcactattgtccggagatgaaacattct

SEQ ID NO: 37290 - DNA, 470 bp, Setaria italica
  Peptide Sequence Number=SeqID_103264
aggacgacaatgtacaaatcaatatcgttaaccaactaacttatgtccactcaaccataagctaataaaaaaatgcaaagttgagttaggaaatcacaacaacttagcacaaaagcacaattaaatctgattgtcctgtaacttatcaggagcacgagcacattgtcaaatgtcaaccatcgggaacgtttcaataccaaatagagtttgaaaatcacagcagcagcttccactaaggcctaagtggctctaggccatcaaagccttgtgaacatacaacaacattttttgagttaaaatgcattgtgtgattcaatatgaataaatcccaaatatataatcctccagaaaaggaaccacctcagaaaaatctcattagacaaactagatggccagtataattttcaattagctagcagcttcgatcatgcataactactggacaacgctatcttacataaatcagatgg

SEQ ID NO: 37291 - DNA, 667 bp, Setaria italica
  Peptide Sequence Number=SeqID_103265
atcttgtgttgcatggagaactcgatcttcatgggggataagtcaagataggctatcatataatacatattttgaggaattgtctgatgagccaaaagaggatgatgatgatacagaagttgaacttgatgaagaggacaacaatgatgatggcagtagtgagacttatgataaagatgaagaagatgaagaggaagaggaagaggaagaagaggctgaaaggagaaagctgaaaaacaggatttactcatccgatgatgacatgatcgatagtactgttcctgcctcaagatatgaggataatactgtccgtagctcaagatatgaggataatactgttcctacctcaagatatgatatcgagtgggaggaggttgaagatgcaaatgtcgatatttttcagccaatctcctttaagaaagctaccaggtggaaccctgtggttgtggacaatgacacatttactgagcaacaaaagcaatcaagatttacttgggagcttgagaggaggaaaaagcttaaacttgggatagtgaagacacaccctttgtatgagaaggatttggactcagattccagctcatcgggttccgaacagatcaaaaggaatggattcaaaagggatggtgatcaaaaagttgggaggaaaaagaagcatccattgtct

SEQ ID NO: 37292 - DNA, 403 bp, Setaria italica
  Peptide Sequence Number=SeqID_103266
gcggggtccagcccgcacttcgccgcagcggcggtcgtggtcggcagcacggccgcggctgccgcggcgcggcgccggttccggcggcggacgtggcagacgtagaggtggaggaagagggcgaggccgagcacggacacgaacgccgcgacggccgtggtgatgagccgcacgttgtggccgccgcccatccccgccggcggggtccgggcgccgctgccgaaccacgcggaccccgggtcgctcgccttcatcgacgacatcgacatggccgctcgctggctgctccgacaaataaactcgacgctcgcgcgcgctgcgctcctctcgctagtcctcggcgtgtcgcgggtgtccgcggcaagtctgtgctgcttggttggtgagttcactgggatggaac

SEQ ID NO: 37293 - DNA, 272 bp, Setaria italica
  Peptide Sequence Number=SeqID_103267
cccgcgactcctgttcttcccgtggctcctaccgcccgtacagcttccgtcgccggcgtcgagcggccgttccacccgtcgccgcccatggccgacggtgcggaaaccgttgccgtggaggacttggaggatgccggcgtcctggaaaaaacggccgtggcctggcgccgccggccgtggcttggcggtgggcggccgtgcctatgccggcaataggacgatgatggccgatgatgagactgacttggatgagttcgtgcctgtcggccagg

SEQ ID NO: 37294 - DNA, 247 bp, Setaria italica
  Peptide Sequence Number=SeqID_103268
tgaacgtcaccctgttcgtgtccagctacgctgtcgcgttcgcgctcctgtggcggctcacgatggtgtcgctgccgtccgtgctgctgctcgtcgtccccggcttcctgtacggccgcgtccaggtcggcctggcgcgccgcatgcgggagcagcacgcgcgcccgggcgccatcgccgagcaggccgtgtcgtcggtgcgcaccgtgtactcgttcgtcgcggagagggccaccgcggcgcggtt

SEQ ID NO: 37295 - DNA, 501 bp, Setaria italica
  misc_feature (215)..(215): n is a, c, g, or t
  Peptide Sequence Number=SeqID_103269
tgccgctcagcatatttccctgcaggtttagcactgtaaccatagcacagttcttgatcgctgatgggatgtgactggtcaatcggttgtatgaaagatcaagcaagccgtgatgctgagtaaactccgagtcggggtgagctgcattcccaaatccgacacagatctcagcaggtatagcaccagacagctggttactagacaaattcagggtnttaagaaatgtcaactgagatatggcccttgggatgtggccagacagattgttagagctcaggtccagggtaacaaggtttgtgcagttgaagagctctagtggaatgttcccagacagcctattgccatgtaaagagagagttgtcagattccttagagcgccgattgaccgcgggatagatccttccaagtagttactgtcgatctgtagcctctgcaaactggagagcctacctatgctttcaggtatagggccagtaagctgattgtagctgagtgcgatct

SEQ ID NO: 37296 - DNA, 367 bp, Setaria italica
  Peptide Sequence Number=SeqID_103270
cacatatggctaggtcaaatgcagcgacgaatgaggcatcagctgtggcttcagaagaagctactgtgtcattagagtttggggcagagaggtcgttgcaggagccagtgcaaacatcgaaaacttctatattggaagctgagccttgttcaccggagatggctcctccagggtttgaagattttaagtctcaatggttgccactgtcgtctcctactctcgctgaatccacacacaatgtggtacaagtggctgccatcaatcctgtgggcatgacgccagatgcagcaactgagtcactgcctgcatcggaggccatggatgtggagattaaacattattctaccttggtccttacttccctacc

SEQ ID NO: 37297 - DNA, 475 bp, Setaria italica
  Peptide Sequence Number=SeqID_103271
cccaggcagcagaaggagataatccgcaggcacttgacggggtccaaacttctgctggtgatcgacaacgtgcgagacaaagaaggctgggagttcctgggggagctaggggagggcttcctcgagcgcgacgtcagagtcatcctaacggcgtcgcacagggacaggacaaggattatcgggggtcaacaggtggtttggctgccaccacgtgagggccctggacgaggacgatgggtggctgctgctccgcaggacggcgcagctcagggagcacgaggccgtcggcaaattccagaacgccgggataaggatcgtgagcaagtgcagcggcctcccgctggcgctcaaggctgtcgggtctagtctgaggcagcaggaccagctgggcccatggatggctgagctctccgccgatttctttgtcacgcaagtgatgcaaagggagatccagaggagcatcgacaccagctac

SEQ ID NO: 37298 - DNA, 258 bp, Setaria italica
  Peptide Sequence Number=SeqID_103272
gtgcttacgtcttgcaggagttgtacgaagcaggtaccgaggggcttcatgtggagaccatgacgatgtagaggagtttgccagtgctgccgcctgtggaagtttcttttttggcacacaaggaatgctctccttagctagagtcgtatttactactggaaaacaagaggcttgttcagatcaacagtgaactcctggacaaccatcttccccaaccagagcgtgcaaggaggagaagagcagcccggacctcgtcgg

SEQ ID NO: 37299 - DNA, 1009 bp, Setaria italica
  Peptide Sequence Number=SeqID_103273
caagtggaacgacacaaatttatatggattagtagcatgaataatcaaggtctaacacaacataattcacattacaaacatgatggcacaccatgccatagtcacagtacaaatacacacattcctaggtagatgcaaatacattgtaatcatggaccggtattacttcctcttgacattatcccaagtccatcagagccatgcaatccggttctctgaagcggtaatgctcctataagatgcacgtcgggctggtgatctaaatagctcagtagctatgaagtacaactcagacccattcggtacaccatcttgttcgacaaggtgcagcatttctgtaacctcctcttcctcacggctgattagatttctttcagtcatagtcctttgaatcatgctctcagatatacgctcgacatagtactccatgctcttagttctcttgggtagtgggctatcaacaacatgctcctttccggacctctgcgacacacgacccacactagaccgtccaacagtgtcctccaaccagtcaacattttcatccgccattgggtcaggggtgtcttcacttccacagcttggtgttctatctccaattccaccaacacacaacattggaccgccttcagtgtccgttgtcccgaaaagagtggttaactcatcatagaatggaaacgccttgccacggaaatgtttgtttgcctcgttctcctcgttgtgcttacgtcttgcaggagttgtacgcagcaggtaccgaggggcttcatgtggagaccatgacgatgtagaggagtttgccagtgctgctgcctgtggaaggttcgttttttggcacacaaggaatgctctccttagctagagtcgtatttactaccccaggttctctgttgagatgcacaaaatctagcagcatacaaatgtagatcgagaatggagaggattggcggagctgggtgggccggcgatggtgggatggagcggcggggcggaggtcggcgggggcggt

SEQ ID NO: 37300 - DNA, 513 bp, Setaria italica
  Peptide Sequence Number=SeqID_103274
cacggttctgtagctatatccttcttctgagcataagtcgcacttccaccaactcaccatcaatcaacacctcaaccttcaattttatcccattcatctttcacgattttcactcctcgacgagcttttggcaaaactcaaaaagctcgcttacggggtgcttgcctaatgtctctaagctaattagtggatcagccaaatttcggaagacctacatgagcaacttaaattttacaatgccagtactaacagcagagtgctgaatcaaatgtactccctccgttccaaattgtaggttgtcttggaacggagggagtagcaattaaggtgtctcaatttagagagtaacatacccgccaaacttcctcttgatcaaagttggagtcgaagtatatagcaccaattagagattccacaatatctgacagaactttaggaggatccaatagtccatttgagtgaaccggatacttgcacatttcttctataaaaacatgaatctgtaaatgacca

SEQ ID NO: 37301 - DNA, 399 bp, Setaria italica
  Peptide Sequence Number=SeqID_103275
ccctccagcgccacgccccgcacgtccggcccgtggacctcacgccgctggcggtcgaggtcatcgcggagagcttcggggagtggctacatgaggagctccagcggccggagggcgaggagctgcgggtgtccgtgggccgggacccgcggctgtcgggcgcgcggctcagcgcggcgctctttgcggggctcgcgagggcggggtgctccgtgtttgacgtggggctcgccaccacgcccgcgtgcttcatgagcaccgtactgcctcggttcaactatgacgcgtccgttatgatgacggcatcacacctgccctacacccgcaacggcctcaagttcttcaccaagcgcggcgggttaacctccggcgacgtcgagaagatctgctatcgcgcgg

SEQ ID NO: 37302 - DNA, 941 bp, Setaria italica
  Peptide Sequence Number=SeqID_103276
ttttgtcaaagacagcagcaataggagcatgggaaaacacaacccgggatacaggcacaaccactacttgcaagttcagttgacgtttgcttaggaaatttatctaagaaagcagcagtttaaacaattttaagaaacaggggaaggataaccgaaacttcataggaatttttcccattttctcttagctaaacttccctttcctatagaacactcaaggcatgggagtagcacacaagatttatcccaaatcaattggcagcagtttcttgagcagtgacctctgcagtaggtcatcttcctcgttacggaaaatctagcagtaactttttccacataagaaagcaaatcatggcagttcttcttgcaatcatttttttccacatcattactgaaagattcaccagtattgttttcctacatcatgtatcacttctagatgactgagacacaccagcaattgctacacacgcatgtagaatatttgcacgccatcctccggtatttcaaacaaatcatgcacaacacaaagagaggtagtttcattcaaagaacacggaagctgcaattataggacgcgaaactgatgggaatattcaactgttgactacaaatattcaactttctttttgtcgatcgagcgacgtcggactgaaatggatccgtgttcgtttacagtagtcaagatccatgacaggttcgtatgattgtttcaaagatacctcgtcgtcgagcaccttggtcgatgtcgtagtctcactcctaccaacgaaacctaaccttagcgtcctccacagcactagcatcacactgacgcaatggccgcgtatgctcttggtccaagtgaagggatctcacctgcccacagggaatcacctcgtgtttagactggaatcgacgtcaaattgaccttattttctttttaggatgacctgtacgta

SEQ ID NO: 37303 - DNA, 442 bp, Setaria italica
  Peptide Sequence Number=SeqID_103277
gcctcttccactgctgaaatcaccaatgcggccatgctcaggtaactgtgacccggtggtccaagcggcatgtaacacgaggtctgcaagcatacatgcatggacagaaacacttatggaggcttctgcttttgctaatatctcagaagaaaccacacgagatgataaactgcaaggccagcaggaagcaacttctgtgatttccagtccaatcataaagaaagatgttgctacacagatgagtcctgaggatagcatatcatcttctccaaaagcgaggcattcctgctctagcctgccatcaggacatctgctaaaagaaggacataataactacaataataacctaaaacctagaaattacaagggaacgtagacaaggtaagaatagaatacaaagtaaactagtagaacccggtaggtaccaaagacggacaataga

SEQ ID NO: 37304 - DNA, 491 bp, Setaria italica
  Peptide Sequence Number=SeqID_103278
cgctctgctcagaaaaggcagaagacatgcgaagtgcagtttcttccaatgaagaccagtgtggtgtgagggcaaaaagaaggcatcttcctttgtgaaaactggcaagcccttcagctgctgctttacctaccgtgcttgctagttgtggtgtagtttgtgtctgtgggtgaagcaatggatatagaactgtttggtgagtttcttcagcattcatataatgtaacatttaagcttccgctagtttcctagtcttaatattttatgaattttatatatgaaattattttttattgaaacaattgctaacactagaagtgtgtgtttctcaagagcgttacagctcttgtcaaccaacagatatgggacttttgactacaaatttgggagaagcagttggccttcgtgccgtggaggtaatggatttgtgaagagaatttgcaggatgtggtcaccgttgtgggggcagcagaagtcgaagtcattgagtg

SEQ ID NO: 37305 - DNA, 2082 bp, Setaria italica
  misc_feature (2036)..(2082): n is a, c, g, or t
  Peptide Sequence Number=SeqID_103279
ttaaagttaaacccgttaaaccttttaaaccgtttaacgtttaacttttaagttactttagttaccttaacttcccctagtctagcggcagcggcttcgccacgcggggcacggctgcgccagaggaggggacggacggtgcgagctcggccaggtcggaggaagaggcggaggcaattaatgattcgttctcctactcgttaagggagtgccggaagcggaggtggcttaagtcagagggttctgggctggtgcggcctccagcctcacatgagctcaatggtggcggaggtattgagcttctagtgctctcgcccaggtgtttgattgggggtaatgcgggaggaatgagcaagagctcgacagcatcatcccggagcagatcaggcacaggcacagggacgttcccgagccctgggactccgaactacaatcggcattgtgcaggcaacatgcagtactccaagggttggagttcagagcgtgtgccactgggcgcaggtagcaatagaaggtatgggggtagcggggtggtgcttccttttaacaatgggaggaagctgccatcgaaatgggaggatgcggagaagtggatcctgagtccggtttcctgcgatgggattggaaggatgtctgcaccagctccacatcatagacggcccaagtcgaagagcggcccacttggccacccagctggcattcccggagcttacgcagctgtttcaccacttgttccctgctttgatggtgttcttgcagcagctaattttgcagcgcactcgcctttctctgctggggttctcatacctgagcatggccgcattggtgatttcagcagtggaagaggcaggtctggtgatgatggtagcagcagatcctactctgctgagaaggagccatatatcttgaggtctgcaagcatacatgcatggacagaaacacttatggaggcttctgcttttgctaatatctcagaagaaaccacacgagatgataaactgcaaggccagcaggaagcaacttctgtgatttccagtccaatcataaagaaagatgttgctacacagatgagtcctgaggatagcatatcatcttctccaaaagcgaggcattcctgctctagcctgccatcaggacatctgctaaaagaagcaaatactcatatacctaaacctgaaatcagggacgtgcaggtagatgatcaagtaactgtgacccggtggtccaagcggcatgtaacacgaggctctgataagcggtcaacaaatattattgaatggaggaagaagactattgagacacgagctccatcttttgatgaaaaagaaagagaaagatgcatgtcaaagtgcaaaagggaggaagctaagatcactgcttgggaaaatctacagaaagcaaaagccgaggcagctattaggaagttggagatgaagcttgaaaagaaaagatcatcgtcaatggacaaaattttaggcaaactccgctctgctcagaaaaaggcagaagacatgcgaagtgcagtttcttccaatgaagaccagtgtggtgtgagggcaaaaaagaaggcatcttcctttgtgaaaactggcaagcccttcagctgctgctttacctaccgtgcttgctagttgtggtgtagtttgtgtctgtgggtgaagcaatggatatagaactgtttgagcgttacagctcttgtcaaccaacagatatgggacttttgactacaaatttgggagaagcagttggccttcgtgccgtggaggtaatggatttgttgaagagaatttgcaggatgtggtcaccgttgtgggggcagcagaagtcgaagtcattgagtgaaaaccactcatgctgtcatgcatcaatccaacctctgtaaacccagtagaagcagctcgattcttgagcttcatgctagttaaatgccaggttgagctggtattcattccgcttgatgtacatctttcctggaattgagtatgtaatgtaagagcatggatgattttgcattacatactcaattccaggaaagnnnnnnnnnnnnnnnnnnnnnnnnnnnnnnnnnnnnnnnnnnnnnnn

SEQ ID NO: 37306 - DNA, 362 bp, Setaria italica
  Peptide Sequence Number=SeqID_103280
ggtgggattgggatgaaaacatgaagtgggttaggggcccaaattcaagtaaaaaaagtatataaaaaggttgtatatacagagcatgctgaggaaaaagattggaaacacaagaggaaccatacgcgcccaaaggagtaaatcccctgttgtaatcaatcttcacatcatccaatgacaatccacatctgtcgaggtgatggagaatgtcagttttcaacatgttcttttcaatacggtttccccgcaatgttactgtagaaccttccataggccaatccttcgctggatgacttgaggaaagggtcgttctgcgagtccgcggcggcagcgacttcgccggatgcatccgcggagaagag

SEQ ID NO: 37307 - DNA, 1026 bp, Setaria italica
  Peptide Sequence Number=SeqID_103281
tttttattttttaggaggcatgctgttaatttattttacaataatcaggaatagctgaatagtctcctgggtacatatgaaacatgtgaaacagtacaattaaaacctcgcaacaagggggaaataatcctaaagcaggcttgcaagttgaatcgaagctacagaaccacacaatgcgatgtttgtggactgaccccatatcaaaggatctaaaagttgcgatgaaagagttaacccaaatatcacatgatttgaaaggctacttggttactgaagaacacgcatgctaacttgattgttcagacagaaactcttgtttttggtaatgaaggcattcatcgcatcggtctttgtacggaatttaaccagcaccatttttatgggctctgggacaccaggtctgagaaagctttcaaatggcggaggttcaaagttagtgccacacaaaaagcgttctatgtcctctggcagggcattccgtggaactccttgcaaaagtacagcttttccatcaaaagactgtttgagatcccacacatcacgacttatcatgtccatcttgtacagacgaatctgacttgtttgcctaattgctgtggtaaacgctgcctttgaaggaaacctcaataaagcgcccaaaggagtaaatcccctgttgtaatcaatcttcacatcatccaatgacaatccacatctgtcgaggtgatggagaatgtcagttttcaacatgttcttttcaatacggtttcccccgccaatgttactgtagaaccttccataggccaatccttcgctggatgacttgaggaaagggtcgttctgcgagtccgcggccgaggcagcgacttcgccggatgcatccgcggagaagagccgagcggacgccggcgcggtagcggccaagagcgaggagaagggatccctcgatgcgacgacgctgcggcggagggcggcggccgcgagcctcgacatgtctccggcggcgcggcggcggaagagggaggaatcaggaatggcgtcgggcgg

SEQ ID NO: 37308 - DNA, 241 bp, Setaria italica
  Peptide Sequence Number=SeqID_103282
ttttattcattccatatctgcgtgatcaagcaaatcgtcaagaccaaaatctattagacacccgccaaagaatctcaggaacatttctgtaaacgtttatacaaactggaatcccagagcacaaaacatgttaactgagacgcccaacaaatactttaaactcatgaggtggtagtccataatccagaccagctaccatcactgcagggctccaataacgacaaatcatccatcttccgag

SEQ ID NO: 37309 - DNA, 256 bp, Setaria italica
  Peptide Sequence Number=SeqID_103283
gcttcgagatcctgcaatcacggcggccatggcgagcaccgcccgtctctccacctcctgcagtctggcgaccggcagcatcaccatcaggtgcaggagggcaaccatgaccgccattggatgcgctcccaggggcagcaggacccaccggaggagtgttggaatttccctgtgccgctcctcctccacggccggagctgaagggggcaggaagatggaggattacaacatcgccatgaagaggatgatgcgcaat

SEQ ID NO: 37310 - DNA, 266 bp, Setaria italica
  Peptide Sequence Number=SeqID_103284
tcctcctccggcgtctccggcggcgagtactcgccggggagcggcgcctcccggttcccgaggcagaagaagttgaggtagtcgcaggggtgcgcctggccgcgcagcccggcgtcgtcgatggcctccatgacgatgccgtacatcatctccacggtccgcctgttccagagcaggatggcctgcacggcctcacccgccggcaccccctcgggccacatcggcgtcacgacgtacgccgcgaaccgctccccgcgccggatcag

SEQ ID NO: 37311 - DNA, 1469 bp, Setaria italica
  Peptide Sequence Number=SeqID_103285
gggctcgcggaggggagcggcgagtacttcaccaagatcggcgtgggcacccccgccacgccggcgctgatggtactggacaccggcagcgacgtggtgtggctgcagtgcgccccgtgccgccggtgctacgaccagtcgggcccggtgttcgacccgcggcgctccagctcgtacggcgccgtcgactgcgccgcgccgctgtgccgcaggctggactcgggcggctgcgacctgcgccgccgcgcgtgcatgtaccaggtggcctacggcgacgggtccgtgacggcgggcgacttcgccaccgagacgctcaccttcgcggggggcgcccgcgtggcgcgcgtggcgctcgggtgcggccacgacaacgagggcctgttcgtcgccgccgcagggctcctgggcctcggccgcggcagcctgtcgttcccgacccagatctcccgccgctacggccggagcttctcctactgcctcgtcgaccgcacctcctcggcgtcgtcggcgtcgtccggcaaccaggcgggctcccgctcctccaccgtcaccttcggcccgggcgccgttggcccctccgcgtcggcgtccttcaccccgatggtccgcaacccgcgcatggagaccttctactacgtgcagctcgtgggcatcagcgtgggcggcgcgcgcgtcccgggcgtcgccgagtccgacctccgcctcgacccctccacgggccgcggcggcgtcatcgtggactcgggcacctccgtgacccgcctcgcccggcccgcctactccgcgctccgcgacgcgttccgcggcgcggcggcggggctccgcctctcccccagcgggttctcgctcttcgacacgtgctacgacctgggcgggcgcaaggtggtgaaggtccccacggtgtcgatgcacttcgcgggcggcgcagaggcggccctgccccccgagaactacctgatccccgtggattccaagggcaccttctgcttcgcgttcgcgggcaccgacggcggcgtgtccatcatcggcaacatccagcagcaggggttccgcgtggtgttcgacggcgacggccagcgcgtcgggttcgcgcccaagggctgctgagcttgctgagggcgaggagcaacgcgccgcgccgtaggagcagaggagcagcaggagcggcgcggttagttaattagtgggtgattagcgggtaaaaagaagcgagccgccttgttagtcataattaacggaggatgtcagtgagtgtgagctttggatgctgttaaaagaaaagaaaaggcaagcgctgggcagtgcgcggggtttgtctctcttgacagtgttggagtagtagcttttggtgcgcgagaggatatcaggataaggcggttgggttggtcgacgaaggctgtaaaaggccctgtaaaagtgcttgggttaagataagaaaagtgtgcttaaaaaaaaaaaaaaaaaacaaa

SEQ ID NO: 37312 - DNA, 537 bp, Setaria italica
  Peptide Sequence Number=SeqID_103286
cacattttgttagttctgctgtttcagcggttcctgaaatcgcattttgttgttcagttggctcggtagttgcaaaagtcaaaaagtcgcttttttgaacaacttcatgtattgctcctttgaccaagatgtggattttcttaggtgcatcactagggcctgcacctttgtcacttttattgtcacaaatcacctcgatgcctctagattgaatcagcttggccaagtgccttctccctctaagatgtttattcagattagtcctactagttgcactcacttgacagagtgcgcagttccagtgcctggcagcattttgtagttctgctggttcagtagttgcagaaatcccattttgtagttctgctggttcagtacttgtagaaaccccattttgtagttctgctggttcagtagttgcagaaatcccattttgtagttctgttggcttggtacttgcagaaatcacatcggccttcctcttacaccagaaaccttttgttttcttggtgaaagtaattcttctagtagtttctt

SEQ ID NO: 37313 - DNA, 390 bp, Setaria italica
  Peptide Sequence Number=SeqID_103287
aaactttgaattagaataaattttcaagattttacatggacctattctaccagctagtataacatatcattagtaaatcttgaaaatttattctaattcaaagtttaaaaactatcctttatggaaaacaacaaacgtgccctcaatcatgcacttactggataactagggggcttggagaccacaattcaatttctaattgataattcaagctgtaaaacgaagtatattgaggtaaatgactgccttgtgtgattaaccaagatgactttacgacacgctttatatttcgactgattcaagcagactgtcattgctaaaaaatacaaaaaaagaaaaagcaaaagaaatagcaagataaagttgctaccattcagaagcgatacctgt

SEQ ID NO: 37314 - DNA, 467 bp, Setaria italica
  Peptide Sequence Number=SeqID_103288
ggcggacgccattgacagccatcttttcactgccgttctctctgcggaagttcatgctggggaggaaattaggagatgagaagctgatgtgctcttgatgagccatcatgccacccccatttgaaacacttgagatcccagagcttgtcgaaggcgagtgagatgtgctgttttcagggcatagattcctgccgaaggccattttgcccaccccacctgttggagtgtgaagtgaaggcggagccttctcccgctgctgctgctcctggagctcctttttgttaaggaagcgacctcctggtccacggactcgcttcattgcatgacaatgtcgagattcatgaagatatggctgggaagagaagaaaaatttccatgctgattgatatatgatatcccaggaaaatgtgcgaactgcataataggtagcaaaacagagctggccaagaataatcgtgtgcggaaag

SEQ ID NO: 37315 - DNA, 290 bp, Setaria italica
  Peptide Sequence Number=SeqID_103289
gcgcggagcgtgggggagggagggaaggaggggaaaggtgggtgggaggtggaggagggggtcttcgggttagcggcgatttgggcaatctgcaagcgcttgaccatgaagagttatcagaagaatcttttgagtcatgtccttctgaggagatatttctcttgaggctcttgaagtccagcagtttcaaaaataacaaggacaatagcttgttggaatttgttgaagaagctcttgcttgccaccatttggcaaccgttactttgatgaagtccctgcaagaggcaatt

SEQ ID NO: 37316 - DNA, 178 bp, Setaria italica
  Peptide Sequence Number=SeqID_103290
cttcgctgcgtgtccgtgcggcggctgatcccttctcttttgttggctgcgatgcgagctccgctggttcgttggggacggggagaatgatgccggttgagtagtaccaaaactaggaaccgggggaaaggcctgacgctttgctctttttcagggcgaaaagattctccctcactct

SEQ ID NO: 37317 - DNA, 216 bp, Setaria italica
  Peptide Sequence Number=SeqID_103291
tcgcggcgtgcgcatgcggagctggggcaagtgggtgtccgagatcagggagccccgcaagaagtcgcgtatctggctgggaacgttcgccaccgcggagatggcagcgcgcgcgcacgacgtggccgcgctcgccatcaagggccgcggcgcgcacctcaactttccggagcacgcgcacctgctcccgcgcccggcctccgcgtcgcccaagga

SEQ ID NO: 37318 - DNA, 2001 bp, Setaria italica
  Peptide Sequence Number=SeqID_103292
ttctacaatctggcagtggtgatctgcagatgagatcaggcccgccggagcatcgttgctactgcccaggaggtagtaagttaacttacccccaatgaaacgagatgaaactgcagtggttctaaaattgaattcatccctctttacaacgagacaaaattgggtgtggtgccaattgaatcgaattgaatcggatggaacctttacagataccggcacatcaaacaactcacactttccttctacatacaaagactcgcgaacgtaggtaaatacaaacacacaacatgccatgccactacctaatactactactgagactacttgaagaatatgccctttcttcttcctttactcttctcaacggccttcattctgaacagccttaatatcagaacaatggcatctcgtgatggggcattttctgcaggctttagattgtactcagcaccatcagcagacacaattgaaaattcagtaggacggccatatgggacattgatagtcatggattgctggaatttctctgtaacgacgacaccacgctgtccattacacttaatgctgtaaccttccctctttattgccaagacagctggttcccacatatctaaaaacctaacaggtaacaaaacttcataagacacatgccccatagaaagaattttttttgataagctccttggtttcaggatcacatgtaatttttctttgatcattagcataaaccttcacaatctcccccttctttttctgtcatccagaggctggacttcaatcgctagtacagagtccacatcatcagcggttactagataggtgggctgccgtgcaccttctatgaaatttactgatccatcatccaaatgacgtacccactcaaaattacaacttgtggtcccattgatggagtacccacttgcttgaagttctcttccaggaaaggcttcacctgtgattcgtagcccatctatggctggcaatggatcatcctctgcaacttcggaaaaagaagaactaggctcctcaaggacggtaggaagataagggtattgcggatttgcatcatcaaggccagatgccaaattaggtgagccttcagactcccattgtgcagaaggttcttgtggaatttgggcttcagctccctccagattttctgaggcatcactcctaataaggtccttgaatgatgggttttgatccttggattcaatgttaaatcgaacagcacgcgaatcatgttcagttccttgagggacatccttcatattgtggttgctggttgaaggagaggtccttccaatgttatcatgctctgcattcgttgtggcaacctcactttgaatggcctgacggctttcattccctaacaaatcccagtcccgtctagctcgaacaggagaagaagctggagaccgaacatgaggatatgcttgctggggcacaatgtcaaggttggcttttaccaatgcatttccagtaggatgagaaggtgactgcgcagcagcacttgtattatttgaagattcagcacgccatggagtaatctggtattgtgattccttaagtttctcctcagtaataataagtttttcttgcaaatgcttaaacagaaccttcagattgctgacaatggattgagcatcaagaacagaaggctgaaggttatattctgatagaagaggcaataaagactgaacgaatgttgatctctcttgatgtgctgcctgcaatgcgtatgtcagacggatgttttcttcaataatgtcttgtctgtaagacaaagctttcgatgcagcatcaaccaaatcttgctgctgctgatcgaacgccatgcgcatatatgcaatccgtttctccaagagatgtttctcattaagtatttgggtccttctacagagtaatcagaaaggtagccttctcaactgtgcaatctcctcctcatgttctttaaccttagtcaagaagatcctgcttccagatggcgtttgagttgag

SEQ ID NO: 37319 - DNA, 447 bp, Setaria italica
  Peptide Sequence Number=SeqID_103293
agacaagtctcagccgcgacgcccggatttggcgagggttcagggtcggccgccgccgccacggagatcaccccagggttcctctggtttcgtcgtgttgtgcggatggaggacaggttctcgcccgtcggacttcagatctgcgttgtctgagggattctggttccgctggccgcggattttctccttctcaggtcaactgacgggcttgcagctgttgttcatcgtctatcgtctatacgtctgctggaaggagttattcatcggaaattcgactggattccagatctactctctttacaggggattaattgatttcagagaagaggaattggtgttctctctggtgtggaggctggtggctgattgcagagggctgttgacttgacttggtggaggagctgatgtgtttcgtttgttgctactgggttcaatccaggctggagg

SEQ ID NO: 37320 - DNA, 436 bp, Setaria italica
  Peptide Sequence Number=SeqID_103294
ggaatctgcctgctgtgctgtttttgtattctgccatcaaagggcgccacgctctagatgtacgtggctgtcggcatcagcggcctgggttggaggacgttgggtagcgtgtgccaggctaatcgggtgactggcgtcgagatgctgcgcgcggagccggcggctgtgatctccgggggaggccggtcagctggagcgagatgcaggggcccggggacgtcgtgaccccggcagcgccgtcgccgctgtccgtgtctcacagcaccaccagcggccggctgtgcccgcacgcttggtttggcttctgccatagtgactcgatttgcttgtccttcggtggcgctggcctaggggggacggcttgccgctgcagctgttggtgtggcccggccagtgacttgctaagcgtgatggcgcaggattgaggcagggaggt

SEQ ID NO: 37321 - DNA, 426 bp, Setaria italica
  Peptide Sequence Number=SeqID_103295
acggtcgacacctacagctgtatgatctccaagcttactgctgctgaaaatcgggatgatatggacagcctcctcggtgagatggtcagatttaggatccctgcattggagcaagccctgaatgaattggttcagtccctgagcagtaagaaccaatttgatgaagctttgctggttatccagcatgctacctctgccaagctcaagttatcagtctcagcttgtaatggcgtgctgcgtggtctggtcaagcaagggagtggcctgcggtcattcatgcttgtgtacatggagattgtgaagtctggactgcttcctgatgtggaaacactgaattggttaattcaggccttgtgtgaatctggccgtgtagacctggcactgattcagtttgacaggatgagcaagaagagatgttctcctaac

SEQ ID NO: 37322 - DNA, 249 bp, Setaria italica
  Peptide Sequence Number=SeqID_103296
agacatgcttaagaccttttacaaggatccccagctgttgctaaaacaaatcatagagttaacagtaggcgacagaaaggcatttgtccaaaggataccgactttcagcagcaaaggagatgcatgactgaattcaaactaatagctgcagtattcaaaagacacctgagaagtaaaatttttataatctattgtcaccctgaggtgcttagcaacacatttgataactgagatgtctatcaagtgaaa

SEQ ID NO: 37323 - DNA, 432 bp, Setaria italica
  Peptide Sequence Number=SeqID_103297
gtctgctctgctctgctcctcccccgttcgttcactgcaaaagaagcggtaaagaagtcggaatctcggggacccctggtctcctctcctgttcagggtatccgaagtcacttccgtcaggacaggatgcagggggctcacactcagctaggctcccacacgattcagactcatggagtgagattggtcagaaagcacacacacgactgggtggttctgattcttctagctgcacttgtgattgggctgcattatgctcccccgttcaagcgattcgttggggaggatatgatgactggtattaggtacccagtgaaaccaagcactgtgccaggatgggctgttccaataatatctatgctgtgtccttgggtcatcttcatatgcatatactttgccaggagagacgtttatgatctgcatcatgcaaca

SEQ ID NO: 37324 - DNA, 298 bp, Setaria italica
  Peptide Sequence Number=SeqID_103298
tcgctttccaatttccaaacctctcttgcacgggagagcacgtacacgcggagcggagcgcgatcggcgccgcggcggcgagatgtcggcggcggcgacgatgacgtggcacgaggacctggccacgctcgtgggggacacgggcgcccgcttccccggtgccggaggggacgcgccggcggcggcgaatgttgcggcggcgggggccgggtggtacggcgaggaggaagaggggaggacggaggaggggtgggcgcagcaggcgaaggggttcgcggagtccacggcggagatgctg

SEQ ID NO: 37325 - DNA, 483 bp, Setaria italica
  Peptide Sequence Number=SeqID_103299
ttcttagttcttagttctttggttccttagtccttgtctagtctattattggtcctaggtctaggattacacccagccacctgcaaaccctccaagttatgatcagtctgcagcagcaccagctcagaccggatatactgcaccggccgcaaatccgcagcctgctccagcaaagggggtgtcgccacagcctgctgctgctggatatggtggtgggcagtggaccggatgaaccatatttctcaaacttaactgacagtgagatcttgttggatgcgtattccaatgatcagatcttttggatgtttctgtggatgcaatgggtggcgcttgagttttgttatctggaagagattgtaaccccccaatttgtaatacatgcatcaactgtaagtaacctaagtaagttacggttaaatagtagaactttaaaacaatacctaattacaagttttaaagaagaaaccaatacgtttaactaaa

SEQ ID NO: 37326 - DNA, 727 bp, Setaria italica
  Peptide Sequence Number=SeqID_103300
caaatcaccaaggacgtcgatgctgattcgaatgctctgacccggtcggttgaactagttggaacccttggaagtgttgataaagctgagcagcttattaagagtgttatagctgaggctgaggctggcggttcccctgctttaatagctagaggttttggaagtggtcagtcgggatcagagcaatttgagatgacagttcctgataacaaggttggcctcattatcggaaaaggcggtgagacaattaaaggcctgcaaacaagatctggtgctcgtattcagttgataccccaacatcctccagagggtgttacattgactgaaagaactgtacgtgttactgggaataagaagcagattgaagctgcaaaggatttgatcaagcaagcaatgaatcagaatttctcaaagcatacaaatcaatctggtggatatggttcgcaaggttaccgccctcagggtcatggtgcagcttctcagtgggggccacgctctcaaagccagcctggctatggatacccaccaagaggtatgcctccacctcagaactataacccaccctacggtggttacccaccgcagggacccccaagaggcggcatgggctgggaccaaaggcagggccctccaccccatccttcatatcagggtggtggttctgactactacaagcagggatctcaaccatacgatagccagccaccaagctaccctcctggaccca

SEQ ID NO: 37327 - DNA, 1550 bp, Setaria italica
  Peptide Sequence Number=SeqID_103301
gggatattgaccattatccttcccttgcatggtttgtgtagttggtaactggtaaggctgcctattgccgaaaggaaacagaaactgtatggcattggaagacagcaacaggtgtatccttgccatgaaaaggctactgcatcaccatgtaatttctcaaagcatacaaatcaatctggtggatatggttcgcaaggttaccgccctcagggtcatggtgcagcttctcagtgggggccacgctctcaaagccagcctggctatggatacccaccaagaggtatgcctccacctcagaactataacccaccctacggtggttacccaccgcagggacccccaagaggcggcatgggctgggaccaaaggcagggccctccaccccatccttcatatcagggtggtggttctgactactacaagcagggatctcaaccatacgatagccagccaccaagctaccctcctggaccagggaactttaacagttatgggcaatctcaggctcctggctatggacaacctccgtatccgcaacatgcacctcaacagaactatggccatgggtatggtgatcctagatacaatgctccaccgccgaaccagtattatgggcagccaccaatgggtcctcagcaaggctatcctcagcagccagatccttatgctaggcctccatacagtggacctggacaatgggcgccccccagaggtgctccggctgcagatggctcctaccaggcaccaccacctgcatcttatggtccaccctcccagcaacctcctgcttatggccaaacatatggcgcagcaacaggacctgatgggtatgctcaacagggctacccacagcagggtgggcaagcaccggccccgtacggccagagtgcaccagcagcacaaggctatcctcagcaaggcgcacagcaaggtggctatgtgcagtacccgcaaacccaaccagcatatggtgatcaagcagctcaagccaacgcgaactatggttaccagggagctccagcagaccccaactatggaaatgcctacccacagtcaggatatggacctgctcctgcagtgggtcaggctggttatgcttctgcaccagcagctggccagcctgcagcatatggccaggcaggatacacccagccacctgcaaaccctccaagttatgatcagtctgcagcagcaccagctcagaccggatatactgcaccggccgcaaatccgcagcctgctccagcaaagggggtgtcgccacagcctgctgctgctggatatggtggtgggcagtggaccggatgaaccatatttctcaaacttaactgacagtgagatcttgttggatgcgtattccaatgatcagatcttttggatgtttctgtggatgcaatgggtggcgcttgagttttgttatctggaagagattgtaaccccccaatttgtaatacatgcatcactgtagtacctagtagttcggttaatgtgactttaaacatcctattcagttttaagaggtaaagagaaccatcgtttactaaaaaaaa

SEQ ID NO: 37328 - DNA, 4032 bp, Setaria italica
  Peptide Sequence Number=SeqID_103302
gccaacgccgccgccggaggtggtagtccacgccgaggaccatcctccggccgccgactccgccgccgccgccgcgcaggaggacgctgcgccgggcgaagtcgaccataagaggaagctcaaggaggtcggcgccgacgcggaggcgaacggcgacggcgaggacgccaagcgaccccgcgtcgacggcgagaccgacgcccccccagggactgagcagcagaacgatgggtcctccgtgaacgtcgaggaggccgctgctgcggaggacggaggcgttgctgctaccgagggggtggcagatggtgataatggcacggtcgcggcttctgaggagaagccactcgagcctacaccggaagcagcagctgaagctccacagcaggaagttgatgcagcggatgcatcgcaggagacatctcgtaaaatcgaagtgcccaatagcaaggttggtgtcctgattggaaaagctggtgaaactatcaggaacttgcaaatgagctcgggcgcaaagatccaaatcaccaaggacgtcgatgctgattcgaatgctctgacccggtcggttgaactagttggaacccttggaagtgttgataaagctgagcagcttattaagagtgttatagctgaggctgaggctggcggttcccctgctttaatagctagaggttttggaagtggtcagtcgggatcagagcaatttgagatgacagttcctgataacaaggttggcctcattatcggaaaaggcggtgagacaattaaaggcctgcaaacaagatctggtgctcgtattcagttgataccccaacatcctccagagggtgttacattgactgaaagaactgtacgtgttactgggaataagaagcagattgaagctgcaaaggatttgatcaagcaagcaatgaatcaggtgatgtgaccttttgtcctttttttgtagcctactattcgtgctttcattgtttaagtgttgccagaagctgttacggtattgctttatgcgtttgatcattcattctatgattgaactcttatgctagctgctgatgtgatttgcttcatgattgatttattttggcacatgaatcatgtggttacttctgtgattctagataccaaattcaatgttttctttcctggtatttttgttacccaaggcaaattcatggcatgacttttgagcaccctgccttattaccgtgctattatgttgattgattggtacaactgttctgagctgtgggtgtcaatgtgcctgttgtatcattgtacaattgttctatctttctgatatttttgagccaaacttgagattttctgtcattgtttaggttcaattttcctccttgataagccttttagcttttatagaatatcccaaatgtactgatatttttgttatataaagaaaaacactgcttcgcttccccactttgttattaatattgtaaatagattgctattttcttgttgggaagtgttgggcttttgccttttcatggaattcaagtgttgttataaactaatcaatctcttctacaatggcccttgtatgaagtatcaatcttgatatatagcagggcctagttgggctggaaggtaagttcttcttaatcagtgatctgtttgtgttctcttttccatcttctgatgaacgatcaatgagacgccattactttgttaggaccgaggaaatcaataatttcttataatttgttatctcctcatccacaaagtttttaggaatgtttttttcttagtttgtacacttcatcaaattcaatgtctccatgaatatttctccttccccttgtcatccttggtactaagcactatgatttttgttggcttattttgcctccttgttttacagcaccatgcatgcttccatacttcaactcatgactttattaataatatgaattgtagaaaaaataaaaatatgaccaaacaattcagaaatggaatgtactgttgagcaatacatatcaagtggtttatttgggagatttggatagaactggtagaattctttattcctagcttgacacttagtagtatatacattatgagtattttacatgttagacttgacaatacacatgggcaagcttagttgaaataaagtggagcataagatccatgacttcagcttcgcgattgctgtgttaccctaccagcactttgtgcagttagcattttgctaattattagatatgatctgattctgtttcctacataagcagtcacaactgacatatcaggtttattcgcttccagtttccgtgaattatttttgttgaaggtgcaaatttggagttggttgggtatcctaatgcagatacagctagctttcttcacgggggtcttcgttctccatcctatacatgcaacgcagagggatattgaccattatccttcccttgcatggtttgtgtagttggtaactggtaaggctgcctattgccgaaaggaaacagaaactgtatggcattggaagacagcaacaggtgtatccttgccatgaaaaggctactgcatcaccatgtgtaggtttgctaaactaaatcgtttgcgactgtatgttgtgtgcgaaacacaacctctatatgccaatagctgaacaacaaagaatttcatcattgatactttgctataacactcttatctagaatgttgaactaactataaggaagatcgggttacttagcattattataagcccagtattatcaaagttgctatcggataatgcgtgccgcggtgcatttaatatctcaatatttatgtgttttggattgaagctgcttgtatgtttatgagatgcacacagatatgttaaactctgaattgtctttcttttgtgcccacatttcttgttgctgtttttaatgatggttaccaagggtcttgttgatattcatgttatattaatgatgtcacatactcacatcatgttgtccacagaagtttgtgtaagtttttgcgttgtattaatggagttctgttctcgaacaattttcttgaatgatttaatgatcagtgttggactatctttaagaagtacggtacccagtattttcacatcgttattcttatttaactgcaatgtgaactctgtcttgttgccccttgataatatcctaataaatgcattttgctttacgttagctgtatttgctactatatattatctacttttcctttctggtttctaacaggctttcctgtgcagaatttctcaaagcatacaaatcaatctggtggatatggttcgcaaggttaccgccctcagggtcatggtgcagcttctcagtgggggccacgctctcaaagccagcctggctatggatacccaccaagaggtatgcctccacctcagaactataacccaccctacggtggttacccaccgcagggacccccaagaggcggcatgggctgggaccaaaggcagggccctccaccccatccttcatatcagggtggtggttctgactactacaagcagggatctcaaccatacgatagccagccaccaagctaccctcctggaccagggaactttaacagttatgggcaatctcaggctcctggctatggacaacctccgtatccgcaacatgcacctcaacagaactatggccatgggtatggtgatcctagatacaatgctccaccgccgaaccagtattatgggcagccaccaatgggtcctcagcaaggctatcctcgagcagccagatccgttatggctaggcctccatacagtggacctggacaatgggcgccccccagaggtgctccggctgcagatggctcctaccaggcaccaccacctgcatcttatggtccaccctcccagcaacctcctgcttatggccaaacatatggcgcagcaacaggacctgatgggtatgctcaacagggctacccacagcagggtgggcaagcaccggccccgtacggccagagtgcaccagcagcacaaggctatcctcagcaaggcacacaggggatagg

SEQ ID NO: 37329 - DNA, 768 bp, Setaria italica
  Peptide Sequence Number=SeqID_103303
taagggattttcgagtatttatctaaaggaaggaacaaacgagaataagagaaaattgcttctaatttgttttatccaagtgagatatatggcataatattcttccatttttatatgaaaggcctttttttatttctctattccactccatttagatctaagaaagaacccaatacaatgaaattccactagtatacaaaaagataaatagatacaaacacaaggtctcaaaccttgttatagaatttgtgtttcaaagaaaagaaatatcatatatattcagcgaatgaaatagagtcggcgaatgaagcggattcattaacaactcaatttacagatcaaaaatgaaaaaaaagaaagcattgccttctttcctatatcttgtatttatcgtacttttgccctggggaatctctttctcttttaacaaatgcctggaactttggattaagaattggtggaataccaggcaatccgaaactttcttaactgatattcaagagaaaggattctagaaggattcatagaattagaagaactttttctcttggacgaaatgataaaagagaaaccgaagacacatgtacaaaaacctcctataggaatacacaaggaaataatacaattggccaaatagataatgaggatcatctccataccattttgcatttctcaacaaatataatctgtttggctattctaagtggttctttttttcttggtaaagaagaacttgtcattttgaattcttgggttcaggaatttttc

SEQ ID NO: 37330 - DNA, 590 bp, Setaria italica
  Peptide Sequence Number=SeqID_103304
gcacggcgagatcctcgtcggcgtcgacggcgccgtgctcacgggcggcggcgagatgccgtacaacaccacggaggacgccggcaacgccacctccttttcggggtacccgcagacggacctcctcacgcccatcgccaccgccggggacctctcgcagatccaggcctccgtcggcatcgtcggcacggtcttcgccgggcccgtcccgttcgtaccgctccccgccaagctctcgctggacaacccggattacgcgtgcgaggcggcgagaaacgtcaccgcggggatcctgtccacttgctgcgtcctcacgccggaggccgaggccaacgccacggtcatcgacgccaacgccaccgacccgaccaagaacttcctcccgcgcggcaccggcgacctcgtcatcacctacgacgtgctccaggcgtacccctccagctacctcgcgctcgtcacgctcgagaacaacgccaagctcggccgcctcgacaactggcggctgtcgtgggagtggcggcgtggggagttcatctactccatgaagggcgctcacccgtcgaaggtggacacttccggctgcatctatg

SEQ ID NO: 37331 - DNA, 527 bp, Setaria italica
  Peptide Sequence Number=SeqID_103305
aagaagttgcttcaggttcaggttcagcagcagcatcttccatgggacagaatgtttcctccagtagtccaactattctgtgtatacctctcatatgcttcattttcagcatcaacatctccttgcatatgttcctttaacttcataaacatccacttgtttatgcttgcaacatcctttttaccaagcgacttttttgttcggagagaattcagaaaatggtggggaagcttctgcaagcaagctagccttgatgatgaaccggttgcaggtaaattggtagatgcctgttctgtcacaggagcagtagtaggtgatggcttatctggcaatgtgttggtctgcttcagaacatgaatgtggcaagggttctgggctttgtagcagcaggccttgcagcactggaacgggcaccgggagcgagcgacgttgccgcactgaatgcacttgggcttgttgagaccccggaggttgggcttgggcatgtcgaaggccgcggcagggacaggaggcagcttctgtggtgt

SEQ ID NO: 37332 - DNA, 319 bp, Setaria italica
  Peptide Sequence Number=SeqID_103306
taattacggcccggaatgaactttccaccctctccacagctcggaacgcttccactggtctcaccccccagttccgatccaggcgacggacgcatgaggcgacgcgaggcggaacgaggtggcggcgcgtgaggcgacacagcggcagcgcgacgtggcggcgtgaggtgacggcatggtggcgtgggacatcttcaacggccaccaccgcgacgacggccgccgccttctcgccggcaagctgctgccttttcctcttctctccctctcgccttggcagatccatctggcgcttgataggggtcagcttgccgcctct

SEQ ID NO: 37333 - DNA, 1110 bp, Setaria italica
  Peptide Sequence Number=SeqID_103307
tggctcaaggcgctggcgtacggtgcgggggcgtggcggtggccggcctggcggcgctggtggcgctgcaggagcgcctcgtctacgtgcccgtgctcccgggcctggcgcgcgcgtaccccatcacgcccgcgcgcctccgcctcgcctacgaggacgtctggctccgcgccgccgacggcgtgcggctccattcctggttcatccgccactccccgacctgccgaggtccaaccatcctgttcttccaagaaaatgctggcaacattgctcaccgtttggaatttgttcgactaatgatgcagcggctacagtgcaatgtttttatgctttcttatagagggtatggtgagagtgatggttatccttctcagaaagggatcacatatgatgcacaggctgcacttgatcatctagctcagaggaaggacattgacacatccaggatagttatctttggaagatctttaggaggtgctgtgggagcagttcttgcgaaaaataatcctgacaaggtggctgctctgatactggaaaacacatttacatctatattggatatggctggtatcatgcttcccttcttaagatggttcataggtggaagctcatctaaaggtccaaaacttctgaactgtgtcgttcgctctccatggagtacacttgatattgttggagaggtcaatcaacccattcttttcctttctggattgcaagatgaacttgtccccccttcacacatgaagatgctatatgataaagctgtcgagcataacagaacttgcagatttattgattttcctagtggcatgcacatggatacctggatgtctggaggggaccggtactggagggcaattcaattgtttttggatcaatatgctccggaagttcagagtcatgatgccagcttcaaaagtgaaattgctgaggatggtgaagctgctggttgaccggaacatctggatcagacttctttttccaagaaaatgtttactgttgttgctgcaatttctatcaccaatgaactagctcactgcaacaattaattcaggcaattgttcggctccattctacccgaagaagctcaagttgtgaatatttttcgag

SEQ ID NO: 37334 - DNA, 2482 bp, Setaria italica
  misc_feature (2471)..(2482): n is a, c, g, or t
  Peptide Sequence Number=SeqID_103308
acagactagaagccgaggagaggggaaggagggggcggggcaagatgtttgacagcttgctcaactccaagttctacaacaaatgcaagcaagcaatcaagtgcacccggactcggctggatctgctgcggcggaagaagcaagccatggtgaagttcctcaagaaggacgtcgctgacctcctcttgaacggcctcgaatcgcatgccttcgcacggatggaagggttgatcgttgagatgaaccaagcatcctgctatgatatgatagagcagtactgtgaatatattgtgaaacagctcaacaacctgcagaaagagagtgattgccctcaggaagccttggaagctgtgtctactctaatatttgctgctgctagatttcctgatttgcctgaactgtgtgacctcagacatatattcacagagagatatgggagttccgtggagccttttgttaattctgagtttgttcagaatctccagaacaagtcatttactaatgaagagaagttgcaagtaatgaaaactgttgctgaagaattctcagttccatttgatagcaaggcactggaatggaagataacttgtgggccacaaaataagcatgatcttcagaagaagagctcaactaaacgggaggtagaagcatcagcacgaaatggaggcaaggttgataggcatgctgtgaatgaaagaaagtctaaccctgtgcctgaaggctatggacagaagcaggaaatgaagacaaagcccaaagatatccatgtcattcctgatggaattggtttgttaggcgagaaaagcaggaagaactactcagataaacttagtgagaaagggcacatggataattccctgcctcctttggacaagaaagaaaggaatgtccagaaagaaatgaagaaatatgacaaaaaggatgatcaccctcggagggaactaaggaatgcagaggagttagaccttaatggcttaaagaaacaagatggtggtgtggtgaaaccttctggtggccctgatcgtagttggggacatgctgatttggggcttaaaactctgggcctagaaaagcaagaaattgattcaagtcgcacgttgaatggtaaaacagtgaataaggctcctccttattctaagccatacagagcaatgggtgagatgtctgctgaagaaaattccaacagtttgtacgatagacgaaagcatgcaggagagtttggacagccgatgcgagataggcagcatgtgccagagaaggcagccagtatgcggcctccttatgttaagccaagttttgagaagcatattggtgctgaagaaataggccatctgaagggtgaacaggtttatgaacctgtttctgtcagaagcaggaaaccacctgcacgtgttgatgattatgctggaatggcttatgaggaaaagatggcgaaccaagcacctgatggccgaagaagacattcaagcaagaggaatggttcctatgatgattatgaccagaaagtaggtcatgtggtacccctagaaggcatgggggtcaatgatatcaacaatgcaagaccttttcaccaaatccctagcgagcgaagaaagcacagaagcaggcggcatggatcaacaagtggcagcgactacaatggggccattgatgatcgcgagtcggatgaggatgaggcgaacaccgcaattgattttggcaatcttctgccccgagcccctagttcacataggaaacacaggagtcgtagtgctgatccccgcaagggaggccgtgatgatgaagaaaggatgatggataagctcctcatgcattacagcaagaaaggtctagacagggaggagcgcaaagaaagagtgaaatgccggatcccccggcctcgagctgatcaacatgctgatggagctggagaactttctaacaaagaaggggcatctgctcatcgccctgaaagagctgtatctctacctccagaatctgcaagcccaaaggcgaagccgaaggcccctgttcggtccttgtccatgcaaccagaaatgtctagagggaatgtgcatccgccggattttgatgaattggctgcacggatcagtgcactgaggaacgcctgagctgccacaatactgtcttgagcatggtctctgttctctcaggaacttctatcacagaatctgtaagctgagtgcctggggttactggattgaagaggacatttgggatgtggttgcctgcttcctcgcaacattttctcatggtggcacccttgttttgttgctctgagtgtaatcttggtagagtattggaagggaagttaaaatggcaattcatagggataccataccataccataccataccataccacattgatttggatgtggttgtttgttgtactcatagaacaattgctgtcgctgtacagaagccattgacgaggctataatgatataagtgaattttactaaaaaaaannnnnnnnnnnn

SEQ ID NO: 37335 - DNA, 946 bp, Setaria italica
  Peptide Sequence Number=SeqID_103309
cgggtcgtgccgccatgaagcccaaggcggaggccgcgaacgacgaggcggccgcggcggtggaccagctcctcgaggcggccaagcttgccgacgccggtgacgcgttcggcgcccgcgagatattggcgcggctcaattatcggctccccgccgcccccacggccggggatgccactcctccgctcagccttctacttcaaggaggctctgcgccttgcgctctccccaaccggcgagacccccgcgccggcggtggcgacgccgtacgacgtggtcctcaagctcggcgcgtacaaggccttctccgaggtctcccccgtgctccagttcgcgcacctgacctgcgtgcaggcggtgctggacgagctcggcggcgccgggcgcatccacgtgctggacttcgacatcggcatgggcgagcagtgggcgtcgctgatgcaggagctcgcgcagcgctgccccgcggcgaccctcaaggtcaccgcattggtgtcctcggcgtcgcaccacccgctggagctgcaactgatccacgagaacctctccggcttcgccgccgagctcggcgtgttcctccagttcgcgcccttcaacatcgacaccctggaccccgcggagctggtggccattaccgggggcgacgccgtggccgtccacctccccgtgggctcggcgcacgtggccgcaatgccggccatcctccgcctcgtgaagcggctcggcgccaaggtggtggtctccgtggaccacggctgcgaccgcacggagctccccttcgcggcgcacctgttccaggcgctccagtcctgcgtctccctgctcgagtccgtcgacgccgcgcgcccggacggcgacgccgtcgccaagatcgagcggttcctggtccagcccggcgtggagcagcgcgtggtggcgtcgccaccgcgtcggcggccttggacaa

SEQ ID NO: 37336 - DNA, 399 bp, Setaria italica
  Peptide Sequence Number=SeqID_103310
gtcgtgatgtcatgtatcgacgtttagcttccgctgttttcctttgacttcgacccatgcaaatttcggtctgaatttcaaaaactctgatgtaatagattgtggaactatattgtcatgatggaatgttgtaatctctgtgctactcaccttcgtgtgagcgatgcttctcgatcctgttatgtggtttatcggaggaaatccgacggtcgaccaagttgacttgcttaaagtgcataatcgtgtgtcaggcgacttcaatgcattttaatcaggttaatttgggcggttccgccacagaacatctccccctccctcgtttcacgggcctcgtactctccgccattttgcctcctaggaagcgaacgcgcgtgacatcctccacatacggtccagggc

SEQ ID NO: 37337 - DNA, 250 bp, Setaria italica
  Peptide Sequence Number=SeqID_103311
acgtggagtctggggatcccccggcgcggcacccaggcgtgcggccagtgctcagcacgtcgtcctcgtcctcaccgtcctccgtgctcatcagcgcgtcgatctcgtccgtgtcctctttctgccgaattgaggcagcgccgccgtcatctccgcagccgtagtaggcgctcttgccggcgtagttctgatcgtagccgtagcagcagtggtcgtagtcgtacccgccaccggacgagccgatcttggg

SEQ ID NO: 37338 - DNA, 364 bp, Setaria italica
  Peptide Sequence Number=SeqID_103312
caaattacaatcttccggaagcaccttgtggcgatttgacgacacatttattctgtcacttgtgtgccatatgccaggagtacagggagatccgggagagaacaggcagtagctcatcttcagctcctaacgtgactccacctccagttcagacaatggatgagctttgatactaattgattgtatgaatgtaatctccctgaactgacagatcattggtgagtgggtgggtgtgacctggtgctgagtttgcctgccagcgtggcatatttttgttcttgtgctcccggagtgtttctatgaggtctggtttcatagagttgttgtaaaggtaacttttgaaatagtgaaccactgacagttc

SEQ ID NO: 37339 - DNA, 779 bp, Setaria italica
  Peptide Sequence Number=SeqID_103313
tccgctccacgcctcctccccctctagctctcggcctttctttcatagcggcgacgagagggcgagtggcgccgcccttagctaggtcttcgtcgggcgcttcgccagcgacgagcacccgacagggaatcagggatggccggaaaaggaagctatgttccaccgcagtatattcctttatacggcctagatactgaagaggatcgtgttcctgctgtagaagagaaccatgccacaagccataataataagctaagccgggatccaacacaatggtcttctggcactctctgatgtgacctcttgtgttttgatgatccacagagctgttgtattggtgcaacttgcccctgtttcctttttggaaagaacgcacaattcttgggatctggaacccttgctggatcatgcactacacattgcatgctttggggccttcttacaagtctctgctgtgtgtttactggaggccttgtattagcagttccagggtctgctgttgcttgttatgcttgtggatatcgcagtgcactaagaacaaagtacaatcttccggaagcaccttgtggcgatttgacgacacatttattctgtcacttgtgtgccatatgccaggagtacagggagatccgggagagaacaggcagtagctcatcttcagctcctaacgtgactccacctccagttcagacaatggatgagctttgatactaattgattgtatgaatgtaatctccctgaactggcaggcaaactcagcaccaggtcacacccaccca

SEQ ID NO: 37340 - DNA, 436 bp, Setaria italica
  Peptide Sequence Number=SeqID_103314
tcgggtcgggtggcgggtagtcataagccataacagataggacagtggagatgacgagcattggtggctcaagagttgggtctgctgtgcacacaaatatgtccaccccgggaagctcctcttccttataccttcgggtgagccggtcggggaaggcgcggcggtagacggggctccaccgcacggacagcgtcagcacccagtagaaaccgaaccagagctcggcggcggagagcccgatccacgcccaccaccgcgcgccgctgctcctcggcggcaggtgcgtggccctgtacagccataccaggaggagccccgcgaggaccgtgcccgcgaacagccggtacgcgtacgccgccacccgagctggtttctccgtcgcgaacagcggcggccggccgccgctggatacgctgctcccggccatggccaccgc

SEQ ID NO: 37341 - DNA, 1412 bp, Setaria italica
  misc_feature (1)..(20): n is a, c, g, or t
  Peptide Sequence Number=SeqID_103315
nnnnnnnnnnnnnnnnnnnngttcaggcatttgaattagtaagttatcattttcccttgcgacaaacttcaaacgaataagtacctgtagattatgaacagaagctatctagacaagcagcatacaggctcaactccaggaaaacgaaacaggagtacatcacatgtagcatagtacaggtcacaagttactctagcagacaagcacaatatcatacaaagcttccgaggcacaccatccatgacaattctcagttggtttgctcaccgtgattttcgctaaacggcaatctgttcatcaggattagctccagattggatcggcccctgaacggaatctgtcttcatctcagctccttgtagctgccctgcagctgactgtctcttgagctggtttggtgctctttagctgcctcgcaggtgatgagcttgctgcggcatcaagcgtaccagtttcctctgatggcaatctggggagtgacttcctctggggcttctttgctgaatgtgatggagttgattttttcacaccattttgagaaaccttttcctcgaggctcaaacgggcaggttggtccggcgtggtattttcttcagcctctgatgtggacttgtttttagaacgaccaagctttggtgattttgctctagttggggggatctttttcagttcaaccttcgcaggagttggttccttgtaaaagcttggcattggtgttgccttgaaattcaaactctttcgcagcattttgagttctgcttcttcattttcctttgatttagcttgcaaattgcttatttctaactctcgtgcatgaatcttctcctcaagcttcgaatagaactcacgccttttttccgatctctcatcgcacttgaaggtgaagccatatgaaggagtgctgccaacttttcgaggctttgtactctcacagttggactcttcttcatctctcttgatggaagagtgctggcctgatgacttttgagttttgcttttctccttggagtcatccagcaatgctgcatccttggacgatgggtgagactcattcttgacagctttattactaccgacaccagcatcaccattggatacccgggcaacggctgccttaggaagagaagtattgggagttcttctccttgcctgaccttcatctccactccttgggctcttagacttgacagccttaggtccatgacctttgttcccattggaaagacgaggcttcctgctctccgggggcgaggtggcctccccgccggcctcttcgggtgggttgatcacctcgctctcccctgagttatcctcattgcctttcccctcatgctcttcctcaccatggacccctaagctaggcaatgcaggcttcccactggccccatcctcgacggccaccgccggaccct

SEQ ID NO: 37342 - DNA, 248 bp, Setaria italica
  Peptide Sequence Number=SeqID_103316
ctacaagatcaacgtcactagttggaagagccaagccagtggcatttgagccaaatagatttgtacgggagcgaggccacagaacctgcaagcaccgtgtgactcttttgacagcccagtttatgtagggcctcctcaccagattaccagcagcaacctgcttacagaattgatctatttcttcatgtagagcattgtgcatcgaagagagggatgtcttgtgagatgagtccgtttagcatatcagg

SEQ ID NO: 37343 - DNA, 372 bp, Setaria italica
  Peptide Sequence Number=SeqID_103317
ttactgcagcaagctaacagagcaacgcgcaccgccgcggccgcgcgcctacaaataccggcgcgaggttctcctactccttccgcagttgccgcgagcccgtgagcatccggagcacgagcgcaccaccaccgccaggcaccagcgccgcgtcgaggatcgacgccgccgtacttgtgcaatggacgggcagccgggcaacggtggaggagcgggggggagcgacgcggtggcgagggcgttcgtggagtactactacaacacgttcgacgccagccgcggcgcgctcgccgcgctctacggccacacctcgatgctctccttcgagggccacgccgtggcgggcgccgaggcgattggccggaagctggc

SEQ ID NO: 37344 - DNA, 546 bp, Setaria italica
  Peptide Sequence Number=SeqID_103318
ctagagaatattgaagtgacattttcctactggcatcagatatctggcatgataattcctgaacattcttcgtcttctctgcaagcaaacatcgaagatgctggttgtcacggtacagcgaatcaattctactattcaatctgctcctttcatcaagtgcatcactagcactgcagattgtaggtgctgccattccattggacatgatttggtcaaatcttaaactagtgcgactgaatttcttccgtaagggctcgaattctacatcatacttaagagccaatgaccatttctctcgtttgaatttgaacagctcttctgtttttctcttgctaatccaactcatgcagccttcttaatttactgatctcagatctgaagtagttaagcatttcttgtctaggcatacccttcagatgtcggaagtcagatttttctgaaataacttcactgagagatatagatttctgtgttgcagaattcttgttttgctcagaggaagagtagggagtgatcctgatgtgttattctttctagaaaaagctg

SEQ ID NO: 37345 - DNA, 601 bp, Setaria italica
  Peptide Sequence Number=SeqID_103319
attctttcgagcagcaatatggcccaaatggttgggcctccgagtttgaacagcatcagtctcagatggccatgggtcagatgggaggagcgaacatggccagcctggctgctatggagcaatcccgtatgcttgcacaaacattagcaagtaataatgaccccaagtttcagaattctaagttcttccagtttgtttcaaagatgagccgtggtgaacttattatagaagataatcaagtaaaacaaggttcagcatcccaatccaatggctgggctgatgaatttcaaacacagtacaatgctaatgcaaacacatgggcggatcagtttgcacatgaagagctttcacaaggggcggataagtgggctagcgaattctctagtcaacataatcagggtgctctaaatgagagctgggttgatgagttttcaaaattaaatgtcactgatgaatgggcagaagaattcagtggaggtggttttggcgaaagctctgctgatccatgggcagatgagttccaagaacagttgtcatccttaaaacaaagctcgggtgcttctcgaggggtttatgttttttctgagatgaacccttaata

SEQ ID NO: 37346 - DNA, 549 bp, Setaria italica
  misc_feature (98)..(98): n is a, c, g, or t
  Peptide Sequence Number=SeqID_103320
tatttagttcaagtaggaaattaatcgaacagcaaattatatgatatcttgaaagggtttaattttctgcgcaatttctgcagaattggagcaggganaagcattaagatatctttataggtggcttcagaatcatccaaatatggggccttgcccctccacagtctactgattcactttatggtccagatgttgttagattgtttaatgaagcagctcagatgtcacctgaagatgccgatgtccatatagttctgggagtcttatacaacctatcaagagagtatgataaagctatagcttcatttaagacagcactacagctcaaacctcaggactattcactctggaacaagcttggtgcaacccaagcaaacagcatccagagtgctgatgcaatactggcgtcgaggttgcgggcatcacatgcagcaatcatgtcagctcgtgacgcattgctaagagaaatcctcaagtactgccaggcattgtcagctttcggattcatcgcaactgcccttacatagtaccgaatggaatcttcataca

SEQ ID NO: 37347 - DNA, 2547 bp, Setaria italica
  Peptide Sequence Number=SeqID_103321
ccttccctcacctcgtggcggtcgcccctcgtcgccggcgacgaccgaagcgggcgcccgtagcatcgcacctccggcgtcggcgagcgcgcccgtccggtggagggggcggccgagatggcgatgcggcacctcatcacgggccagaacagctgcgccccggacggcgcctcgtcgtccaaccccctcaacgccttcgccaacgccgtcctcggccagtcctccaagacgcggtcaataaaggaacttcctggctcagtcagtgttccatctacatctgattttggcacagctgctcccttgtcaaccatcccaggttcagatgatgagttcaaacaagatcaacgaccccttgcacggggtgccgacttcattcgtgggggtcctgctaatgattggattgaatcttttcgccctcctggggttcctgaatttggagtaacagaatcacaagttgcagaatttgaccaaatctataacaatacagggacaaccattggaccgcccttggatggtccaccacaaagggtgttgtctggtgtcttgcattcttttcttgcaagtggcagagctggtgtgccgtttcaacctgttccagtaccagctcttggtttatctgaaagtgacaaacaatgcatacgtgatcgtagctgcataatggcacgacatattttggctgaccaaccagaagaatatatacaggctcaggtcaataccttgttgcattcgcttgatattgacaaccgtatgagaggccctatgcatggacaatacccagagctggagcagtactggaatcagtcccaaagttctatgggacctgcttcgatgcataatgctgcagataaatggattaccgagtttggaaatcaaaataataacccagaaagttgggcaaattctttcgagcagcaatatggcccaaatggttgggcctccgagtttgaacagcatcagtctcagatggccatgggtcagatgggaggagcgaacatggccagcctggctgctatggagcaatcccgtatgcttgcacaaacattagcaagtaataatgaccccaagtttcagctttcacaaggggcggataagtgggctagcgaattctctagtcaacataatcagggtgctctaaatgagagctgggttgatgagttttcaaaattaaatgtcactgatgaatgggcagaagaattcagtggaggtggttttggcgaaagctctgctgatccatgggcagatgagttccaagaacagttgtcatccttcaaacaaagctcgggtgcttctcgaggggtttatgttttttctgagatgaacccttatgttggtcaccctaatccaatgcaagaaggacaagagctcttccgcaagggcctcttaagtgaagctgttcttgctttagaggctgaagttttgaagaatcctgataatgctgaaggttggaggttgctaggagtaacacatgcagaaaatgatgatgaccaacaggccattgcagcgatgatgcgggcacaggaagctaatccgacaaaccttgaagttcttctcgctcttggtgtcagtcacacaaatgaattggagcagggagaagcattaagatatctttataggtggcttcagaatcatccaaaatatgggggccttgcccctccacagtctactgattcactttatggtccagatgttgttagattgtttaatgaagcagctcagatgtcacctgaagatgccgatgtccatatagttctgggagtcttatacaacctatcaagagagtatgataaagctatagcttcatttaagacagcactacagctcaaacctcaggactattcactctggaacaagcttggtgcaacccaagcaaacagcatccagagtgctgatgcaatactggcgtatcagaaggctctagacttgaaaccgaactatgtccgtgcatgggctaatatgggaatcagctatgccaaccagggtttgtatgaagattccattcggtactatgtaagggcagttgcgatgaatccgaaagctgacaatgcctggcagtacttgaggatttctcttagcaatgcgtcacgagctgacatgattgctgcatgtgatgcccgcaacctcgacgcccttcagaaagagtttcctctgtgagtcttggtactggacagtagctgttgagcagaacctcgtccaggaaggaaagcagcaaacttgcaatacgcatgctgttattggctgcactcatggaaatggaactggaatccaatagccttttgtttttctgattcttgtttgatgtatgtcgattcttctatttaacaagcaagtggggatgtataggaagtggggaacaacactgaatcgtagatgtgaaataccatgtcgattggcaaggtaatggtggcaaaggggggacaatgttagtagttacacatttacagaaggcacagcaggaataaaaagaatggtcgaataaaaaatgtcctttatctcgagggtggtacctctgcctgttcaatgaagtaatggaaatatatctcctttatt

SEQ ID NO: 37348 - DNA, 1094 bp, Setaria italica
  misc_feature (1)..(37): n is a, c, g, or t
  Peptide Sequence Number=SeqID_103322
nnnnnnnnnnnnnnnnnnnnnnnnnnnnnnnnnnnnngtttaaggtaaagacacttttgcattttcacagtaggcataactactaacaaagaatagaacctagagaaagttggaatggcccaaatgtgaatctacggttacatttcagatgggcaaaatatagtagctactactaaagtataagttacaaaagcagcgcacagctgaagtcaaatggaaaaaatcaagagctccaattcacgaccaactgctggattagaacagccaatatggcaccaatggagatattcattacattgacaatatcgttattcagccattcaaaaccttccttatcttgtaatgtcgccccaatataactctcaccataatttgcaatctgggacgcaagaaggcatactgcaacttgtgatatattcacctgcccaagaagataaccaacacttgcaagaaacacagatcctagaattccagcaagtgtaccctcaatactgattgcaccttctgtacctctaggaacaaccttaaatgttgtcaccaggtatctattctacaaaagaaccaagattgagcactcagtactgggcatctactgtgactccattttgacttacattctacaaaagaatgtaaagtctacaggaggaaatcttgaaaactaaacgtacgtcgttcttccaaaagccttccctatttcactggaaactgtatcacttagtttagtacagaaactggcaacaaagccaagtctccagagctcagagaatgttgcaccacctacatgatatattgaaagtagagcacaaacacaaccggcagcgctagaaccaataacacttccaggccctctccttcctcctcttttctcagccactccttgagcttccttctgttttatcttcagcttagttactgctgtacccacgacaaagtaggcgacgacgaggaggaaccccgggggaccaaacgcgcgccacgtcagggtgccgaggaggtatgaggcagcgacgcccgaggcggagaggccggagaggagcaccggcgatccggcgacgaatacggcgaggttggcttcctccgtcggtcggtaccgt

SEQ ID NO: 37349 - DNA, 416 bp, Setaria italica
  Peptide Sequence Number=SeqID_103323
ccgctgcttatgaggtgcttggtgatgaagacaaacgtgtaaggtatgaccgtggagaggatatcgacgagatgaatatgggaggcggcggcggcggcggcttcaatccttttggggaggcggccagcagtacacgtttcatttcgacggtgggttccccggcggcggcttccctggaggtggaggctttcagttcaacttttgataagctgtgttaggcacgatgacagtcatattgttttgccacagtggggttgttataggaactcttagtggtagctgataactattgttaggaaggcagagactgttcttatcattgtacacaaaatgttttgagggcagctacaatttttcccatacatccgctgaatgggaaaatggaaataaagtaccacattatttttcaagaaaaa

SEQ ID NO: 37350 - DNA, 1112 bp, Setaria italica
  Peptide Sequence Number=SeqID_103324
actacgaaacggaacggggatgaagacgagaaggagaagcagagggagcgccaaagctggagacggagatcatggtgcgggcatgggggcgggcggcgctgcctccgctcctcatcctctgcctcctccacctgcagtactccccgctggtcgtcgcccaagaaggtcaagaaaaagaccctgcaactctgttcgcacgagcctcggagatgatgaacctgaggaaatatgatggggcgcttggcctgctaaatgctgtgctggaagttgacccaaatcattctgaagcttacaggcaacgtgcatctgtgcttcgtcataagtgcagatacaaggaggctgagagcgactataacaaatacctggagctaaatcctgcgactgcttcagtggaaaaggaattatctcagcttctgcaggctcagaattcattacagtctgcttatggtcagtttgattccggagacttttcaaaagtcctggaatacatcaacaaaattgtgctcgtcttttctccaggttgcttaaaggcaaagcttctcaaggctaaagcgttgctagcactgaaagattactcaagtgttatttcagagactggatttatcctaaaggaagatgaagacaacttggatgcgctgctactacgtggtcgcgcctactattaccttgctgatcatgatgtggcctctaggcactaccagaaagggcttcgtcttgatccagagcattcagatttgaagaaagcatatttcgggttgaaaaatcttttgaagaagactaagagtgctgaagataatgctgccaggggtaagctacgtgtgtctgctgaggactacaaggcagctctagcaatggatcctgaccatactgcttataatgtacatctttatcttgggttatgtaaaactctggttaaacttgggagaggtaaggaggccatcagcagttgtactgaagcactcaacatagacagcgatcttgttgatgcacttacacagagaggtgaagctaaacttctctcagaagattgggaaggagcggttcaagatctaaaagaggccgccgctgctgccgcggtaccctatggccccggccgggcggctcctcgcggt

SEQ ID NO: 37351 - DNA, 935 bp, Setaria italica
  Peptide Sequence Number=SeqID_103325
tttgtttagtttactttggtttacttaaatttccttagatttgaagaaagcatatttcgggttgaaaaatcttttgaagaagactaagagtgctgaagataatgctgccaggggtaagctacgtgtgtctgctgaggactacaaggcagctctagcaatggatcctgaccatactgcttataatgtacatctttatcttgggttatgtaaaactctggttaaacttgggagaggtaaggaggccatcagcagttgtactgaagcactcaacatagacagcgatcttgttgatgcacttacacagagaggtgaagctaaacttctctcagaagattgggaaggagcggttcaagatctaaaagaggccgcccagaaatctccacaggatatgggcatccgcgaagcacttatgagagctgaaaagcagcttaagttgagcaaaagaagagactggtacaaaatccttggtatttcgaagacagcatcagctgcagagataaaacgtgcctacaaaaagctggcattgcagtggcatccagataaaaacgttgataaccgggaggaagcagaaaacatgtttcgagaaattgccgctgcttatgaggtgcttggtgatgaagacaaacgtgtaaggtatgaccgtggagaggatatcgacgagatgaatatgggaggcggcggcggcggcggcttcaatccttttgggggaggcggccagcagtacacgtttcatttcgacggtgggttccccggcggcggcttccctggaggtggaggctttcagttcaacttttgataagctgtgttaggcacgatgacagtcatattggtttacttcagtggggttgttataggaactcttagtggtagctgattaactatttgtttaggtaaggtctagtagtacttgtttctttattctatttgttactact

SEQ ID NO: 37352 - DNA, 215 bp, Setaria italica
  Peptide Sequence Number=SeqID_103326
tagaatgcgcagagagtccggcgaagtttccagatgtttcactcttgataaccttctctaatttccggtcatacatatgatggtaagcagttgggcacacatagcatctgtttcttctgcttaccatcatatgtatgaccggaaattagagaaggttatcaagagtgaaacatctgaggatagttaaaagagcaaatgcaaagtttccagatgtt

SEQ ID NO: 37353 - DNA, 252 bp, Setaria italica
  Peptide Sequence Number=SeqID_103327
aactatgggctgatgcagttagttaacttcatagctgtacactacatgtggggttcaaagcaatatatatctttgtggcgtgagttggacaatgactctattaagataaaatatgatgaacatctgtctgaatggtttgaactcaatctagagaatggagcccagataaatgatttttagggcccattgcagttttctccaatgaaacgtaggtgccacccttctctaaggaagactaccctactaaattgt

SEQ ID NO: 37354 - DNA, 637 bp, Setaria italica
  Peptide Sequence Number=SeqID_103328
atctagagagactggatgacgtacgcatgcgcccattgactagtggtagataagtgtaacctctcacgctactactgataagtttcagctctgtctataccaaactcttagcccgatcgagagagtttcaccaccaactccgcgaggcctaagattgttaccgcctctagatccttatatactgatttaatcgatgttttatgattcatttaagtaaagtggatcacgataaatttccaaataatggaatacattaaccatgtacggctactagtacttggtgacacaccatgctactcgatctagcttcattctctaccaaccaactaatgcttatacaaaattcaaacctactttatgttccgaccaagtaaatccagttgcctggataaagtaacgtttcagaattcaattttgtcgcggcacccttatctacactaccaaagtggtatagtacacaccaaagtttctttttaggtaggggaaagagaaacaatctattctccgcttgttttgcacgtacgtggaatcaaaggaccagcgacaatttgagtggagctaggccagtggctggcggtgggcgagcaggggatgggaattggatcacgcattcgcgcgccgatcgccgtcgcgaaag

SEQ ID NO: 37355 - DNA, 375 bp, Setaria italica
  misc_feature (364)..(364): n is a, c, g, or t
  Peptide Sequence Number=SeqID_103329
aaggattgtcaagatcaaataaaataccagtggtagtgtccagctcagatgaatcaataagtactaatgtagcactgaaacatcaatctaaaggtggcaatgagataaaggtattcacaaaaagccttactcacatcaaaactatggcaagtgctttggaggaatcacaacttattggtcggcagaaagaaaaaactgatatcatcaacctcatttcaaatccatctaatcaagagcttgcggtgatctcagtatggggaatgggtggtcttgggaaaactactctgatcaaagatgtttatgaaagtcagaagcatgttggtgtgttgagaagcatgcttgtgttacagtgatgcgccctttnattcttaagga

SEQ ID NO: 37356 - DNA, 268 bp, Setaria italica
  Peptide Sequence Number=SeqID_103330
aaggtcgtactcgtacgccttgtccgagcgtttagctgcgtgcagcgagctccagggatcaattcaaccgcacgcaggcggttccgcggttggaaaaccttgcctgcgttctgaagtttttccatagcatgtcagactgagcggtaacagtgacagaatcatattgtggagaaggcgtacggatacaatggtggtcttccgggacatagcaaatcaggcccttgtttacttccctccaaaatcccaactttaacaccatgcaaaaaag

SEQ ID NO: 37357 - DNA, 224 bp, Setaria italica
  Peptide Sequence Number=SeqID_103331
aagatgaagaggcggcggcgctccaagaaccgcaaatcttctggacccgcggctcccgccgcctcttctcggtcaggagaacccacctatcctcatagatctggagaagccgccgcctcatctgaccgatattgagaaagggcctcttatgcatcagctgctcctgagaggatgcagcatcagaggagtgaaggcggctcgccatcatctggtgaaagaaaccc

SEQ ID NO: 37358 - DNA, 275 bp, Setaria italica
  Peptide Sequence Number=SeqID_103332
ctcggagcactctctctcttctcgttcgcaggaggtcggaccggggcgccgccacccccatcggagagccgaacgttgtctttcctgtcgtcgcaggggtcggggtggggcaccaacgctcgcatcgaaggtaggggccggcggtggctgtcattttctagtgattttttggggtattgtcgttcgtaagatttcagtgcaatttgaggcaaatttcattggcaaattagtgctaggatatttttgatcatgttcaaggaggtcccctagcgaat

SEQ ID NO: 37359 - DNA, 466 bp, Setaria italica
  Peptide Sequence Number=SeqID_103333
taattttgggtctctgtatcagagcctctgatgcatgcacctgaccggccaccaccccacccgtgcgtcacatggctggtggcaccaccaggctgagctgatcgatccatctcctgctcccggccgggcggatcagagcgcggggaggcggaggtgtcagccggggcggctacctccgtgatcgtcatccctttgcttagtcactgttcttatctcctcactacctcttttgtaaagtcaaaatgatagtgttaaaccttgagcttcgaaatgatagctttttccatcgcaacttgggttacctgtcgccgccgcgagtgtcctactccgagctggcctggagccttgacggcagctttctgccgactcttatcacctcctgctcaacgtgatggcactgtggcagagacacctgctgatgtcttctgcatctgatgtttcagcgatctagcagtagcatctacag

SEQ ID NO: 37360 - DNA, 392 bp, Setaria italica
  Peptide Sequence Number=SeqID_103334
tttggagggtgaatcgcgcttggtgccaatgaacagtgcttgccggtcattttatcaacttccgatgggtactattcttctcaagcattcgttgattttggtttccctaatatatttatttctcgtgagacatttggttggacaccacaagaagctaagctgcatatggtttctgaattcttcagtgaacaggagtggaaagttgttgatgaggttcttggaccaaacccacgacaattatctgagatatatatgctgaagcaaaaagcgaatagaccagaggcttttcatgacaggaatattgaggaaattattgatacatacctggcacatttgcaagtctccgtcgtgaatccagcaatggagacagcattacaatgttgcagaagttt

SEQ ID NO: 37361 - DNA, 413 bp, Setaria italica
  Peptide Sequence Number=SeqID_103335
ttgttgaaccaatgatagctatatgattcagaaccattctgatataggttctataaatacaagttaactgctcaagcagaaaatgcaatatgcactgctaacaagtagttagagaactccagctagaacataactggtagtaagaatgagttttcactgatacaataacatcaatatatcaggacaatgtcacaaaaaatcagaattctgcgcgaaggaaaaaatggacaagattgattcaatgactacataaatacttatgcatgtaactcaacaagtggatcaaataaagtcggtaggttgttcatcatccggcaatcgtagactcagtctcatttctgtttctttctcgacaaaaagggtcgcttcctgcttgccattccaattgaaattgcgctcacaataattcagac

SEQ ID NO: 37362 - DNA, 373 bp, Setaria italica
  Peptide Sequence Number=SeqID_103336
gccgtcttccatgtggacgcgaccaccgccgccgcctccgggagcgacgggtccttcctctccctccaccgcctcgccgccgagggcacgaggcggctcctcgcggcctgccgcgcgtccggcgtggggagggtggtgtacacaggctcggccgacgtggtggccgccggcgcccgggatgtggtcaatgccgacgaggactccgcgccctaccctgacaagtttgggaacgcggtgagcgagctgagggcgcaggtggagatgatggtgctgggtgcggacggggtggacgggatgcggacatgcgtgctgcgcccgagcaatatgttcgggcctggcgattcgagcctgctgaggtttgttgctggatatg

SEQ ID NO: 37363 - DNA, 332 bp, Setaria italica
  Peptide Sequence Number=SeqID_103337
acatacaggagaaccagaaccaaccctatccctgctatatcagagattttcttctttgcttgtatttgtacgcagtatacactatacagacatattatgctttagtttcatcatccaaaagaaaagaatggaaaagaaaacataaagatcaggtcagaacaaactataaaacctatcatatgaatccacgacgttcacaatgaacagaggaagaattgcagtatcctatccttcatcttgatccaaagcatccaatgcctgatataataccttgatggaaacaaaattcgtgccagaaatattcagtttcacggatcacaacggtaattact

SEQ ID NO: 37364 - DNA, 788 bp, Setaria italica
  Peptide Sequence Number=SeqID_103338
ctcccttacttggatggccgattgttgtttattctagtcggaatgatgggttcaggcaaaactactgttgggaagatattagccgaagtattaggttattcgttcttcgacagtgataagttggtagagaaggctgtcggcatctcatctgttgctgagatctttcagctccatagtgaagcattcttcagagataatgaggtatatatctgtttctctaatgatatttatttaaattttccttattaaaggttgaaggtgtgggaaaagactcccaagtctgcaaggcattcgttcatctttctttctaggaagatcgaattggcaattccccgcctcagatttaatgctgtaatccggtagaggtctgacagcatcaggctcctattcaagtacctctatacctgactaaccaacttttctgatatcctcttgtttcattcgacttgtcaagagtgaggtcctaagggatttgtcgtcaatgcatcggttagttgttgcaactggaggtggtgccgtgatccgaccaatcaattggagttacatgaagagagggttgactgtgtggttagatgttccactggatgcacttgcaagaaggattgctgccgtgggaaccgcatctcggcccctcttgcatcaggaatctggtgacccatatgcaaaggcttatacaaaacttacatcactttttgagcaaagaatggacgcatatgctaatgctgatgccagagtttcacttgaacatattgcattaaaacaagggcataatgatgtcactatactta

SEQ ID NO: 37365 - DNA, 398 bp, Setaria italica
  Peptide Sequence Number=SeqID_103339
aatgatgggttcaggcaaaactactgttgggaagatattagccgaagtattaggttattcgttcttcgacagtgataagttggtagagaaggctgtcggcatctcatctgttgctgagatctttcagctccatagtgaagcattcttcagagataatgaggagttacatgaagagagggttgactgtgtggttagatgttccactggatgcacttgcaagaaggattgctgccgtgggaaccgcatctcggcccctcttgcatcaggaatctggtgacccatatgcaaaggcttatacaaacttacatcacttttgagcaaagaatggacgcatatgctaatgctgatgccagagtttcacttgaacatattgcattaaacaagggcataatgatgtc

SEQ ID NO: 37366 - DNA, 830 bp, Setaria italica
  Peptide Sequence Number=SeqID_103340
ggaatgatgggttcaggcaaaactactgttgggaagatattagccgaagtattaggttattcgttcttcgacagtttagtaatgttactggcctattcctattgcagtgataagttggtagagaaggctgtcggcatctcatctgttgctgagatctttcagctccatagtgaagcattcttcagagataatgaggtatatatctgtttctctaatgatatttatttaaatttttccttattaaaggttgaaggtgtgggaaaagactcccaagtctgcaaggcattcgttcatctttctttctaggaagatcgaattggcaattccccgcctcagatttaatgctgtaatccggtagaggctgacagcatcaggctcctattcaagtacctctatacctgataaccaacttttctgatatcctcttgtttcattcgacttgtcaagagtgaggtcctaagggatttgtcgtcaatgcatcggttagttgttgcaactggaggtggtgccgtgatccgaccaatcaattggtactagaagtgataaactaccctgaggttgagttacatgaagagagggttgactgtgtggttagatgttccactggatgcacttgcaagaaggattgctgccgtgggaaccgcatctcggcccctcttgcatcaggaatctggtgacccatatgcaaaggcttatacaaaacttacatcactttttgagcaaagaatggacgcatatgctaatgctgatgccagagtttcacttgaacaataattagacaattaaaaaacaaagggacaataaatagaatagtacaactaataacttaa

SEQ ID NO: 37367 - DNA, 1289 bp, Setaria italica
  Peptide Sequence Number=SeqID_103341
cttctctcattgccctgctccgctgccctcctcgcccgctgccgccgccgccggcggccaccgcccgcgcgctctccgttaccccggcgatcgatggccggccaatctaacaccagctccaccaatcaggtctaacacgaataggcgccctcgcctgagtgcggctgctgaaccacaggcccggccgtctcctcgtcaggtcgggtcgagaggagatggaggcgagcgtgggcatcggggcgcggccccgtatctgggccgggctcgtcgagaagccgcatggcggcgcttactccgccagagccccggccttaaggttcacggcggagaagctgccgcagaggctggttctgggaaccgatccgtggaggggcacggatcctggactgattcgtgccgcaaagctgaaagcatcttgctgcaagaaatcggcaggtactgaaaaagtccactactctgctgatgaagctctcatactgcagcaaaaagcccaggatgttctcccttacttggatggccgatgtgtttatctagtcggaatgatgggttcaggcaaaactactgttgggaagatattagccgaagtattaggttattcgttcttcgacagtgataagttggtagagaaggctgtcggcatctcatctgttgctgagatctttcagctccatagtgaagcattcttcagagataatgagagtgaggtcctaagggatttgtcgtcaatgcatcggttagttgttgcaactggaggtggtgccgtgatccgaccaatcaattggagttacatgaagagagggttgactgtgtggttagatgttccactggatgcacttgcaagaaggattgctgccgtgggaaccgcatctcggcccctcttgcatcaggaatctggtgacccatatgcaaagcgctaaggatctattgttttctaatgcaggcttatacaaaacttacatcactttttgagcaaagaatggacgcatatgctaatgctgatgccagagtttcacttgaacgtaggttcctatcatttccaataacaatgccagctatgtatactcctgattgtgcttctaatgctttatactactaataagctcactgaacacaatgcttcacgtaatttaattaattgaccaaattcttcatgatgcagatattgcattaaacaagggcataatgatgtcactatacttacacctagtaccatcgccgtcgaggtaccctgaaattctgtttcttgctgttatgccttagctgaattgaccttcacaactaaactaact

SEQ ID NO: 37368 - DNA, 417 bp, Setaria italica
  Peptide Sequence Number=SeqID_103342
caaaacaaacttaatggaacttcagatattacaaatggagtacccagccaaaattcaaaaaagctagcacctacctaagagcaacttccttccggacactgtaccggatcttcttatcaaagttccgctccttccgcttctccctaaacctcatcagtgatgctacccgatgaggaaaattcaacctctgaagcgaagcaaatacactcatgtgaatcatccattccagaatggtcttccaaacatgattcacaagcattacattactctcgccatcacttgtcctaagtcctaaccttattgtacgctccagaggatgaccctgcgcccagccctgggtggttcagctcccttccaccaagcagtaagagaacggcttaggaaccttatcaggtgagacggaatacaaacacgtag

SEQ ID NO: 37369 - DNA, 1140 bp, Setaria italica
  misc_feature (1)..(26): n is a, c, g, or t
  Peptide Sequence Number=SeqID_103343
nnnnnnnnnnnnnnnnnnnnnnnnnnaggagaaataggagacgtcgatgcacgggtcaaacatctgctttgagatctacaagcacgcaagtgctcacactgaagcaatttacttcatcagttctcaacagtcgcgcctcaagataagaaaaacaaatttgctatagcaacaacggctgcaaacatgattccacgagataaaacattgtcgcagctcttaaaacctacacaacgcaagataaaaagtattccatatctaagcaggttcccactcaagttatagtacaacagttgaccgcctactgcagagattgctccaggatgatcctcgttgctttaacccatcgctgaactgaacaccactacagcactactcccctcatgactcgtggccattggccatggctgctgcaggattctctagctcgctgccaggtgctgctatgacacttccattctgaccaccatctagaacaggagctgattgcacagcttgaagaggcacaggagattttgacaagtccctcagcagacccttatttgcccacatgaggccacaagcattgcataatgttcttggtccatcaggtccacgacgcatcataggtgtagctgtagcactagtaccacagtgatggcattcggcagcagatggaggtcggccttccactgacccccaatttggggagccatctgcagtcaccatttctgatgctgctatttcatcaggctttggttttgaagatgtaaactgacctcggttgcgttgcatcctaagagcaacttccttccggacactgtaccggatcttcttatcaaagttccgctccttccgcttctccctaaacctcatcagtgatgctacccgatgaggaaaattcaacctcttattgtacgctccagaggatgaccctgcgcccagccctgggtggttcagctcccttccaccaagcagtaagagaacggcttggaccttatcaggtgagacggaatcaaacacgtagacctcgccctgaaacgagagggtgagctggttgttcgccatgggcggcacggccccaggcaccatcgacccatgcgggtccatctgcgcgccggcggcagccgccgcggccgccgccgcggcagcatccgcgtccat

SEQ ID NO: 37370 - DNA, 424 bp, Setaria italica
  Peptide Sequence Number=SeqID_103344
ctcgccgccgccgcctcgtcccccgcagcttcggggccctaaaccctaggcatggcgtcctccatactctccgactgctcctccgcccgcctcctccctctccgccgcgcgctcctcccgcagcgggtgccccgcatccgcccctgcccggctctagcttcctccaggcgcctcttcgccgccgcccgaccgcagctgctcccgcgcccgccccgcatggattcggtccccgccgccgccgcctcttccgctgagtcagcaaccgtcgcagctgatgcatctgccaaagtgattgatgggaagctagtggcgaagcaagtgagagaagaaatagctgttgaggtcaccaagatgaaggatgtgatcggcatagtgcctggcctggcagtcattcttgttggatcaaggaaggattcacaaactt

SEQ ID NO: 37371 - DNA, 1565 bp, Setaria italica
  misc_feature (1503)..(1503): n is a, c, g, or t
  misc_feature (1564)..(1564): n is a, c, g, or t
  Peptide Sequence Number=SeqID_103345
ggcggtggaggaggaggatgcggaggggaggggtgccgggggcgagggccgatgtggaggtctcgacccagaggtagaggagggaggtggaggatgcgacgggggagaaggagtggtagggggctagtggcgaagcaagtgagagaagaaatagctgttgaggtcaccaagatgaaggatgtgatcggcatagtgcctggcctggcagtcattcttgttggatcaaggaaggattcacaaacttatgtgcggaacaagaagaaagcgtgtgaagcggttggtataaagtcgtatgaggtcaacttgccagaggacagttccgaggaggaggttatccagcacatagcaagctttaatagtgacccatctgtgcatggcatcttggttcagctgccgttacctcggcatatgaacgatgagaacgttttgaatgctgtcagtattgaaaaggatgttgatggctttcatcccctgaacattggacgacttgcgatgcaaggtcgagatccattctttgttccttgcaccccaaaaggatgcatggagttgctgcacagatatggagttgaaataaaagggaagagagctgtcgtaatcggaagaagcaatattgttgggatgcctgctgcattgttgttgcaaaaagcaaatgcaactgtcagcattgtgcattcacaaactaagaaccctgaggaaataacaagacaggcggatataatcatcgcagctgttggagttgcgaacttggtcagagggaattggataaaacctggagcagctattattgatgttggcatcaacccagttgatgacccagaaagccctcggggttataggctcgtcggagatgtctgttacgaggaggcctccaaggttgctggagcgatcacaccggttcctggtggtgttgggccgatgaccattgcaatgcttttgtcaaacacacttgagtcagctaaaagaatccacaattttaaataactgcagaatccaacagaaagaagtttggatgggtgcctaacgtttgatgtagactacaagcaaaggttttgctcaactgttttctgtgtcttctgttggaccagaaaagtgcaacaggagccctaaaaaaaataaattttgacacagatgagatatgtatcccggcttgatacagtattgtatttgataatgtgccatggaaccatatctttggcaccagtagaatcaggtgaatctgagatgtcagtaagtcgaggtgtcagtaagctgggatgaatgttgctgcatgcatcagaccaaatcagcaaaatttgtttccatgtcttgactgtgactggtgggtgccattgtcgatgtgggataatgctgacaagcgctccaatctaatctgtccagttggatcctgtattttattagctagtctgcacccatttttttatgtgtggtacactgcactgcacacacatgatggtgtatttggttcttcccaactgctcccttctcacagctggatggggtttnctgtttgtttatgagaatttgtttgtcagcctgttcgcttcagcttatcaaccatcgaacng

SEQ ID NO: 37372 - DNA, 649 bp, Setaria italica
  Peptide Sequence Number=SeqID_103346
atggcgtgcagacatgcttcaagtacagaggtgggtactaaattaggtaggtggcaacagaaattaaaacatcaattaatcaattgcgaaaaacaagtacaacacctgcagtgtccgctaacatttagttacactgccgcaagattattcaatggtggctgagagtaagtgtagcttctccaaatcttgcctacataaatcaaaatctctggttgccacaatttgtcgtcaacaacttgaaagcacaacataacatttctttttatttgacatagttgcttggccgcagaaaggtggtacaactctggtgcaaccaactatgccgcctgtgctggagccgcctctgccttgtcttccttcttccccccagtgaaaaacttgataccaccataaataacagcaccccacatagacaagctggctagcacaaagtgctcttccttccacttgctcgggctcatcgggtccttccataagggcaccttcgcaggcccatggccgtctgcggcaccggcgaggccgcggcgagagactaggcgggcgaggggggaggaagtggaggacgccgccgccgcaacgagacgagatgccatcgcgacgaatcgactcgtttcaggttcgggtgtctcgcttcttctgctgtggtgaa

SEQ ID NO: 37373 - DNA, 440 bp, Setaria italica
  Peptide Sequence Number=SeqID_103347
cgcgccgatggaatccgacgccgaggaggaggccgcggcgaccccggcggcggcggcagcgccggccgcggggcggctgaagggaagcccggagctgactgtggaagcggacatgcgggagatggcgaagacggccgcttggagcgtcagctcctgcaaggccggcaacggcgttgcggccctccgcgacgacaacctcgacacctactggcagtcggacggcgcgcagcctcacttggttagcattcagttccagaagaaggtgcagctgcagcttgttgtgctctacgtggatttcaagctcgacgagagctacacgccgagcaagatctccatcagggccggggatggcttccacaacctcaaggaaattaaaactgtggagcttgcaaagccagttggatgggtccatatatcattatctggggctgatccacgag

SEQ ID NO: 37374 - DNA, 421 bp, Setaria italica
  Peptide Sequence Number=SeqID_103348
tttgttatttatgttggtcgaaaaactgaaactgatggaatactgtaacttaattggtttgtgtattccatgccttattaggggttaggtacagttacatgacctggcctggcatttcaggagaaagttgcttccgcattgcaagtactggtcctcaggatgttgagcatactgattgacaatattgccataatatcaataattcgcgataccttttcccaatgattccaggaaattaaaactgtggagcttgcaaagccagttggatgggtccatatatcattatctggggctgatccacgagaaacattcattcatacatttatgctgcaaattgcggttttgtccaatcacctaaacgggcgggacactcatatccgacagatcaagatctatgggccaagaccgaatcctgttcccc

SEQ ID NO: 37375 - DNA, 707 bp, Setaria italica
  Peptide Sequence Number=SeqID_103349
tgtcgggtagtattggtcgtaagtacggtccgtctttggtagtcgttctagcttccttgcaaggccggcaacggcgttgcggcccttccgcgacgacaacctcgacacctactggcagtcggacggcgcgcagcctcacttggttagcattcagttccagaagaaggtgcagctgcagcttgttgtgctctacgtggatttcaagctcgacgagagctacacgccgagcaagatctccatcagggccggggatggcttccacaacctcaaggaaattaaaactgtggagcttgcaaagccagttggatgggtccatatatcattatctggggctgatccacgagaaacattcattcatacatttatgctgcaaattgcggttttgtccaatcacctaaacgggcgggacactcatatccgacagatcaagatctatgggccaagaccgaatcctgttcccctccaaccatttcatttcatttccagggagttcatcacatactccaccattagatgacaatcagcgaacctaattgtgtgtagtcctccatgctggagttgtctgctgaagattggagagtgtttatacggttcagagttaaaggtttcctagcgtgagctttgatccgtgcacaggttcaacactgaaagcacctgtcaaagcctaagcctgagttgcccctgaatacctggactggagaattcac

SEQ ID NO: 37376 - DNA, 447 bp, Setaria italica
  Peptide Sequence Number=SeqID_103350
aataactagaactctcatttgagtcagataactacatctgtgtttttggtaggcaattaatccagccagcaatactctaaagaatttaagatagtttagtgaaatggtacaggaattttaccatcctaatatattaggaggtgaaactatttcaaagtagtggaagtgatgctctgtttaaacattgtactacttgattttagttactttactgcttactgtctgtctttcttgtgtatgcagagaaacattcattcatacatttatgctgcaaattgcggttttgtccaatcacctaaacgggcgggacactcatatccgacagatcaagatctatgggccaagaccgtaagttggataccatccaagcactcacctacctgtctcctcatttttagtaatacccgggtacatttgactggattgagttttatgtgcttacgaagt

SEQ ID NO: 37377 - DNA, 597 bp, Setaria italica
  Peptide Sequence Number=SeqID_103351
gctacacgccgagcaagatctccatcagggccggggatggcttccacaacctcaaggaaattaaaactgtggagcttgcaaagccagttggatgggtccatatatcattatctggggctgatccacgagaaacattcattcatacatttatgctgcaaattgcggttttgtccaatcacctaaacgggcgggacactcatatccgacagatcaagatctatgggccaagaccgaatcctgttcccctccaaccatttcatttcatttccagggagttcatcacatactccaccattagatgacaatcagcgaacctaattgtgtgtagtcctccatgctggagttgtctgctgaagattggagagtgcttaactgcttatacggtttcaacactgaaagcacctgtcaaagcctaagcctgagttgcccctgaatacctggactggagaattcacactccgtacgagttaacaatctgttatccatgtaatgtgacgttattcacctccatgggcatggagctgctccgggagaacatcgtcctggaaactctcttgcactttattttaacaatttctgacacctgtgattcatttg

SEQ ID NO: 37378 - DNA, 276 bp, Setaria italica
  Peptide Sequence Number=SeqID_103352
gccgttagccgacgcgacctcgtccctctcccacacggccacaccccgcctgagccaacggcggcgatgcaggcggcagtcggccaccgcgccgccaacgtgggcttcccttcacgctcgcgcttgcggggtggcttccttctccccggccgcgcccgcttcttctctgaaggcgcggaggcggcgccactccgcgtcgaatccctgccccagccacggacccatggcggcggcgatttcgtgcacctcaaggccgtggatggggaggcacagcgg

SEQ ID NO: 37379 - DNA, 424 bp, Setaria italica
  Peptide Sequence Number=SeqID_103353
ctaaatgtctatagatgacaaaagatactccagcaattttagtatcagacttgggtggatgtggtattggttcgcttagtagccatagcatggccaatttgtacttgtttaccaacaaacaacatgaagaacaaaacccttcccaaacaagttgtggtaggtgaatttgtacgtctaccaatctggggcccttttgctactgtgacattcatcaaacttgtggtgacaacctggtttgcattcttgaatacgctgtaatcatcaatctgattttgattacactgttagatattaatgtgctgatttcttaattcagtttcaactttcaattcctgtttaccacgttgcatgtgctaacacagctccatgccatccttgttatgcagcgattgtgtcaggaggaaagggtacagcccaggacaaa

SEQ ID NO: 37380 - DNA, 289 bp, Setaria italica
  Peptide Sequence Number=SeqID_103354
ttgtttcccggtactttaattgtgtggtttaggaaagaaagtaattgagagttgccttttgccaaggaagctaactcaaaataggttagggtacccattgcttcctctttcgaggcctttgtttccacgggtttccatacgaaataacgagtgccgtgcttcctcctacgggtcagcagtcaaaagagttgttcagtcatatgatataggataactaaaacaaaaggaaagaaagtaattgagacttgccttatggtctagtcccccccgccgtcatcgcagcaggagg

SEQ ID NO: 37381 - DNA, 787 bp, Setaria italica
  Peptide Sequence Number=SeqID_103355
ttttgtttttttttttttgtactagcattcactcggcatttcccattttgaagttaggttcaaatctgacaacgcatcattgaacatttcaacgtatttacacagccatagccttccatgatccgtttgctgccttgcaaaggacgcatgtaatgttgtgcctagttgcctaccaatgactggaatcggatgtcaatcaaaaaatcgttcctgccttccaaaggatgcatgttgttgtgcctagaaatgactgcttggaacatcgtgttagtgtagcacttttgtactggtttcggatagagggtaatagggtatatttacaccttgaactctagctttttgctcaacaaatcctgttctttgttttcacaaaattcaatgtgcttcttcaagaaggcctacaattgaagtcgttcaatcacattttgcgataataaggaatgaagttctcatgataattccaatgcattccagatttaatgaagttgctaataagttaatatgtaccagaccatataaaaaagatggatagatcatgaacaattgaattccattttgttaccatcaaaccaactgatcagaataggaagccaggcccattagagcaaacaagcaaagcaatgaaaatagatccgcaaagccaaacgaagattctctaagaaagtgatcttgtgattgcttggatcaccacgaaatcctcgagctatcattgccttggatatttgttctgcgtgatcaaatatgtttttgaataatttacgacttaggtaattaattaagtttagta

SEQ ID NO: 37382 - DNA, 255 bp, Setaria italica
  misc_feature (241)..(241): n is a, c, g, or t
  Peptide Sequence Number=SeqID_103356
aatccaaaagaaaaatacagaaacctgaatactccaatcttctgttgcgcccagatccacctggattatgtcggaccatcggctgctacgacacacacatcatggacagctgccttccgatcccctgcccacaaagcagcctcacagtatcaccgacgaatggtctcgtgcaccgaggaatctggatccggagcttctccggcagcacatcctcgatgcaggccggatcgacgccgtttcngccgagggcggcgg

SEQ ID NO: 37383 - DNA, 477 bp, Setaria italica
  Peptide Sequence Number=SeqID_103357
gcagaagggacacctcttcgtctcgccctcgcatcaaatccttcctcctctccgccgccgccgccacctccgcctccacgaagagagcaaggatacataaacaaaaggaaccatggatgcccacagtttttaccacgatgattatcttcaagagaacatcctgttacgtggaggcgaacgggtcgtacgggcaagtgctggggagattctggctggtgtggacctcgagatcgccttcggcctcgagaagctcctaaacctggagatgctggtcatggagatcgctcgccgtgccgctgacatcgagcctctcatgcgggaccctcagtccatttctgccgagtcgattgacaaggctttcgaattcgatgtcctgtatggcattgtagactctgaagccaatgagttggagaagctagttggttctatccgaacggatattgcaaatgctgaaagcaaggtttcggaggaaggacc

SEQ ID NO: 37384 - DNA, 330 bp, Setaria italica
  Peptide Sequence Number=SeqID_103358
caagaacagcacaaccaacgaaccaacccggagcccggagaaggaaccgccgggcatagcatattctctcctccccctccggttctccctccaaacacagcgccctgaaagcgaccgccaggccgcaggcgaggcgagggagagggaggcgcccactcttcttccttgccgcgcaccagccgttcatggggaggaggtgcaccggcgtggtggctctcatcatactcttgctctctgttgcttctcacggaagagagctacctgtcaagaagagtgaccagagttttgtctacaatcacactcttgcaaagactattgtggaatatgctt

SEQ ID NO: 37385 - DNA, 916 bp, Setaria italica
  Peptide Sequence Number=SeqID_103359
aagctggaaatcacgtccgcattaataatcgaataatttgtcagtacagactatgaagtgaaaacagcctgcccacagagaacattataagactatagtggtctttagcagattttcatatggtcggccccaaactacacttccagtccagacaaacggagcataactccattcttatccttgttagacttcctcgacctgaggaagattcatcaactccataaccgccttcttcggagtcaattcattatcaattatccgcgctaccgcagtcaggactggcattttgacattgtacttctgagctaacgcaatgacagccccagcagttgatacaccttcagcaacctgattcatcgaactcatgatttggtcaagtttttcgcctgaaccaagacgcagtcccacatttctattccgtgaaagattgacaaaacatgtaagcatgatgtcacccgacccagacaaaccagaaagagttatcggcttcgctcccatctttgttgccagccatcgtatttctgaacaaccttgagcaacaagggcagccatacaattattcccaagattcataccttccactatacctgctgctatagcaagaacattcttcagcgcacctgcaatttctactcctgtaacatcacttgatgtgcttatcctcaaatttggggaagctaacagctgctgaacagaacttgccaactttttgtcttttgatgccaccaccatcgctgtaggcaatttgttcattagttctactgcaaaagaaggtcctgatagaacaataaatggttggcggcggtttcccaatgctcgtgggatgattttagacattgtccgaagggtattgagttccagccctttgctaagtgatatgaatggcaactttggatcaacatgtgttgaaatactt

SEQ ID NO: 37386 - DNA, 359 bp, Setaria italica
  Peptide Sequence Number=SeqID_103360
ctggttctgcagtttgaatcgtatcgcctagcgaagaaaattttatatggttgagttactatctagtaaatgaaatgtttgccaatctactgctctggctatagaaaatgtccgttgcttgatgggggcaaattgctgcccggaagattgtaccgaggatatcataagaaagcaccaaaaaggtttggttctctcatgttgtaccatgtcacttgtacggcactttaaataaatagtaatagttacgactgtgccaagaaagataaagttactcagatttgtttagattgttgtcaaattaccatttgttcttgaaattttggtggaagattattccagctaaaaaaaaaaaaaactaa

SEQ ID NO: 37387 - DNA, 385 bp, Setaria italica
  Peptide Sequence Number=SeqID_103361
cccatttaaatccagaggccgaaagtccaataaggcgctgaaagctgaggggaaggaggcggcggcgaggcgacccatcagccaaccaggccaccaccacacatctcgaggcgaggcgcggaggaggccgtcgtccctccacccacccacccgctcgctccgcacctcatcgcttcgtcgatacgcatggataccaccgccatgggagcgctcgaggaggcccacctcgccgccgccgtggccgccgcgtgcgcgtgcgaggaggaggacgatgacctcgagctccttggcggggaggccgagcccctggcggcggtggcggcggccgacgccatggagccggcgatccgcgcgctgctggtggggctcggcgaggacgagcgcc

SEQ ID NO: 37388 - DNA, 1977 bp, Setaria italica
  Peptide Sequence Number=SeqID_103362
atccagaggccgaaagtccaataaggcgctgaaagctgaggggaaggaggcggcggcgaggcgacccatcagccaaccaggccaccaccacacatctcgaggcgaggcgcggaggaggccgtcgtccctccacccacccacccgctcgctccgcacctcatcgcttcgtcgatacgcagttcgttccacctatctattcctcctcaaccgcagccccattttttttccctttttttcccttttgtttcttgctctgctatatttcgcggccgcctcctaataatagccgccgcgggcagtggataccaccgccatgggagcgctcgaggaggcccacctcgccgccgccgtggccgccgcgtgcgcgtgcgaggaggaggacgatgacctcgagctccttggcggggaggccgagcccctggcggcggtggcggcggccgacgccatggagccggcgatccgcgcgctgctggtggggctcggcgaggacgagcgccgcgaggggctgcgacggacgcccaagcgcgttgccaaggccttccgcgacggcacccgaggttacaggcagaaagtaaaggacattgtgcagggtgctctgtttcctgaggttggtgtcgacaaaaggaccgggtctgctggtggaactggagggcaagttgttgttcgagatattgaacttttctcatactgtgagtcatgcctgcttccattcagcatacaatgccatgttgggtatgtgccctccggtggaagggttgttggcttaagcaagctttctagagtatctgatgtctttgccaagagattgcaaaaccctcaaagactagctaatgaagtttgtggtgcactgcatgctagcattcaacctgctggcgttgctgttgctctgcagtgctggcacatccctttgccagaaaacttggaatgcaagactttgcaaggttggattagaacttcacattcatctcgctccggagttttcgagggtgaaaacagcactttctggagtgacttcttggctcttcttaagcttaggggcatagacatggaggtggacaaccattctgcctctattccttggtgccccttaaggtctcatgaggtcccactctctaacgggcactgcaagaaaagctcaactaacggcatggtttctgcagttacgtcaatgctcttatcacttggagaggaccccctcaggaaagaacttttaggcactcctcagcgctacgtgcagtggctgatgaagttcagagcatgtaatctagatgtgaagctgaatggctttacacttggtaatgtcagcatgtatgagaggccaggtggaggcaaggcggatcatggagcaatccactctgagctgcatttgccattttgtgctcaatgtgagcaccatcttctgcccttctatggggtagtgcacattggatacttcgatgatggaagcggagaaggcattgatcggtcacattttcaggccttggttcatttctatgggtgcaagcttcaggttcaagaaaggatgacaaggcagatagctgaagcagtttattccgtttcacacaatggggtcatggtcgttgttgaggccaaccacatttgcatgatctcaagaggggtagagaaaataaggagcaacaccgcaacaattgcagttttgggccagtttttgaccgacccttctgccaaggcatgcttcttacagaatgttttagatacagctggttctgcagtttgaatcgtatcgcctagcgaagaaaattttatatggttgagttactatctagtaaatgaaatgtttgccaatctactgctctggctatagaaaatgtccgttgcttgatgggggcaaattgctgcccggaagattgtaccgaggatatcataagaaagcaccaaaaaggtttgggtttcaaactttcttatttgttttgttttaccttttattgtttacttaactttttagttttacgttta

SEQ ID NO: 37389 - DNA, 274 bp, Setaria italica
  Peptide Sequence Number=SeqID_103363
cccccgtgtcccggaccgacggccactccgccggcgagcggcgacaaagacgaaaggggaaggaaggggaccggcccggcggcccctctgccagcaagccgccgccgtcttcgagctttgagcagcgagcgagttacgaggtccgtggcagtagaaatggaatcgtatatggcagtgatagcagagaagcaggtacctcctttcctgttgaatggtgctggtccaggtatgctatccgaaatacagactgctgatgctgatgaagcatttatcc

SEQ ID NO: 37390 - DNA, 243 bp, Setaria italica
  Peptide Sequence Number=SeqID_103364
gcaattactgggtcagatcactccaccaagctaagaggctgctaccaagatcagttcaccatgggcagcaacggcacggccaccgccaccgcgcacgcgtcggcgctgaccccgccgccgtcgcaggggaggctcatcaccgtgctgagcatcgacggcggcggcatccgcggtctcatccccgccaccatcatcgcctgcctcgaggccaagctccaggagctggacgggccagaggccagg

SEQ ID NO: 37391 - DNA, 294 bp, Setaria italica
  Peptide Sequence Number=SeqID_103365
cccaaaccctagcaccccgcgaacggcaacctccctggtccgatggatttcgctcaccggaaggcggcggcgctggccgcgctctcctcgccggcgccggacaagtccccgaagggcggcgttgacgctcccatcgccccgctcctcgaagtgctcaactcccatccagacctcttcactacctcctcctgctccggccgcgtttccgtcctcgcgcaaccgcaggagggccagggccagggcgccgccaagccgaagaagaaggcgcgcggcggcgggtgggtgtacgtgtcg

SEQ ID NO: 37392 - DNA, 1417 bp, Setaria italica
  misc_feature (1397)..(1417): n is a, c, g, or t
  Peptide Sequence Number=SeqID_103366
ataaaatacaagggagccaaccctcagacggaaggcgcacggcgcacggaggcgttggatcggatcgtcgccggcggggggcgagatgtgggagtcggtggcgctgacgctggcgggcaccgccggcaacaacatcggcaaggtcctccagaagaagggcacccacatcctccctcccctctccctcaagctcaaggtggtcaaggcgtatgcgttgaaccagctctggatcagcgggttcctcatggacatgtgcggcgccgcgctcatgctcaccgcgctctcccaggccccggtatccgttgtgcagcccattgccggctgcgggctcgcgatactttgcgtcttctcccacttttacctcaaggaggtcatgaatggcctcgattgggtcgccatcacgctagctggtctcggcaccataggtgttggtgtgggaggcgaggaacagaaagttgatcaaatacctcttctcaatataccctggctagtgctctccgttgtcatcttgtttgtaggtactgctcaacacttggcttcatatgtataaaaaacaaaggcgcgagcaagagttgactggacccgaagtgattgaggagatcatatatggcttagaatcaggcattttgtttgggatttcttcagtgatctctaagatgggatttgtgatgtccgagatgggttttccaaagattgttgtgccagctgccatttcctgtagtgtttgctgcagtgctgtaggatttgtgtatcagactcgaggtctcaagcatgggagggcaattgttgtatctacatgtacatcagtggcatctatagtatctggagttgtagctggcatgattgcacttgatgaacatctgcctaaagctcccacagctcgattttttctcttacttggatggttcttcattatcacaggagtgatactacttgttagttcaacccgattgattgcacgtctacctaggccagtgcagaagtttttgaagagcaacatggagcgctcccacagcatcaggaggcccggttcagcacgagggaaggaccccatcccaaccacaacaatccatgcgtcatcgttacatctgcttacttctccaacgaaggagaaggcctagcaaaatgttgctgttggagcaaatctgtttcggcacctcatatgcgtcatgtcattgtttgattgaatgggtatgccactgtagaagtctagagtagtagcatcttataaagtttgggttggttactcatcatactgcctgcccttcataggactaacagaagtgtggaaaaaaaaatctgcaaaatttatgtcacgtctcatcttgtcgtttgttggttgctcagtgataattcatgactggttctagaaaacccaaaaaaaaaaaaaaaaaaannnnnnnnnnnnnnnnnnnnn

SEQ ID NO: 37393 - DNA, 342 bp, Setaria italica
  misc_feature (340)..(342): n is a, c, g, or t
  Peptide Sequence Number=SeqID_103367
tgggcagaagaaccatcttcataatggctagggccagcaactgtcttcggtctttgctacaaattttttttgcagcgctgcagatgtatgaatatgacatctctacatctgcagcgctgcaaatgtagagatgtcatattcatacatgcctcattttttggggagaaaaaaagtgaagagttgtgttgacacattttggccttcctgattgtctaggagcaaccaggttaggtttgtgtacgcctctgtatagagtgagttgtatcatccggttctcttaaatcgaaaagtagcttcagttcctgttcaatgttgttaaacaaaaaaaaaaaaaaaaaannn

SEQ ID NO: 37394 - DNA, 635 bp, Setaria italica
  Peptide Sequence Number=SeqID_103368
tgggattcagactaatatatgatgagaagtcaagcagttctttacattagttgttgatgtaattcatactagggttttattaccagggtttcactgaggttcagatgtcaaaacttaagaaaagcgaagcattcaccagagaaagggaaagagaaatcgaacaggttgtcgaatcagtcaacgagcttgcacagatcatgaaggatctttcagttcttgtgattgatcagggaactatcattgaccggatagactacaacatacagaatgttgcagcttctgttgaggagggctacaaacaattgcaaaaggctgagaggacgcagaagaaagggggcatggtgatgtgtgccactgtccttgtcattctgatcttcatcatgatcgtccttctgatttgaagaagatcatttctgacatgcatagctatctcttttttaatggttgacggacggcaaccaagccaacgccacgctcatctactcttattatgtgagtgaggattacacagttgctggcccagccattatgaatatgggcagaagaaccatcttcagatcagtaagtcgtatcgcactattcaaacgaactgcggcgttacccgaattaattagtactaaggtactaacttagta

SEQ ID NO: 37395 - DNA, 1278 bp, Setaria italica
  Peptide Sequence Number=SeqID_103369
ccgaagagatatctgcaaacatgcagcgggcaaagatgaaaatgggagagttggctaaggcacacgctaaagccttgatgccatcatttggcgatggcagagacgaccagcgagcaatcgaggttctcacacatgagataactgacttgctgaagaggtcagagaagaggctgcagaagctgtccatgaaagattcatcggaggattcaaacgtccgaaagaatgtccagcgctctcttgctacagacctgcaaaacctctcaatggagttccgtaaaaagcagtcatcttatctaaagcagcttcgccaacaaaaagagggtcaggatggtgttgacttggaaatgagtataaatgggacgaagtctacatttgaagatgatgagtttgaggatgtgggtttcactgaggttcagatgtcaaaacttaagaaaagcgaagcattcaccagagaaagggaaagagaaatcgaacaggttgtcgaatcagtcaacgagcttgcacagatcatgaaggatctttcagttcttgtgattgatcagggaactatcattgaccggatagactacaacatacagaatgttgcagcttctgttgaggagggctacaaacaattgcaaaaggctgagaggacgcagaagaaagggggcatggtgatgtgtgccactgtccttgtcattctgatcttcatcatgatcgtccttctgattttgaagaagatcattttctgacatgcatagctatctcttttttaatggttgacggacggcaaccaagccaacgccacgctcatctactcttattatgtgagtgaggattacacagtgcctgcatatcgggaacgccgcagttcgtttgaatagtgcgatacgacttactgatctgaagatggttcttctgcccatattcataatggctgggccagcaactgtcttcggtctttgctacaaattttttgcagcgctgcagatgtagagatgtcatattcatacatgcctctatttttttgggagaaaaaaagtgaagagttgtgttgacacattttggccttcctgattgtctaggagcaaccaggttaggtttgtgtacgcctctgtatagagtgagttgtatcatccggttctcttaaatcgaactgcggcgttcccgatatgcaggcactgtgtaatcctcactcacataataagagtagatgagcgtggcgttggcttggttgccgtccgtcaaccattaaaaaagagatagctatgcatgtcagaaaatgatcttcttcaaaat

SEQ ID NO: 37396 - DNA, 749 bp, Setaria italica
  Peptide Sequence Number=SeqID_103370
tttttaactcgcctacgaaaggtaagcagaggactaaatctattcttacattggtgagatcccatagtattttctggccctttatgagaatttttttccgtcagtggctgaggtattctgatcttttgtccgatcagccattccatcagcatgcatgggatcacacatagaacttgaaacagggatttgattatttgtgtcctcactgcattgtaataatttgttgtgtgcctctgcagtcggaatcgtggcagaacaaatctcaggttgttctttctgtggtaacgatccatacaactcatttttccctctctccggttcacattcttctttgatgctttgttgcattgacaaaggctgttgttttgtaggagtaacaaaattatcttcttttacgatggtgttctcagcatgcgcctcaaaccttgggggtaaattgctggcaactacattactggaggcagcaggagacgaatcaagagctgtgtcatcagcagtatggtcttgtgaggtaacgcgcttcctcttgtaggttatcatgatcttggagctcatcctgaaatgtgcaaatgtgatgaaaagtaaagcttgccgactgtatcagatatttcagctgtgttcacattctgtcgatcgcgcgggcggcggattggggacggattcgggggaaggaataggaatgtgggatggatggaaagggacagggacctgcctgcctgttgctgctgctgctgctgctgcttattttc

SEQ ID NO: 37397 - DNA, 977 bp, Setaria italica
  Peptide Sequence Number=SeqID_103371
tctaaaatcaagcctgtttccccttctctcccctccccttgcctccccttcctccctccctctcgtctccggcgggcggtggcctcacctcccttgcgcccccgtcgccccgatggttccgtccgcagctctcgcgccggtggccttccggtcgtccttctcgccgcctctctcgtcgaaccctactcgtaatagaataaacatagaaggtgctttctgttcgccatgttccacaaggaagagagctaattataggcctttccgggtgtacagtttatttggagggaagaaggataaagatgagaacggcgatgaggcaccatcaaaagcaggaatttttggaaacatgcaaaatctctatgaaactgttaagaaggcccaaatggttgtccaagttgaggctgtccgggtgcagaaggagcttgcagcgactgagattgatggctattgtgaaggtgaactaatcaaggttactctttctggaaaccaacaacctattagagttgaaatcacagaagctgcgatggagttgggtgctgaaaaactttctgagctggtaaatgatgcctacaaggacgcacattcaaggagtgtccaggccatgaaagagaggatggcagacttggcacagagcttaggaatgcccgcgggcctcggggatggcctcaagtgatgctgcaattcatgaaagccgctttccaattaattttttttctcaattttgtatactagccgtgcgagacgtaagcttaacccctatgcggcctctcttagctgtgtaagaattgtacttgtgagcactgtttggttcggcattagctataatttgctgttttacacgagcaggtactgcgcaccctgttagctttctttcgaggaaatgcatccttgtaattttgtcacactgaacatccacatggatatatcttctgtgggctggtaaggtgcaagatacgggccaggctttgttgagcatg

SEQ ID NO: 37398 - DNA, 924 bp, Setaria italica
  Peptide Sequence Number=SeqID_103372
agtagaatgtttatgctactaattggttactactcaaaatttctcaagctcttagcacatccaccaagtgattcattgctgtttcttaagctcttgtgcggtggcagccaaaatatataaaattctagccttaccttaagttaaggtgcgatttctgtgtcctgatctatatgcatataaatgttgcaactaaacttgggtgttgcctccattgtgtttatttgcaacctttttgtgacaaattgaacaaaatggatgtacctttctttttgttaaaatgcgatttatgcggatccgcccttttcttttaagaggctggatgccccccttttgtgatgtgggttccctaccacaaagtcgctgttaccgttaaatggtgcattcatatgtgctagctcctgctgcttcccagcgcttcaccaaccatttggatctttattttttctctctgtctctaaccatctaggtgattctttatgagggaaaaaacatttattcatgtagttatcaaatacaaaatgaaaaggcagtcatataagcttttgttttgtctccttttgagagagctgttgatcaattcttgatttagttgcatcgtgaactttaacatgaataatgcaaacatgtcacatttgaccgcatcaaattaaatgctgacttcagcccttcggtatttgattaatgaaccactcttttattgcaaacttatttgtggtagcaagacaaattcttttttgtctatgtcattttttttgttcggttgagttgataatgaaataattaagcaggcgaaacagttatgaaatgtctattgtaataaaagtttggagcaacatttatgatttgctggtattctaagtcaggctttctaagaaccaaaaatggaagtcagcaattctgaagacctgaaacacttgggtgtaa

SEQ ID NO: 37399 - DNA, 652 bp, Setaria italica
  Peptide Sequence Number=SeqID_103373
tgatcaagtccatggtctaggtttgagagagattggtgggtttactaagcaccgtcgagctccctctgtacgcgcatcgtgctatgctatcgcaaagccatctactcttgttgaaaagatgcaaatcataaagagattgaggggacatcaaaatgctgtgtattgtgctacctttgatcgcatggggcgttatgttattaccggttctgatgaccgcctagttaaaatatgggcgatggaaacagctttctgtctggctagctgccggggccatgaaggtgatattactgatcttgctgtgagttccaataatgctgtggtggcatcttcatctaatgatttcattattagagtgtggcgtatgcctgatggaatgccagtctcagtgctcaaggggcatacgggagcagttactgctattgcatttagtccaaggccaggtgctgctttccagctgttgtcgtcatcagatgatgggacgtgcaggatttgggatgctagatactcccaacaacctccacgagtatatacaccaaagccccccagatgttgccaccgggaagagcggtgatgcatcttctagcgctgctcaagttcagccaacaaatcaccaaatcctatgttgtgcgttcaatgctaatggaaccgtgtt

SEQ ID NO: 37400 - DNA, 410 bp, Setaria italica
  Peptide Sequence Number=SeqID_103374
gcgcctccaaaaatagcacaggcagctcagcctctcggcaagcccgaggcagcagcaggggcagcaggacgacggcagcggcagcggcatcggcatcggcatcggcggcgacgcggcgcaggcgatggcggtcggcgaggacgagtcggcctcgcactccaaggccgacagggcgcggtcggcgatgagggaggagagggccatccacctcatcccgctgctcaccttcgtctgcttcctcctgctcttcctctgctcgcacgacccttccgcctctgatatgtcgagcttcgctggaggcgggggactgagatccgggaaccggaggttgaggatgctatagaaattcttggcagttatcagatgcgtgtccgtccaacgttttcatttcaatcactgtatcttgcgct

SEQ ID NO: 37401 - DNA, 814 bp, Setaria italica
  misc_feature (3)..(3): n is a, c, g, or t
  misc_feature (47)..(47): n is a, c, g, or t
  Peptide Sequence Number=SeqID_103375
tcnttgtttttttttttttttttataataatgcaatgccttctgcancccttttggtgcagctggcataatgtttttattcatttattaaaaataacagactttgtatatgtagcctgacctctagctgttcagtgtgatgtatccgttttggatcatccactgcatactccaatggttattcacgttcttgagcgtccaataggcccatccaaaggtagctcgtccataaacctcttgctgcgtttgcgcaaacctctggtagtctgtcttcgatgcgccttgaatggtccattcggctacccactcccccacgaacgtgagagggagcccgttctgattcgtgacggcggctaggtcagcggagcggttgttcctgacgaagtcgatgttctggtccacggtgaggctgttgaacttgctatcaaacaggttgtagtagtgcacgtcgaggacggcgccggagaagccgccggcaaactggaggagctcggtcgcgtccgcggacaacctgttggacatgatcacgtaggctgtcgatgtgtgctgccgcacggcgttgtagccgtcctggtaatactttttcaggctgggcaaggttgcgcccggcgccaacggctcgttgagaagctcgatggccaggaggctggggctgttcgcatacctttttgcgagaaaatcgatgacttgcactgtctgagctatgtttgcatcgctagttccccactcttgcgagccgtctctagttgcactgtgctcgaatgggttttgagacccccggggcagcgtgcaagtccacaataacacccaagttg

SEQ ID NO: 37402 - DNA, 483 bp, Setaria italica
  Peptide Sequence Number=SeqID_103376
tttgttttaacaagttaacaagaaccgtttacttccagtcttgaagcgttcgagctaagcaaggcttccagttccgttcgatccaccactctagttttagctttcgtcctagttcgcgatggcttctcgtcaggagcaggctagctaccacgccggcgagaccaaggcccgtgccgaggagaagacggggcacgtgatgggcgcggcgcaggagaaagggcgcgaggccaagtccaaggcgttcaacgccgccgaccgcgccatgggcaggggccacgacgccaaggaggcgaccagggacaaggcgcgggaggccgcggaccgcaccatggggatgggccacgacgccaaggaggccaccagggacaaggcctaccaggccaaggacgcggcctccgacaccgcgggccgcgccatggacaagggccgcgaggccagggacaatgcgtccgagtcggccggcgccgcaggggaccgcgcccc

SEQ ID NO: 37403 - DNA, 386 bp, Setaria italica
  Peptide Sequence Number=SeqID_103377
attggatggccatagacaacacttttgggctccaaggaggtttcatatggggactgggttgatcagggtttactaaaggaggattcagatggatccaaattttgggcatatggtggcgactttggagatactcctaatgccaaacttttgcctcaatggcattgtgtggcctgatcggacaattcacccagctgttcatggtaactggaaatactgggaaaaatgtttttgctttcttatgtatcaatttgttaaattaatgtctttgtctccaaagccaccggatgccaaatttagtttaccagatttattctggttgcagaagttaaatacctttaccgagcctatcaaaatatcatcagcttttagataccatttagtactta

SEQ ID NO: 37404 - DNA, 2813 bp, Setaria italica
  misc_feature (2758)..(2813): n is a, c, g, or t
  Peptide Sequence Number=SeqID_103378
agatgccaatgggaagcttattgagtgtgaatcatgccaagtgggcattcgcaatgtggtccgtgcacacaagcaaatgcttgtcaatggatgtcctgttgtactaagaggtgtcaacagacatgagcaccatccacgccttgggaagacaaatatagaagcatgcatgatcaaggatctgattttgatgaggcaaaacaatattaacgctgtaagaaatagtcattatccccagcattcgaggtggtatgagttatgtgacatttttggtctttacgtaatcgatgaagccaacatcgagacacatggctttgatgaaaatagccatttcaaacatcctacactagaacctatatgggcaaatgcaatgcttgatcgtgttgttggcatggtggagagagataagaatcatgcatgcattattgtatggtccctgggaaatgaatcttcatatggtcccaatcatgcttccatgtctgggtggattcgtgaaagggacccgacaaggctcctccattatgaaggaggtggttccagaacatcatccacagatattgtatgccccatgtatatgcgtgtctgggatattattaagatagcaaaagacccatctgaaacaaggcccttaattctctgcgaatattcgcatgctatgggaaacagtaacggaaatattgatgcatattggatggccatagacaacacttttgggctccaaggaggtttcatatgggactgggttgatcagggtttactaaaggaggattcagatggatccaaattttgggcatatggtggcgactttggagatactcctaatgacctaaacttttgcctcaatggcattgtgtggcctgatcggacaattcacccagctgttcatgaagttaaatacctttaccagcctatcaaaatatcatcagcagataacatgcttaagattgaaaatggacactttttcgatacaacagaagctttggacttcagttgggttcttcaaggagatggttgcatcttgggctctggttcgctgaatgttccaactttagcaccgcagactagtcaccttatcaacatggaatcgtcaccttggtttgctctttggagtacttgtgcagtcaaagaagtatttttgtctgtaaatgtgaaacagaggtaccatacgcgatgggctaaagatggtcatctcttggcttcagcacaactttgtttacctcagaaaaatggctttgttccccatgcagtagcattctccagtagccctctggtctgtgaacgcactggtgatagtgtaataatcagcaagaatgatgcctggaaaatcaaagtgaacagtcaactgggaacaatagacagttggaaggtcagcaatgttgagcttatgagcaaggggatattcccatgcttttggcgcgcaccaactgacaacgacaaaggaggtttctacaccaagccctatgtttcgcaatggagagaagcctccctcgataacgtctcgttctacagcagccagttttccgtgaaggaattgcccgacaacactgtggagctttccactgtctactatggtcttcctgggaacttacccaagcccgacgatgctgctctttcacaagctcccgagtctactcttttccaggtgaacatgctctgccggatctacgagtcaggcgacgtggttcttgagtatgaggtaaaccccaaggccgatctccctccccttccccgggtcggtgtcgtgttcaacgcagagaaatccctgagccacgtcatgtggtacgggaggggcccgttcgagtgctaccccgaccgcaaggctgcggcgcacgtcggcgtgtacgagagcagcgtggaggaccttcacgtgccgtacatcgtcccgggcgagtgcggcggccgggcggacgtcaggtgggtggcgctccggaacgccgacggcttgggcctccaagcgtcggtccatggcgagtccccgccgatgcagatgagcgcgagctactacggcaccgaggagctcgaccgggcgacccatgtccacaagctggtgaagggggatgacatcgaggtgcatcttgaccacaggcacatggggttgggcggggacgatagctggacgccgtgcgtgcacgagcagtacctgctgccgccgacccgctacgccttctccatgcggctctgccccctgctgccatcgtcgtcgtgtcatgacatctacaagtcccagctcccctagtgacgaatgacgatatgatgtgatgtgtgccggacagccgaggccggaggcacgtcagcacgtgagagggcaatggaatggaaccaagtgaaataattaggaaatgatgcagagacgccttccgctcctgcagtggccaggatgttgggctggccgacttttttattttatttttttcccctttttatgaaagattcttacagatatgcttctggtgcaaccatttcaaaatctggacccttagcttggcgctatccacgttggtgttaagcttacacgtctcggcgccagccttcctgacgtcaaggtccatacgcagctgcgtggatgctgatgtggcgggggtttggcgccagctatcgtggtgctaagcttgccgctgtggattttggcaacaagcttggcgctgtagatcttggcgccgagtagttatcttgtaccttttggtaaaaatgaaataagtataattatttcgtggagtatacaacaaaccacattatggttcacttgggcttcttatacctnnnnnnnnnnnnnnnnnnnnnnnnnnnnnnnnnnnnnnnnnnnnnnnnnnnnnnnn

SEQ ID NO: 37405 - DNA, 307 bp, Setaria italica
  Peptide Sequence Number=SeqID_103379
atatcactttggcgtacaacagggaaagcttgtctgctggaaaaaacacacacacctgctaataggcaaagtcatgtgtgttggatgtgctatttacctatctatgtacctatgtgcattttatctatttagatgctctttagatgttctatagatgcttggcttagcttcggagttacctacccatgattatcctatacacaatactaccccatattactcatgcatactacctatagtatacaattaattttaatcatcggaagcttacatacgagtcctttcgaacagtagtataacttttcgt

SEQ ID NO: 37406 - DNA, 830 bp, Setaria italica
  Peptide Sequence Number=SeqID_103380
caagacagttcattttgtccagtatataactctgttgagtttgtacagtttgaacacaattactaatgtttttcgaagatcattgtttaaaacggaaactttgagaaatgaaataaatttcctttcgaacagggtgcaacaaacactgcagcagaagaaaggctaaagtttattatacaatggatttctcatttttctagtaaagaattaatcctttgttttacacccgttttatatatgctgtagaactgttcagtttaacaattttagactgatcgatagaatacgaagtgcatggttgatgtgttactctgttctcaattcagtgtaccttttggtctacttgcagattgtcaagaactgggagacaaacaaaccatggcttccaaaaaaaagagtagatgaggttgtaagtgatgcggagaaagtaagagattggttggaggagaaggaaaccctgcagaaaagcacccctgctcacagtccacctgctttcacatctgaagaagttgttgacaaaattctggacctacaagataaggttgcgagtattaatagaattccgaaaccaaaaccaagattgaaaagaaacctgcaaaagaggaagagcctgctaataaggagaaaactgccaatgagaatgaatctactggaacatctcaggaatctaaagcgacggaaggtgagccagcatcacccgagactggttattcggaacctggatctcacgacgagttgtgagtacgtgaatcaactatggagggccgtagaacaggttggaaatatgcaataataactacaaaagaaaggacaagtactagaagtactaa

SEQ ID NO: 37407 - DNA, 1095 bp, Setaria italica
  Peptide Sequence Number=SeqID_103381
gctaactacttccaaagtggatgatgtggttaacagataaaacaaaatggtagctaaaccaaccttttatgatgaaaacgtgtttactgagtagcccctataaaacaagaactatatgacagaatgtaaggaattagagcaacacttaggctttcttactttgctttgccacagtgcaaaccacacacttccaagggatacgaatgcataaaaaacagaaggccagccaaatttgctgatcaacataggtgagaaagcaaggccggtgactgacccaaggtacattccgctgtacactaaggcaagagatctgcttctctctgaaactggaatccatttggaaaggatgttgttcatagaaggcatggcaacaccctcgcctatccccatgaaggcacgcacggtgagtaagcacggaagtccaatcttggcagcaatgggtgtaagaatcgttgcaagtgaccaccatacaaccccaaatcctagcacaaccttaccaccaaacctatcggcccaaatacctccaagaatctgtgtaagaaggtagctgttgtgctgtacatagtaggaacagtggtgtggaatgtcttttcaactggagagaaagtgctcgaatgacctgtgctgtggataaaattaactgatttttagatccattttgcggataatacattacggcagggaaagctcttcatgagacaatagtcgaactccattgttggctggagatatgatgtttgggctactgaaaggatgaaccacaaactaagtgatgtaataacccagggagttttgctgagaatttgagaacgtagatttagaaccaaataaacatgtgcagaatgcagccgcagcgagggcacgccagattttgaagcaagccttttgcatctgtttcttgagcagtccaagactccgagtccaagcttgtgcctggtcccccatgcatcttcttttcaatttttgttgtacaatagtgagcgatgaaactatgtgctcagcctccctcctgagttttgaggaaggaaccaaacagttgtgtaatggtagtaatattatgcaaaaaaaattggaatgaaaattcttgcttgtatt

SEQ ID NO: 37408 - DNA, 497 bp, Setaria italica
  Peptide Sequence Number=SeqID_103382
ttggacctgccttgtcttgacgctgctgagcaaggtccgaactccagccatggccgtgttgtgcatggcatgcagtcaggggagtgatgcttttcacaatctgggctgtattccaaccaccaagatataggaccacgttacgcgggggtacttcttggactgtcaaacactgctggcgtgcttgcaggagtttttggtactgctgccactggctacattcttgagaaaggttcttgggatagtgtgttcaaggtatctgttgtgctgtacatagtaggaacagtggtgtggaatgtcttttcaaccggagagaaagtgctcgaatgacctgtgctgtgtataaaattaactgatttttagatccattttgcggataatacattacggcagggaaagctcttcatgagacaatagtcgaactccattgttggctggagatatgatgtttgggctactgaaaggatgaaccacaaactaagtgatgtaataacccaggg

SEQ ID NO: 37409 - DNA, 1779 bp, Setaria italica
  Peptide Sequence Number=SeqID_103383
tagaacaaagaagtatcagcaatccatccaccaatattcgcaaaaactgccattgtcagccatggcaagacgcagagaagcccggactcggttagattgaacttcagaacctgattgtagtaagtgggcatccatgttagaagaatgaatgttccccagttgtggcaaaagtgtgatattatgagagcccagactggagcctttgatagaatcagcctccatggtatggaagtgacaggctgcttgaaggtaccaccacccagtatgtgcctcttttcagcattacttaggttaggatcatcatctggagagctgtgtgctttgctttgccacagtgcaaaccacacacttccaagggatccgaatgcataaaaaacagaaggccagccaaatttgctgatcaacataggtgagaaagcaaggccggtgactgacccaaggtacattccgctgtacactaaggcaagagatctgcttctctctgaaactggaatccatttggaaaggatgttgttcatagaaggcatggcaacaccctcgcctatccccatgaaggcacgcacggtgagtaagcacggaagtccaatcttggcagcaatgggtgtaagaatcgttgcaagtgaccaccatacaaccccaaatcctagcacaaccttaccaccaaacctatcggcccaaatacctccaagaatctgtgtaagaaggtaaccccaaaagaaagatgattggattagaccaacagttgctggattccagttgaactctgaagacattggaaggattgcaatgctcatattgacacggtccatattgcaaagaaggaatgcaaagaagcagaggaggacaatcgtccagcgctttggaaactcctgccaccatggagaaacctcattcgtatctccaatcctcacagcctcagcaggaacatcagaagggctcaagggtgatcccgttatttcatattgctcggctttacagtcagcacgtgttcttattggtagtttgtactctggctggacacaagcactctccaaactattaaaattttcccacctcctgggtttcaaccagccactgtttattggatctgaagacagaaagcactcaacccttgacacaactctcctcttcatgcttgcaccgtggaatgcccgagtcaagtagtctcttgaagactccaacatgggctgttgaaactgtccagacatttctagtgttgccattgcagtgttcctggaataattttgaaactggaaaagtgtgctcctagtaacatgtcgaccaaatcttcctcctagtaaaatacacttgttctgtggtaacgtgcaatatttcatctcatgttgtgttccatagctggcagtggtaggcatccagagccagtgagtgcggcacttcacttgtggcagggtggggcgggcgggcgacggcacccccaccccacctccccacgtcgctccacacccctgcatccccaggcccggaaggagagaacaagtgacggcggccttctggagttggagaagaagctagaacaggggagaaggagaggggtgcgggccggcggagagaaacggttgcttaggagcaggcggtgcgctgccgccgaccacggggctggtgctcaccgcgtcaccgagcgcaccgtgaacgaaaggtggcagccggggagaaaccaggcccggacctccaccggagcagcgcagagctctctcgctcacgggtcacctcgctgttacccgcgggagaggaagaaggggcagagagcgcgcggtgagg

SEQ ID NO: 37410 - DNA, 1633 bp, Setaria italica
  misc_feature (51)..(51): n is a, c, g, or t
  Peptide Sequence Number=SeqID_103384
atgatgatcctaacctaagtaaatgctgaaaagaggcacatactgggtggnggtaccttcaagcagcctgtcacttccataccatggaggctgattctatcaaaggctccagtctgggctctcataatatcacacttttgccacaactggggaacattcattcttctaacatggatgcccacttactacaatcaggttctgaagttcaatctaaccgagtccgggcttctctgcgtcttgccatggctgacaatggcagtttttgcgaatattggtggatggattgctgatactcttgttcagagaggggtctctataacaaacgtccgtaagattatgcaatcgattggttttcttgggccagccttgttcttgacactgctgagcaaagtccgaactccagccatggccgtattatgtatggcctgcagtcagggaagtgatgcattttcacagtctgggctgtattcaaaccaccaagacataggcccacgttatgcgggggtacttcttggactgtcgaacactgctggcgtgcttgcaggagtttttggtactgctgccactggctacattcttcagaaaggttcttgggacagcgtgtttaaggtggctgttgtactgtacataataggaacagtggtgtggaatgtcttttcaactggagagaaaattctcgaataatctgtggacagtcctatatgccactatatggaaattgactgattttgccaatatcactttggcgtacaacagggaaagcttgtctgctggaaaaaacacacacacctgctaataggcaaagtcatgtgtgttggatgtgctatttacctatctatgtacctatgtgcattttatctatttagatgctctttagatgttctatagatgcttggcttagcttcggagttacctacccatgattatcctatacacaatactaccttatactactgttcgaaaagttatactactgttcgaaaggactcgtatgtaagcttccgatgattaaaattaattgtatactataggtagtatgcatgagtaatatggggtagtatagggatatgattggaaatatgtaaaatggtattgttgaaatatatcaaatctttctaaattattctatcttctttcaaatatttctcaaaccgtaaggtatgttctccttcggtaattttttgtttcatgtgtgaattttgagagtggatgattaagctactgatcatgaaatacttctgaaatgtgctgaagcagattatgcaatcgattggttttcttgggccagccttgttcttgacactgctgagcaaagtccgaactccagccatggccgtattatgtatggcctgcagtcaggtttgatgtgcttcagaaagaccattcatgtggatccatgtcttatctaaaaaaatatggatctcaatgtagcttcttatactttaacaattggtgatgattccgccaaaagtgcttgctgtggtataagcgcgtgtaactgtccattttctttggcagggaagtgatgcattttcacagtctgggctgtattcaaaccaccaagacataggcccacgttatgcgggggtacttcttggactgtcgaacactgctggcgtgcttgcaggagttt

SEQ ID NO: 37411 - DNA, 423 bp, Setaria italica
  Peptide Sequence Number=SeqID_103385
gcgccttgccgtactcgaccacgtcttggtatatctcgtccagcgtcttgtacctgaactcgaacccctcctccaccagcttcgccgaggacaggcagactcgcggcttctccaggagctcacctgatgagtcgttgcctacgttgacgctgtactgcgggtactttctcgccaggaaccgtgcgatctcgacgatggtggtggtgaagctgctgcagatgtacctccccgacgccgtagtctccgtctcggccaggaacacctcggcgcggcagaggtcgtccaggtcgacgatgggcaccccgccgaaggtcttctcgatgcctttcagcatgcccagcgctgcctcgtcgccggatagcatggagaggctggcggggacgctcgtgtacaccttgggcaccggcgacgcgccgacggtga

SEQ ID NO: 37412 - DNA, 417 bp, Setaria italica
  Peptide Sequence Number=SeqID_103386
tgttgttgtagatagatcttccttcaccaactgctgcaacaattgttctgaaattgtcgtctgctagcaccatatcagaagcttccttagcaacctccgtgccagcaatgcccattgctatgccaatgtcagccaacttcaatgcaggggcatcgttaactccatctcccatcattgcgacaacctcaccatcttcttttagcagcctcacaatctcttgcttgtgtttcggctcagcccgggagaacagaagccccccttgctgtctcagcttagatttcttatctaggagggatatgaactctctccctgtgaaactcttgctgcagaggtcctcatccctgccgaaaacgcctatttcccgacagatagcctcagctgtctctttgttatctccaagttaatcaactaattaga

SEQ ID NO: 37413 - DNA, 456 bp, Setaria italica
  misc_feature (376)..(456): n is a, c, g, or t
  Peptide Sequence Number=SeqID_103387
tctccgagcagctgacgaactccctgtacaagcggttggagtggggcgtggcgttggaggtgggcggcgacgcgcggcgcgacgtggtggaggagaggataagggaggtgatggccggggagaaggggaaggagatgaggaagagggcggcggagtggaaggaagccgctgcgcgagcgacgcggcccgggggcagctcgttcaacaacctggacaggctgatcaaagatgttctgctcaaaaggagttagaggctcttatagcttgcactgtcgagccaaatttcagaatattttcctgggaatggtctgtaactctgtacatcatgttgtggtaaattagtttgaaattcatgaaacaaaaaaaaaaaaaaaannnnnnnnnnnnnnnnnnnnnnnnnnnnnnnnnnnnnnnnnnnnnnnnnnnnnnnnnnnnnnnnnnnnnnnnnnnnnnnnn

SEQ ID NO: 37414 - DNA, 435 bp, Setaria italica
  Peptide Sequence Number=SeqID_103388
agggataactctgtgacaaagtgaagatgacagaggaaggtgaaaggttgtgaatactactgttcttgtttgcgctagggatgttgccctcccatatatggccctttaaactgaatgtgcagagctacatgtgattaaaaggctcatatatggggggaaggcatctccagccagaatgacaaacaacaatagtcacaagtattctccttcctaggtctcttgcactttgccacaatgctctgcaccgctgtccattccaagttagccatgctgctgaagcgacaactaagcaagttgcccaagatgccatgctgatcatgctactgtgctgctttctaatcagcaccgcaatgcatactgagatcaacgcatatcctttgacctaacttcaatggattggttagcgcatcgcttggtctagtttcatcctgatac

SEQ ID NO: 37415 - DNA, 243 bp, Setaria italica
  Peptide Sequence Number=SeqID_103389
agaaaggatccagagccattcctcaagttgtggtcaagtggacaggcattcctgctacttcatcaatgtgggaagacttttacgttgtcaagcacaggtttcctgacgccgttgcttggggacaagcaacatctgcagccgggggagatgtaatgcctggaagaggcggagtaggcgcagcgaggggaatacgtgttcaggagtgcgtggtatgtgtgtattacagatgtgtgcgagtgtgta

SEQ ID NO: 37416 - DNA, 657 bp, Setaria italica
  Peptide Sequence Number=SeqID_103390
tgccgcgccggagtacgaccggagcgggcaggctaccatgaagtccgacgtgtacagcttcggggtcgtgctcgtgcagctcatctccggcaggagggccgtcgataccagcaagcctgtggccgagcagaatgtggtcacctgggccatgccaatgttcaaagaccagaagagatatcacgagctggttgatccactcatcaaaaccgagtacccagccaaagcgttgaaccaggtggtcgccatggcagcgatgtgcttgcaggaagaggactccgtgcgaccactgatggccgacgtcgtcatgacgctgggcttcctcacatctatgccgccagatccaccggcccctgttgctccaccggccaccgccccagagccgaagaaagacaaaggacgatcggacgatcattccgactcgtcgtcagaatcttcggacgacgacgaaggcaacgaggacgaggaggaggaggaggaagccgatgagcaatgatacgagcaggagcaggagcaatgatacgagccgatgagcaatgactcgtcgtcagaatgtggaagggcatggaggtgaagtggcttgatgcactgaggagtatcgtgtaaatgagttcagtgcgtggactggctaccgagaggtcgtggcaatgtaaatttgtg

SEQ ID NO: 37417 - DNA, 473 bp, Setaria italica
  Peptide Sequence Number=SeqID_103391
ataaaaataagttctattaatggcttacatggtatgacctgagcttgattaggcccaaagtacaggttccttaaagtaaaaaaccacgattgttaaaatccaaaaaattacatgccttgatccgaaaagttttcaatgcattattagtaatctgagatggactaatatagcttttgctatgtcattttaccatgtatctttcaattggtgagaattagtgtaaagattccttgctaccagaagcaagggtgaaaatagatgcaggcatgcgttttcttgttaatggcgagatacaaagactaaaggcaaatataaacctattacggaatgcataatgaagttacctgtgcttcagcttcttgacgcattctgtcatatctttgagcaaggtgccgagcatcctccaaaggagctcccataaccatagccctcagtggttctgcaacctgcgtgcccagggctttcagcaggtt

SEQ ID NO: 37418 - DNA, 1531 bp, Setaria italica
  Peptide Sequence Number=SeqID_103392
ttttttttttttttttgttaaactaaaagaaaagttatgggtgtatattgacgggatagttgaagaatgaagataaacattagtgttcagttcctgccatacggatttgaacaatgcggacggccagccaagcaggaacaagccatccaacaggcaggtttcaacaaaattacagatcttctctgacgataacgaacataatacacagtgtacaaccccggggatatgtatggctcggtgagcgtctcagaaaacttggccaactttacttgcaagcacacgttcccgtttctcgatgtagtcgtaagggaaccagccagctttacccctacattcaccttcggcccatccattgtttgaaacctttcggaccactatgtagtcaccagctgcaaggttgagctcagtgtcgctctcagcccgatatgactggatggcctcagccaagaagtactccacagtctcgaccaattctgcaacagtgttcctcatgaatataccattgacttcttcatatgcaggtggcggtggcatggaactttcaaccaccggaggaggtgctccttcaattctttggcgctcagataccatctctctttcaagctgatcaagaatttgtaggaccctttggtggtaatttctttcagattcaaccaatgcaataagtcgctgcaatgtcagcctttgctgttgagcttcaacagcagtcattgctgcaacagcttctttgcccaaaacccccatatttgacttcaactcctgcagctttgtttcagcagcctctagccttgaaatcatatcgccatttccagatgcctctcttaatttcatttggcgcttcgaaacttcaatagcctgtgcttcagcttcttgacgcattctgtcatatctttgagcaaggtgccgagcatcctccaaaggagctcccataaccatagccctcagtggttctgcaacctgcgtgcccagggctttcagcaggttacccctttccttttccatcatggatcgtgccttagcgaaacttaatgccgccttcgacagcgtgctcccactggtacaagtgttctcggtgccatacttcttgccgtcctcacataacttgttcccgatttcgacctgcttcgaacccgtgacaatgtagccctcgacgccgcgaacaatatccctttggaagtgcttggcggcgcgcgtggagatgtagagcttctcgagcttggagtgctgctgcgcgtcggcctcgtccgcgaaggcgccgtccgcgccgtacccgcccccgaactgcttcatcaccgcctgctgctgccgggcgacctgctcccggagcttggaggcctgcttccggatggcctccattgggcgcagccgccgccaacctctccgacgccgcggccgatcgagacggagacgggggtggggatgggaatggaggcgagccgaggagagatctgaatccgggaggagggaggaggtggcgtcaggctcccgctccggcgttcttcccttcccctttctctttctcctttttgtt

SEQ ID NO: 37419 - DNA, 2037 bp, Setaria italica
  Peptide Sequence Number=SeqID_103393
gggtggtggtggtatcttatacgatatagagagatgtgagggcatatccccttggtctggtggaagcattccatttggtccaggctgaactttctttggaggtgcaattgatgaaccagtaatgtcacataaactatctagacctgtcttaataaatttggaccccagttgtgagttctggaaagatgaaagaaaacaaagaacaattttgcatcaaattcatgtgcgttagagtatgtaatgtctaatggcaagcataagaagaataaaatcagcaacaatttgcataaacatcacaaatatgagcatattttgtatggaagcacaataatagttatcatgactcttagcaggttcagaacataatgttgtgattttggaagacagaagcagacatgctgtagacttaattttcatcttggggaaagtttgtataattttgaacgtaacaaaagcatagacaagtttatgctaacacaagaaatgtacagcatctgagtctgcttaactaagaccaagaagtttcaaatggaaggacattttgcgtgtttatattgcctggaactttcgcacaatgaggaaattttgcaaatgcaaaactttcttcaaagagaggaacgaaataaagtataccaaaacctactaacaagaatatattaacagacaaaccaccaaccaaccaatttcaaaacttaaggcatgctagcaatgttaatcaacactagtgaaatatgtaattaagcagaaatagatcaatgggaaggttaaatttatattttctgtaaaaaggtaacaagatgttcgaagaagtctgcatcttgtgaattgaacgccaccgctaatgcaaacgccttgtcacaaagcctgtgaaaaacccacacatatatctgttaccacctgtgagcttcagacaaggtcagagaaaatacctggaacgaaatgaaatgtcagaaacagataaaagaatacgataagaaaacaaacaagcaaatctggcaatccactgttgtttttaatagtattgtgaaatttagatttgtagtttccattaagagaactgcaagaacttcaggataaagcaaaatctgcaggtcaatttatattttggggctagttcaaagcaagtcagataaattctaaagtagttatttaattcacaagtctataaacaaggaatcattaagttctttcaagtgtataaacatatgatcatgaattgcatggataacatttgctgtgttgcatcagagctcctggataatcaaaagtgattcccttgtttaaaggcatcatggacagaagaaaaaaatcattattttgtggacaacaattttgaaatcacatttttaaatagatgtcgcaatgccatacaaagtttttcttgtagttgacagagcaacaatttacatcaaagttacaaaacaaaagtaaaaataggtcagggattcctgacataaaaattgccttgaaattttatgtggataagcatcagtggactcatcaaagatggcacaatccaagctgagagataacaaagaaagatgagaaggatgtcatcaaatcaggataggcatctactgaacaccacagggaaggaaggtgtggtcatggaatttaggacaatgaattaaaagggaggtaatacagagagaggaggtggatagaggggacagggacagcagaaaaagtacgaaagaagaggttatctgctgcacctcctgtagttaagaattaagtcaagactatcagcaaaatcaataaaagtaactttacctgattttctgtagtcggacccttggaaactggtagttcctggaatttccttctggaacgtttatccgcttccacatccgagcttgagttcgcttttatcaccgtgcttgttgatgtggatgtcactggaacagcctgagttgtcgacgatgaggcatgcttgagtgtgaatgccacttgctgcaatggagttgcttggggataaatatctccatagccactgtaaaatgtcccaccatttactgatggaataggacaggtcat

SEQ ID NO: 37420 - DNA, 2532 bp, Setaria italica
  Peptide Sequence Number=SeqID_103394
tttgcaaaccactatcacatttaatctaaaacaacaaatattcatgtctaagttaaacagctcacggttcattttgacaacgttcgaattggaaacacggtacaaagaaatatcttggcctgttagcagtactactgaacaagagcaagaagctccattgtctctttgactaggaagacacacaggcaggaaaatccttatctgccattctgatttcacaccagactacagtctactacagactcagtgttaagccgcccaaaatggtttctgctctgaacaaggagttggattgcccttaggtacgctgtctatgacatcaatatcgtcgtcgtcgttatcatctccgtaatccataagcttcagcaaagtatcagataagggtccgccttttggtttttcctccttaggctccggcgagactgatcttgtatcctttggaggttccatcagctccttcgatgcaaaagtcttgctcttatttcttgacaacatctcatttgaaggaaatttgggtggaggtggaggcatgctcctgggtgatggaggtggcatgtttttggttggaggcagcagcatgctcttcgggggtggtggtggtatcttatacgatatagagagatgtgagggcatatccccttggtctggtggaagcattccatttggtccaggctgaactttctttggaggtgcaattgatgaaccagtaatgtcacataaactatctagacctgtcttaataaatttggaccccagttgtgagttctgattttctgtagtcggacccttggaaactggtagttcctggaatttccttctggaacgtttatccgcttccacatccgagcttgagttcgcttttatcaccgtgcttgttgatgtggatgtcactggaacagcctgagttgtcgacgatgaggcatgcttgagtgtgaatgccacttgctgcaatggagttgcttggggataaatatctccatagccactgtaaaatgtcccaccatttactgatggaataggacaggtcatattactgggtggtggaaccccagaatatgttggagccacagattgcagtgtcacttcaggagcaacaatgggagcaataactccagtagatgcaaaggaatgtgacggtcctgctaacacattaggacttaaagtagaatggacatccgatcttgctcctgaggtatctacaccagctaacaactgctgaggaggtggaacagcaccatatacttttgaagaagaaattctggaagcaccgaattctgctgctattgtatccaggaggttctctgccaaaacttttgcagcttctaggctctttaaatgcatacttgtgaggtataggtgtagaggttgctgtgaagcttcaccaagacaaccgccaagattctctgaattttttcctcttattacaacggttgcccctgtttctttcatgatgtgatttatgtactgatcctacaatacaaaaaagcaaaagcaccaacagcacacaaacagtttctcccatccaaattgggatgccagagaaagctttatgattagattttcaagagaatgaaagaaaacaatacatgattgacaaaacaaaaactgagagacactaataacaaaacaatcaaatcaaaccagcatcacatatagttatacaagaacatacatttggcccacgaattcgagctgcgatgtttaatgatggatctgcatcaaaacccaaaatatcgaggcactaaaaggataaacagcctgtccactgctagaagaataagagaccaatgtagactctgagattgtgccttgtttcaatatttcttcaatcattgaagccgcacggtcaactgccttgatacgctcagcggtatctttcaactgagatccagcagagatatgtagatagagcggtttctcaccatcaggctgtccatttggagggtgatattttcccctggtaatgatgacagtgcttgtgcatctctgaatctcttcttgtgtttgtcgttttgtaagcttatatcgcacggatggatcagcgtcgtttataacaacttcccgcgctatgacctcatctggtatttttgcctgactcaatttctgaagtgcagcagaagcattctggagcaccaatggtgcaatatgcggcggcaacgaataaggaacagggactacactaggcaatgtagcagctccataggcggtgacgccaggcagtgcaacgccaggaagagcgccgatgttaatcacgggcatccccgacacggcagcagccttcaccgccgcggagaccaagtcctccgcgggctgatcccacttcctcttcttcctttcaggcctttgcctgcccgcggcggcgggctcgtcggtggccttgtgggcccggtcctccgtcatgggcgctcgccggcgggtgggttcgcggatgaatcgggggaaggaggtgggcacgaggcggcggtgaggcttggatgcggacgacgaggggatgggtccgcattggtgcctgggcgcctagccgtgtccgcg

SEQ ID NO: 37421 - DNA, 337 bp, Setaria italica
  Peptide Sequence Number=SeqID_103395
cacagtaccaagtacgttaagaataagataatagattggattactaaaatgcttcatagggaggagactggctaatcattgttgggtctaaagttttatataccattaacctttgcatttgtttaattcttctaaggaataatgtacaaggctaaacatttacaaagaggatttcccaagtgtactttctatatgcgttccacatattctcaatggcgctacttaattgagcatgcaaatgattttccatatggctcttaaaataacagaacagtaaatgcaccaacatgagctctcaagttttcttattactatttgcatctcttacagatacagg

SEQ ID NO: 37422 - DNA, 408 bp, Setaria italica
  Peptide Sequence Number=SeqID_103396
acaagaaagggtagaataagaacgctaggcagacaaaaggcattcggaagagtgtgttgctggctggaatcccaatggcacgtctgttcatgagctcagcagtctgcaagccgtggtcatgcatgggtatcctgagctactccatatgcatcagagatggctgcactgatagttaatgacgcctgctgctgcagctctggttgaccgctcagtaacatcagacttccccagagatcactgcatcagtcatgttctctaacttccagtactcctacgatggtgcaagctgctcagctctatcactgcatccatcattttgttgcctcaacagttggatgtgctcagagatggcagaactacgcattttcctcgtctgtcttccattcaataaaacaaaaaaataaaaaa

SEQ ID NO: 37423 - DNA, 460 bp, Setaria italica
  misc_feature (435)..(435): n is a, c, g, or t
  Peptide Sequence Number=SeqID_103397
ccttaataactccatagtaattgttggtggaactacagagaagcatcctatcaccaaaaagatgattcttgttggtgaagtcttccgttttgatttggaaacattgacctggtctgtcattgggcgcatgcctttccgaatcaagacagccttagctggctattggaggggtggctctattttacttctgggcagagagatcgagggcctgataatccagctcctaagaaagttgttggtagtatgtggagaacaaagctgcacctttgatgttaaaatttatgacaggggttttctgtacactgtagatttgtatctcgtactctaactgctaggaccctctcagacaattgtgctttcctgtattttgttgtctacctattcatattagctgctttaactagatttcaaacgtttaaaaaaaactaaaaaagngactgccaaggacacacagggagta

SEQ ID NO: 37424 - DNA, 282 bp, Setaria italica
  Peptide Sequence Number=SeqID_103398
gtgcgcttgcctcttgcgcgcttgctagcttgcttcccttctgcctccttccccttcctcggctgctctctccgattctcactgttcttgccggagcaaggttaggagcgaggagagcctgtcgtgctgccgcaagactacaagcagcgaggggtcggcggcgctgcgagctcgctgctgcctggggacacaggagcttcatacattttgcaagaccactgatacactggaacattcacaccctcaagacactacacttgaataaaacagcagtggggtcaa

SEQ ID NO: 37425 - DNA, 276 bp, Setaria italica
  Peptide Sequence Number=SeqID_103399
ctcttgcgcgcttgctagcttgcttcccttctgcctccttccccttcctcggctgctctctccgattctcactgttcttgccggagcaaggttaggagcgaggagagcctgtcgtgctgccgcaagactacaagcagcgaggggtcggcggcgctgcgagctcgctgctgcctggtgtgctgcactgccgaagtgtcaggggaaaacaccgaaatcatggaaatcagcttattgcaggatgaatcggatgcagcaaccacctagtttgcctaccta

SEQ ID NO: 37426 - DNA, 874 bp, Setaria italica
  Peptide Sequence Number=SeqID_103400
agacgaacctagtaggactacgacttagtactactaagatagacacaccggaatcgaataacactagcaatgaggttccggtagaccacactacactggatcctgatgaaacatccttgtaccttcagacaaaaccaacagactcagaaactgaaagtagtagttctgccactggagatgtggttgaaactgaatatcttgatcaaaagctactttctagaggtctgcctgatttaatggatgtcgattcgcccagtcgcttaacaaaaacaccagtgagaacaaaacatgtgactcttgtgctggatttggatggtgagcaggcactcacttcacattatgcaatcttacttttgacattttttttttctttctggtacttttgaatatctgttctccttccatttgttctgagacccatctgatttttgtttcgtcgatgcattaattacagtgttactgttttgtactgtatgcttttgctgctgccatgccattgttatttttttagtaagtatttgtatactattcatctgtcatgatcagaattgtgaaattcagttgtggtatgatattattactgccatactttctttgtaagatagtctaacccatttctcatatgcagagacccttgtacattcaacattggatcactgcgacaatgctgattttactctagaagttttctttaatatgaaaaatcatacagtctatgtgagaaaaaggcctcacttgaagatgtttcttgagaaggttgctcagatgtttgaggttgtcattttcacagctagtcagagaatctacgctgagcagcttatagataggcttgatcctgatgggaaatatatttcaaaacgtatttaccgtgact

SEQ ID NO: 37427 - DNA, 1974 bp, Setaria italica
  misc_feature (1956)..(1974): n is a, c, g, or t
  Peptide Sequence Number=SeqID_103401
tagtttcttcctgtttcgtcgataatcatttacactttacatgacttgctttgttcagccatgtggcctcacaaaatctttttttttctatgtaaaatcaattcatggctcgccctcttaaaacagactgattagtgattaagtatgttctttcactacactaggctgtatataggttaacgttttcaatttccccccactaatgtctttagtgatatcaaatgtttcaacagttggccttttcctactggaactgcagtactttgaacatgctttttgcaaatacttgcattaaggatgaataaaatgttaagcaacgactgtttagggacacaggagcttcatacattttgcaagaccactgatacactggaacattcacaccctcaagacactacacttgataaaacagcagtggggtcaactctaataagtcatcaaaatgtgtgctgcactgccgaagtgtcaggggaaaacaccgaaatcatggaaatcagcttattgcaggatgaatcggatgcagcaaccaccagtttgctaccacttccattgttgtcatgcggccctagatccatgggtccatcatcatctgaccttgagagtatcctctccccagatccaatctacagtgaccttcagttgaaagagataaactacaatgctgcagcaatggacgaaagcaccgagttccttcacctgatacttagtggcaatgatgaaggatacaacactacaactgaattccaagtttgggatgttctggacttctatgtcacagaaaacttttcttctctccagtttgatagtttaatgggttttacaaatgaagttagtacttcatacaactacaatgactgtatgaatttagttgacatggtagagcgacctgtggctcgcttgtctctagatgacacaccggaatcgaataacactagcaatgaggttccggtagaccacactacactggatcctgatgaaacatccttgtaccttcagacaaaaccaacagactcagaaactgaaagtagtagttctgccactggagatgtggttgaaactgaatatcttgatcaaaagctactttctagaggtctgcctgatttaatggatgtcgattcgcccagtcgcttaacaaaaacaccagtgagaacaaaacatgtgactcttgtgctggatttggatgagacccttgtacattcaacattggatcactgcgacaatgctgattttactctagaagttttctttaatatgaaaaatcatacagtctatgtgagaaaaaggcctcacttgaagatgtttcttgagaaggttgctcagatgtttgaggttgtcattttcacagctagtcagagaatctacgctgagcagcttatagataggcttgatcctgatgggaaatatatttcaaaacgtatttaccgtgactcctgtttattttctgacggatgttatacaaaggacttgacaattctaggggtcgacttggcaaaagttgcaatagttgacaatactccacaggttttccagttgcaagtggataacggcataccaatcaagagctggtttgatgacccctcagatcaggaattggtcgagttactcccgttcctggagagccttgtggacgcagaggatgttaggccaatgatctcaaagaccttccacgacaatcatgaacagaattaatcatttcatctggtgatcgaacctgcccgtgatgttaggttcgctccacatggtgcaggccattcttgggaaattaggtataggatcaggattcaccatttatgttatgttagctgttacaagtagcaagcataaactgcagtcggcaatgaaaatggcttgtatatgtatgtttcttcggttttcggtgtcacagatcattgtacagaaacgaacactagtgctgaataagtgatctgagtgcaattttgcttatgagagacttannnnnnnnnnnnnnnnnnn

SEQ ID NO: 37428 - DNA, 359 bp, Setaria italica
  Peptide Sequence Number=SeqID_103402
attctatatagatccaagtggcgaacccgtatccatttaagaaaggccacctgctatcgccagggccaagcagaccagagctctccccatcaaactcaaatgtcacagcaggacctcttgcttcctcgctccccatggccttctcaagcgccagtgtcattggtgtggcccagctcgttccaagtgccttccttaccaaaccaagccaggaatgcaggtccttcacactgagcgagtgtccacccaacacctcaatgcactgaagaagtgctgccccgtcccagctactacccggatccatttcaacgaacagcttctctgcagactcgaggagggcagccaggaggccagcagaagag

SEQ ID NO: 37429 - DNA, 531 bp, Setaria italica
  Peptide Sequence Number=SeqID_103403
aagttttggtaagttctagttgttacccttttatatgatgtatacatcatgagatccgtgttcattgtgcactttgttaaatttcggaacaatatgctcccccatcacaaatgtaaaggtgaaagtttgactatcaattttctaaaattgtatttatcgcagataggaaaaatgatatattctgaaattacttttcatgatgaatctagcatcatatcttgcaaaattatttgaatttttagctatccatggtcaagggctcaaggctaacaacatttgactctagaaaacctaattaaactactaatatttgtaatcggagggagtattttctcgtaaacttgaacaaatcaaattactacagccaagttagacattatcacagcagaggaatttatagttgcaatctgtattttgtgcctgcatcaagagttagctgtttttctgtagaatcaaaattgattgatctgcagagtgatctgtaggtcagacgtggacatttttcactttatctagctgctactgttttca

SEQ ID NO: 37430 - DNA, 1557 bp, Setaria italica
  Peptide Sequence Number=SeqID_103404
ttttacaaaacaccctagattacagcacggctgaaactcggaccgtgaagtttggtaagaatggggggaaataagtatgcctacagcatggttatacaaaaattacttcaagctttgcacaggggtggtctttgatgtattgctcaagttcagaatcgtctctaaacctgaaacggtataacgcctggcgttgtgttaggccgaccgggtaaatcctgtataccttcagatcgtccccacctctaatactcggtggtctttcgtccttccatacaggaacgtggttgagggacctaaatttagcaagcactgcagactccaaagcccccagagttaactggccagatctcagaaaaatgctctccgactgaaactgtcctctctctcggacaaataagtggtagactgtacccttcttgctggaacagctacaaggacgatttgtaaattttggagtcctttcctccttttcatgaatctttgtagcaatatgtatgcaaagccgacaagatgaatgaaccgctgccatgtcgataagtgctttgaaagaatcagacggaccatcatacttccacctcagagattgattgaaggcatcaggatttgaagcaatatttttcattgtcttagcaactgaagcaacatcatcaagctccttaatatgtaatatcgcgccttctcctggagaaaactcctgaacattcggagcaccaacaacaactggaatagaacctgctaccagcgactgaaaaaacttttctgttacgtaatcctcctcattagaattctcaaaggccaagctgaatttgtagcgcttcaatgtctccactttgtccactttgccatcacggttacgatgacaactaccataagaatcgattttcacatccaagttttcaagcatctcaagtgcttgcagacgaaagttccgtgcaccacagttggaaataaaggctgcagcaagagcttcttcggtctttggaggcacaggtgccataatatcatattcagcccatgaaaagtagcctacaggtacatccgaggaaaggctggtagtcatcacaattttgtaccctctccctcgagccacgtcaatattgttctctgaataatattgagatgattccattgatctgaggatgctatctacagaacgatctggcgcgattccaaaagtagcatcaggtgtcttactcgcagaaaacccaaactcacatcctacagagcatttattccaatccttagcggcgccgccgacgagcacgggttccctgtcgaagtcgcggtcgtagggcacggcgtcctccctctcgagccgctcctggcaccgccggatctcatcgtcgccctcgtcgcctcacccgcaccctcgtcgccttctgccccattccattgagccattccacccgaaccaagccagccatgccgaccgccgtgcgctcctcccacctcgccctcatctgcctcgcctttctcctcaccggcgccaccaccggcgagcgcctcctcgtccacagccgcacgaacgccaccaccaccaccaccttcccaccgcac

SEQ ID NO: 37431 - DNA, 1110 bp, Setaria italica
  Peptide Sequence Number=SeqID_103405
tttgattagtagattggcgctgtgtccaactcgaaatgacgagcgtgacttgcattgcaatctcagaccagggaacaccaagcgaaaagcaccgccagtgtgacaaggaccgggatgtgcgtagcatgagcatgcatcctggttgcgccggaatgtgttggagctgtgctgctgtttgatctggcgggaggcaggggcggctccgccacgtccgagtctgtgaggagcggcatgggagccaatgctggtggttgcgcaagtttgctgatgatttgcatgagatcgccagcacgaggaggggccatgaaaatcggcgcgctgttgcccatgttcatgcaactgttcaccttgtatcttcgagctgtggcaggaaaatcagtgatcagcccgtccactcccgcgcccttaacatacgcattgatctgcactgtcgcatctgcgaagaagtcgtatggctgagacacaaactcattcatgagagtgtaaacatagaccgagagacccgcagtctgcagtgtctggacaagattggtcttgtacattgtgaaatggtggggttcagggaaaacagagctggtatcaaccgatacggcactagcaaactttttgatgtccacgagggaagaaggtgtggcatccctgacttcttcgttgatcatgtacacaagatcgtactttgtttgctgcttgaacttctctagaactgaactattcgtcgactgaatcataactttctgggtagtttgattgttgtaaccagcatcgccaagggctttgataactgtatcaaccatgtcaaatccaagttcctctgccacaaaagcggcatgctctatactgatcatgattcctgataaatccttattctttgtgaagtccaaaaagtctgatagtctcatgaactttcctgcattcctgtacctcggatttctatccattctgtaggtggataatggggtagatattatgggtctcagattctttacaatgtcatcccaagtgaggttgaacgtaaagactcctcgcgcactctgaatttctttgatcactgccgtctgagaggcaaattgcgatcttgcaacagtagtatcatccattagattaaactga

SEQ ID NO: 37432 - DNA, 266 bp, Setaria italica
  Peptide Sequence Number=SeqID_103406
cgcgaaatcctcacatggcagcgctgcacctccgcgagacaccctgcttctgcttctccgacccctgtccctgcgccgacccgcgccgccccagccccgatctcgccgcccccgccggccccttctcctttctccgcgtccatcgcacctgctcctgatcccaccctcttcctcgccctcctcctcgcgccgtccttcgcggttctgattctactgccctgccgcggttttttgctcccggttcctgtgagtctctgagttcttcg

SEQ ID NO: 37433 - DNA, 270 bp, Setaria italica
  Peptide Sequence Number=SeqID_103407
ctctcgctctcccacgtccattcggccgcttcgccttgcagatcgccgtcttcctcatctccctctccctctcacacatgcacacggccgcattgccgcattcatttctcatcttctcgtgcacctatgttctttccctcgtcttcctcagtcagcaagatcgacggcggcggcggcggcggctcccttcggcggattgcccacggggaggggatcctcggctaatctagtggccagggtgccgagctcgccggccactgcttgttgtgg

SEQ ID NO: 37434 - DNA, 983 bp, Setaria italica
  misc_feature (962)..(983): n is a, c, g, or t
  Peptide Sequence Number=SeqID_103408
catttccgccgccgccgccgccgagagagagccggaccccgcccccacccaccaccatgtggcgccgcctccagccccgcggcgcccgcctcctctgcagcccgcgccgcccctctctcctcggcggccgccgccttccgccgcaccagcccgctcctctcaggggacaagccggcgacggtggaggacgtcatgcccatcgccacggggctcgagcgggaggagctggaggccgagctccaggggaagaagcggtttgacatggatgcacctgtcggccccttcggtaccaaggaggaaccagctgtcattgagtcctactacaacaagcggatagtcggttgccctggtggtgaaggagaggatgaacacgatgttgtatggttttggttgaaaaaagatgagccacatgagtgtccagtctgctctcaatactttgtgcttaaggtcattggtgatggtggagatccagatggtcatgatgatgatgatgaaggacatcactaaggatgcctcgtggttctgaaaacaagaatttgatgaggcagatgatttcactatacttcttttctagcaccagactgctctacggggtccttgtttatgaatagacaattggccatcaagcaggtggtagttttcacctagggattttgtccaaacaaaagctttttgcgatttgacccatgcatttctttcagagcatcatcgaataaaagatgactgcatcagattgctttcttttgttatctaatgcccatcgggtgtgatggacatgttatattcagtcatgcaacagccctatttctctgcttagtgtggcgggcagtttacaaaaggcctcctaaatctttgacaagtcagaagcaaaagtatggtgatccatgattttatgactatgagagtgactggttgcggtatttttatcccacaaataattgtttccgttatttttgaaactnnnnnnnnnnnnnnnnnnnnnn

SEQ ID NO: 37435 - DNA, 838 bp, Setaria italica
  Peptide Sequence Number=SeqID_103409
aggaaagagaaggaagaggctgagttgaaaaggaaggcttccactaaaaagcaagcaaacttcatggaaggtctatttataagaaagcccggtagtaacatggaaagttctggtaatcattatttggagaaaactataaattcaaaatcatcaggaactattgaagaacttcctgttgcagctacattagcaatggactgtacattgtctcaagcaaatcatttgagatgggggaattctgggtggaacatgtttctagatggagaaaaactctctcaacataacagattgcaccattggggtgttaggagaagtcctaaggttcagttgtttcttgagctaaagctacagaagtcctctgcaactgcaccttctgataatatgccaattccaataaaagaacagtcatctcaggagagcacaggaagcattgatttcagcaaacttcttgatgaactgaaaatatcatctcatgggaataaaatccattctagaactgttcagaatagcatatcatcttcagcttttttggtcaagaagcttttgcagtttgatagaagctttaggccagcatattacggtacctggagaaagaagagttctacagttagtgcaaggcaaccctttcagagggacccagaactcaattacgatgttgagagtgatgaagaatgggaagaggaggattctggtgaaagactatctgattttgaggaagatgatgagactatgaatgaacgtgattacgtgattaatgtggaagaggaaactgagaacagttttgtagtgcctccttgtattggtgatctttcaggggatgaggtatagcttttcttaa

SEQ ID NO: 37436 - DNA, 460 bp, Setaria italica
  misc_feature (383)..(383): n is a, c, g, or t
  Peptide Sequence Number=SeqID_103410
ctacacgtcccgcgaggcgagcgtggctgagctgatgcgcgcgccgctccacgacgtggcggccgcggtgcgcgccgccatcgcgggggtgatgaccgcggcgaggttccaggagctggctgactggatggaggagcggaaggcggcattcagggacggcgggaagtggacggaggaagtgaacctggggctcgggagccccgcgctcgtcatctccgggctgctcccgttccccatcgacggggacctcgggttcggcaagcccaggctcgtgatgccgtggctgcggcacggccggctgggctccgcgaacgtgacggtggtgcccagcccgagcggcgacgggtcgtggttcttcgccgccacgaggatgtggccccggntggtggaggtggtcgaatccgaccctttgctgaagcctgcagcgaacctgggacaggcgacgccggcgggaccccgt

SEQ ID NO: 37437 - DNA, 406 bp, Setaria italica
  Peptide Sequence Number=SeqID_103411
cttagtccttccttcgtccttggccctaccgccgatgccctcgcaccgtcgccctcctcggcctggccgccgccgtcactctcccggctccttgccgcggcgctgaggggcggccgcgcgggaggggagctccccgacctcgtggcggcggcaacgggcggcgcggggatagggacgctgctgatgagcacgacggcggcggcagtgaccaaggcgcgggagagcccgtacctgctggcgctggcggcgaacccgacgttcgtgtcggggctggtggcgtgggcggtggcgcaggccgccaaggccctgctcacctccgtcgtggagcgccggtgggacctgcggatgctgttcagctccggcgggatgccgtcctcgcacaccgcactctgcaccgcgctcaccg

SEQ ID NO: 37438 - DNA, 537 bp, Setaria italica
  Peptide Sequence Number=SeqID_103412
gtgggcggtggaggaaccctaaaaggtacaacctaccgtacgtaggaagcgccggtgggacctgcggatgctgttcagctccggcgggatgccgtcctcgcacaccgcactctgcaccgcgctcaccgcctccgtcgcgctctgccacggtgtcagcgacgcgctcttccccgtttgtctcgggtttactctaatagttatgtacgacgccacgggcgtcaggcgccacgccggaatgcaggccgaggtactcaataagatcgttgaggacctgtttgaaggccatccaattagcgaaagaaaacttaaggagttgttaggacacactccatcacaggtctttgccggagcaattttaggcatcttggtggcctggtattgctgccagggttgtattgtacccatttgatgttgctgttgtatgacttgatcagaaatgaaattattctcacggagattttgcacgtagtgtaacggtgtaaccattgttctggaaaatagctgtcttacccagtttgatattgtcaagaaggtgac

SEQ ID NO: 37439 - DNA, 634 bp, Setaria italica
  Peptide Sequence Number=SeqID_103413
caaacgaagtaaatcatgacatgttatttcctgaatgctgcccactgcttgtgctctgaaggaagttctgttcttcaaatttcattgttgctagatgtgtgcctgtcttcccttgagtatacttttcgtcatcaactaatttgtgctttttgatcgacacgcaggccgaggtactcaataagatcgttgaggacctgtttgaaggccatccaattagcgaaagaaaacttaaggagttgttaggacacactccatcacaggtctttgccggagcaattttaggcatcttggtggcctggtattgctgccagggttgtattgtacccatttgatgttgctgttgtatgacttgatcagaaatgaaattattctcacggagattttgcacgtagtgtaacggtgtaaccattgttctggaaaatagctgtcttacccagtttgatattgtcaagaaggtgactactgtcatccatcttgggcatgtccctgtatatatgtaactcaattgtacggaataatcgatatttggatcctatccagcctcaatacagagttgagactgaaggtatttgataaaaaaaaaataaaccaactaaaaactaaaaaaaagagaactagaccaaaggacaacaac

SEQ ID NO: 37440 - DNA, 252 bp, Setaria italica
  Peptide Sequence Number=SeqID_103414
caccctcctctccaaccataagctctgtagccaccgcggccacctcctcccgcggcaccaccccgtcctcctcccgtgccgtcacccgcagcgccatgcccatgccctcggacgacagcttcaccgcgttcatcctctgctcggcgaacagcggccacgccagcatcggcacccccgcggccacggcctccagcgtcgagttccagccgcagtgcgacaggaacccgccgactgcgcggtggttcaggatct

SEQ ID NO: 37441 - DNA, 369 bp, Setaria italica
  Peptide Sequence Number=SeqID_103415
agaatgacaaggttgatgaggcttttgagctagcattgaggatgctgagtctggatttagaactcaatgtctgtatttacaatgccctgataagtggcttctggagatctggaagcattagtaaagccttcaaaatcatatccttcatgaggaaaaacgggtgtgagccagatgttgtcacatacaatattgttttaaaccattactgcgacgcaggtatggtgaaggacgctgaagacttgatgaagaagatggaaatgagtgggtaaatcctgaccggtacagctataatcaaatgttaaaaggattatgcaaagctcatcaactggacaaggcatttgcttttgtgctgatcatatggaagttggt

SEQ ID NO: 37442 - DNA, 611 bp, Setaria italica
  misc_feature (1)..(30): n is a, c, g, or t
  misc_feature (38)..(38): n is a, c, g, or t
  Peptide Sequence Number=SeqID_103416
nnnnnnnnnnnnnnnnnnnnnnnnnnnnnnattttttntttttttttttttttttttcttgaacaaatacatatatttattggattcttttttcttactccgtacaattgagtcgtgagaaactacgtactacatagtacgtattactgaggacagtacagaactgtagtgttgaaatggaacccacatttagataccagaatacaagtggggaaaatatgtcgtgttggaacatacatcgattttatttcgggcagcctttagcagatgcgcatggaaagataactgagatgcacaaggatttgatctgaaggccacttattcagacccggacgagtgacgacctactagtggcttcccaagcaacagttctcatcgtcagagccacagcaggttttgccacactgaatccagatgccattcctcgtgaaatagcagcatcggcacccttgcgggtgaataccgtccctcctggctgctgcaggcatggccacagcaaagatgactgcagccattgcccaaatgaagagtgcaagaagtgtgttcctcctcatcctacctcagtcactcaaagctccacttccaaaatcttaagacttgcaatgactgca

SEQ ID NO: 37443 - DNA, 722 bp, Setaria italica
  misc_feature (712)..(722): n is a, c, g, or t
  Peptide Sequence Number=SeqID_103417
gaaattattgaagttgggtctcaaatggattggcgggctgaaccagataacagcattgttacgtcaaagaaaagacaagaaggtgactggggagaatgtttgtcatcacagaaccaagaacctcctcaaggaggaagcaatgcgaataatgaacatggtcggcaaaagaacattgtgagaggcaaggtatctctggctcatgttattaaccaggcggaagcttgttctcaacaaggtggctggtctagacacaaagctgtatctattgcggaaaaactagaacaagataatttgagattggagcctagatccagtttgctttgttggaaagcttcaagcacttccagacgaaagatgtccgcactgaagatcaggacccgaagatcacgagctttatcaaggctcgctttgtgcgggaggtgcatttcagtgagatctccgagatgaaacgttgggggcagtcgccccagatttacgtgtagctaacttagtagggatccataacttgttttttctgtagctgtagcagcactttgttaggtgctattatgtactagtatatagtagcgtgtaacatgtaggagaatgagagaaacaccgtagcccattcttttccgtggaacactgggaataattgctccataatttgttttattgggcaaatgctccagaatttgttgatgtgaagccaaggcattgccgacaaaaaaannnnnnnnnnn

SEQ ID NO: 37444 - DNA, 2463 bp, Setaria italica
  misc_feature (9)..(9): n is a, c, g, or t
  Peptide Sequence Number=SeqID_103418
aggccgtcngtggcaacagaacctgttccgcgccggcggagccgacggcgacggcggcggtggcgacgagctgatgcagcagcaggtgtcgcaggagtcgcgcaacgtgtgcggcatcccctggaactggtcgcgcatccaccaccgcggcaagtccatcctcgacatggccggccgtagcctctcgtgcggcctgtcagaccccaagtcggcgtcggcggcgcggaggtcggaagccgccacctccgcggcctcgtgcggtaatatgaacgggtcgcgttcgcacccgcatttcccggttaccgcgaggctgacttcctcgacgagttcagattcggactctctgcctctgcttgtcgacggtgcgcgcaacggcgtcggtggcatttctagtagcttctctggggagctcgggatcttctccaagagtagcgagctcgattctgacctcgcgtccgaggcacggtcagggcagaagtcacggggctcacaccgtggccggcaccggagcttggcacagaagtatgctccgaggacattcaaggacgtcgttgggcagagcttggtggtgcaggcgctgtccaatgccattctgaggaaaaagattggactggtgtatgtcttctacggaccacacggcacaggcaagacctcgtgtgccagggtattcgcaaaggctttgaattgccattctgctgaacacccaaggccctgtgattcatgtgcttcttgtattgcacacaatctgggcaagagtaggagtttgttggagattggaccggtgggtaacattgatctggacagcatcgtggatatccttgataatgtaatgctttcacccgtgccatcccagcacagggtgtttataattgatgattgcaacacattgccacctgatacatggagtgtcatatccaaggtcgtcgaacgtgcaccgcggcgtgtagtttttattctcatcagccccagtctcgatctccctcatataatcgtgtcaaggtgccaaaagttctttttcccgaagctgaaggagtgcgacattatcaacactttgcagtggatttctactagcgaaggtctagatgttgatagagatgcattgaaacttattgcttcccggtcagatgggtcactgagggatgcagagatgactctggatcagttgagtttgcttggacagagaatttcgatgtcgcttgttcagaacttgttggcttggtttctgatgataagttggttgatttgcttgatttggcactatctgctgacacagtgaacacagtgaaaaccttgcgagatatcactgaaacaggtgttgagccattggccctgatgtctcaacttgctacaataatcactgacatccttgctggcacctatacattcgctcgagaaagagtgcgaagaaaattcttcaaacgtccaaccttatcaaaggatgatatggaaaaactacgtcaggccttgaaaacactctctgaagcagaaaaacagttgagggtctctaatgacaagatgacctggcttacagctgctcttcttcagcttgctccagataaacaatatatattgccaagttcatctccaagtactagtcttaatcagggtctgcttacccgccctgagggagacatagcaaggaactctggtatggatcatagggagatatatgctggtaatcatggcttaccaagagcatctgatcttggaaatcagcagtatagagatgttaatctagcggctggtttgagcaacaatatggcgagcaattaccatgctggaaggagacctggggaacatactccagacagccatgtattgtcaacaggtgctactagagtgaatgaaggatctaggtacagcaaaactgacagtgaaatgatctggcaggctgtgctagataatgttcagtcagactcattaagaaaattgcttgctagagagggtcgactgatttctgtcagcctaggcacagctccaactgtccaattaatattcagttctcgtgtgaataagtccaaagctgagaagtataggggccacattctgcaggcatttgaatctgttctttcttctgctataatacttgaaatccgatatgaatcaaaggatgatctgacagcaggtcatgctccagttgtttctccctatcctgaggatggttcaaatatggtattgaggaggtctttcactaaacatagttcagtttcttctggaggtgagaatttaattagaaggcttcaaaaagacagtgtggtccagggtggtagctcaaatcagacacgctggatgcaatctgatccacacatattgactgaaggcgaaattattgaagttgggtctcaaatggattggcgggctgaaccagataacagcattgttacgtcaaagaaaagacaagtaaggttgtacttggggtagtaattgttttgtttcttaatttcttaacttaagttaaactta

SEQ ID NO: 37445 - DNA, 589 bp, Setaria italica
  misc_feature (27)..(27): n is a, c, g, or t
  Peptide Sequence Number=SeqID_103419
tgcatgatgcaccttcctgctcacccncccttccctgctgctcagcgcggtggctacgctgaataattggcaagctgacatgtcagagaatgatatcatgacagaattgaaaaagcttgatccccagaccccagccgggcaaggaagcactggaggagatgaaggatgtatgggtgcagctcaccatctgcactgctgccaagtcatggccggagatgcatgcagcacagctggcaagaggaggagccccttacttttgtttggctgcagctgtgacgcactataactgtggggaatttgggttcagtaggaccgagctcacccgtgatcgctctttctgtatacatctttttagatttgtttggtatatattgtccacagccttactaaaataattgttgcactgtctaatgtcgttctgtatactccctccgtccctaaataactatcgcttttggtttcgtgccacaagttactatgttagcttgatctagcaagattaatctgaaagagtgattagataaattaccatgtcaacactttagttccagctagtatgtgtacttgtggttatgttatttatatcgct

SEQ ID NO: 37446 - DNA, 608 bp, Setaria italica
  Peptide Sequence Number=SeqID_103420
atgtttgccgtgccatataagatgttgccattgaagggagtgaatggggaactgttgaaccatcatggtgccagtgagccagaggagtgctttatggcatttgcgaggggtcttcagtggggtccttcatgcagggcagaaggtctttgtgctatcaccactgtatgatccattgaaaggggatgcagtgcagaagcatgtgcaggaagtggagctgcaatacttgtatgagatgcttggacagggcctgaagccagttgccagtgtgggtgctgggagtgttgttgcaatccagggccttgggcatcatatattgaagagcgccacattatcgtccacaaagagttgctggcccttctcaagtatgatgttccaggcgtccccgatgctcaaagttgcaattgagccttcaaatccagctgatctgggagctcttgttaaagggctcaagcttcttaaccgggcagacccatttgtggagtatactgttacacagaggggtgagcatgtccttgctgccgcaggtgagatacatttagaacggtgcataaaggatttggaggaaagatttgcaaaggtcaaattggtggtctcagacccccttgttt

SEQ ID NO: 37447 - DNA, 437 bp, Setaria italica
  Peptide Sequence Number=SeqID_103421
cgtacccacagctagccacccacccactccagcctccaaggaaccgtagcagccgctgccacttcagcgagtagcgaagatgttcggagtgaagatcccgatcatcgacgacctgacgggcggcaacaagcatggccacttgaatggcaacgtggtgctcatgcgcaagaacgtcctcgacgtcaacagcatcgccggctccctcatcgacggcatctccgagttcctcggccgcggcgtcacctgccagctcatcagctccacagtcgtcgaccccaacaacgggaaccgcggcaaggtgggcgcggaggcgagcctggagcagtggctgctgaacccgccgccgcttctcgccggcgagaaccagttcagcgtcacgttcgactgggaggtggagaagcacggcgtccccggcgccatcatcgtcacgaacaacc

SEQ ID NO: 37448 - DNA, 1398 bp, Setaria italica
  Peptide Sequence Number=SeqID_103422
cctcaacctacaagactaatccaaccacgaagggaagttgacaggcctgtcttgacacctaatattattgacaaatgggatgtcaacccaccttgccctaaggtggcctctaccatcactattcttttgaagcagaagtaccctggttctacctatctgccagctggtcagcgaagagaagttccacccaatggagaagtggttctccactggcaacagtatcctccagaaacaagggatgctattttgaatgaatttcttcaacgctacaagtgggcccctggccgagaagcagagtgtctgaagctatttgagcgcagagcagcaagacaatttgccggtatcctaagtgaagagaagcgaaaggttagagtaaagtttgctgcagtagacaaatccactgaagctacaggcacacacaggtccaacggacatgcagagtcagaagatgaagatcaagaagaagagccagaggaccagcaggcattggagagacatgacgacgaggacccattactgtggaaaccttccccccctgcatggatgtacccaagttggtgggagaggctatgcgaacactgggccaaagaagaagtcttaaagatgtcttcccagaacaggaagaaccggtacattgggggtcgtgctcatcacacatcgggttcacggagcattgcgatgcataggcagattatggttatagaaaatggtgggatgccagtgtcagaactagaggtgttcaacaagacccataggcgtaatgctggcacaggggaatttgtcagtgagagagcaaagcgaactgtggagggcttcaagaaacgtatggaggaggctggtgataagatacacccccaccttgcatgggtgcaggaagtagggggtcggaaccgtggaaggtactatgggctcactggtatcattgacaagaacaaggttgatgagttagcaaagtccacaccaaattgttttggtataaaagggcaccggcagaagttcacgcaggagcaggtgcagcagatgattaatcaggccctgcaggggttaaatgaaacctgggagaagaagtttaagtccttggagcaaagtgtgtgtggaggtattgatcctgagcatgcccctggatcttctgcagctagagagggaggccaggaggatcagtcaggacgtcatcaggatgcgtcagatgcgcagtccgaggaaagccgcgaggacgacgatgaggaagtggtgtctacaagcgtctgagtcgcatcactgtgattttgtagtttgtgacagatgcttgtgtgcccattgtactccagagaaatgcttaaatgcacggtttttctccctggtgttgtgttggcctgttcggctcggcgactgcttcgacgctttgccgttttttttttt

SEQ ID NO: 37449 - DNA, 486 bp, Setaria italica
  Peptide Sequence Number=SeqID_103423
ggcagggctaaagattgttctagaatgacaataaatgcctcacaaaaattatcaaatatgtacacatatctacaatatgaggattttaaaattatactgaactgctggaggatatcaattttgcaaactaccacaatgctttggtgatctggcagtcgcacaagagaaaaaccaatatgtacttggaagactagaactacaaagaaactttcaacagttacgtacccaaaatgcttctgacagctagaacatttaccaaaaagaagcaattatcttgcaatccacaatcgttggaacagtgtacaatggagcatatggtaggatgattcagaaataaaacttttaaccagggaactaatatgctgaaattaggtttatcatgaataacatatgcatgggtgaatcagaaataagacttttaaccaggaaactaatatgctgaaattagatttatcgtgaataacttagaaaaacctcgcacacaca

SEQ ID NO: 37450 - DNA, 1407 bp, Setaria italica
  misc_feature (1392)..(1392): n is a, c, g, or t
  Peptide Sequence Number=SeqID_103424
atatctgtgaaatagacccaagatgtgtttgcgtccatggctcacaagcaagaaaacagtccttttcatggaatttgcttttgcttgtgaaggactatattttcttgcgcgtagcctaatcatggtattcaatcattcatattggtttatgacgtgtgtaggatgcatgagtttatgagaaacgattaagaactcccatagaaatcggaaaatcaactagccactcaaatggtattcatattggtttatgacgtgtgtaggatgcatgaattctatgggagttcttaattgctcccatagaaatcggaaaatcaagttgccactcaaatggcccttttgtgagtgtgactagctggtacccgtaaaatacttaatgcatgatggaaatgtatatatatttcctttcatataacttgaaagttaacctatggatatcccttgatgaactgttaagcagctattgcatacactgttctgcaagtaaggtgcggcactgttcatgagaactccctttctctctcaagggaacatgactcggtttatttaattttatggaaaaaatgctctgttactcgattttttaacagtcagttacttgaaatttgagacttctcctgtaattcattttatagtgctgtatcagtccaaacaccttcagattcgttatatatattgttagtactgtttagttacttcttattctctatatttatcttttgaaagaaggttttgtctctatggcctaccgtaacttgcttaggactaggagacttactgtttttgtgtatgcgaaacagagagattcccaccataatttataattttagcaaaatatttaatattaaatcattttaatattgtttccaaccggtttatattatcattaatgaaagtgacagtcacccatatacctgcagatcttttctagctccatgcaagcaaagtatatttgcagctagcaaagttgttgcgcttcctttgtaaatcagtaaacgtgatctgaactctgaagtatcgaaacatgtgtgtgaaatatataagaactaggaagcaaactaatacaaaaagggcttgatttcatattcttgattgtcaaaatttggttggtatatagactaatgaaaaacacagaccgaatatgatcattgatagatggttggtaattttattaattgctaggttttgagttttttttagtttaacgtactgtaggtctgtagccttttcaattggctacgactgtgtcaagtcataggctcatagcctctctgataaaggacgaaggtgttattgtcatatcactgttgaggtttttaattcatcttctgtcatgcatggcacttgtaggaagagagagatgtgacagtacagttgccgcccgtcccagtttgngagccatgcatgtac

SEQ ID NO: 37451 - DNA, 520 bp, Setaria italica
  misc_feature (338)..(338): n is a, c, g, or t
  Peptide Sequence Number=SeqID_103425
cgtaaggtcagactgatttcaaaagatacaaaatcatccggctgatgaatagtaatcccatttcgataatcaatattattccatgattgttcgaagagttaaaaatagcgtcgagacagcacggggcgagttgccgttgcacttccgaaaggggatcacgcgcttcactacgggcttttggatagaaagtattggagtggaacgaaggatatgagtataaaatgaactaatttttctccaatccttttcatttcacttcaattcattgctatccaaacaagtcctgcacaggctcacagccagctgtccgggaggccgatgtgctggaacctgaaggngcagtcatccgagtccttgctgagcacgatctccggcccgtcgccgtcgaacgcgatctcgtcggaggatgcctcgccgtcatcgccggccgcagcctgagccggcagcatgaccgccgccgccgctgacggcctgctggcgcccgcgctcctgaggagtgcggcggcgctgaggtcctccc

SEQ ID NO: 37452 - DNA, 775 bp, Setaria italica
  Peptide Sequence Number=SeqID_103426
caggatagcaaactttagcaacataatctagccaggctaatagaacaacgtacgtggaaacttagttctagcaacaaaaatgaggtctagcacttcatgactagctggaagctggaagtggttggagggccttgaggggattcataattactccatcaatgaggccatactccttcgcttctttcgcgctcataaagtaatcacgatcagtatctacgttgatcttatccaggggttgtccagtgtggtatgccagatatccatttaagttagccttgtggtgcagcatctcattagcctggatctcaagatcagtctcttgtccttgggctcctccaagaggttgatggatcattattcttgagttaggtaagctgtatcgctttcctgcattacatttaacagttatatgacttgtacacccaagcatggatgttgcttgcaatgtaaataaatattgtgtttgcaatcactactgctacctttggtcccagcactaagtagaaaagctcccatactgccaaaaaagaatataataaaggcagaaaggagtgtgtaagaatctaataaggtaatgcaaaataacatcatgtgacgtgtaacattagaagttaagcccaataataagacatggtcacagaataccagcaatgaataataaacatatttgcaccaactaaccctaaaactgaagcacaatctaggtctccactatatcgaagccattattcaatacttatatctagttattgcactgaatactaggagctgtaat

SEQ ID NO: 37453 - DNA, 1199 bp, Setaria italica
  Peptide Sequence Number=SeqID_103427
atggtccctttaagccaacattttaatactgttaatgtgaattcgattgcaatagctattacgaaggatggacatctatccacagatctttttttttggtttacacacagtggcaaactttgcaccatcaggatgggcatctaaccatagatcttgtttcatacagtaacaacctttgcaccatcaggatgcaaactttgcaacataatctagccaggctaatagaaacaacgtcgtggaaacttagttctagcaacaaaaatgaggtctagcacttcatgactagctggaagctggaagtggttggagggccttgaggggattcataattactccatcaatgaggccatactccttcgcttctttcgcgctcataaagtaatcacgatcagtatctacgttgatcttatccaggggttgtccagtgtggtatgccagatatccatttaagttagccttgtggtgcagcatctcattagcctggatctcaagatcagtctcttgtccttgggctcctccaagaggttgatggatcattattcttgagttaggtaagctgtatcgctttcctttggtcccagcactaagtagaaaagctcccatacttgcagctagtccgatacaaacagtggaaacatcaggcctgatatgcttcattgtatcaaatatagccattccagctgtcactgaccctcctggtgaattcacatacataatgatatccttagtgggattgatggcgtcaagatagagcagctgtgcaacaatgatgttagccataccatcctccacagggccaccgcaccggataatcctatgctggaaaagctggctgacgacgctctggaaccgctccatcaccatcggggacggcccacgctcctgccccgccgcgtactccaccgggaagtagggcgacctcggcactaccaaatcatccctgatcgaccaaatcccgcgccgctgggcagccccgtacgcccccgcgcccccggagacggcggcggtcacgccgcgagcgcacctcttgttcctgaggagaggcaaggatctgggagcggggttggggttggggttcgggcggaggaggggagcggtcagcgaggaggaagaggcggcggtggcggtcgccatggatgggggtgggagctcgagtggggttttgggcgggagggggctttgttttggtagctcctctc

SEQ ID NO: 37454 - DNA, 631 bp, Setaria italica
  Peptide Sequence Number=SeqID_103428
gttccttttcttccccaggttgttcacccccagccctagccgccgccgcagccgccgtttcgtagctccgatctccgattgccgcaagacaccaagatttcaggtagttgggctgtgagacaggctaaaacgaatgatggcttcacgaggtaccggtgctgtgctttcaagagctgctcggatgaggcaaaagctgcagtctgccttggaggccagtgccctagaaattgaagacgtttcttaccaacatgccgggcatgcagcagtcaaggacaatgcaaacgagacacatttcaacatcaaggtagtttcaccaaaatttgaggggcaaaaccttgtgaagcgtcacaggatggtttataatcttctgtctgatgagctgaactcaggtctccatgctatctccatagttgcaaagaccccgaaagagtttggatcatgattgtctaatgtgtaataagaactggccggtgttccaaaataaattgattatagcataaccaatgtaaccatgaatggattgcaaaactatgtcatggcatgctgctcttcttatgaagaccctgtattcagattagactggagtgcagaatttatgtcaattattactgatggacatgtcaattattgt

SEQ ID NO: 37455 - DNA, 346 bp, Setaria italica
  Peptide Sequence Number=SeqID_103429
tttttttttaaatttcatataaatattcaagtaaaaacatactactaattataaatttatttacaacgaggtgcatatttcattgatccggtccagaacatgcgtacaaatacactactggtacaacaacctgtggtcccaggcttccttccttcacaaatactcgtacacgttgcagtacatacgaatacatacgtctacggcgaccccacccccggccggtcgcttcacctcgccgtgcgcgtcatccacccatgcccatcctcgccatctcacttgccgggcctgccaggtcgtgctcatgggcgccgtcgaggggtaccgcattgccggcggcccgctcggc

SEQ ID NO: 37456 - DNA, 347 bp, Setaria italica
  misc_feature (68)..(68): n is a, c, g, or t
  Peptide Sequence Number=SeqID_103430
gggtcgccgtagacgtatgtattcgtatgtactgcaacgtgtacgagtatttgtgaggaaggagcctngggaccacaggttgttgtaccagtagtgtatttgtacgcatgttctggaccggatcaatgaaatatgcacctcgttgtagtacatacgaatacatacgtctacggcgaccccacccccggccggtcgcttcacctcgccgtgcgcgtcatccacccatgcccatcctcgctcactcacttgccggggacgaagttggtggcgtaggcccaggcgttgttgttgacggggtcggcgaggtggtcggcgaggttctccaggggccccttgccggtgacgat

SEQ ID NO: 37457 - DNA, 630 bp, Setaria italica
  misc_feature (47)..(129): n is a, c, g, or t
  Peptide Sequence Number=SeqID_103431
ttactacttacttggttactaactaaccttgttggttccctaggtcnnnnnnnnnnnnnnnnnnnnnnnnnnnnnnnnnnnnnnnnnnnnnnnnnnnnnnnnnnnnnnnnnnnnnnnnnnnnnnnnnnntttttgtgtcactcatatattttttttgttttttcttactactaattataaaatttatttacaacgaggtgcatatttcattgatccggtccagaacatgcgtacaaatacactactggtacaacaacctgtggtcccaggcttccttccttcacaaatactcgtacacgttgcagtacatacgaatacatacgtctacggcgaccccacccccggccggtcgcttcacctcgccgtgcgcgtcatccacccatgcccatcctcgctcactcacttgccggggacgaagttggtggcgtaggcccaggcgttgttgttgacggggtcggcgaggtggtcggcgaggttctccaggggccccttgccggtgacgatggcctgcacgaagaacccgaacatggagaacatggcgaggcggccgttcttgagctccttgaccttgagctcggcgaaggcctcggggtcgtcggcgagccccagcgggtcgaagctgccgccggg

SEQ ID NO: 37458 - DNA, 1294 bp, Setaria italica
  Peptide Sequence Number=SeqID_103432
ccaacctcccttcctcctctggacgaccaagccagggaggacaaccgatccagggaggagcatccagccaaggacaccggagcacggcagttcggcaaacaagaccttctctcttcctccgcatcccgcagcgaggcatggtggagaaggccagaaccatggcgcgcaagctagagatcccgcagtggaagtccggcgcgtcctccgacgggctgccgtcgccgacgagcccgctggaccgcgcttcgccccgagggtggcgccaccgcgacgccgtcggaggtgtcggactcgggatcctagccgccctggaggcccagccctccgcctccgccgccgcggtgccgaaggtgtccgcccccgtctccatcgcgcgccgcgcgcggctggaggtgtcggagctcgggtgcagcgggcggtgcgccaccagcctgtgcggcggcggcgcgcaggcgcagaaggcctcgacgtcagatggccggccgggctcgccgggtgccgcgttccgcgtggcggagttcctgtcgtgctgcgacatgtgccgacgggcgctggacgggaaggacatcttcatgtaccgcggcgagcgcgccttctgcagcatggagtgccggtaccacgccatcgtgagcgacgagttccaggaggagaaggagcggaagcgccgcgcggccgccgccgtgtccccggccgccgccgacggtctgccgaggaaggcggccgccgacatggccgggtcgccgtgcagcggcggtggcgggcagatcttcttcaccaccggcatcgtcgccgcctgacgggcggcagatcttttcttctatctagtgaccaaaacaaggcagctagagaaggaaccggcggcggctgtaacataaaaagacaagaagaaaaataaaacaaaaaagagaacgaagagaaaataagggtgcgtgcgtgtctgtgtagagagaggggggtgggaatttttgctgtttctctttctttgcgaggaggaggaagcacgggggttttgatattatttggatcttgatttttttgtattattagtagtaaaactcttatgatcatgcggcgatgggcgagatgttttcgtagcagcgggatggaagggaagggatgatgacaagttttccaaggattgttgcttcccttttgtttccccactgtcaaaaggaataaacatcttgtgtcctcctcagttcaatccctacacagacacgcacgcacccttattttctcttcgttctcttttttgttttatttttcttcttgtctttttatgttacagccgccg

SEQ ID NO: 37459 - DNA, 419 bp, Setaria italica
  Peptide Sequence Number=SeqID_103433
gaagtagaacaaatcagtggtaacaagtatggaaattttctacaggagataggaagtacttgttgtttggaggatgttgaaatgggttggggattttgccctattcaaattacaggtagagaatgtcctgcatgctctacctgtaatttgcccatttctcgagtctctgacactgaggtttcaggtgatatctgacagtgttgttagaaatctattggaatcggcaacaaatcttcaggtgctttgcctgcaccattgtattggcagtttaacttcatttagctttcaaacaaaggcaccgacattaagggtactacggcttcagtgggttactccatggattaccaatgatgatttgaaaatccttacagataattgtaacttagttgaactttcactgtctggttgcaaactccttg

SEQ ID NO: 37460 - DNA, 409 bp, Setaria italica
  Peptide Sequence Number=SeqID_103434
tacctgcaggccctgtggccgttctccgccctcgtgagggaggaggacgacctgcgcgcgtcggcgcggctggtccgggcgctctcggtgccggaggagacgaagcagttcgtgctcgcgctgcgcgaaccgccgcgggatcgggacggcagcggcggcgtgatctacatcctcgccgcgcagaacctttcggagcagtccgcgtcggacgccgagcgcctgatcagggaggtgcggccgggggccgtggtcacccaggtctcgcgcgcggccctcgacgacgtccggatcgaggaggactgcctgtccggcagcgccggcgggggcgtgctggtgccggcgtcgccgttccaggtgatcaagaggtgcgtcacggagaagaggagcaaggaccagtatgtcaaggcgg

SEQ ID NO: 37461 - DNA, 507 bp, Setaria italica
  Peptide Sequence Number=SeqID_103435
ttggcttttctaggtacatagctttagatatgcaactatatatatgctatatctagatacatagtaaaagttagtaaaaccaaaacgaatagtattttgggacggggagagtttataaactaaatgagtgttttaaataaaaaattgaaattccagactaataacttggatacttgtgttaagcaagagatttacttctatttaataattttgttttgaatttagttttatcttttaagagtggttgttcacattggagctgtggataagatgttctgctgtttggttagcattagcaataacttgttgggtccttcttgttggccaaagaaaagaagttcattgagaacaaatgctgcaccctcaaccagttgatattactttcataatttgtctatttctgtaacattgggagcaatctctgcatgtgaaggaccaatcacggtcgcgtcaagtgattgactaacttaggtgctcacagtcacatgtgagcttctcagtcaaggt

SEQ ID NO: 37462 - DNA, 413 bp, Setaria italica
  Peptide Sequence Number=SeqID_103436
aaaaaacaaaacctgactggttcaaatttctgaattgtggcctgtttgtttgtgaaatttgaatattcgaattgaagttctgagcggatactggtaggttatgctattttttggaggaaggggttaattaagattatggttatcagtagcttaccaatagatagaacaagatccctaatggtgtcctttttttttcaaatttcaagtgaagggttatggttatctcgtgagagctaattatgcttgtgttagcaggggatcctctgtgtgacattattccgttacacttggatgttttccggggtgatactgaccttctcagggaattcctacggagctatcagcttcctttactgaggggggaatcaaatgctgatatatacaagacaagtaagaacaaaaaattaacaaaa

SEQ ID NO: 37463 - DNA, 232 bp, Setaria italica
  Peptide Sequence Number=SeqID_103437
aaaacagaccgatttggccgtacatggttacgagaaagtgcaacggagatatttttgctcacatccgtgatatgctgtccaagactgatattcttcctcttgcgtcatccttgggagttcaaatgcgaaatatacatctattaccccttccacatatggagcatgtacccaaatctgggaacatgctccatatatggaagggtgcatgccttgcaataaatgttgacaagtg

SEQ ID NO: 37464 - DNA, 1514 bp, Setaria italica
  Peptide Sequence Number=SeqID_103438
ccgacgcgcaattcccaccgatcttaggagctccgatcccgcccccgcccccgccccgcctctacccaacccgacccaccgaccaggcccggggggcgatggaagcggcaagcggcggccggagggggccggcgctgggcgccctcgccgtgctccccgacgaggtgctctgcgccgtcgtcgacctcctcccgcccgccgacatcgggcgcctcgcgtgcgtcagcagtgccatgtacatactttgtaatgaagaacctctctggatgagcaaatgtctttcaattgggggtcctcttgagtacaaaggttcttggaagaagacaacattatctaggcttggcctatgttcagaaaatgacgagaactggcagaagcctcgtcagtttgatgggttcagttctttgtatctatacaggagatggtatagatgtgttactagtttaagtagtttttcatttgatgatggacatgtggaaaggaaagatgaccttgtattggaccaatttcgctctcaatatgatgggaaaggcccagttttgcttactaagttggctgaaacatggcctgcaaggacaaaatggacattgcagcaactaacaagggattttggtgaagttccattcaggatatcacaaagaagtcctcaaaagataacaatgaaactaaaggattatgtttcttacatggaactccagcatgacgaagatcctctgtacatatttgatgataagtttggagaatcagtgccagcattactgaaagattacagtgtccctcatttattccaagaagattttttttgatattttggattatgaccaacgaccggcatttcagatgggtttatcactaggccagagagatcaggtgcttcttggcatgttgatccaggactgacaagcgcatggaatacccttctttgtggccgaaaaagatgggcattgtaccctccaggaagagttcctggtggtgtcacggtacatgtaaatgatgaagatggtgatgttgacattgaaactccaacatcattgcagttggtggcttgatatctatccacatcttcctgaacatgagaagccactggaatgcacgcaattgccgggagagacttatttttgttcctagtggatggtggcattgcgtttttgaaccttgagacaacagttgcagtgacacagaactttgtaaaccagtctaatttttcagcatgtatgtctggatatggcacctggtcacaggcacaaaggagtttgccgtgctggtttacttgctgtcccaggaaaatctgctaaagataatgaaaatcacgcacctgtcccaatgagtggatggaaccaccctgacatgagccgtaaggaaaaaaggctgaaaggttcagaaccgctaagaacctcaaatagcataaatcactgttctgcatttgagttctcaggtgttcaggaaagtttggaaaatcaagatttctcatatgatatagatttcttgtcacaattccttgagaaagaaaggga

SEQ ID NO: 37465 - DNA, 2178 bp, Setaria italica
  misc_feature (2111)..(2178): n is a, c, g, or t
  Peptide Sequence Number=SeqID_103439
tagactaggtttaacttagactagtacccaaggaaaaatactgactaaaagataatgaaaatcacgcacctgtcccaatgagtggatggaaccaccctgacatgagccgtaaggaaaaaaggctgaaaggttcagaaccgctaagaacctcaaatagcataaatcactgttctgcatttgagttctcaggtgttcaggaaagtttggaaaatcaagatttctcatatgatatagatttcttgtcacaattccttgagaaagaaagggatcactattcttctatctggagtccaacgaattcactagggcagagagaagcaagagaatggctgcgcaggctttgggttcttaaacctaaactgagagaactaatatggaagggtgcatgccttgcaataaatgttgacaagtggtattcatgtttagaggagatttgtgcatgtcatagtttaccactacccacagaggatgagaagcttcctgttggcactggtagcaacccagtcttcattgtctctggcaatgtgattaagatatacgcagaaggaggattggattattctgtccatggtttgggcacagagcttgagttctatgatctcctgcaaaaaagtggttcacctttgatcaatcacatccctgagataattgctagtggctttcttgagtataaggatgatatctaccggacgattccatgggatggaaaagggataccagatgttttggccaaacactacccaatggaggtttcttatgcaaacagctgttttcctcttgggctttggagcaagcaacgctttggaacgagcagttcacctgatgattcaaacagaccgatttggccgtacatggttacgagaaagtgcaacggagatatttttgctcacatccgtgatatgctgtccaagactgatattcttcctcttgcgtcatccttgggagttcaaatgcgaaatatacatctattaccccttccacatatggagcatgtacccaaatctgggaacaatgatgtgaaagattgtggtgatgatacggttctacctgaatggaagcaactagtctctactctaaataggagaaagcaggatgtaaagaagcacctagctaactggggaaactctgtcccgcaagttctaattgagaaagctgaaggatatctacctcccaatatggacttcctcatcaagtttgttaaggatgatggtgacgtggtgtacccactcccgtcttggatacattcagatataatggatgataacattctcattgagggaatcacagaatcgagtccttccggtaacagcaaaggaagttatgaaacagatccggaaaaaatgaatgcaattcacataattgatttcagtgatctgtccattggggatcctctgtgtgacattattccgttacacttggatgttttccggggtgatactgaccttctcagggaattcctacggagctatcagcttcctttactgaggggggaatcaaatgctgatatatacaagacagtgcaaaattcaaagttccgcagggcatcatatcgcgcaatgtgctactgtatactacacgaggacaatgtcttgggagctatattcagcttgtggaaggagctaagggctgtgacttcctgggaagacgttgaaaacttcgtatggggagagctgaatcgataccaggagtcctgcactccatagttggctcttcataaccaatactgacaagactaataaacatgttcaaatctcgtgttccttaacatatgcaccttcaaagagcagaaaataatgaagacccaacacaaccattgcatgttcatatttcctggggaagcaataatcctgcaatgcgtgaaagtgctgtcaaatgatatttttacagcttataatacatggccatgtgttctttgcgtacacgtaaggtcgtttatagggtatagtgtgtataggaacacttacagataatccccagcttccgtagaacaaattaattaaaccgtttgattcatgagcgacctgctgctcagtgattttggggtaatgtaattttgagacacgtaaatggattgcacaaagcaggtagaatggtgtaaggttgtcaaaacnnnnnnnnnnnnnnnnnnnnnnnnnnnnnnnnnnnnnnnnnnnnnnnnnnnnnnnnnnnnnnnnnnnn

SEQ ID NO: 37466 - DNA, 384 bp, Setaria italica
  Peptide Sequence Number=SeqID_103440
ggccgagcccgcggcgaggctcccgcgcagctgcccttctccacctccgccgccgcggcgtcctcggcctccgcccccgcccccgcgccggccgttccccacttcttcccgcagcagatgcagtcctacctctccgcctcgcagcagtaccagcaccagcagcaccgccacggggcgcccccctcgccgttcgacaccgccgcgtcgtaccgctacgggcatcagcccttcccgcaggcggaccaggcgcagctgcagaggctcgtccagctacagcaacagcagcatcagcagatggccgcagcggcggcggcggcggcggctgcatctgctgcggcagccactccgggcgagagtccccgtgcagcggcggcgcctgctggc

SEQ ID NO: 37467 - DNA, 875 bp, Setaria italica
  Peptide Sequence Number=SeqID_103441
gacatgagtatccttcaagtcatcacacttttctagatccaagactcgaagcaggcgatacttgctgaagtctaaaatagcttcactaggcttcccaaaaaccgtcagagatcgaacgagagataaagcattacaatctgaattattgccatctgtagcagtgcttttatggacagaaagacgacgaacatatttgtcattgttcatctcatcacaaagcaaagtgacaaatttctgagagattgacatgtgcgtaatgaactcatgcatcatgccgtaagtctggcatgtcttcacggtctcattgttgcttacataaatgggctcaatgatgttccgatccttgagcgcatcaaaagcagttgcaggatccggggtgctagttgaaggttgtagttctacaaatccctcagctaaccatagtctcaacagactttttctcttgatctgataatcacatgggaacataccaaaatatagcaaacaggctttcaaagcatggtttggtagactggtgtagttgcggatcagcacccgtcgcattgcttcaaaagttctgtcattcttcaaatgataatgtaacttgctgcatatatcttcacatgaaggtcctttcggccaaccctgtgtttgcaagaattcacctatagttaccagagcaagtggctggccgccacatttcttcaaaattgctgctgaatccggctgcttgtaacaggaatattcgttagggcaagctttgaaggagaacagttgtttcgagcattcctcatcgagtcttctcatcttgtgcacatagctttcagaggagctgcaggcattagcaattgattgaatagtagttgtcaccactactctgcttgaaacatcattat

SEQ ID NO: 37468 - DNA, 938 bp, Setaria italica
  Peptide Sequence Number=SeqID_103442
gggattcctggctatagaaatttcaggaatttttggccgtcgtcttctttctgttcgcttattgaccaatggcacctcatcttcatccgactcactataacaatagtaattcaaccactcaattattaccgagtatgaaccatccagcttgctttgttccttttcttccgtctgctgcactcttggttctctagtacagctgttcgtggacgttttggtgcctcatgaacagcttctgccatttgaaggtcacagcaaacatcctttgaaaatttgattttcttgttagacctatctcttgaagaggaatccagtcctgaacagccaactgcattatcagtaacatgaaggaacccagcagaggcatcttcccgctcatttttgttgcttcttctgccctgatctgatgtatgtgtgaagtgccaacttttgcagacagcttcgtcagccttgccctcggtgagtgcttcttccgcttttggacctccaggtaatgattcttgaactctacaatagctacccgagcactgctgcttgtgtctgtgccagtgacacttagaattttgacatgggtcatcggcaccttttctctcaatgcagtcattaccagaaggaactttcatcatgattgacttgatcaaatctccacagctttgacacttgtagtgatagtatttctttctgatctcatggagcagtgttatgctgtagccaccaactggtcgacggggatctgctacagagctcaaattgattttattcatcagtttccgaaattttgcaccatgatcactgtggtcactgttattgtctttgatgcaaatataggcatgaatcatctcatgaagcaaagcattcttcagatcagattcatcatgacattcgcataaggatttggaaagaagtataatacaaccaccacctccaggataatagtc

SEQ ID NO: 37469 - DNA, 1180 bp, Setaria italica
  Peptide Sequence Number=SeqID_103443
caaacctctcccgcgccgccgccgccgccgccgccgcttcaccctcctcgcggtgccgccgtccgtcgaggtaaggtcaacatggtgagggtcagtgtgctcaacgatgcgctgaagtccatgtacaatgctgagaagaggggaaaaaggcaggtcatgatcaggccatcgtctaaggttatcatcaagttcttgatcgtcatgcagcgtcatggctacattggtgagtttgaatacgtcgatgaccaccgtgctgggaagattgtggtggaactgaatggaagactaaacaaatgtggtgtcattagccctcgctttgatgttggcgtcaaggagattgagggatggactgcgaggctgctcccatctcgtcagtttggctacattgtgctgacaacttctgctggcattatggaccatgaggaggcccgtaggaagaatgttggaggcaaggtgctaggtttcttctattgaagggagtatgatgaaagtattaggatatttccaagaactcatctgagcacgtttttttttagtatcagaaaatccatgcaagattcgagtaaaggaacttgagtgttcttgatggcaagataaagaatataagacaagcatataggtcaattaactgcaggcacatctcataacaaggatcccaatttctgaagcacataacacattccagaatcttaacaagtcgctctattcagaccaaaaaacacaagctcagatgagttcttggaaatatcctaatactttcatcatactcccttcaatagaagaaacctagcaccttgcctccaacattcttcctacgggcctcctcatggtccataatgccagcagaagttgtcagcacaatgtagccaaactgacgagatgggagcagcctcgcagtccatccctcaatctccttgacgccaacatcaaagcgagggctaatgacaccacatttgtttagtcttccattcagttccaccacaatcttcccagcacggtggtcatcgacgtattcaaactcaccaatgtagccatgacgctgcatgacgatcaagaacttgatgataaccttagacgatggcctgatcatgacctgcctttttcccctcttctcagcattgtacatggacttcagcgcatcgttgagcacactgaccctcaccatgttgaccttacctcg

SEQ ID NO: 37470 - DNA, 783 bp, Setaria italica
  misc_feature (726)..(783): n is a, c, g, or t
  Peptide Sequence Number=SeqID_103444
aacaagtacccaagacaacaatccatttcgtttcagtccaagaatcaattgagcacgccaggagaagctagctgctaggagaccagcaacaacttgggcaggatgcagccggcgaaggtgaaggcgaaggacatggtgagctcggcgaaggagaaggtgaaggaagggtcggccaagatgcagggcaagacgggggaggcgacggcggcgacgcacggcgagaaggagatggccaaggaggcagcccgcgccaagaaggaccaggccaccgccgacatgcaccaggagaaggccgagcaccgcgccgacgccaccaccggccgccacggcaccacgggcgtgcccctcaccgggccgcacggccaccacggcgccaccaccggtgcggccgtcgaccccgcctacccgtccgccggcaccacgtacccggcgtcgggcaacaagtacctctagatcagaagctgcgtgtcaggggatcgattgtggtcgcactagcgttttttttgtgttgtgtagcgaccgagtgtgatcgagcagcgagtgcatgtatgctttgtgcacgtgcacgcgtgacctggaataatgagaagggtagcagcagtagtcttgggtgaagcttcgtttcagttgtaccatgtactgtactcatgtgtggtgttgtttctgtgtgtagtgcttttttttggaagaaatttatgtagtgctgcatgcaaatctaagaaactnnnnnnnnnnnnnnnnnnnnnnnnnnnnnnnnnnnnnnnnnnnnnnnnnnnnnnnnnn

SEQ ID NO: 37471 - DNA, 253 bp, Setaria italica
  Peptide Sequence Number=SeqID_103445
ttttttgaaactgaacctccagcaaattactctggtcaagattgtaaacagaaactattacatttcgacagcaaatagtaacatcatggatgaccagtgtttcttccatctcagtatatatccaaagctgacttatctgctgacttatctttcatcgtcctatgcttaaccagacagaagccatgactcaaaaaggttccttcgttttttaataggctaagaactgatccaccgttttcattacggcagatgg

SEQ ID NO: 37472 - DNA, 383 bp, Setaria italica
  Peptide Sequence Number=SeqID_103446
tctccaagttcattttgaccaatttttcgttcatcagagaaatttctggtgatgaactgcagaagtggatatgataacttactcggcttctgtcttccctcaagtatacgctccagtatattaagatcatcagatatgtcgaccattctgcaatgctcgcaaagagtttgtgagaacattttctggaatttttgcaccatctgccgtaatgaaaacggtggatcagttcttagcctattaaaaacgaaggaaccttttgagtcatggcttctgtctggttaagcataacgattatgtcacacgcagtaggtcttttctttgggtcctattggtcacaaatttgtgctatttcaatgcatctgtccatttagttcgcagactcc

SEQ ID NO: 37473 - DNA, 599 bp, Setaria italica
  Peptide Sequence Number=SeqID_103447
aaaacagagcaatctttccatctcatcgttggtactttctccatcttttcctacatttcttcttctgcataagaacagttgcctagcaaccgtattatatttccatgctgagccatcgtcatgagtttaacctcctgatgaaagatcttatcgctaatactgaggctcctagaaagccttgtcacagcaacgatccgcaggattcctcggcttctgtcttccctcaagtatacgctccagtatattaagatcatcagatatgtcgaccattctgcaatgctcgcaaagagtttgtgagaacattttctggaatttttgcaccatctgccgtaatgaaaacggtggatcagttcttagcctattaaaaacgaaggaaccttttgagtcatggcttctgtctggttaagcataacgattatgtcacacgcagtaggtcttttccttgggtcatggtgaacacaaatttgtgctatttcaatgcatctgtccattagttcgcagactccacctaatgattcgtgccaatagttcctttaacatccgtagccgatatcgatattgtggatttttttcgctattgcaccttgacaaaccaaaat

SEQ ID NO: 37474 - DNA, 504 bp, Setaria italica
  Peptide Sequence Number=SeqID_103448
catgactttgaattatgcaactcagtaagcctttgactttttataggggagtagacgtagtaagaatagtaaataaattatgcatattcaatgactaaaagagatttaatttgttcctgccaagaacactccaggcactttggtctggagtgaaataaaaccacggaaacaaagttgttcttttgttttggagaaatcacataagggaagttttggacagcagaagaggcgtgactgagaacaaccagacaatgacattaatttctgtccattgctggtcagaccatttgatatcaaactcatcagcttccatgaagtcaaatgacaaggacctatatgtttgcagtggcaagtcaattttcgcatttggaatggcgaatcataaactcatgaaaccattctttttttaataataacaggagcagtgtaaattcaaatatagacgtgtaatcacttataagttataactcgatgatgaatatctaaatgtgtagcttaccgctg

SEQ ID NO: 37475 - DNA, 440 bp, Setaria italica
  Peptide Sequence Number=SeqID_103449
cagagattcgcacactacatgacatcatccaggaacaagtttgctacagaatacaggtactgcctcccagctcccgaacacatggatgggcacccttctgaatttagctcagctcaagccatcccgccgctagtcgccgtcctgattatctgaaataaggatgatccaatgaccacaaaaatgaagaatccaagcacaattggtccaacagggtagtcattccccttcttcacggtagtctcaggcacggagcccctctttgtgatgttcttctggaacttggcactcttcctgtcagcaagacgccttgaagtagtcatcttcgcgtgccgccgcgggtgatcttcgtccggggacgggtcggggacgttcgtactagtcgtcgtaggtcgtcggtcgggtaggtagtaggtaactaaggtaaacttaaggttagttcg

SEQ ID NO: 37476 - DNA, 1064 bp, Setaria italica
  Peptide Sequence Number=SeqID_103450
gccccgtaagtagtcttatcatgataatacccaaactgtatatatctgacttgcatgatatttgtttgttgtctatcatttctggtgcaatgtatcccatagttcctttaacatccgtagccgatatcgatattgtggatttttttcgtcattgcaccttgacaaaccaaaatctgtaatttttggctccatgtcagcacccagcagcacatttgcaggtttgagatccaaatgataaatgtgtgctttctggagatagtccagagcctcacaaactccctttattattcgataacgcatgttccattgaaatccatcgaacttttcttcaaggtaatggtgaaggtctccattcggtacatactcaaagcaaaggaacctgtgtctgttctcagcaataactgtttttttctgtctacttccatcacttccccttgtatatctgcacaatagcctaagaattttacaatatttttgtgctttaccctcttcagacagttgacttcatccaaaaataacttatcagaaaaatcgttcattatggtaaccttcttcacagcaaccatcccattttgaagacctccgtgttttagcatgcccaggtaaaccacaccaaaggcaccattaccaatcacttcagcaaaatttttggtaatagattttataactgcataaggtatgctgatgggtcctgcacttgcatcactaagtctgcgctccacgtcttcaacgtcacttgcttgcctcatttctggcctgtccatggctgtacgctgaggaactatggaacttttccttgcagcaacaacagggttgtggtgtctcgttttgatgctcttctttctttcggacttgaaagcctcccgttcctcgctaacatcatggatgaccagtgtttcttccatctcagtatatatccaaagctgacttatctgctgacttatctttcatcgtcccccacccccccattttgactataatcagttgattctgtgctgggcttgaagacctggatctgaagactggagggacgcgaagaagagactgctccccccctagctcta

SEQ ID NO: 37477 - DNA, 2117 bp, Setaria italica
  Peptide Sequence Number=SeqID_103451
aacatgctgctccggaaacatacagttgccgactgcatgactttgaattatgcaactcagaagcctttgacttttataggggtgtgagtacgtgcgtgtagatgtataaattatgcatattcaatgactaaaagagatttaatttgttcctgccaagaacactccaggcactttggtctggagtgaaataaaaccacggaaacaaagttgttcttttgttttggagaaatcacataagggaagttttggacagcagaagaggcgtgactgagaacaaccagacaatgacattaatttctgtccattgctggtcagaccatttgatatcaaactcatcagcttccatgaagtcaaatgacaaggaccgctgttgatgatggttatgcttgtcattacaagttctgatgatttgaaatattttgggatttattgctttaaagtcatacatgcaaatcatttgatggttctgggaaatatgaaatgcacttccataattgcgaaaatcaaagtgactccgggcaagttcacaaaaatcccagtaatgcatattcaagtatcttactcagatgcacactggaatttcaaagagcaagtccccatcattttcgtaggcccttttgcttcgtgctagacactttgcactcttacattgactggtggtcttacatcgtccaacagagtagggagtgaatgcaatcactcaagcaaaacaatcaaatccaccgtatcgaccactttatcagcagtctcttcgtcgaacatgtcttcagttatatcctcagctgtaagactctcatccactctggtgctctgcacatagaaccgtgatgcaccatactcgcattgctctggtgccatctcaagtgctttcaatgctatgatgaccctgcacctggatcgcggtccaacgatacttttgcttggctctgtgtagtacgggagtgagctcgaggctgtgattctgaaggcgaaggcatcgtctgtatcattgatcagctcaaccgagcgtgttatcgccttattatgctcaaaccggaaatgaagctcaagtggctcaatctcaagcatgtcctccaagcaagaatttatctgatcaagtgtagaaacattggcgttagtatccaattcgttgagttcaccgactatgtgggatataggaggtcttttgtttgggtctttttgcaagcaactttgcgccaattccaggcatttctttatctgtaggcaccacaatgcagctgatttgccccacctgtgtttccatctccggagtactgtagtaagacagggtgcctccttacttccggtcaccaactctctgattatgatacccaaactataaacgtttgctttaaatgacacactgtcattcaacatgctctccggagccgaatattctcgctgttgatgatggttagtgcttgtcattacaagttctgatgatataccaaattctgtgatctttggaaccataaaatcatccagtagtatacatgcgggtctgagatacatgtgaacaatttcccttttcttgtgaagataacgtaaaccctcacagattcccctgattatctgatatcgtgtatgccactgaagtccccttaattcatcagaaagatgcttcttaaggcttccgttgcttaaatactcaaaacagagcaatctttccatctcatcgttggtactttctccatcttttcctacattttcttcttctgcataagaacagttgcctagcaaccgtattatatttccatgctgagccatcgtcatgagtttaacctcctgatgaaagatcttatcgctaatactgaggctcctagaaagccttgtcacagcaacgatccgcaggattcccttgaaaaaatctccaagttcattttgaccaatttttcgttcatcagagaaatttctggtgatgaactgcagaagtggatatgataacttactcggcttctgtcttccctcaagtatacgctccagtatattaagatcatcagatatgtcgaccattctgcaatgctcgcaaagagtttgtgaagacacaatctggctatttttgtctacctattcttgtccgttaattgtaaaacggttggtatctagttctttagtct

SEQ ID NO: 37478 - DNA, 887 bp, Setaria italica
  Peptide Sequence Number=SeqID_103452
tttttttgaaactgaacctccagcaaattactctggtcaagattgtaaacagaaactattacatttcgacagcaaatagtaacatcatgggccggtacaaaattttgtaagttgttacagctggctcaacatggcacaccggcattcttgtccatgacttggtccaagcggcagctccaggcaaaaactgtgacaacatgggcaagcatgagtgcgacagtgaagttcgccatcttcttatgtttgtgctcatcagattcttggtgctccaccaatggtagcttcaggaagccgttctatcgagtacctgtgttgtgtaatatacatgattggaacaccaggaaccttccttatcctccttttcaaatctctatcacatgtagcaacaatgtagcatttgtgctgagtaaccctatccacaatgcagtcatcagcataagtccccttgtgtgtgcatgctaatctttggaacctagggtccttggcaattctcaaggccacgcgatacttctgtcccagcttttcaagctcagccataacacagtcagtgatacacggggtgcattttgcataaaggcagtccatcattcctttctccaaatccagcttgttctggatggaaaagttgatgaagttggtgtccacaatcacccgataaggcggccccagcgcagtgttgtagctgaagaacagagccgacgaaacttgcggcacattccggccgagcttctccttctcggcgtccttcttattgtggttcagcacatcctgcttgtacttgttgatagtcttcttgctgatgatcttcttcaccgccgcgaacttgggccccttgctctttgacctccccatcgagacccaaaccctaacaaccgcgggtacctcgc

SEQ ID NO: 37479 - DNA, 613 bp, Setaria italica
  misc_feature (1)..(19): n is a, c, g, or t
  Peptide Sequence Number=SeqID_103453
nnnnnnnnnnnnnnnnnnngtcctttggtctagttcttctttagtttttttttttttttttttttttttttttaattatagctactcttctacatatttaaagttttctcatatctttaaacttacatcagttcaagtttaaactctttgataccccaaacaaaagaaaagaaacgcagagattcgcacactacatgacatcatccaggaacaagtttgctacagaatacaggtactgcctcccagctcccgaacacatggatgggcacccttctgaatttagctcagctcaagccatcccgccgctagtcgccgtcctgattatctgaaataaggatgatccaatgaccacaaaaatgaagaatccaagcacaattggtccaacagggtagtcattccccttcttcacggtagtctcaggcacggagcccctctttgtgatgttcttctggaacttggcactcttcctgtcagcaagacgccttgaagtagtcatcttcgcgtgccgccgcgggtgatctcgccggggacgggcggggacgtcgacagcgcgaggcgcggcgggaggagaggaacaaggagcgaccgagcgggggaggtgcgtgatttgggg

SEQ ID NO: 37480 - DNA, 580 bp, Setaria italica
  Peptide Sequence Number=SeqID_103454
taaagatgggatcagggcggggagttggtggagagggtggagaaggttgaggagagtgtgaggaggatggtggcggccgttggtgtgctgtcaaggaccgttgagaagctcggtgtcaggtttagggtgttgcggaggacattgagggatcctatcagtgagacagcagctttagcccagaagaattctgaagccacctgtatactagctgcacaagaagtccttctagaaaaagaaattggcgcaattcagaaggtgctatatgcaatgcaggaacaacagcaaaagcaacttgacctgatccttgcaattggggaagcaagcacgatactagatggtgaacaagacatgctagaccgggacagtgctagatcttccagcgttgatccagctccagagatagagaacaaacaggcaaaaataagctcgggagctgttacatgtggcaacaacaaaccctgattatctcatctgaaatggaaacaagaagcatccaggatagaccttcgattgtgttttacctgacattgtgaaacgcggatggttacagcaccacggcataaatgataatgctttgcag

SEQ ID NO: 37481 - DNA, 993 bp, Setaria italica
  Peptide Sequence Number=SeqID_103455
atcaatcagaaacacacacaaaatcaataatcaaattatcagaacagaacctctgccctttcttgcactgcctagttgaccactggtggtgtgtggttacttggaaacggctggcggagctccattcatgcatgcacaatttgcacatgcacccatttgacagcaattatgcatgcatgctccatcggcactcccatgtgctaactgctaactaaaatttaggactctctcagcagagaatctatcaatgacgatgttaaaacagcttcatccatgtacatcaattcctctcgaggaaataaaggcatcgtcagcgctttctgcagcaggtgcacttctcctgctcatgtttcagagcctgcagttcgctctgcaggcccttgatgtgctccactgcaaggtccaacatgtcggcggtgctcgtttgcttgtccatgtggggcacaagctcctgcagcttcctgagcttctcgctgatcctcgtcctccgctccctctcggcgatgctcctggggtgcgtggcgcacccgcgcttggcgcgcactttgaacggcatctggtctggctgcagctgcatgtacctgtccatgcccgccatctccagcgccgtgcccgccatggcgccgctaaactgagagtcgtacgcgccgagggtggcgatgatgtccctggactcctcccacggcccgacgatggagaacccgccggagaaggagcgcgccgcggcggcgccaccaccgctgctactactctcgccagcgcggtcaccaaccaggccgggcgggaaggcgccgtcctcggagatctgcgagaggtggcccgcggcgccgcctggctgcggccgggtgaagttgaactgggacggcttcatcttcctgccgctgccgctggcttcggcgccaccgctgcctccggcgccttttgagcccggatacccgttgtccaccacgaggttggagaagaagccggccggcgagctgctgtgccgcgcca

SEQ ID NO: 37482 - DNA, 281 bp, Setaria italica
  Peptide Sequence Number=SeqID_103456
caaaagatcagatggtgaaacttcattactttttgttttccagcgacagggctagaacattactggcataaatttgtaatagtaggttattttgtgcttactggcacaatcggtgcctagcttacattagaaaatagtagcacgaagggtcatacttcaaaatcacaagattcttgcctacaacctcctaaaatgttattgtgattatcatactaatggtgatttattcatgtaataaccagatcaactggattagccagtgttgcccgagtctttggtag

SEQ ID NO: 37483 - DNA, 311 bp, Setaria italica
  Peptide Sequence Number=SeqID_103457
taagtgacactgagagaactcagatacttgcaatttctgatcttatggttgaaatcactgatcagagccgttcctctccctacaaaagccttgatgaagcaggaagaaggttctgggttgctgtgcagttccgacagcttcatgctcttaggagatctggatattcatctagtagtgaacggctccatgtggattctgcttcgatagcgtgggccttccaatctgattgtcaggatgatctacttaattctgtgcttcctttagagccaacctggccagagatgcaaaagcttggtataggattatggcat

SEQ ID NO: 37484 - DNA, 654 bp, Setaria italica
  misc_feature (1)..(19): n is a, c, g, or t
  Peptide Sequence Number=SeqID_103458
nnnnnnnnnnnnnnnnnnnctttgcattggtattactttctgatggataattggatacggtatgattgcaattgcttcagattaccagataattggatacaggcaactgactgatggactgaaactctgacaaaacacacaaaagctccgagatcgatggagtcgtatgtacatgcacagcacaaaagaaaatcctgagcaagaagacgagacgacggcacgacgcccaggaacatgaacatcgttaggcctgcagagcgagcgccatcaccggcgcgcgcgcgcgtgggcggcttggcctcagaagtagaggaagcgcgccctcatggccggcgacgggcaggactcctggcagagggcgtcgagcttccacccgggcagggagacgccctcctccgcgcgcctctccttgccgctgcggccgcggccggcgtccgccgaggacggcgtgcccgggctgatcggctccttacccgccgccttagccgcgtcgacggagccagcgccagccgccggcctaggcgccgggacgatggtcacctccggcacccggctcttcccttccatctcctccggatctcccttggaatcacgctgtgcttggggcctgaaagctgggtcctttgctgtgcgtgtgctacactctgtctgcag

SEQ ID NO: 37485 - DNA, 1802 bp, Setaria italica
  misc_feature (1)..(21): n is a, c, g, or t
  Peptide Sequence Number=SeqID_103459
nnnnnnnnnnnnnnnnnnnnntttttttacgactttacggtaatttgctatgcacttgcatagatcacatattgaaaattacatcagtccggatactccaagatgggagagtgatttttagaatgcattcttaaacactaaccacttttctccaactcgttttccgtgtcccaaaaggtagaaacaccaatagattatatcgagctacatggcaagaatgcctcatctaaatatcatgcagatttggctcttcgtcggtacaatgacccagctcggatctgatctttttggtaagtacatgggcgagctgattgcattgcactgcgaggccatggcacaaaatatggggcaactaagccatgttatagctccaaaacttgagatttgaggtcgattccgttgaatataaacgttccccgcaacggcacaaactgcttggtgaccagctttattacttcttgggaagcgacgccgccaataaaagcagccactgcatgaatctctgcacccccaaaccggcacatctcagcaatcagatcttcagttaaggatgctccactcaagcccatctcacttagcactgaagcggcagcagtcttcagcctagggatatcctcatcaatctcactgtcgaagattccaggtaatctattatagttggcagccaatcggtcaacggcacgtagtagaacgtagaaattcattgcataactgtagtcttcatcggtgaaatacctttggacctcagaaacaataggagagctaaattcctccatgatgctacgatatctacagaccctgagttttctagcatttttacaaaatgttttgatatatgctcttgaaatagaatccggatctctaccaatccgcttcaagatatcctttacgcgattctccatggcaagacagtcagcttcagccttagcttggtaaatcttttgtaggcttacataatactcagtaagtgaagtcatgtcaggaattgttccctcgagaggcagctcaccattgccctcatttgcaacaaattccttcaaagcagccactaaaatccagaaatccgttgaagatgaattgacttccgcggagttatcatcaattatctgctggatctcatttcttattcctggagtggctgagactttatatgaagactccacagcttctttgtaattttcttcatctacattaagcatatgggcccgaatcaggtccttaaactcccttttctcttgactagttgaaggtaaattaccatcatgagcatctgcccatttttctgcaagcctcacaaggataacaatgtatggtgtatgcttgtgcacgacaggatctttatcatttatgtcaattgattttgcaaactgcttgagttcagcccatggattgtgaaggcgcaagtcatccaagaagtggtctggttttgattctatgacacagtgttccttgacgctgaccctgaccagacctgttagaccatatgaacgtgctgcaatcaacacaatatttgcttttctgcagatatcatctagcttcagtaaagaactctctggaagctgagtagcaatgacgacagtgaactgggaaaagaatgaaggattggtgtctatcaaagtcgctggagtctcctcaacaaacttggctttaactgcatcattcagctcttgtaggaaagaacagatggatttagctcttggttgccccaaacatccttcatccaataagaaattattcccgagatcagatgcttcgactttagagccatcaacaacagtgacacttcctattcctccaagcaa

SEQ ID NO: 37486 - DNA, 277 bp, Setaria italica
  Peptide Sequence Number=SeqID_103460
gggggtcgagcgggtcggcggcctcggcgagtaggaagacgaggagctcggcggcggggtggggcgcgcctggcggcgtggggaaggtgtcggggttcccggcgacgatgcgcgcgtaggagaggatgaggccccggaggtgcgcgatggaggccgcgagcctcgcccggagcccggcgtcgcggatggtggagatcttgcgggcctcgtcggcggcgcggccgaaggcggcggcgaggaagttgaagggggcgggagcagcgggcaggtccggcag

SEQ ID NO: 37487 - DNA, 350 bp, Setaria italica
  Peptide Sequence Number=SeqID_103461
tactgaccggaaaaaattgacttgggaggaggccggagcccggagctagtctgccggcagccgctgatttttgtttgctgaattgcagcgatggggttagtcaaagtagtttgttttcctcaggcgaagcgagagaccgagagaccccccggtccctactcctaccatgctcggttgacagtcaaactgaggagtactgtgtcagcaatgatgcagcacgccaaagcatggacgaaggaatcagcagcagcaccaattgtatgtgtagatctgccgtatcaatgcacttgattcgtaaggctagtcccaaagtttcatcgcactgtttataaggatatcacgtcatccca

SEQ ID NO: 37488 - DNA, 161 bp, Setaria italica
  Peptide Sequence Number=SeqID_103462
aggatgacagctcaaatcagcacggcatccttctctcgtgcgttgtctgatagctgtccggcaacaggcgatgtagcgcatttggcacatacagtctgccgttttcttcagtctcctctcacagccttcctctccattcttcgccaacttgctcctacact

SEQ ID NO: 37489 - DNA, 353 bp, Setaria italica
  Peptide Sequence Number=SeqID_103463
gtgcgctgtctatgacggcgtcgtccacaccaccttcatggagggctactggaagcagggtaaggacaaggaggccatggacaactaccagtccctgctccagcggggcttcaagatgacaccggccacctgcaacgtcctgctcgagacgctcttcaagcacggcaagcacaaggaggccaacgaactgtgggagaccatgatggacaaccacacaccaccaaccttcattggcatcaacgctgagtcctacaatgtcatggtcaaccagtgcttcaaggagggcaagtttgaggaggcaattgaggtatttcaccgccagcaggaagaatgttcagatggatgttggttgc

SEQ ID NO: 37490 - DNA, 476 bp, Setaria italica
  Peptide Sequence Number=SeqID_103464
cccgtcgtctagtgctgaagaccggtctgaacatagtccttgcatgcaacatcccaaagacagcccatgctcgaggctgctgcggagaggaagctggtagagaagctgaaaggtttgggctacatgagacccgtagctggggaggctactacttccactgcacactgatgggtggtgtgatctgaagtattccagccgtccagggcttgtgcacaacggcagccttcctagaacgcaaattgatcaatgtcttgcatgactgagagtcagcttctgaccatggcggtttgtattcagatcgctgagcaccatgcctgcgctgggccagatcgcaaatcgaagtttctgggcattttcaggcgttagatggccgctacacggggcaacaagcagtagtttctttatttattataagtagatcgatgcacatcagaattaaagcgcaacttggatttcatcaagtaaatttgttgttg

SEQ ID NO: 37491 - DNA, 1114 bp, Setaria italica
  Peptide Sequence Number=SeqID_103465
cttggtgctgcaggctgcccggctgctgcagtgccgcgctgcgtgctggcctggcacctagcgcgctaggcgcagccagtccgcaaggggccagggacggggtcacggggttcacaaccagtagagccaggcgagctgctgccagtgaaccagaggacagagccaccgaggttttaggaacgcaatatgtcttccgaggagctgaggacaagctttgcagatttggtagtgggttcgccaaaccagacagcgggccaaaataattcttcaggtgtttcatcgtctgaggagggcctgcaagtcacttgtttcacggaggaccttcatgatgtcacacttcattttcagatagttaggctctcgaaacagatctatgtgtgggttggatgcaacacggcaaaatttggccatttgtatgctgctgcaaccactaggccggacaacagagtgagcgtcacctctgtactaggaggaacttctgacaacaccggatcaggcatggcccgtcgtctagtgctgaagaccggtctgaacatagtccttgcatgcaacatcccaaaagacagccccatgctcgaggctgctgcggagaggaagctggtagagaagctgaaaggtttgggctacatgagacccgtagctggggaggctactacttccactgcacactgatgggtggtgtgatctggtgaggtttcggtctcaaaggcgtagtttcaccattaaatagatgtaggaggatccgaggaaggcttgtgatttttgctgggctcaattgattgggcatctgtatgctgttatgtggcagaagtattccagccgtccagggcttgtgcacaacggcagccttcctagaacgcaaattgatcaatgtcttgcatgactgagagtcagcttctgaccatggcggtttgtattcagatcgctgagcaccatgcctgcgctgggccagatcgcaaatcgaagtttctgggcattttttcaggcgttagatggccgctacacggggcaacaacaaatttacttgatgaaatccaagttgcgctttaattctgatgtgcatcgatctacttataataaataaaagaaaactactgcttgttgacaaaaaaaa

SEQ ID NO: 37492 - DNA, 325 bp, Setaria italica
  Peptide Sequence Number=SeqID_103466
tctgtcatcctcgtggtaacttatttcttcttctccattattccaaattgttttcattttattgtgcacgcatggaggcaatatgttaagaaaatgtgaactctggatataggtaacttgataaacttcctgctcataaaatgatgaggagtcaattaaaatgaattaagctggatcaaaattcatcatcatatgaggagtccagtccatctcaaatcacctgtggtaacaattgtatattagagtaggcagagaaatgagcaatgtgtaactgctaaaagcttaactgttgtctattcttagtattatctattttccatcatat

SEQ ID NO: 37493 - DNA, 320 bp, Setaria italica
  Peptide Sequence Number=SeqID_103467
tcaaatattttactaaatgtcttccgctcattgtttgtgaccagatcttcttcttggttctccactggtggcagagtgatcccattatccgtgcaccactgtgagatcatgcttctcacaaggtggttcggaatgagaattgtatttgaaaggacttgctgggtctgcggacatgttcggtttccagcacctaaccattcttgaatgaagcggcgatcatacgtctggccggaggcgaggacgacgggatccctcatgatctccgaggagatggggcacaggaactgctccggcaccacggcggcctccgccccgccctt

SEQ ID NO: 37494 - DNA, 283 bp, Setaria italica
  Peptide Sequence Number=SeqID_103468
ctcacagcaatgcactggatgacgatattttcccctataaaaagcaccacctggtaaggaatgaagaaaatcacttgccagttcccaaagaggaccatactcatgcacagttccgcaaagaaccgcatcctcctcagatgtccatgagtctgaagcacaatcacgagaccatattcccttctttttcagcctctcaggttttattacaataacacgttttactgacatgcaagggatggaaattcttgcctattctacttctttaagttcttagtcttgtcct

SEQ ID NO: 37495 - DNA, 1017 bp, Setaria italica
  Peptide Sequence Number=SeqID_103469
gacaagcaatgatatctacaatgacatcagaaagagctgcaagtgaaacgaagcattccagtaatccagttccatctgtcttcggcacaacaactatatctacaataacttgcgccatcctacggaacgcctgaatgcttcagtagccgtccaagacagcctttaagctgaacaagaaggcgtcatgtttgccctgtttctgaagcagagaccatgtggtttagtctaacattggagcattgaaccatctatactggtcaacaactccatgttctacaatctcaactaagttttacttagtgcgtgagtgccaaacagtttggtgctgtgcatcgtcagtgtcactccttaggcaactgatcatgaggctgcaacacgaaaaatttggcattctcagcaacctctgcttcgagcacagcctcaaggactaggtctgagcctgttggtccacctgagcggcttggaagtaatccagcactttcagctgatattggcagtacatttagcaacccattgctttccttgaattgttctttgtagttcccactcaaggaagaacacgccttaatccctggggcttcctatagcggtgcataggtcattgcttggctgtgcagatttgtcaatcctgtatcaactgtttccatgtccttggatttcactgacgtatggtcagccacatcaacttttctaccttcagttgtacttgcgaagttctgaggggaatcagatcgggttctaagaaagctttccatttcttcacgaattatacttcgaatttcatgacgaaattcctctggcttacttacagaaacatcagaggcatcggatgtccttgcttcagccatgccagtgttatgctgtctcatgttaaactggccaggagttaatctagacaagttctgaacttcataacgaattgagtctaactgtgtcatcgcatctttaagctccttatgaacctggtggctgcagactgccccaggatctcgtccagctgccggcgcgccacgatga

SEQ ID NO: 37496 - DNA, 464 bp, Setaria italica
  Peptide Sequence Number=SeqID_103470
caaaataagatgcatggagcatgtgttgccgacagatagatgccggcaccaccatctccttgccattgcgacgccgtgctgataggggaagccatgagaagcccaggcagcatgttggggagccgagccagtggtgaagcgcatcatcagcgaagggcatggatccagcggctgttgtaacggattctttgaggaggagctcagatccgggccatcccgcaaggatgagcactccgggcagatctcgaccttccccgtccttctatggagggaggctagtcaccacagtgttgtccggagagaatagggctcacctcgacctgcttatctccacagtggcgcgtggggaagacggaggaacccgcctccatggatccagatgctgggatccggtcgccatcgccaccgccggcaactccctgtgcgccgccgccgcaggctcgaggagagagattggggagggg

SEQ ID NO: 37497 - DNA, 254 bp, Setaria italica
  Peptide Sequence Number=SeqID_103471
cgcatttgctatataggatcgaccatctgacccgggctaacctttagacaatcattatacccaacagcgtgcctatacgataatgtatgtacttactagatcacccacaaagccatcgtagaatatcttgtccacgttcagttaaggcattaagtttcttcactctcaaacttcaaagcaaagcgaagggtggactgcgttcgagtttgacgttgaccgaacttgcatccaaagctagcgatgggtgctatata

SEQ ID NO: 37498 - DNA, 455 bp, Setaria italica
  Peptide Sequence Number=SeqID_103472
aactgttgcaaaaagtctcgtgggtctgggttatgaggtcgaggttttagcatttacggatggggaagctcgtgatatttgggaaaatatttgccttgtaaatattgtgaacatcgatactttgaaatctgtcgactggtcaaagtacaatgctgtgttattaagctctcttgaaggaaaaagggttgtttcaattcttatgcaggaaccttttcgacttataccagtggtatggcttatacatgaagacactcttggacaacatctcagaagctatgcagagttacaggagtccattccaaatgtcattgaggattggagggctcattttcatgcatgcgcttatgttgtgtttccagatagctaccttcctttcttatactcgcctcttgattctgggaacttttggtcatttctggttctccagttgatatctgggccgctaaaagatttgg

SEQ ID NO: 37499 - DNA, 279 bp, Setaria italica
  Peptide Sequence Number=SeqID_103473
gcccgccctcgcccccgccgcgtccttccagccggcgttcgtcgccgtccagtccgtggtggaggagtacgaccccgccaggcccaacgactacgaggactaccgcaaggacaagctccggcgggccaaggaggccgagctgagcaaggagctcgagcgccgccgccgcgaggagcaggagcgggagagggagcgcgagcagcgggagagggaggcccgggagcgcgaggagagggactaccagtccagggcgtcctccctcaacatatccggcgaggg

SEQ ID NO: 37500 - DNA, 363 bp, Setaria italica
  Peptide Sequence Number=SeqID_103474
ttagttaggtacttcctccccctaatagcaccttcttcctatgaggctggagtccatcaaggatcaaaaccagaatcttcccacaatcacacagagaaagaagaacaccaagactggttcccagcctatccaaggtagaagcgagcaacgttagtgtggcagtaacatggtgactgtgagagaggagatgcgtaagggccatggacagagcaggaggacatgcaactggtatgcactgtccgcctgttcggtgaccgtcgttgggacttcattgcccaagtctcaggtttgaggggttggggaactacaacttaggtagctattttgcaatccttagcgcaaagtcgcaaacataaatgtaat

SEQ ID NO: 37501 - DNA, 425 bp, Setaria italica
  Peptide Sequence Number=SeqID_103475
tggcttcctccccctaatagcaccttcttcctatgaggctggagtccatcaaggatcaaaaccagaatcttcccacaatcacacagagaaagaagaacaccaagactggttcccagcctatccaaggtagaagcgagcaacgttagtgtggcagtaacatggtgactgtgagagaggagatgcgtaaggggccatggacagagcaggaggacatgcaactggtatgcactgtccgcctgttcggtgaccgtcgttgggacttcattgcccaagtctcaggcctcaacaggacaggaaagagctgccgccttcggtgggtgaactacctccaccctggtctcaagcatggccgcatgtcaccgcaagaggagcgccttattattgagctccatgctcggtgggggaacagatggtctaggatagca

SEQ ID NO: 37502 - DNA, 344 bp, Setaria italica
  Peptide Sequence Number=SeqID_103476
agacaaataccttaagcgcaaaagtcgcaaacataaatgtaatccctgtgtctaaccagccttcttgatcatactatatgttccctatgttgttttcatgtaggcctcaacaggacaggaaagagctgccgccttcggtgggtgaactacctccaccctggtctcaagcatggccgcatgtcaccgcaagaggagcgccttattattgagctccatgctcggtgggggaacagatggtctaggatagcacggaggctgccagggcgcacagacaatgagatcaagaactactggaggacacacatgagaaagaagcacaggagaggaagagtgagcatatcacc

SEQ ID NO: 37503 - DNA, 1057 bp, Setaria italica
  Peptide Sequence Number=SeqID_103477
aactgtactttgacttagtggcttcctccccctaatagcaccttcttcctatgaggctggagtccatcaaggatcaaaaccagaatcttcccacaatcacacagagaaagaagaacaccaagactggttcccagcctatccaaggtagaagcgagcaacgttagtgtggcagtaacatggtgactgtgagagaggagatgcgtaaggggccatggacagagcaggaggacatgcaactggtatgcactgtccgcctgttcggtgaccgtcgttgggacttcattgcccaagtctcaggtttgaggggttggggaactacaacttaggcctcaacaggacaggaaagagctgccgccttcggtgggtgaactacctccaccctggtctcaagcatggccgcatgtcaccgcaagaggagcgccttattattgagctccatgctcggtgggggaacagatggtctaggatagcacggaggctgccagggcgcacagacaatgagatcaagaactactggaggacacacatgagaaagaaagcacaggagaggaagatgagcatatcaccttcatcctcatcctcctcattgacataccaatcctgccttcttgacacctctccaatcattgggatgagcagtggtgacactcacaatggcagtagctgtgttaccagcgcccttgacagcacccagagttccatggatgcatatcccatggatcagatatggagagaaatcgaggcaccgcaggcacctgccttgctgggcattgctgaagggaaagagaagacatgcagtagtatcccctgccctctgccatcacctgctatgtgggattacaaatgccctgagatattctggaagatggaagatgaagaaatcaggatgttggctccatcatttggttatggtaaataaggccctcactattgaaggaggaaggaatacatctatatataggccaggtcactcagcaaatctgcctagcagatttgcagtacctgcacttaattactagctatgtttgcattagtacggtattcagtatttttaaat

SEQ ID NO: 37504 - DNA, 323 bp, Setaria italica
  Peptide Sequence Number=SeqID_103478
gtgtacctccatgcgcagagcaagtagagaaagaaggagacgagcccgaacatggcgaggagccagtagaacagatcgaggcggctggcgttgaggttagcgccgtcgagccagccatgtcccccgccgtggcgggcggtggtgcggttgaccaactggatgaggaagctcccgagccacgacgcgacgccgaggatgcagaagacaatggcgccgccgatggacttcatgccggcggaggcctcgctgtagaagaactcgagcaggccaacaaaggatgtgacgtccatcacgcccagcaggaagaactgtggtcgttgtag

SEQ ID NO: 37505 - DNA, 637 bp, Setaria italica
  Peptide Sequence Number=SeqID_103479
aactacctctgcaggggccaccgtctgtgatctctttctcaaaagaaatctccaagaagccatcgcctccatcatttttcaacatggtactgtccaagcgtggtcgatctagcttaaaattatcgtcaggaagctcacggaatgaaaggtccagaaagtccttcgatgcccgattaatcctatgagtagtttccacagaagacttagcccctgacctctgatttcggtgggagtgaagataagctccacttgtgctaggccgagaggatgcatcgacaatatcaaacaacagaaacgcatccccaccaaatgcagagtctattttcctcctgccctcctggatttttctgattctgctaatttcactagagctctggtacatagaaccacgcttccccacaatgctttgttctgtgcttgtcttgcggcttcttgttggcaagctcctgcagtggaaatttgggacgtagtccagacttaactcccctgagttgctatctgagcatttcaactgatggtatcttctgtttcgactctcattttcttcattaacacagcaagaggtctgcgaaattccgggacctgttcccaatctagaatgatcctcacgtttcaagccagcatcttgccccataga

SEQ ID NO: 37506 - DNA, 451 bp, Setaria italica
  Peptide Sequence Number=SeqID_103480
ctaactaatcttttgcttggccgatctaccagcagattgatggaagtggatgtaaatgcaggcaaacacagctggttggttcaggcaccgcaccaacagggcacagatgttcctttgttctgcaggaagcaacgatacattcacaagaagtgtcggtgagtaccctgttctctgtccaatttattcagcaggtctggtgtgcactttcatgtgtgtttttaaggcccataatactcggagcaaaaaaacatgtgatctgaatctgacctgggttttcgtctgtgatctttggtgcttgcacaagcatgtgatgatggtggtagcccctgggtctaggtaaccaggtagcagggtcagatgtgatgtggaggttggcttagatgtttagctacaggtctcgcactgtagtgtgtacctgctgcatataggacctgctagctgcatgtgatgg

SEQ ID NO: 37507 - DNA, 234 bp, Setaria italica
  Peptide Sequence Number=SeqID_103481
cagtgagaaagttaacaagccgcatccaaaggtgaggtggaaagcatctgaaactaggcctacgcgtccggtgaataggccgatggcgagctcggtggcggagtaggcgacgttgagggcgagtagtagggcgaggcggcgcatggggcggctggccgtggccaggcggagaagcttcttgctgggcttgggcgcctggtagagcgggggcatgggcatgggcatggagatgga

SEQ ID NO: 37508 - DNA, 1062 bp, Setaria italica
  Peptide Sequence Number=SeqID_103482
tttttgtgatcatatgatgaatgtatatgattttgattcgtgtatgtgtttataaacaaacaaacaagcaagcaagcaagcaagcattcgattggattcattgatttctggatacagtacatatcaccacacccacccctgatctaagcatctttcctacaaatagaatacaatgtggccaattcagagtatccggggaactcacaatggaactacgactcgtcagtttggaccgtcagatcctgaatgcccaaatcctgatacagaccatgggcatgttcaaggaccgcccgatcatcagcaccactcttcaccctgatggacagagatccaacagcctgaccaggtacaagctcccagaatcgaccttgccatacttcggaaacatcttcacaagcagtaatctgtctggagcactttgcaaaggcagaaggtggcacgttgccaggtgcaatttgcagtaggatattaccagtggctttaaacaacggcagaacaagcatgaaaactgccaccgagacaatacccaggcacagaacttcagcattctcaatccccaatgaaagaaaccaagaagctagtatcaagccagcactccgtatcgaatcagccaggacatgcaaacagaccgagtggtaattcatatcctccgcattcctgtaaactatgttaacacgagcgtagctccgaaagaaccaaacaccaagtaagttaaccaaaaggttggtgacagcagaaacaatgagataatgcttgtgctctgattcatcttgcataaacgcatgcaatgcttcaacagccaaggagaaagacaggaacagcagaaacacagcatttgtaaaggcagccagaacctccaaccttttgtacccataggtgtagaggttatcaggcttggttcgagatgcagccatagcgaacagtgagaaagttaacaagccgcatccaaaggtgaggtggaaagcatctgaaactggcctgcacgtccgggcaccagaaatagaacacaatagcatgttgtggatacagaattgatagcaatacgtaatcaggaactacttg

SEQ ID NO: 37509 - DNA, 768 bp, Setaria italica
  Peptide Sequence Number=SeqID_103483
gagacatgtcaacaaaacatcacactagtttctgggccactccacctccgctacctacaggcaggacattcagactctggaaacaaacacttctctccctcaaaaataaaacaatgggcaatggatgatttgacgcagactgtgtcatggttggagagccaagaagagaagccagagccaagtgaactgaaggcaatagctgctgaaggggttattacttgtctgcaagatgccatagaatccctcgagcaaggcaatgacatcaaaggagtggcggagcagtggagcttcgtcccccatgttgtcaacgaactgctgaaactggatggaagcggaaaagatgcatcattgcctaaagaacaactctcgcaattagcaatcaaatgtaagaagatttatcaggccgagttcgtgcgcatggacagcgacaacaagaaggggaagaagcgtcaaagcagctcgccggtaacagagcaccgcaggaagacaaaatcgagtgatgatcattacgacagtgatgacacgatagaaatgacggaggaagagattgatctcgcctgcagacagctccctgggctatgcggatgatactgagctaggttagttgaggtgcgtccttcctctgaactctgaacaggagaggaaggatgctggatggccgtctccattcttttcctgctgccacccaaataactgtgggaattcggtagttagacacattgacgagttcagggctgtaatgtggactttgctcgtatgcaagaccgt

SEQ ID NO: 37510 - DNA, 245 bp, Setaria italica
  Peptide Sequence Number=SeqID_103484
gcgggcggccgtgcaggagggcgggtcgtcgcacgggaacctgctggatttggccagtcgcttcagggcggcttcgtgatgaatgcagcgtggtgtagcggccggcagatgcacgtcgtttatgagatgttattgagcgggtgcaaaatcatgcgagggacatttctgtttagcgtagctgtccgagacttcgttcattcatatgacaatgcttttctttcttaccaaaaaaacgcagacatcgg

SEQ ID NO: 37511 - DNA, 1026 bp, Setaria italica
  misc_feature (1024)..(1026): n is a, c, g, or t
  Peptide Sequence Number=SeqID_103485
gagaaagggggaggccaaaccgcactgcaagtcttcttctcccttgcaccacaccgccgccgccgctcccctgaagccggagctagatcatcaggcggggaagcgacacaggagaaccctgcagtgcccggttgctgcttgaagaacaggtaggcagcatggccggagttcagatgatgccggcggccgtggacgtagcggggctgaggaagacgcgcgcgggggccgcaccgtcgggcggctcatcggtgagcaccaccagcttgttcgcgggggattacaggaggagggctcgccggccgtcctgctcggtcagggccctcaggcagagccggagcaggggagggctcggcatcgtctgtaacctcggggggcagtacgatgataccttcgatgacgtccagctgcaactgatgaactacttcacctacaaagccgtcaggaccgtgctgacccagctctacgagatgaacccatcaaactaccgttggttctacaacttcgttgctgtcaacaaacctactgatggaaagctgttcctccgggctctcagcaaggagaggcaggagcttgccgaacgggtgatgataacaaggcttcacctgtacgggaaatggataaagaaatgtgaccatgcgaagatgtacgagatgatctccgacgagaacctgacgctgatgcgggagcggctcatggagacggtcatctggccaaccgatgacaccaacacggagaagatcggctgatgcggaggcgtagaattctttttggttggtgattaagcttagctccttaggtatgttgtcagttgtatatagttggagttgtagtagagagtgtagatgtctctgggaagttgttcaggaacagtgtatgccaatctcaagtgttacaatgctggttctctctctctctagtgtctgcagttgatttcagggaagcagaaatactatacgtaatttgcgtgaataatgaagcttgggttcatttcagagattgtcttgagttcttttgaaacttccannn

SEQ ID NO: 37512 - DNA, 360 bp, Setaria italica
  Peptide Sequence Number=SeqID_103486
ctggtctatgtggaactggaataccaaagcctgtataccaagctgtccaagcctcagtccacatggtaggcttgtgaggtttattcggggagaaccagtcacaataaaatccattgcacgtattaataattggatccggggcatcatcttctttgcacatgatccatgggacacccgtgttgagtgcaaccgccatgttagctgcccatgacgcgtaggccttggcaggttcgccctgatcccactccaagggcccaaactcattctcaatctgggagaggatgattggtcctccctgccattcaaagagcccttctgacttcatcatgtcaacaatctttgtggtgaatttctgcatct

SEQ ID NO: 37513 - DNA, 290 bp, Setaria italica
  Peptide Sequence Number=SeqID_103487
aacgaccaagcctagctctctccatcgctattactgtcggcgcgcgcgccggtcgccgttggtggagtcttggatcggaggacggccggcctctgccgccgccgctgattcctgtacgttgtagtgttgtgtgcatcatcggtgcatgatcacatgcgcgtgtaaagatgtaggagcctttgatactaaaaaaaaaagttgtagccgcatacgacgtggttgctcctaattttttgttggagtcgcagcccgtgcatgcgcgtgcgtacgtgccctaccctacgtagagg

SEQ ID NO: 37514 - DNA, 738 bp, Setaria italica
  Peptide Sequence Number=SeqID_103488
ttagtcagattttcttatacagaaacgaatactccatgcactattaatccccacctcacaacgctacaatctgtcccagttctggggaatcctgatggcttttacatgattcacttttgtccacatgcctaatctaaactatcaggaggctcttccagcagagagttagcatccacaaaaagaattgctgagctacaaaagctacaacgacgggctcatattacacatgcacatatgttacatttcgattttcgaatagccaaacagtgagtgtaatgtaactgccatggaggcagctgacggaggctgtaaggacgccacgatggtgacacaggcaaaactgattcagaaccgagatccctgcttcacgccagcaaccgccatgagtgtttcctcattaaatacggcgatcggtgagtgagaccatttccagcgcatgtcattcagcgtgggctcccgccgtttgtgtagaaaccatccggactatgtgcctccatctcagcaagcatcaccgactttgccctctggtacctattccttttcgctgagattgccgatatcgaagtcaaatcttgagggaactcaaagtcataatcatatggcccccttctgatgcacagaatgtagaccactataagtatgacaagaagaacaaatccgaacgatgctccaagtgcaattttgccagttttgttcagccctcctttctcccagaatactgcacaagcaggtaacgta

SEQ ID NO: 37515 - DNA, 1139 bp, Setaria italica
  Peptide Sequence Number=SeqID_103489
aaagtaagagttgcatcatacattccgggggaagatacagatcagatgttccaagttcaagcttgcgatccacagcattaagaacatacacggttgccctagtatctacatccgcacgaccaccaccaaccgaaaaaaaaataccggccatcccagtctccaaaacgaaggtgtcatcatcatgtattaatcagaggatgcacttgcacaacgccgtcagacacggtggtgctgcaactgcagcagccgtgagtaggcgccctccggccgggtcaggagctcgttgtggctgccgtgctccacgatccgcccgtcctgcaccacggcgatgcggtccacccctcggatcgtcgagaggcggtgggccaccaggacggtggtccgccccttcatcagccgctccagcgcctcctgcagcacgcactcggactccgcgtccagggcgctcgtcgcctcgtccagcagcaggatggccgggtccttaagcaccgccctggcgatggcgatccgctgcttctgcccgcctgacagctgcacgccacgctcgccgactgccgtcttgtagccgtcgggaagctggctgacgaagccgtgaacgtttgctgtctttgccgcctcgatcacctcctcctcggtcgcaccatccttgccatacgcaatgttttctaggatgctcgcagcgaagaggaccggctcctgctgcacaaggccgatcttgagccgcaaggacttcaagttcagcctcctgatgtccttgccatcaatactgactttgcccccagtcggatcgtagaaacgctcgatgagagcaatgacagtgctcttccctgaaccgctggctccgactagagcttggctacgcccagcatggatcttcaggttgaaatccttgaagatttgaatgtctgggcgtgctggataggcaaagtccacatgccgcaactcaatgtcccctcggatggtggtgacacgctctgactcaggatcatcaggctcaattcttgttgccctgttgaggatgccaaagatggatcggatggattcacctccacggacgatctctggggctaggctcacagtctcagctacagagttggcagtcaccacaaggacaacaaacaccttgatgaccttggaga

SEQ ID NO: 37516 - DNA, 347 bp, Setaria italica
  Peptide Sequence Number=SeqID_103490
gcccctccggccggcggcggcttcgcccccccggacggcggtttcggcaccccgccggggttcggcccgccgggctccttcaacggcagcgggtcgttcgggccgagcggcacgctcaacccttacggcggggcccgtggcgccatgtccagcggcgccggcttgaccgctctgtccgccgtcgccgtcgcggttcttctcgtgccatgaatgcgatgtgaattaccaatgcagatatcgggattagctctagagactagagagccctttgtcgcttggtagtgattatgcagggattagccacgtgttatgctgttcatcattgaggtgttattggtcaggttcgg

SEQ ID NO: 37517 - DNA, 1173 bp, Setaria italica
  Peptide Sequence Number=SeqID_103491
ctcttccttcaccggaaggacattctttgaggaatttcggtagcttcaaagccagcaacgtaagtgggccactggagatatctggccctctcccactacctctagagaaatatattggacttagaatcttctcttatgaggaggtttcatctgcttgccagtggttttctagcgatcagtgtgtttcagaaacacttggttcaacatcatataaggcaaccttcagggatgactttagtggtacgaagaccactgaagcaacggtagctcgattactaccctccactcagagtttgaaggagtttaaaacacaagtgaacacattagcatcgcttgagcatcccaatttatgtaagctaatcggctattatgcaaaagaagattctaatggaaggatgttggtctatgagcggcttcatcatggcagcttagataagctattatttggaagacctgatggtcgtttcatggactggtctaaacgtttgaaggttgcccttggtgctgctagaggtctagctttcttacatgatgaaggaccatttcaggccatgtacagtgagttttcaacttcaaacatccaaatagataaagatttcactgctaagctttcaggatatggttgtgctggcttcaacacagaggagatatctaatgcacctgtgtctgcagcacacctttcggtggagaccttggcgaaaggtttactcactcccaagagcaatgtgtggagctttggagttgtgttactggagctaataactggaagaaagaatcttgatgtcagttcctccaaagaagaacgcaatatcgtcaagtggagtaggcctttccttactgatgatagtcgcctatccctgatcatggactcacgaataaaagggcgctttcctaccaaggctgctcggatagtagcagacatcattctgaaatgcttgcataatgatccttcagagaggccaacgatgagggatgttgtggaggccctaacaggggtccaggaaataaaggttccgtgccgatatcctctgcaagagccatctgctgcaccaagaaaaaggatgttaaaatctacatccctcaatggaattgtgccccagcatcctgttataaccttctctccatcgccaccttcacataaccaacccttgatctcgccaaggtcatttttta

SEQ ID NO: 37518 - DNA, 485 bp, Setaria italica
  Peptide Sequence Number=SeqID_103492
acctgaattcttgacagaacagcctaggagcaaagtttgctggcagtggcgccaggggcaatgcctgactgacattacacttgcagcagggaaaaggctgtgggtggaattcttgcgcctggaccagttgttctctagaaagaagctgatgaaacctgtgacgcttcactcaccatccggcgacaggtgacagacagctagctgcagtcccatctcatgaacacttgcacttgtcgtgacactgcttgcattggccactcgcaggccagatcattttctattgataccaatggtacactgctactgtaaccaatagaacggtgcccctgaaactgaggtctggatgctcatgccaatctgtagcctgatccctgcagtgagtgtgggtgtacctggatgttcctctgcgaagaggagtccccgactgctggtatgctctccagcttcaccgcgtgccgcatcagcagctcgatcagcgtcgtgat

SEQ ID NO: 37519 - DNA, 752 bp, Setaria italica
  Peptide Sequence Number=SeqID_103493
tttttttttttttttttaaaaaagaagaacggtgatgctttcctttattatgccgaccaatcgactacagccggcggggaggaatggtgctgtgattacaaacagttaataagtggggtttggttctcctaacattctaacctagcggctcaccacgatcacaacgaatgggcagttgggcaccaaaaatgaaacaacacggaaagaacacacacatcgcacgtatacacgtatcctcttaatttactgatcgacgaatttcagtcgaagagctcccactgtgtggtggccggcgcgtcgaacgtctcccatttcgtcgtcacgacgacggcctgcagccgcgcgttggagaccttgagcacgtccagcgtctccacgcacttctgcacccgtttcgcctggatgttcctctgcgaagaggagtccccgactgctggtatgctctccagcttcaccgcgtgccgcatcagcagctcgatcagcgtcgtgatctgcacctctgcaaccttgttccctctggaaatcgatttctcgatgctggttacctgatcggcgagcttgtcgacctcgagcgcgatggcgccgatggcgcggttggcgctctcgatcttggcgttcttctggcgctcgatgtaccgccgctcaaggctggcgggatcctcggccagcaccatcttcgacttgttcttcacgccgcaggcgtccaggtactcggtgttgccccgcgcccggcccttgtaggtcagctgctg

SEQ ID NO: 37520 - DNA, 252 bp, Setaria italica
  Peptide Sequence Number=SeqID_103494
caaaacgggtaaggagatcaagaacatccggacaggcttctcgcaagtcggaatcgcagtacgagaaggagacaagaaaccatacagcacactgctcgacgacggaccatgggtgttcttggtgcccttgctagaaatctggacgcccttgttgggccaggggtcatgctcctttatcctctgtacgcgtcgatgcgcgcgatagagagcccttcctccctggacgaccagcagtggctcacctactgggtt

SEQ ID NO: 37521 - DNA, 862 bp, Setaria italica
  Peptide Sequence Number=SeqID_103495
gtcgcccacgttttgttgtgtcaacagcaccatcatccattgaataacctgaatgacttgatggagtcactgaaccatcaagaatgcgctttggacgtcccctcttccttttaccactttcaggtgaggtggttgcaggtgtctgaaaagggggtacactatcttttgagtgaattgaaggagttataatatctgaactatcctgcaaacgtttgggtcgtcctctttttctcgtaccagattcatgtacagtgggcccaggaagtgcctgaacaacaggtgtactatctgcttgaggagctggaggaccctgtacaggaacatcttgtacacgtttgggccgtcccctcttccttttgccagattcctgtggggtggctgaaggagtcagggaaacaacattgtcactttcctgaggagctgaaggaaccaaaggaaatgaagtaactggaggaaccgtaggagccagaggagttgaagaagcggaaggagctgaaggaccagcagcatctggcacacgctttggcctgcccctcttcctcttaccagattcctgcatgccagctgacagaggagtttgcaaaggaggtaccaaactgttgactgcggtaccattagcttgagcagctccattcatattagcagtatgcagctgtgtctggctgggttctgcagcaggtgttgatgctgcaaacgttgatggaacagcagccgtacccaattcagtgcctccggcatatggtccaaatggggtcacacagataaatgaaggggagttttgaggagtgaatgtgtggagccctagtggtgcagggaacatgggagtcaatgtacgcaagggttgggcatcaagaactgtgtc

SEQ ID NO: 37522 - DNA, 447 bp, Setaria italica
  Peptide Sequence Number=SeqID_103496
gcaaagcaaagcgaagcaagcaaggcgcagccgatgggagatggtgctggtgatctcgctgcctctggtggccctcgtcgtcatcatcgccatcatcctctgcatcatctgccgctgatcgccgacgccggccgcggtggcgcgcacaccatgagtcgtttgcagcgtcgtcgccgacacccgttcatcatcatcaggacctgatttatttcgtgatcacagcgtaataacgtgcgtgcgtgcgtgcgtgtgtatccactgtcgtcggtggtctggggtgtggattgtgatttggagtattgattagttttggacctctcctgtctttttcctcttttttatccgactccaaaggcatcggacacagcatcgtgcatgctgcgcgtctgcactaggttgtcttcgtaactaaaaaaaaaaagacttctcaagctttttcgagttttt

SEQ ID NO: 37523 - DNA, 469 bp, Setaria italica
  misc_feature (435)..(435): n is a, c, g, or t
  Peptide Sequence Number=SeqID_103497
ctgcgtcacgtcgcggcgtcccgcgtcgccgacgtgtccggcggcgagcggcggcgggtgtccatcggaatggacctcgtgcacgacccggccgtgctgctgctggacgagcccacgtccggcctcgactccggctccgcgctccacattgtcaagatgctcagggacatggccgccgcgcacggcaagaccgtcgtgctcaccatccaccagcccggattccgcatcctcgagctcatcgaccgcgtcgtgctcctcgccgacggcgccgtccgccaccacggctccctcgacttcctccagtcgcgcctcatcgccaccggccacgccatccccgcccacgtcaacgtcctcgagtacgccatggagaccatcgactccctcaagcccgacgtcgccgtcgccaccacgatcaccaccgcgtcggcaaaccgngagaacaacgtcgcgccggtcggcccggggctgg

SEQ ID NO: 37524 - DNA, 474 bp, Setaria italica
  Peptide Sequence Number=SeqID_103498
tttgagccattaaaattgcagcatccagcctaagcactaggaaggcttctcttcgctggaatgcagatacattgagcatagtaatatcttcaccccaacaaagtggtgctggtggtgcaaagagcagtgataacatatatgataacccagaggtgtcagaaaagatgccatcacaactacggactcgcagtgacagctcagtgagagtaacagctaacccaaatagaattgctacccttgatgccctacgatctacgtctatgagatcgcatgagcaagattcaagtaagtctaaaagacaaaatctaattcagtaagctagtcgtttagagacaattctttgtgtgttctttttccttttggacccaaagatatgcatttggcaactctttggtggtctagttagctgctcatcatgttagaaaggtccagttcaatgaataggcattctattaatttagtcagaacaaattg

SEQ ID NO: 37525 - DNA, 365 bp, Setaria italica
  Peptide Sequence Number=SeqID_103499
tggaaaagtagctgggaaaaaggctgggcttgccgccgccactacccctgcctcgccgcggcttcacccactcgtctcagatgcctccctccctgcggcttcaacaccaggcctgtcaattattcagtatcgcatcagtggattctgaagatcgactaatctgatgtcaatagcatgctgtttgccggtcgtcgagtgcgtgtactgcctggcgtgtgcgcggtggacatggcagcgctgcctccactctggaggctacgacagtgagacctggggaattgcatcggctgccgagtttgagcctgtgccgcggttgtgtcggctgatcctctcggtctatgaggatgaccttgagaacccccaat

SEQ ID NO: 37526 - DNA, 1146 bp, Setaria italica
  Peptide Sequence Number=SeqID_103500
ttcaattaagcttggtacgatccacgatggggacgtcgccacgcatcgccatgttccggccgttaagccggcacgcaagtttcttggagctccggctctccaggctgaacgccgacacgctgtagttcaccttggtgggacgcctgttgctcacctcattgatgctcacagtgtagatggtgttgctctcgaggttgccaaatcccgccgtcggcaccgcgaagccgtggagggaatcgatgaagagcgcgcggtcgccgatgccggcgagctcctgccaagccggattgacgccgcggtggttgacgtggaaggccttggagaagtcgacgtcgtcgccgaagaggtacatccacttggacttgacgaggaggaagagctcgtcgccggcgaccgcgaggcgcgcctcggaggggagctcgacggccggagccgggatgacggctgcgacggcgagggtgacggcgtcgacgatggcggtgcggcaaacgtcctcctcgaagacgaagaacttgccgcctgcgtagttgatgctgctggcgttgcagtcggcgagggcggggatcggggcccatgagtcggcggcgggcgggccggaggcgcagaaatggatgccctcgccgcaggacaccatgacgccgtgcggggaccagtcccaggccaggtcgtcggtctccttgaagaaggccgggagcggcgggagcgggcgggtggcgccgttgaaggggtggacgagggaggccgcgagatccgtggggtcgacggcgagggcccacccgtgcggtgacgcgtagaggcggcggcggcggtggtgcgcctccgctgcggggcggggcaggcggaggtccgggtagatgcggtcctcccgggggcagaagaagagccgggacggggaggacgggaggaggagccacggcggctgcggcgggggcgcggccgccgcgtcgcccgccgccgagcgccaggacgagcagacggagcggaaccgcgcgatgtcagcgagctccgtgatcccgccggcgatgtcggtgaggagctccggcgggaggtccgaccagcccatggcggccatggcgatcgcaattcgcaacccgtatgcggggggccgatcggcgatcgcgatctgaattgggccttttgtttctg

SEQ ID NO: 37527 - DNA, 1452 bp, Setaria italica
  Peptide Sequence Number=SeqID_103501
cccgacccgacacgacctgcgctcttcggcggctcggctcgctcccccgcagccagtgaaaacctccgacgccgaacccctccgccgccgacgccgccgcggccaagtagcgcgaaggggacgcgagcgcgacctattcctcggacgcgcttcagatctcgcaccgcccgccgttgccagcttctcttccatggaggcgagctcctcgtcctccgcggccgccgcgccgccgcccccctccatacccacctccagcggccagggcgtatgggctgacgcctcgccgctcctcgccgccgcgtgccgtgatctccaggatggcgaacttgtacatggggagaactttagtctgtttgctgcaatgtctgcattggaaataatggatccaaagatggattctggaattgagagaagtggatataactctattgaagaagccatagaagatggtgtcgccccactcccgcttagcttggacaggacacttgatgttcagcgctctattgatgtcatggatcatcttttctcatgtgaggcaacatggcacaaggggcatcctcttgctcaaactgtatttacatgtctctaccttatgagaatggagagaacttcatcgcatgctgtactacatagcttctgcaggattttgcgtgctacttgtaatgctgtcatttctgtggtttccactgcccgaactcatgaggaagaggatatcttcactatgtcttttgggctgcctttgagagatgaaggggatgacaaatgcctgtcaattctaaactcagttgaagagacaatatctcgtcaattacgtgcatgcaaagcccaagcattgtccaagaaaaaaactctagaagatcttgaatccctgcaggataatcctgacctggaagaggattactgcagagctctgttatgcaggttacgttttcgtaagcatttctaccatgttgttatgagcatgaaaaaacctcatgggagaggattggagttggcccgaaagcatgttgcttcatgcttgaatgagcttagtttgatgctcaagtctcgggagtttctcaagtcccaatccaacattacattacaagatgatgaaaactgcaccactgcatcgggctgtcgacctgttggctttgatgttagcttaaacagcagactgttgagtcccacaccgccacgtgctgttaaagtacttagctggagcaatgcaatcaggtactttgagaagcttctgaatgatcttgatgtcatttgtgctttgtcactcgatcctgtgcttgagaatgtgcttcactatattgtacagttccaaaaatctgtgccagatttggttcctagagcatttctccagactttgttggtccaagatggcaagctttttaacgggacaaaaacttagttttactagaatagtagaatttacaaagggactttaatacaattaaccggaac

SEQ ID NO: 37528 - DNA, 926 bp, Setaria italica
  Peptide Sequence Number=SeqID_103502
ccgatccagtccacggacagccgcgccaccgccacgctcgagacggagacggagttcgaccgcgacgcgcgcgccatccgcgagcgccagctcaagcaggccgaggaagccctcaagaagaacccatcaggggccgcctccgcctctgcctccggcgccggcgaggtgtacaaggggatccacggatacaccgaccacaaggccgggttccgccgggagcacacggtgtcaagcgagaaggccggcggctcgcacggcccgctccgggcgtccgcgcacatccgcctctccgcgcggttcgactaccagcctgacatctgcaaggactacaaggagacgggctactgtggttacggtgattcctgcaagttcatgcacgacagaggggattacaagtctgggtggcagatggagaaggagtgggaggaggctgagaaggcccgcaagcggcgcattgcgatgggtgggggtgggagtgacgatgaggcagcagaggatgaggatgatgatgacgaggaggccctgcccttcgcctgcttcatttgcaggcagccttttgttgatccggtcgtcacgaaatgcaagcactacttctgtgagcattgcgcgctgaagcaccactcgaagaacaagaagtgcttcgtgtgcaacaaagcgacgctgggcatcttcaacgccgcgcaggagatccgcaagaagatggcgcaggacaagaagcagcagcaggagcagtaactctaggcacacagaatgcaagcttagctgttgtacgttgatgtattaactttgttccgatattatttttccatcagaaaaaaaagagagaagaaaaggaaaatcagaaccctgctttgaacttgtatatacactatcatccttcaccacattcaggctctagcacagctagtcctccagccaaaaaaaaa

SEQ ID NO: 37529 - DNA, 2097 bp, Setaria italica
  misc_feature (1)..(20): n is a, c, g, or t
  Peptide Sequence Number=SeqID_103503
nnnnnnnnnnnnnnnnnnnngaagtagaattatcaatcatgcatgccaacatgaatggagctattggctctaaacgaaccctaactctatacagtgaaagcaatatagttcacaaacaccctgactccttaacatttggggtggctttgtagtcaaagcatgtatgcaagcacaactttactacctacctaattcatccttaagaaatcggagttaatcacttaaaccgcgatggttggtcatagcaggggcgcaggtcactaaaagtacactacaaagagcataagattcattctcccttcttagacaacgccaaaaacctagttgatacgagaatctaatacaatgacactgcacgcaacgaggggcagacttattggatggtccatggaacaccttaagggacctctacggctccgctccttcaaaaaacaccctgacgaggacctgtttcttgtctagccaaaggaacctctgcacttacgggaccaacagaagcaacttttagacttccgacaaccagaattagatcccacttgactattaccttggctctgaccataatcatatgtgagctctgtcatcgggggtatgtgcttaattgcaaaaaatgcaatatgtggatatccttcatcaccgtgatcatacaagactggttgccaaaaaacattaggtgagcaactgtggttcataaagcgagccacattccctgttcgctttgcactgatgatgattggcagttgcttgggtgtctcatttgagtcagaaagactaggttcgcccagtaattctggtgcatagttccatcttaaattctgctctgaaggagaggtctcgaagataaagtcatcttcgctgttcccactatttctgtcaatgatttcacctgcatattcacagataaatgtacctgctcggattggatcccaactacggaggccccaaccacgatctcctgtcttaaacacttcaaaacgaatctgggtacctttctgtacaactcggttgcggcaattttgtgaacaagtgcaggaatcattacactcatataacataggcatgcggctaacaagtatgcctgaagcactgtaaggaaggtcaccggcatttcgatgcatacaagagcagttgttatcaccagggaggcatacacttgtgcatttgcaaccttgcatctttctcatggagctcagagaatttccataggtcaatttagtagtatatgtgaaattggtaggacccttctcatcatcaacctcatttacaaggcaaataggtttactttccacaccatacgatatgtcaagcaatataacatggtctctagatgatggattttccctccatttttcagtcttcttccacactgcaatgccatcaggttggccaggttctctgagcaacttgtgtttaaacacattgaaaccagattttcctttctccatccaggcttctttaatcttgtaaaggccatcatatacgtatatcttgccagttggacaagccaaatcttttacactacgaatgactctaattggattacctctatgcaaactcctctccagtgcaagattacccctttcaagtttttggtcatctttgccagacatgccctgtccagtataaactagaacatctggatcgtcttcactgttatcatacacaccagctgacacaacacttatagccacagggtcctcctcattaccaaacttggctgacatgtaatctatccctgccatgctctgactattcagccccactaggcacatctcaatcctgaagtagaacatatcaccaacctcaacacctggaatctctccaatcctcttgatcttattgacacgaagttcagcattagtcatgatgctcccagccttcaagttatgctgctgctttgcgacttgcttcacatcatccagctgcacaagtctccgccgcagtgcgtcaaacatcatgagtacattatctgcagtttctctagtatcctctgaagacaaagatggtagctgcagcagattggtgccaattgtactacttgtctacgtctaacgttaaggggttacttaagttaacttttaattttaggttaattta

SEQ ID NO: 37530 - DNA, 589 bp, Setaria italica
  Peptide Sequence Number=SeqID_103504
tgtagctccattgtagtactcttattcttcaatgaaccaaaccattcctgcaaaatgaagtatgtaggcttgttagtgtaatggcatccatagttggaccaccttccttgtgagataaacaatattggcataaaagattaacatacaaacaaacaaaatgtacccgttgctcctgtagtttgacagtcaaggtttctgttgtttttgtgtagaacagtctttccatgagaatacaaatggttactgaattttacaacttagaacttacagtatattctttaggatataggtatacctcttctcattgagtttggcagatgtactcgcaatttcctgatggaggagctccaaggtctgcttcagcgtggcgcactcgacatccagcgtagcgatcctgccctgcttctccaacatctccacgcatacctgcgcccttgctgtggccagctgctcggcctcctcgctcgcctgctttgactgcgccctcactagcgcgatgtcggcgtcgtgggcgtcgatggctgtgcgctgctgctgctcttccgcggaccgcttcgcggcgtcctcctccagatcgttcatgtaggag

SEQ ID NO: 37531 - DNA, 232 bp, Setaria italica
  Peptide Sequence Number=SeqID_103505
tgcagagctagcagcaacacgtacacaaggacacacagcacacagcttgagcgatccaaatggcgcctgctgcggcaacgaagaaaggtgaggagctgaggatcctctgcatcgacggtggtggcatccgcggcctcatcccggccaagatcttggagtacctcgaagccgagctccagaggattgatgggtcgacggcgaggcttgccgactacttcgactacatcgtggg

SEQ ID NO: 37532 - DNA, 185 bp, Setaria italica
  Peptide Sequence Number=SeqID_103506
ttttatgcacaccaatttctggttagtattcccgcaaaaaaaattctgttaagtacctcataaactgtagaagacaaagaaactatagaaaacataaatgacattttggcctccgggttaaaacaaatgtcactagtgccggctttagcattttcaatctgaaaggtcatacagcctcaccacaa

SEQ ID NO: 37533 - DNA, 488 bp, Setaria italica
  Peptide Sequence Number=SeqID_103507
tgtccttccgggtttaaaactaaattgttctacttagttgtccggtcttttagtctatttttctaattctgaaaggtacatacagcctcaccacaaccgttgcaaaggaaaattcagtacacgatggccacaaacatggaagaactgaaagcaaattcagagtctctggtggaacaacatcaagagtgagtatggtcggaggacattccatctcctccgctgatccaactgggcttcaaggatcttgctatctcgagtccacaacagtgccttcgggaagcgcagacaggtgcaccagaggaacatgagattgcaaggatacgtcagagccagtgatcttggcctcctttgttctgttcagcaccttcctcacctcattcgcaagctcaaattgtattcgtaattcgttccttctattggattatgctggccaatgccttctccattgagaacaggtaatccctattattagcctagttggggtccta

SEQ ID NO: 37534 - DNA, 805 bp, Setaria italica
  Peptide Sequence Number=SeqID_103508
tcgttccttctattggtatttattgtcttggtcctaattgcctttctccattgagaacaggtaatccctattatagccagtggggccattgactgtagcaatttggcccttagttgccatatcctgcaaaggggcaggaccaaggtagtacttgttgccgattggatcaggtgtggatacgaaactgcatgacaccaaactctgtgagttccagagaattttaaaatggaattgatacttttgggtttggattcttacacaagtacgccggtcacagctggtttcagagaatctccttccttgaagaagtcaacagatattttctggtcatactcacactctcttctctccaagtactgcattgctttctgctctttgtctgtatcacccttgacgcaatatgcgattccccagcatatggcctcctcgtctgtttcaagcgtgcaggtccttgccggtgctccggtgtgcctctatggtcaatgcaagcaagattgaaggtgcgcttgtagcccttgatgaagccgaggatcttgtcatcgaagtcgaatccggggttccagatcagggacccgtagccgaagacccagagcaccatcctgcagctccttgtttattcgatttccctcggaggaagcggcggcagcggcggcggcaagaacgacgcgctgattgggcacgggcgggcgggatggaggaggaaagatctgcgattctggggtctcctcgtcctctcccgtcccgagccttccgcgtcggtcttcggttcttcgtcttgtccttggttccgtcttctcctcgccgg

SEQ ID NO: 37535 - DNA, 636 bp, Setaria italica
  Peptide Sequence Number=SeqID_103509
aaaaaatttaaaaaaacaaaaaaaataaaaaactaaaagaaaaaaggtaaaacaaataaacaagacctacaaccaacaaccgttgcaaaggaaaattcagtacacgatggccacaaacatggaagaactgaaagcaaattcagagtctctggtggaacaacatcaagagtgagtatggtcggaggacattccatctcctccgctgatccaactgggcttcaaggatcttgctatctcgagtccacaacagtgccttcgggaagcgcagacaggtgcaccagaggaacatgagattgcaaggatacgtcagagccagtgatcttggcctcctttgttctgttcagcaccttcctcacctcattcgcaagctcaatgatcgaatcgtcctcatggattatgctggccaatgccttctcccattgagaacaggtaatccctattatagccagtggggccattggctgtagcaatttgccttgccatatcctgcaaaggggcaggaccaaggtagtacttgttgccgattggatcaggtgtggatacgaaaacaagtacgccggtcacagctggtttcagagaatctccttcctgacatttcagcaagggaaaatgagagtttggaaagggaaaggaaac

SEQ ID NO: 37536 - DNA, 1285 bp, Setaria italica
  Peptide Sequence Number=SeqID_103510
aacgtaaacaaagaaagaaccaaagtaagaattcttaggaccttggtctagttccagttttttttttttttagaaaacataaatgacattttggcctccgggttaaaacaaatgtcactagtgccggctttagcattttcaatctgaaaggtacatacagcctcaccacaaccgttgcaaaggaaaattcagtacacgatggccacaaacatggaagaactgaaagcaaattcagagtctctggtggaacaacatcaagagtgagtatggtcggaggacattccatctcctccgctgatccaactgggcttcaaggatcttgctatctcgagtccacaacagtgccttcgggaagcgcagacaggtgcaccagaggaacatgagattgcaaggatacgtcagagccagtgatcttggcctcctttgttctgttcagcaccttcctcacctcattcgcaagctcaatgatcgaatcgtcctcatggattatgctggccaatgccttctccattgagaacaggtaatccctattatagccagtggggccattggctgtagcaatttgccttgccatatcctgcaaaggggcaggaccaaggtagtacttgttgccgattggatcaggtgtggatacgaaaacaagtacgccggtcacagctggtttcagagaatctccttccttgaagaagtcaacagatattttctggtcatactcacactctcttctctccaagtactgcattgctttctgctctttgtctgtatcacccttgacgcaatatgcgattccccagcatatggcctcctcgtctgtttcaagcgtgcaggtccttgccgggtgctccggtgtgcctctatggtcaatgcaagcaagattgaaggtgcgcttgtagcccttgatgaagccgaggatcttgtcatcgaagtcgaatccggggttccagatcagggacccgtagccgaagacccagagcaccatcctgcagctccttgtttattcgatttccctcggaggaagcggcggcagcggcggcggcaagaacgacgcgctgattgggcacgggcgggcgggatggaggaggaaagatctgcgattctggggtctcctcgtcctctcccgtcccgagcctccgcgcggctcggtctcgctgcctggtccgctctcctcgccggcgcacttgcctgcctggggattcggaaaagagacgttactaccaattagaagaaacaaggtaaataccctaattaataagaccaagtaggggaccaattaggactagtaaga

SEQ ID NO: 37537 - DNA, 502 bp, Setaria italica
  Peptide Sequence Number=SeqID_103511
gggggagacaccgctgtcggggacgccgatgatcacgccgtcgccgaaccccaaggcgctatggtttcccccgccgtcgccctgtggcgtgtccaggccgaggaaccggggcgtgtacgtcgtcagcagctcataaacctcgctcgggtgcgcccagaggaaccccggaatggcggacatagcgtcgagctcccggcgggtcagccgggcggcgaagccgctggcaacgtggtggtacgcgtggaggagccggccgtcctccgggaggaacgactggtaccacgccgtccggtcgtcggcggtgccgaacacgcggttctcggccggctgcacgtgcacgatgaacgtttgaagctcatcatcgccggttggtagctcgatgagcgttgggagcacaccgtcgccggctgtagtcaggtcctcggcaacgattggagcaaggaggaagggaataagaagaatgcggagcaaggatagcttgaagcttcccatggctgcaggc

SEQ ID NO: 37538 - DNA, 267 bp, Setaria italica
  misc_feature (264)..(264): n is a, c, g, or t
  Peptide Sequence Number=SeqID_103512
accggaataccaatcggccggcatcgccttggtccgccgtgggcttgcgcagccgcgccccatcgtcgtctccatctccacccacctggcaacctccccgcgagagccgaccccgcgctagggcttcgcgggctccgaattccgccgctaatgctggggccagggccttccgctcctgcgctggtggcgggggccggagaggaggaatggtgtgcgtggatgggccgcgcgcaggtcaggcgccggaaggagcatggcgggccnccg

SEQ ID NO: 37539 - DNA, 853 bp, Setaria italica
  Peptide Sequence Number=SeqID_103513
ggcggtgacagcggacatggtcatcccggggtcgaacatcgtggtgggtccctacgcgggggacgcaagggtgaaagaggccgagttcgtcaggagcagtgcgcgcgcccgggactgccccaaggacgaccgccccgagtttgcggtcctcggacggtccaacgtcggcaagtcctcgcttatcaacgccctcacccgtcgcaaggaagctgcgctgacctcgaagaagcccgggaagacccagacaattaatcactttttggttaacaagagttggtacctcgtggatttgcctggttacgggtttgcagctgcgtcccaatcagctcgaatggactggtcgtcatttaccaaggggtacttcttgaacagagataccttggtcagtgtactgctccttattgatgccagtattccgccacagaaaattgatcttgactgtgctaactggcttggtcgtaacaatatcggattgacctttgtgttcaccaagtgcgacaaagtaaagaagggtaaagggggcggcctgatgagaacatcaaggtgttccaggaaacaatcagcgggctgtatccagagccaccgccatggatcatgacgagcagcgttaccggactaggccgagatgggctgctcctccatatgtcgcagctgaggaactactgggacaacgaagcagtctaggtagagctgcatagatcaaccgccactagcaacaatagtagtatagttagaagagaggatcacaggccatgatgacctccattctcttttgacaggactatttcatcttggcacaatgaccatggagaatgaactctacttatcatctaatgaatgaaaatgaatcatg

SEQ ID NO: 37540 - DNA, 1170 bp, Setaria italica
  Peptide Sequence Number=SeqID_103514
ttccatccgtctccccccccccctcttcatcgcccgaggaagaagaaaggggacgaagcggagaagcttctcgcagggtttctatcccgtccgtggccggcgactccgggcgccatgaacaagcaggcgctgatttacagcttcgtggccaagggctccgttgtgctggcggagcacaccgccttctccggcaacttcagcaccgtcgccgtccagtgcctccagaagctgccccccaacagcacgagatccacctactcctgcgacggccacaccttcaacttcctcgtcgaccgcggcttcgtgttcctagtggttgctgatgaggcgaccgggcggagcgtgcccttcgtcttcctagagagggttagggaagacttcatgcagcggtatggctccagcatcgacgaggaggggcagcacccactcgctgatgacgcggaagaggatgattttctgttcgaagaccggttcagcattgcatacaaccttgatcgtgagtttggcccgaggttgaaggatcatatgcagtattgtgttaaccatccggaggaaattaacaagctctccaaggtgaaagcccacctgtcggaggtcaaagggatcatgatggataatattgagaagatattggatcgtggtgagaagattgagcttttggtgggcaagacagagaccttacaatcgcaggctgacagcttccacaggcatggcagagagctgaggcgaaagatgtggcttcagaacctgaggttcaagctgatggttggtggagccatcgcggctctaattctcatcctttggctgatggtctgcaggggattcaaatgctagagcactcagtgccgccctctttttttcttttaaaagtgctcgatgtgttcgccgtttcacatgcacagaatggccacaaaatcgtgtttcagtcattttgtgggtattggtatcgtgtagcggatgttgatcccgtgcggtccttgccgtgtttcatatgatgattgtaggcagctggagtacctgtggtagctttgtgggagaagggatatgacactatgaccagacctttattatctgtacattccgaaatgcaagctcttattatttggaatcgggaccttatgtactggtgccaataaataatcactgtaaatgcagagctctctttggtgc

SEQ ID NO: 37541 - DNA, 483 bp, Setaria italica
  Peptide Sequence Number=SeqID_103515
cgaatgactaacgctacaagtagaaaaaggtgccccgccacctataaggcaacattcaaggtttatctcccaagcaattccattgatcatgatgtttattccaagacacaaccaactatagctttatgttaatgctacacacaaagctgtttttcttagtgcagtttgttcctttcttgacagtgatagaaagatatgttcgtgctttatgtccagagtactggcgggcccttctagaagttaaaacggtcttaaaggcaggtagaatgacataagacaattacatagcctactttagaaccattattagaaggaaaaggcaactttcctgaagttgaaagggataactcagaaagagatcaccacaaagttgaaggaccaaatttaatttctccagtgcttccaagtgtgggtatggagaaccaaatttaggacaatacaaaattgccaactaggctttcaacagaaagtgtggctgctgca

SEQ ID NO: 37542 - DNA, 620 bp, Setaria italica
  Peptide Sequence Number=SeqID_103516
gaggcttcagagcactagcacgatgaggctgggcacaagccaaaagctttggtttccttcacagaaggccatgtttcttcagagtgggttcagagcaatccaactgcatcgaatataaagtgagttgtttcgatgaattcgtttgttgctcataagattatgagatgtattttgcaggtattaaaatatttcattgttgtggttctgttataagtttgagtgttgctctttgctctggttagatctattattgaatctgcagttctgtacttccgttgcttccagctcctggttagaacttcagtatcaaggatatatgttgtgtacacaattatatagcacctgtcctgtcaggccattcttcaactaggcagtagcccacaagccacaactatcagcaaactacccttttgctattcttctcagcggctcagaactgcttcctaagcatttggtatgtgacaaggcacagcaactaagcaggctcctaggagttcccaggccaactaggatttacatcatccttttattgataggtcattttacgattcacagtcatagatcatcttaattgatgctgcaaattaacatgagcgccaattcatgattgcggtttgcag

SEQ ID NO: 37543 - DNA, 459 bp, Setaria italica
  Peptide Sequence Number=SeqID_103517
ccaagctaacgccgggccatacgcgcggacgatcatggcaaacgaaggcggggcggcggggtccggggaggaaggcggcggagacagcgatggcggcgggacatggcgcgtggccacgcggggcaaccagatgctgcggctggacatggacagcatgcggagccgcgtgcaggagctcgagcgcgagtgcacgagcatgagaaaagccatcgagaagatggacggacgaggcgcggcggcggacgggaggtggggctcgatggtgacgaagcggttcgggtgcaagttcccggcgcaggtctttcagtcgcagcagcggacggtggtggcacggcctctccggccacgcatcgagcagagcccatgagctctcgccgccgcacatcgtagagcttcgagatttcctttcttctgttctcttgtattctttacttcgaattgtgttgtaaaaaatttcta

SEQ ID NO: 37544 - DNA, 257 bp, Setaria italica
  Peptide Sequence Number=SeqID_103518
gtggcagcaagtaccgagcgcgagcggcgacggccgacggcgtcgaggcgtggcgggcggctttggcgtagcgcatcagccctcgcgctcagctacgcgtgggcgtgacggcgcgggagtctctcgaagctgggcgagcttcgtcctccccgacctgcgtgcggagtccctactccctactgcctcgccgccgcgcattctcacgggccacaggcgctgccgtgagtgttgagcatttgccgcacgattgctatagt

SEQ ID NO: 37545 - DNA, 383 bp, Setaria italica
  Peptide Sequence Number=SeqID_103519
tggttattggaaggcaggttttcagctgatgatttgaacgaggtttatggagagtcccgggctaacggtttgggtcacgaggtgaaaatgagaattttgatgggaacctatgctctttctgctgggtactatgatgcatactacaaacgagcgcagcaggtgaggacattggttaaggaaagcttcaaagatgctttggaaagatatgatattcttatttcaccagctgcgccatcagcagcctacaagataggtgaaaaagataaatgatccattagccatgtatgcaggagatatcatgacggtcaatgttaatttggccgggcttcctgcattggttgtgccttgcggatttgttgaaggtggagctgcggggctcccag

SEQ ID NO: 37546 - DNA, 1628 bp, Setaria italica
  Peptide Sequence Number=SeqID_103520
ccgccgcagagcgggaggcggaggagctcgaccggaggattgcctccggggagaaggatgcggtggggccgctcgctggagtgctggtgggagtgaaggacaacctctgcaccgccaacatgccctccactggcgggtcgcggatactggacggataccggccggcgtacgacgccacggcggtgcggcggctgcgcgaggctggcgccattgtggtggggaagacgaacctcgacgaattcggcatggggagcaccaccgagggctctgcgtttcaggtgacaacaaatccgtgggatgatgcacgtgtgcccgggggatcgtctggtggttctgcttctgctgtttctgctagacagtgcgtagtgtcactaggaagtgatacaggtggaagtgtgagacaacctgcgtcgttttgtggcgtagtggggttgaagccaacttatggtcgggtatctcgttttggcctcatggcctatgcttcatcgctggatgttgtgggatgctttggttcatcagtttttgacactgcaaccatcttgtctgttgtcgcgggccatgacaagatggattcaaccagcagttcgcaggatgttccagactatgcatcagagttagtctctctagattcacttgaatcaaaaccattaaatggtgtaagaattgggattatacaagaaactcttggagaaggtgtggacactggagttgtatcatcaatcaagggtgctgcttcacacctggaacggcttggatctgtggtggaagaggtttcactgccttcgttttctcttggcttaccagcttattacatactagcttcatctgaagcttcatctaatctatcacgctatgatggtatcaggtatggaaggcaggtttcagctgatgatttgaacgaggtttatggagagtcccgggctaacggtttgggtcacgaggtgaaaatgagaattttgatgggaacctatgctctttctgctgggtactatgatgcatactacaaacgagcgcagcagtagtacaaacgagtgcagcaggtgaggacattggttaaggaaagcttcaaagatgctttggaaagatatgatattcttatttcaccagctgcgccatcagcagcctacaagataggtgaaaagataaatgatccattagccatgtatgcaggagatatcatgacggtcaatgttaatttggccgggcttcctgcattggttgtgccttgcggatttgttgaaggtggagctgcggggctcccagttggattacagatgatcggatcaccattcagtgaggggaatttgctgagagtaggtcacatctttgagcagacactccagaatttcagttttgttccacctttgctggcagaacactagctgctatgtaggcttctctctgccctactcagagctatcaaacaagcaattaccagagacgggttttcaaagcccttctgttattcttataattttgcagacatgtcatgtggtataccgaggaaattggctgtgcgcatgtagaatttagacatttttctgctaaagcaaactaacaggagttgcttccaactttgatgcaatatacatgtggaattgctgataattgagtgagacaacgacgcc

SEQ ID NO: 37547 - DNA, 398 bp, Setaria italica
  Peptide Sequence Number=SeqID_103521
tgccctgagctctggtacaggttgatcatctgacagcggttacatcctcccatagaagtaaaatacgcctccccaatgttaagccttttccagttatcctcgttgtatggtgtggacccagagacaacaatatttggacgaaatctcattgcgtcaacaaacacccgttgcttaccatttccattacctggaatttgtgtaactactaagttatcataacaaggttatccaaaaaaaatggtttgtaaattacactctatctactgataaagtcaagcaatctggttcgcaagagctattggttggttctgagagtacaagcaatctggattgcaagagctatatcgggtaatcacagtcattttggtccctttgcagtaaaacagggaacagaacag

SEQ ID NO: 37548 - DNA, 1559 bp, Setaria italica
  misc_feature (3)..(3): n is a, c, g, or t
  Peptide Sequence Number=SeqID_103522
ttntaccctttttgtcgtctatatgatgctaagttgccagtggtctttcgacttgatcacctgccctgagctctggtacaggttgatcatctgacagcggttacatcctcccataagtgtaaaatacgcctccccaatgttaagccttttccagttatcctcgttgtatggtgtggacccagagacaacaatatttggacgaaatctcattgcgtcaacaaacacccgttgcttaccatttccattaccagaacttaaccggctgttgagatcagttatgcttgcttcggaaacaagtagcagttgtccttcattgacaaaactaagtttgctttgagtatctctacataggcgatctctcctgccgttaattgtgcaggaacggtacttggagctcaagcatctcataaaggtacaaggacgtccaatagcatcgctgaaccagaagtttaccttgtcaccataagtttgcacctcgtacctttgaccataaacatctacttctgcacttagatgagtccaattctctagaacagatatttgcaatttatccttgcgttttggcgactctaagaagagtttcccaagttccaggtcaatcaatgtgcggatagaactcaactctggcacctttttctgtgtcaaaatttcaccacctgatccttggagaagccactctctatcatattttaaaccaccaattgtcagtggccaaccctgcacactaaatccttggcaagatttcacaggatatatagttatggattttaaacggatatctgaaatagcttgttggctccaatcatctacaaaattaggaatatccatgttcaccatgtagccattggtcaatcctacagctttggacacaaaagatgattgcaggaacttaagaaattcctctgcatcttcatatgtggacatgtagccaaatgatatcctcacagcaccagttggttttccatttattatgtcattatcatcccaacaaacatgcccagcctcaaaattagaaactagatctgagtgtgacaagccaaggtacttagcacatgcaccaggattacagaagcagcctgtacgtaaatgaattcctgacaaggaagcaagcttctccacctcgcgatatccaaaccaggtgccatcttctcttttcaaattgaatgtgattgtaggacccatcttcagatctttcaccttagaagcttgttgtccgtagattatgcaaacatttttctcattgctgtgcttcaaatccatcattttctttctcacataagtagcaagagatgcagtatgccgtgcaatagctgagatagttagcatatcaattatctcaaatccatatcgaagagaggatatgctcaagaatgagattgttccatcctcaagaacttgttcaatgctttttcttttctgaacaaagtcaatgtcagcaattgaagcagccaccgttcctccactgaagtatgtcttgttcagtaaactagcagcctcatttttacaattaaggcaccaagaccagttgggtagccaaatatcttgtagaacgaacagaa

SEQ ID NO: 37549 - DNA, 589 bp, Setaria italica
  Peptide Sequence Number=SeqID_103523
tttaaagggtttaagtttacgttttacttacgttaccttcgtaggacctcgcgtacgccgctgaggcgtgggccgccgcgtcggagcggagaaggcgtggcggccgtgagcctggccagtgctactgccccgtcgagcacgccgtcatggaagtgagcagcttggtgtccgccgccggcggtggcagtggcagaggcctcgacaggttctggcttctagggtccgggaacagccatgcttacatgaagtgcagggcaggacagccatctctcgaggccgtctgggagctacacccagtcgtcgtgccagacggcagcctcgcgctgagcctcagctgtgacagtgatgctgaacaactggcaagtcaagaaagatcaaggaggccatggccctttgttaacaatggcgctgcagccggcgagagcgagccaacttcctcctgtgccgcgacgatgacaacgcctagcgtaccgccatggcttcaccgctaccaagaaccagatatgaacagactaggcaaccgcagcaccagtttgcagttgccagattggaacccaactatggattagcaagcacaccacacctcgga

SEQ ID NO: 37550 - DNA, 258 bp, Setaria italica
  Peptide Sequence Number=SeqID_103524
ggttgcatgaacaaagttccatagtgaatagtctaagaaaaaattggcaggaaactgtggctcagtgtgcttccatccgtgaagacctgattgctatttctgatatactattaccttcagaagaagaaccccacattcccctttgtaggcatgaaagtttgggtaactggagcgacagatggaagttcagctttttcagaaagataacacatcaggatcactccctatcttcctctgagcaaaacaagaattctgcaa

SEQ ID NO: 37551 - DNA, 147 bp, Setaria italica
  Peptide Sequence Number=SeqID_103525
atggatgctttgacctcattgttgggagatcagctggtagttggtgttgtcagtgatgaggagattgtcgccaacaagggcccacctgtcctttctatggaagagaggttgactcttctgtgatctcatagggtgcattgggaatga

SEQ ID NO: 37552 - DNA, 349 bp, Setaria italica
  Peptide Sequence Number=SeqID_103526
gaaaccgaaagacgcgcgctgggagaaacggggaagcctcgccgccactcgcggcagatctcgcgccacgcccggattctgacgcgagattcgcgcccgccggccggtgccgccgccgcgcgccggcccgatctctaagaatccaccttgaagatgatgggtttgctagcgtttgagagccaccaggggctctggaatagcggatactattcacagttgtttggaattggaggagttatgatcactattgcaattcttatgttatccacgggctactttggtggaattggcgctccatttgcaccgtatttctggccatacctaggacaagttccaaagaagagggagc

SEQ ID NO: 37553 - DNA, 1979 bp, Setaria italica
  misc_feature (1926)..(1979): n is a, c, g, or t
  Peptide Sequence Number=SeqID_103527
acctcgccgccactcgcggcacgatctaacgccacgcccggattctgacgcgagattcgcgcccgccggccggtgccgccgccgcgcgccggcccgatctctgtgcgtttgtttcctcacccgctgttgcttgctccttcgttgttcagaagaatccaccttgaagatgatgggtttgctagcgtttgagagccaccaggggctctggaatagcggatactattcacagttgtttggaattggaggagttatgatcactattgcaattcttatgttatccacgggctactttggtggaattggcgctccatttgcaccgtatttctggccatacctaggacaagttccaaagaagagggagcgcaaaaggcctgtgagagtgtacatggatggatgctttgacctcatgcactacggccatgcaaatgcattgcgacaggccaaattgttgggagatcagctggtagttggtgttgtcagtgatgaggagattgtcgccaacaagggcccacctgtcctttctatggaagagaggttgactcttgttagtggtctgaagtgggttgatgaggtcattcccaatgcaccctatgagatcacagaagagttcatgaatactcttttcaacaaatacagcattgattacattattcatggagatgatccttgtcttctacctgatggcactgatgcatatgcattagcaaagaaggttgggcgttacaagcaaatcaagcgaacagaaggtgtctcgagcacggatatagttgggaggatattgctaacattcaagcagaaagatgctgacactgattttaacattgatgttgatgagaaggctggagcgaaaccaaatgatgaagtgaagagtcatctatctcattttcttcctacttctcgccggatcatgcagttttcaaatgggcaggctccttcgccaggtgctcgtgttgtatatatagatggtgcatttgatcttttccacgctggccacgttgagatcctcagaagtgctagacaacttggcgacttccttcttgtgggtgtccatgatgaccagtctatcagggatagaagaggatattgtcctatcatgcatcttcatgagcgtactcttagtgtgcttgcctgtcgctatgttgatgaagtcattattggcgcaccatgggaagtttcgaaggacatgatcaccacgtttaacatttcattggttgtgcatggaactgtagctgagggcaatccagctggtgaaattgatccttatgctgttccaaagagcatgggtatctttaagacaatcacgagcccgaaatctataacatcagtctcagtggcgacaagaatagttgacaatcatgaagcttacaagaaaaggaacttgaaaaagaaggctagtgaagacaggtactacacacaaaagaaatttgtttctggagactagtgctgcagaaagtgcctatatttttgcaacaaattgaggaaattcgtgcggccaccgtgtattgatgttattctccagcagagactggaacaggtaatcagctatagacaggtcatagtgatagttgacagccattcggcggtgatgattggctggtggaactaaattaggggttaaaagagaaactgccacattcttcagctatggcccttttaggaagaacgctcacttgacatgaaaagttcatacatgattcttttttgactttgttgtccctggaggggatatatatatttgtagctgagcatcttcagcgaaatcattgttgtatacttgtgttattacttgacagcgtgtggagtgattagcgttgcatactccctgattgtatcatgttatattgaaaggttacactgctgaggaaaataaccttgtcatgattagatgtctgtggaaattgttgccggtcttttggcgttaaattnnnnnnnnnnnnnnnnnnnnnnnnnnnnnnnnnnnnnnnnnnnnnnnnnnnnnn

SEQ ID NO: 37554 - DNA, 487 bp, Setaria italica
  Peptide Sequence Number=SeqID_103528
aaacgccacggtgaccagggacccagcgctgttgctaccaacggtggaagattgactgttcggcgagccttgggcagtgttggatgatggctggctgtggccgtcggggaggatggcaaagccggatgggagaagggagacgtaggcagagtcgccgccgttcatgacaacgtgcatggactgcacgtccaccggcgcgtacaccaccagcgagcccgatgagtcggtgcaagtctcttgcaagatcagcatgttgttctggttgccacttgttgcctgcaacgtcacagtgtatttagtaaaagcaagctgtgaaatgcatcaaaattgaagagaacaaatgctagagcgtcagtcaacttctctactctaactacaatgaaatgtgcagaaaaaatgtataattaatttatccaagcatttccttttgttaggcaacatcattgtagacttgcaagataaatagcatatgattagaattttaccg

SEQ ID NO: 37555 - DNA, 1444 bp, Setaria italica
  Peptide Sequence Number=SeqID_103529
ttttttttttaattaacctaaccctaaacgtaatttaatttaactaattattgtgcaaagtaaacaaacacaagccatctctcttcagtgtcacctcatccctctctatatttccccatcgaggagaactagaagaaagaaagaaaaactcttcacaaaatggttaaaacaaacttctagaagcatataggagaagccctaggggttttgaacttctttgccagagacttaagtcaatacccgaaccaccacatgagcacatcaagcttgagcatacagtaaaaacatgtttgctcaagagattagagcctagcgcgcggttcgttcttgacttaatccctgtgtacctcaccccatatattgctctatgcaatacatttatactccacactatataacttatttttcctttttatctttcaccgcccctcaagcaccagcagatcctttgcagcatatggccattttcttcttgtgccattttgtagagctagcatctcccatcatcgcctcaagctaagcatttgacatggcatccgggctccgaccttttgcaagaaccggtggccggaatccacgtcaaatgcccgctagggtgtgacgatgctggcctggagagcagacttgatcttctggattgtgcaggagagcaggttgctgacggtctccactgactccacggtgagcttcgcggtgggcaggttgttgaccaggatctggaacgccacggtgaccagggacccagcgctgttgctaccaacggtggaagattgactgttcggcgagccttgggcagtgttggatgatggctggctgtggccgtcggggaggatggcaaagccggatgggagaagggagacgtaggcagagtcgccgccgttcatgacaacgtgcatggactgcacgtccaccggcgcgtacaccaccagcgagcccgatgagtcggtgcaagtctcttgcaagatcagcatgttgttctggttgccacttgttgcatttggacggaggagggagacggcgttgccgtggtgctggcccttggcgatgtggtccatctcctgcatggcctccccgttggcgaggatgtcccactcgccgcggcgctgctcgtctcggaggtagtcgaacacgcgctgcgggggcgtggagggcagccgcacggacgtggtggcgctcagcaccacgccgggaggctccccgggcgcgcccacgctctgccgcgccatcatgcgcaccttcttctctccctcgcccgcggcgccgttcccggcagctcctccgccttcgccgcgccactcgtccaggcgccgccacttctgcgccgcggacgcgcacacgcccgcgcagaagttgtccgtcatccgctgcgccagcttcagcatgctcctccgccccaccggcgttattgcggcgtggtcgcgggcggggagggagttggagcaga

SEQ ID NO: 37556 - DNA, 413 bp, Setaria italica
  Peptide Sequence Number=SeqID_103530
ttgttcactgcatgctgtgttatgaaggtggaaactataagactaatgatgtgccatgctgaatcagttgtgagactcgctgcttggtgctcttgtaaaatttatccctggatctatatggaactatgaaagcatggttgtggttaatggcgacttgttttctttccgtagaagcagcgtgtaacatgtttgaaggcatatttgtctgttcatccaaatgggcaagttagattaggagtgtgcagtttgttgtgatatttgtgatgtcatggcagagaatccagactaataatgttgctggatctgtttgttgccacaaagtgcaacgggcatggtagaggatctactccctccatcccataaaacatatcattctaggaatttttacgacatattaataagaggtaaaatga

SEQ ID NO: 37557 - DNA, 507 bp, Setaria italica
  Peptide Sequence Number=SeqID_103531
agcaactgcagaaatttcttcagagagagattctgaagaattctctcgactgatgcggttccatgatggtaccttcgttggtgttttgggataaaaaaaagggaatcgcagtcgctctattccggagcagaggcaaaacacctgaccacccccctcgccaagaaagaaaccagacgaaggcaaaccctagccgccggcgcacgtctcgcgccccacgccgtcctccccaagatccggccgatccgtcggagccatggcgctgcgctctctcatcggcaagctgaggggggcccctgctgcggaggcggcctctcgcgccttctcccagaagtgtgagcactgcagcaaaacatcttcaaggattgcagttcctcttggtcagaaggatggagccatggaaaatgattcgatagtgttttcgttcgagacccccatgtggaagcactacgtgatcagagtcacaagtgttgttgctagttgtaccctgtcgtggttaattgttaaaac

SEQ ID NO: 37558 - DNA, 471 bp, Setaria italica
  Peptide Sequence Number=SeqID_103532
cctactacgacaaccttactacccaacaaagtagtagaagcaactgcggcaaaaacatcttcaaggattggagccaaagatgattggagcgaggaattcaagaggttccaaaggaagcagtacatgattagaatcggatctggtgttgctgcttttagcattctgggaataagtgggaaatacactctttatttacttgaaactggtcaactaccaaaggttcgcagaaggaaatgagttttgactaccttctagtcctatttaagtaccctgtagtattgtgttaaagcactctaggagagtatgctctcagacaatttgttcactgcatgctgtgttatgaaggtggaaactataagactaatgatgtgccatgctgaatcagttgtgagactcgctgcttggtgctcttagtaaaaatttaataccctaggaatactaataataggaaactaatagaaaaaaaaaaaa

SEQ ID NO: 37559 - DNA, 1059 bp, Setaria italica
  Peptide Sequence Number=SeqID_103533
aaggtctaatggtttactgattcactctcacttccgtcatgagaattgcaccgaacgtggtgacgaaatatttggtgtgccaacaacaagaacagtaccctgttgcgtggatgaagtagcaactgcagaaatttcttcagagagagattctgaagggggtgtgccaacaacaagaacagtaccctgttgcgtggatgaagtagcaactgcagaaatttcttcagagagagattctgaagaattctctcgactgatgcggttccatgatggtaccctccttggtgttttgagtcgaacatagttagaatgtccctgggaagccgctgtcctttcaatgcttctttttagcctccgtttgtggtttaaaactgctatcgattcatccaatgcaagttcaatggcacagtttgctctgattgcagagagcttctcccatgtgcacctgcggccttggttggcagccatctgaagttccgcatatgttggattctgtataatcttcaaatactgagctactgttgctggcataaccatggtgacatcaccctcccagtcctgagcaaacaactttgcaagtcctcccattggaagaccaagctctagaatttggttgcatcgatacttaacttccatctcagcaagacgagcaagctttccagcaaagcggcctccataggctctaacaagctctttcattcggaggagtggggaaatgtgagggttagtttggctcacgatgaaatgatttacattaaacaattccttgagtctcatcatgggcaaatccatctccaagctcccatctctccaccggcgctttgaggccccaggaccttgttcaggatctgtggaaaagggtgcatggaagggaactatgttgccgaatctatcctttgccatcagttcctgagcttcgaagagcccaggaaatgcacaagaggcggttacagcactccagataacaacatgaggtgctgtcagatagttgaggcagcgggtggctcatttttctaggagagcaaacagtgatcccaaggacacggccagtcatgtcataag

SEQ ID NO: 37560 - DNA, 913 bp, Setaria italica
  misc_feature (884)..(913): n is a, c, g, or t
  Peptide Sequence Number=SeqID_103534
atatttaatacagtattataatttctatgcgagtacaacccagacagcaaacagcccaagtgcaacaaatatttttatgtgctggaccggactctctacctacactcgccacgtgcgcgagccggctcaggttactcgagccacggcccggggataaaacaaaggggatcgctcgtcaaccccactacgaaccccccctcgccaagaaagaagccagacgaacgcaaaccctagccgccggcgcacgtctcgccccccacgccgtcctccctcagatccggccgatccgtcggcaccatggcgctgcgttctctcgtcggcaagctgaggatcccccctgctttggtggcggcctctcgcaccttctcccacaagtgtgagcactgcggcaaaacatcttcaaggattggagccaaagatgattggagcgaggaattcaagaggttccaaaggaagcagtacatgattagaatcggatctggtgttgctgcttttagcattctgggaataagtgggaaatacactctttatttacttgaaactggtcaactaccaaaggttcgcagaaggaaatgagttttgactacctcagcctatttaagtaccctgtagtattgtgttaaagcactctaggagagtatgctctcagacaatttgttcactgcatgctgtgttatgaaggtggaaactataagactaatgatgtgccatgctgaatcagttgtgagactcgctgcttggtgctcttgtaaaatttatccctggatctatatggaactatgaaagcatggttgtggttaatggcgacttgttttcgaaaataaaaagaaaaaataaaaaaagggtactaaagaactagaccaaaggacaacaacaaggggaannnnnnnnnnnnnnnnnnnnnnnnnnnnnn

SEQ ID NO: 37561 - DNA, 706 bp, Setaria italica
  Peptide Sequence Number=SeqID_103535
cgcatcgtcgactcaccgtgctgcctcgtcaccggagagtacgggtggacggcgaacatggagcggatcatgaaggcgcaggcgctgcgcgacagcagcatgagcgcgtacatggcgtccaagaagaccatggagatcaacccggacaacggcatcatggaggagctcaggaagcgcgccgaggcggacaggaacgacaagtccgtcaaggacctcgtcatgctgctcttcgagacggcgctgcttacctcggggttcagccttgacgaccccaacacgttcgctgccaggatccacaggatgctcaagctcgggctcaacatcgacgaggaagccgccccggaggacgacgccgacatgcctgcgcttgacgagggagccgccgaggagagcaagatggaggaggtcgactgaactacgtcttccaagttcccttccgactggtgtgttccttccgatggctgctcatggtgaggcttcagtttggtgtgtcaagtgtcctcatactgcatgcgtcctgaggagtcgtgtcacagtgttctagttgtacttcactaggctaatgtgtcgtgtatacctcgaatcaaacttgtgcatggtcttggatgtcgcattttgcatcttgcagtatctgtcatggcatattggccttatgagaggaacagtataaaaattaaaaaggatctctcctttgtctgagtttact

SEQ ID NO: 37562 - DNA, 483 bp, Setaria italica
  Peptide Sequence Number=SeqID_103536
taaaaaaatttaaaaagttaaaagtaactttacttacgaaattgcaagggaagaaaggaactaacaaagagattgaaatccggaagtcatcgatattttcctctttatgcagctgctcaagtgaatgaaggaaatgtgttgttgttactggatagtaggttggaagggaatggtaatgtcaaggagcttgacatcacctgcagagttgcctgttggtgtatccaggacgaggagaacgacaggccatcaatggggcaagttgttcgcatgttggaaggcgtcgtgaacactgaaattcctccaattccatcttcctttcagaaccttatggagggcgagaacagctgtatatattctgacgaaggataaagttttagttagagtggggataatgtgtagggtgcattcaaggcaaacaacacacatgctccaagcttacttcaagtttaattcgtttttctgttgctagagcaagtaaaactt

SEQ ID NO: 37563 - DNA, 525 bp, Setaria italica
  Peptide Sequence Number=SeqID_103537
gcatgcatttcgccgtcgtagccaaagacagatccacaagatatggaatattcttacacatatcgtgggggattttggaattacttcagcatggaatggatgctcaagtgtcttatgcatttcattctgagaggaaactgcatccagagaagttccagaatcagttgtccaatcagaaaacatatttaaagctggcatgcacacaaggatggttttgtgcctctctgtttcatccgatgtctcggaatattgcttgcctttcaaaagtaaagataatgaagaaatctggaaaatgggaaacattggaaattccgcagagtatccggtccattgtttgtctcaatttgcccagcttctctggtggactaaacccttggggaacaccaagtaagaggaagcaaagaaaaagagacttggtaatgcctccacttgtggatgatggccttctggagattgtgggtttcaaagatgcttggcatgggcttgtcttgctatcccccaaaggccatggaacacggtgagcct

SEQ ID NO: 37564 - DNA, 909 bp, Setaria italica
  Peptide Sequence Number=SeqID_103538
gtcaatgtactgagacatagttgtcaaggcatcaggggatgacagtatttgggatggaagattgtgtaggttctgaaagggtctggtgtcagaagatgccggagcacccgaagattgtgcgcttatgatccaagcacgctttggagaatctgggcaacaaaagctgggagttcactgctcccgggatccacattaacagcctcaagtacaacacttcttgccactgtgggaccacgacgacgaccagaatttgatgcattagcttcagttcctgcacttcctgatggagctgactggcctggttgtctaacaacaagatgcaatgtatgaccatcttcaacatgataagcagacaagagttcatcatcctttaggactctcccacggcaaatcaagcgttgttgttcagacaatattcctgttacagtagcaattttttctttcaacagaggaaccggcacacatttattcacacgcaaattgtatgtctgagaatccaaggtcttgattttgatctcgattgtagtctctgaatcttcagcacaatgttgcatttgcacatctgaagtactctccatgatctccttgggcaaagagaaccgagatccggcagccgaggaggcgagacgaagcgggacgagaagcggcctatgagagaggaaggcgcgcggtggcgtccctgggctcccctccgatgcgtgcaggtgggggtcccctcggacgagacgagagaggagggcctcccctccgatgcgtgcaggagggagagaagaggacgcttgcttggacggagaagagggagcgcgtccgccgcggctgcgtcaccggcgcacggcgtcgcgcccgccgctctccagatgcgccgccgcggagaggacggagcagcgaatgaatcgggtcgggaaggag

SEQ ID NO: 37565 - DNA, 2472 bp, Setaria italica
  Peptide Sequence Number=SeqID_103539
tgcactgaattatgaacaataccaaaacgagctattctgtgtgtaagcaatagcaggcgacaacaatatgtttaataaaccatacaaacttgaactatttattctcataacgatattattgattgcaaaagtcctccacatgctccggctagaaccaccagagaagaggcttgatttatcgcataaataattccatcccggatagattaagcttctacatattggagatcggatgccggcatgtacggttgtgcactcaaaaataacagcttataagatgcgcaaaaagataagcataggtgcctcgtccagtgtcctcaatgccaactatatactacagctagatccatttgtctcaataccgtcaccatttgcctcaactcccgatttgacaatttgatgggttaagcaagaactggcaagattctcatctctcaagcaaatttgaatcagtcgctgaatctttgtcttttagaattaggctcatcaatttggtcgcggttatgttgatgggaactcgtagaatctcttgggtcatcccttgctctgtttgcactcccagatgcagcctgtgcatgtgtgctgctagtgtctggtggagcactttgattctgtgtttcaacttgggagataaatggcataatttgtctgaccatgctagcaaagtgtagcgcctcctcactggctcctgacacttgtgttgttgcactatttctaccatctacctgctcagcagaagacgttggtgcttgctgactcgagctatttcctctaacattttctccagggagcattgatccaagaaggtccattatctgagagagagtgaccaggccattctgctgcccaggtgaggtctcagagccatttcccacattgacatcagctacagattccagattacctgcttcatgagcttgagatgactgaggaattgattgttgattaggatgggtgctactacgagcaggttcatttggagattgaccatttcgttcatcgttaccaatagtgtttgctctttgtcgaactctggtgatcagtggatagataataccaacacctccactagaagaccctgatggagcacgactgataccagcaggcatggcaaccactgttctaagtggcaatagtctaactccagactcaacagaaaaaggagtgccacctgcaacccctgcagatgcttcaccaatatttgcatgcgaagcctctcctgtcctattcgcttgtgcaccagccgtctcacttgggttagtactggctacaggcacagacccacctgtacggacatggatatcaacatctcttggatgtaaaacagacccttgcgaaccaagaccagaaaataatgtacccatttggacagaccttcctggaaaaaatggaacaggttgaaccataagaggattaggccctgatggagatatataaagagctggtccagagtttacaaccgcttctgaagatgcaggattaatacgcagcagcattgtggtgcggccaagttccagaagcaaagaaccaaggttctgaaggagagatcctgagcgaaatgcactgctttgaaggtcccttcgtgttgcaggatcagttatgttctgaagatctcccaattgagctgagagttgagatagcaatgcaccggcctgttcaacaacaatttgcctagtagagtgcatagtttcagctagcaaagatgcagtatgaagcccaagtgtagaagttgattcaggctggatttcctgattttgtgtaccaccaacactagtacttcctgcagttctgttttccacattaccctctgcttgtccattatgattaaagccttccctcctaaatgagtccctcataaagtcaatgtactgagacatagttgtcaaggcatcagggatgacatttggttgtgatgacccatgtgctggctcagactggaaaagcagaggagtttgttgttggtcaagttcaactcttacagtatttgggatggaagattgtgtaggttctgaaggtctggtgtcagaagatgccggagcacccgaagattgtgcgcttattgatccaagcacgctttggagaatctgggcaacaaaagctgggagttcactgctcccgggatccacattaacagcctcaagtacaacacttcttgccactgtgggaccacgacgacgaccagaatttgatgcattagcttcagttcctgcacttcctgatggagctgactggcctggttgtctaacaacaagatgcaatgtatgaccatcttcaacatgataagcagacaagagttcatcatcctttaggactctcccacggcaaatcaagcgttgttgttcagacaatattcctgttacagtagcaattttttctttcaacagaggaaccggcacacattttaattacaacaacgacaaaattagtaatagtactagaagaaataccaaaggtacttagaattttagaata

SEQ ID NO: 37566 - DNA, 363 bp, Setaria italica
  Peptide Sequence Number=SeqID_103540
cacctctcctcagtgaggtgcagctaaccaaccaatggtgaccccagaagaaggctcgtcacggtcgtcgaccaccttgagccgccccgtcagctcctcgatcgacaacgctgagaggtcgaacagcgtctcgatggagatggcgagctgcgagtacttcttcggaacaacgcatagaaactacgcaacggctttctcctcgttgatctcgttgtcaccgtaccgctccagccactgcatcaagctggagaggcggatggtgaagtcgtcgacgtcctcgcccggcttgaaagccagacgatcccactcctgccgaagcttctgcagagtggacttgcgggctggtcgctaccgactcgggcc

SEQ ID NO: 37567 - DNA, 271 bp, Setaria italica
  misc_feature (253)..(253): n is a, c, g, or t
  misc_feature (258)..(258): n is a, c, g, or t
  Peptide Sequence Number=SeqID_103541
ttctatcatagtaaattggtggcgccagagggatcaacagtttgctaatgcaaagtaacttcagaattcaattttggcatgtaaaacagagaattaatcagaaattcgatgtttatcaagtgacaccaatgcaaaatgacgttacatattcagtcatttggattggacgcagtcatattgagattattttacacagaaatgctttcttgcctgaaggaatgaacttattcttgcctaccaaaaaaaacaaaanaaaanaaaaacaaaaact

SEQ ID NO: 37568 - DNA, 241 bp, Setaria italica
  Peptide Sequence Number=SeqID_103542
agccgtataaggcagcagtgccatgagtagtgggcagtatgccctgtcttgtacatagtactagtagttggtagtgtaggtagatacactcatagctttgtgtactctactttgacttgtgctctataaagagtagatgagcagctgcagctcaaacagttcagcagcaacagagagttccgtgtgtgtgtgctgtgctccttctcatcttcttctacctctagctctattgtgtgtgcgt

SEQ ID NO: 37569 - DNA, 382 bp, Setaria italica
  Peptide Sequence Number=SeqID_103543
gttggaatcaaccatttggtagaagtaacatgcagtttcattgggttcatttttataacgtgtgtacttcacctatttcttgcagatagcatggaacatcacaactaatgagcaagcaaacaagtcccgctacgcatatcttcgagggcctgatgggcgcttcagaaatccttatagtcgaggttgccagaggaactgcactgattttcttgtcaatggatacaccaatgatgaggagattgcatggccaacccttcagcaaacagtacagagaagctagagctacggatcttgcaacctaagttcaagttatacgtcacagcttatacaccaaagagcagcctgaaaagcttatgctttcatcatgtccatcggaatattt

SEQ ID NO: 37570 - DNA, 225 bp, Setaria italica
  Peptide Sequence Number=SeqID_103544
tgaacaatgggtgtgaagagggacctacttggttcacaatccgagtcacaccccttcatacaggtttttagacactgttgtcgatcatagaatcgtttggttccgtaggttgttcgccggcgtgtgcagtatgttttcttttagttggtcacaacttgctagcacgggccatttctccaccacaaatggcccgtgctagcaagttgtgaccaactaaaagaaaac

SEQ ID NO: 37571 - DNA, 1273 bp, Setaria italica
  Peptide Sequence Number=SeqID_103545
tgctttatcctctgatcaaatttcatttgttgccctatatcaatccattgattattatttctagatcctgttagttaattgctcagctcattgcttctctctccttttgcaaagtcaatggagcaggtagagctccttgtctggctgtatggccactgcctgccgtataaggcagcagtgccaagagtagtgggcagtatgccctgtcttgtacatagaactagtagttggtagtgtagttggtagtttcactcataccattgtgtactctagtttgactttgtgctctataaagagtagatgagcagctgcagctcaaatcagttcagcagcaccaattgaacctgtgcaaagtgtttgtgcgtgtgtgtgctgttctctcatccccttcttctacctccagatagtgtgggtgtgtgatgtgttctaggagttctaggaactcaccttggccattgccaacatctgcgacatccaaatgctcttaaaatcggatgttttaaattttgaaccatgcagaatatatattgattctcccccaagaaaacggtatgcgtagcttgtgttcaataaaagcagttaagataagcatacacaattatcgtcgtcgttgttgcctgactcgcctccttctctgagctgttggtggtagcttctccgagggcccacaaggaagtatagttcctgtctcttgctctatgcgtttcttcagctctctcagaattcggatctggcccaatttttccggagataatttttcccagtaaattccttgtggcttcgggattgtggtctttgtgaagatgacctgagtcggggtgcagataatgtcaaccggcacatcatgaattagcagcttctccactggaatgtcatccactaactgcttgtcatgcacagtagttactatcatggtcgaatcatctatagctcccatataccgaagcattccatattccagctctgcgaatccctcacccttccccaaccgcgctcctgaacttggatcaactgctactgatccaatcacaatcaaatccaccttaatcctttcatctagacctattggcctcccatattttgctgcaccaacagaagtgcatgcttcaggaacacatccaatgggtatcatttgagagtccagaactgagaaaaatcctgtccttagccgaggttgtggagtcaacagttttttatcacctgacagcgttaagaaccgaacttgcttctgaggcgagtcaggattgacctttacccactgggaattctgaaa

SEQ ID NO: 37572 - DNA, 940 bp, Setaria italica
  Peptide Sequence Number=SeqID_103546
ctttcttgtttgcttatcttgtcatctgccttatccttttcctgaactcaattgtatttgcacctaatttttctaggatcactgctactgctggtctttggtcttgggctgctgtatcacttttctttgcatcacaagtacagttctacagagttagcagaaagaatcctggctatatcaaggcaaacaccaaggcgacttgattcgaaggaaccacttatggagattgaatcttaccaactcctcttggacaggcaattggtctcagctatgccctacttgtaagataattcgccctatgcgctccaaacattgtccaacttgtaagcattgtgtcgagcaatttgaccatcactgcccgtggatatcaaactgtgttggtaaggtaagatgtagatatgtatttctgtgttaaacgataattggacatctagaattatctttggttgtgaatttaaatgcctgattttctgttcctgttgttttaacgaaactttttccttgttagggactaaacgtggatactattttagtcctctggaagaataaaatgcttactgctaaagagagtatacagtcatttgattgtcttttaaaatctgactgcaataagactgtcacacttgaacctcatctgcatgtttgtattcaattgttttctgcatgtagctccgatatatttccatatactactgatatatatttttcttgcagcgaaataagtgggactttttcgtgtttctttgtatggggatagctacatcctttctgggcgctgccgttggattccatagactttggacagagcctgttatactctcatcttcagaatcgtggacacacttcatggtgacaaatcatcctggtgctgtattattcatgtttctggatgtcttttattaactggagctcttattctcactggagcacaagcagtaca

SEQ ID NO: 37573 - DNA, 1418 bp, Setaria italica
  Peptide Sequence Number=SeqID_103547
tacataattcaactttcagctctaagttgagagcacggaacttatgtgttgttgcaatgcaattatttaatgttaacaggctttgttttgttgagggaaaatctaatgtattttatgcaagtgcaggagattcagagaagcttgtcaaagttctgtttgagcttgctaggcatcatgcaccatccacaatatttcttgatgaaatagatgccattattagccagcgtggtgaagctcgtagtgagcacgaagctagtcgtcgcttgatgactgaacttatattacttattcaagaatttacttactcatgccagggttcctaaggttggttgctatgatgtcgaaatttgaatccagtagtcccctaaatcattactaattctaaaggtattatattattgcaactatgtaaaatatgtttcaactaactgcaacatccaggaaaaaaaggtgcttttcaaaagccattgcaatgacaaatggagccttatactggcaaacaaaaattaaatgggcatggaagcagccacaagttttctcattgcctcatcagtcaggggcatttctggtgtttctgctgttggataattgcttagctcttgtttcactcttccttttgctgaaagtaaatggagcaggtaagctccttggccaatagtggccactgccagccgtatatggcagcagtgccatgactagaagggcagtatgccttgtcatgtatagtactagtagttggtagtgtagttggtagtttcactcataccattgtgtactctagtttgactttgtgctctataaagagtagatgagcagctgcagctcaaatcagttcagcagcaccaattgaacctgtgcaaagtgtttgtgcgtgtgtgtgctgttctctcatccccttcttctacctccagatagtgtgtgtgtgtgctgtgttctaggagttctaggaactcacctttgccattgtcaacatttaatgccaggactttggacagagcctgttatactctcatcttcagaatcgtggacacacttcatggtgacaaatcatcctggtgctgtattattcatgtttctggatgtctttttattaactggagctcttattctcactggagcacaagcagtacaggtaaattgtctaatgtagcaactgtgcaggtggcactgcagcattatttttcacccagtttgtatataactgcattcaacaaacattctttggttatcatagtgggattttctatttatctgtatgatctaattatggtctcatggtctgtgcacttctgacataggttttatttttgtgccgtatacaattcgaatcctttgctactcatcaatcgtataagaatatatttatctcattccgtgtttttgaaaccgcgtatcacttaataattttgttggaatca

SEQ ID NO: 37574 - DNA, 1629 bp, Setaria italica
  Peptide Sequence Number=SeqID_103548
tcgggtcgtagtagccgggcgagagtacaccccctcgtcgactccgctcgttctcgctcgctctgtcccccacggccccagagacaggcagccgccgaagcacgccgccgctgagcaatggatttcaaggggttctgggagtccagattcgggggcaagaaggagccggaacagaacgggagcgctaacggggacgccaacggggccgccccaaagaggaccgccgatttggcggtctacgagcagttcgagcagcaggccaggcagacacaggtccgagctgctgcgatccgcgatgggaacgctgatgtgatccagaagccccttctgcctccatttgagtcagctgaaatgcgtaatctcgcggagacattattgagggatattattcgtgggagtccagatgtgaaatgggagagcatcaaaggactagagaatgcaaaacgccttctaaaagaggcagttgtcatgcccataaagtacccaaaatacttcactggtctcctttctccatggaaaggcatcttactttttggccccccagggacaggaaagacaatgttggcaaaagcagtcgctactgagtgcaaaaccaccttcttcaacatttcagcatcatcaattgtcagcaaatggcgtggagattcagagaagcttgtcaaagttctgtttgagcttgctaggcatcatgcaccatccacaatatttcttgatgaaatagatgccattattagccagcgtggtgaagctcgtagtgagcacgaagctagtcgtcgcttgaagactgaactacttattcagatggatggtttgacaaagacaaacgacttggtatttgtccttgcagctacaaatttaccatgggaattggatgctgctatgctgcgccggcttgagaagcggattcttgtaccgcttcctgaagccgaagcaaggcaagcaatgtttgaggaacttctgccagaaactacctcaaagctagaggtcgcgtacgacgtactagttgaaaagactgaaggttactctggttcagatattcggcttgtgtgcaaagaagctgccatgcaaccactgagacgtctcatgtccgttcttgaagccagcaatgagttagtgccagaggaagaactgcctgaggttggtcctctgaagcctgaagatatcgaacttgctttaaggaacactaggccatcagctcatctccatgcacatcgctacgacaagttcaaccaggactatggaagccaggttctttgctcagagcaagcttgatcaggttgccatggaactggaagggagctattctgcccatggacatgatggacaccagtttgtttgcgtgttgatggggtcccattgtatcaaaatggttgcattagtaactagcctcctcagtagattgcaatttgcccaacattggctgaattgtgaagttgctggcagcgctcatatctttgtgggggacatttttgccaggctgagatctttcgcgaaaccttacagcaaaaaattgattcattgtttaatcacatgtcgaaataaatgtttggtgccgcagaagagtactgtctggttatattgaactgaatgcgagcaggtccaagttttgtgcttattgttaaaaaaaaa

SEQ ID NO: 37575 - DNA, 1864 bp, Setaria italica
  Peptide Sequence Number=SeqID_103549
accttatcgagcacgggccgacgtgaacgcgacggaccaacgcggggcagacggcgctgcactgggcggcggtgcgcgggtcgacgtccgtgtccgacgtgctcatggagcacggcgcgagggtcgaggccgccgacgtcaatggctaccgggcagtccatgttgcagctcagtatggccagacgtcattcttgcatcacattatctcaaagtacggtgcagattttgatgctttggacaatgatgggaggagcgcattgcactgggctgcctacaaggggaatgcagatacaatcagattacttctgtttatggatgctaatcaagtaaggcaagacaaaaacggttgtacccctttacactgggctgctataagaggaaatttggaggtttgcacagttcttgtacatgctggtacgaaggaagaactcacactaaatgatagtggtgggctaactcctgtgcaacttgcagcagaaaaaggtcatcggcatctttccaacatcctttctaatgctataaaagtaagctttgaagacaagttcttccctgggagatcgagaaaaattggatatgcccctttcttgtttgcttatcttgtcatctgccttatccttttcctgaactcaattgtatttgcacctaatttttctaggatcactgctactgctggtctttggtcttgggctgctgtatcacttttctttgcatcacaagtacagttctacagagttagcagaaagaatcctggctatatcaaggcaaacaccaagcgacttgattcgaaggaaccacttatggagattgatcttaccaactcctcttggacaggcaattggtctcagctatgccctacttgtaagataattcgccctatgcgctccaaacattgtccaacttgtaagcattgtgtcgagcaatttgaccatcactgcccgtggatatcaaactgtgttggtaagcgaaataagtgggactttttcgtgtttctttgtatggggatagctacatcctttctgggcgctgccgttggattccatagactttggacagagcctgttatactctcatcttcagaatcgtggacacacttcatggtgacaaatcatcctggtgctgtattattcatgtttctggatgtctttttattaactggagctcttattctcactggagcacaagcagtacagatagcatggaacatcacaactaatgagcaagcaaacaagtcccgctacgcatatcttcgagggcctgatgggcgcttcagaaatccttatagtcgaggttgccagaggaactgcactgattttcttgtcaatggatacaccaatgatgaggagattgcatggccaacccttcagcaaacagtacagagaagctagagctacggatcttgcaacctaagttcaagttatacgtcacagcttatacaccaaagagcagcctgaaaaagcttatgctttcatcatgtccatcggaatattttagtttgttcagacatggattgacaatgggtgtgaagagggacctacttggttcacaatccgagtcacaccccttcatacaggtttttagacactgttgtcgatcatagaatcgtttggttccgtaggttgttcgccggcgtgtgcagtatgttttcttttagttggtcacaacttgctagcacgggccatttgtggtggagaaatgagttgcctatagatgtcaatgcggcttttctgaatctcattgtagtgaattgaaattgtacatgtcgcgtacatacggtcaccatattgttcgattcgcaaattatactgggcagtgaataacatgcaggtgttccttttcttagtttttaaaaaaaaaaccaaaaaac

SEQ ID NO: 37576 - DNA, 294 bp, Setaria italica
  Peptide Sequence Number=SeqID_103550
caccgagctagggattaaaaacttggcctttagcgctctactgggtacgaacgccgtacttgcaccggttgcccgcgtcgtggtgcgagaagccaggagaagcgaggcgccgcggcacacagagacggcggccggcgtgtcgttgcgaggaggaggcaaggaggagctgatcagccatgcagggggaggagaagagggggaaggtgaagaaggggtggctggcggtgcgcgtcggcgccgagggcgacgagggcggcttccagcggttcgtcatccccatcgcctacctctacc

SEQ ID NO: 37577 - DNA, 470 bp, Setaria italica
  Peptide Sequence Number=SeqID_103551
cagagtgaacctcctggaccttctgtcaatgatgaccagcaaagcttggcatcgtctccaatgagttctgcaccaactgcttttagtgggagctcgtttgcacggcactacaaaggcgcatggtgcactccgccacgtatcttcattgaccaggtatgatgcaatacttctggccatgtcaactttccttagtaccattgtcttgtgtctatgttatataattgaaggcaccacaatttgctgtgcagtctattctttcaacttcaacaaatcttatcagaaatccaccctgtcttctaagataatctatcaaaattggtgctgttctgcctgccacagttatccgcatttctaagttgtgcctatcttttccctctgagcgagtcatcctgcatatatttgatcctgtctgcatcacatcgcaggacgaaatcatcccacacctggaacctggacgagttccttacggg

SEQ ID NO: 37578 - DNA, 585 bp, Setaria italica
  Peptide Sequence Number=SeqID_103552
tcaccggagtgcacactggcggcacggtccacattgcaaaccgagctcccctggctcatgttatcgtgatctgaggacttgctgagcgctaggtggcccagcgtcgccccggccggctcccggttcgcgtacttgtccggcggcgggaaactcgactgctcgcgctcgtgcattgtctgggcaaggctgcggccggcaacacggtcgacggggatctccttggagtagatggggatctgcgtctgcctcaggctgtccatggttctcttcgtcctccggcgtgacgccacccaaatgcagatcatcagcaggatggccacgagaagggcgacgacgccgatggcaatccagacccagagcgtgaggccaagaaccgtcctcttcatgtccgagctcaaatcgccggaacccatggtgctgtcaggctcagagagtcgattcagtcaagctcgcgaggtttagctgtatattactagcgcagatcccctaatgcacatcagcacgaggtgcagatgaagttttcttcctctttctgcaaccgggcctccttccactcatccctcaagcaaagaaccagcaatcgcg

SEQ ID NO: 37579 - DNA, 1771 bp, Setaria italica
  Peptide Sequence Number=SeqID_103553
agagaaacattgacaagtagcaagccagcaacactaacagcacaacctcatgtgcagcactgcagaagcagggagaagtgaaccagattgtagaaggtaacaatgcaagaaccaaaagaaccgaccaattgttaaaacacccaaccaagggaattccctaggcaccaacatataacctatacagagaacaggagaccaggagattcttcatccaagaatgcttctactccacctgatactagtagacctaagattcaggtagtaacatcagggattgccctgcctccaccacctaccaacataccctatcagggcagcaatcaccttggtgatcaacatcatttctcagactgttcatgatatagcatgtatttgcaggcctcaaggctgagatcggtctgatgtcgcgctgccagtcctctctaccttctttccaaactcggcagagttcgaaccctctgcaatagactcaatatccatgcttccagtgcgactcctccggtttctccggtcctcccggtacggaacttcttcagactcaagcatcctgacaacctgtcccatcttgggtctcttttcagagtcaggatcaacacaccttagtgccactaaaagagctcgcttcagagacctaatagatggtctaacttctaagcttggatcagccacttcctctgcccttcgattggccaccatcgttttgagccattcaacaagattgacctcattggaagatcgactatagtcaacaggaccccttcctgtcacagtctccagcaagagaacaccaaagctgtagacatcgctcttttcatttaacatcccagtattagcatattctggtgcaacatatccaaacgttcccatcactctagtagtaatgtggcttttatctgaacccaaaagcttagccaatccaaagtcggagaccttgccattgaattcatcatcaatcaatatattgcttgatttaatatctcggtgtacaacttttggttctatggcttcatgaaggtaagcaagcgcttttgcagtgcctgttacaaccttcatgcgattttcccagctaaaaacaccccgctgacacatagctccatgaagccactgctctaagttaccattgttcacaaactcatacaccagcatcctgtttacaccctcaacgcagtatcccaatagccgaactaaattcttatgtcggacatgaccaatagcctcaacctccactctgaattccttctctgcctgccccatgttgttaaagatcttcttgatggcaacttcagttccgttcaccagacgcccacggtacacaactccatagccaccttctccaagcacattctccttggagaaacggttggtagcaagctcaaggtcacgctgagtaaaccagtgaccccagccaagatgagagaattcaggaaggccgaccagaggcgacgcggacacaaacgccgcaggcgaattgggcttcctccgtggccccgagctcccatcctcaccggagtgcacactggcggcacggtccacattgcaaaccgagctcccctggctcatgttatcgtgatctgaggacttgctgagcgctaggtggcccagcgtcgccccggccggctcccggttcgcgtacttgtccggcggcgggaaactcgactgctcgcgctcgtgcattgtctgggcaaggctgcggccggacaaacaacggtacgaacggggaatactaccttaggaagtaagaataggggaattacttagtacgttacttaga

SEQ ID NO: 37580 - DNA, 520 bp, Setaria italica
  Peptide Sequence Number=SeqID_103554
ttgatctctagctagggagcttcctctccatcggtcgagtggtcctctcactctcaccaggagcgcagctagctctcaaagagcgaggccggaagagatggcgtcgctgtcgatgacgagctcggcctcggcgcgcgcgcagtggacgaagaagcagaacaagctgttcgagcaggcgctggcggtgtacgacaaggacacccccgaccggtggcacaacatcgcccgcgccgtcggcggcaagtccgccgaggaggtcaggcgctactacgagctgctggaggaggacgtcaagcacatcgagtccggcaaggtgcccttccccgcctaccgctgccccggcggcgccggcaccctcggctacgaggccgacaggctgaggcatctgaagatctaggcgaatgtgaacttacagatgatgatcgggaagaggatgcgcgcgcacgtgtatatatgattgggacagtatgcatgtccatgctactcctacgcaagtgggctggaagaagcaagaattcag

SEQ ID NO: 37581 - DNA, 187 bp, Setaria italica
  Peptide Sequence Number=SeqID_103555
ttacctcaagcagcctcacaatcaaagtctgttatcaagaaatctggcgcatctcgcattaaggaagaagaccgtaacagcggtagagttgtcttccagtccggatctgatgaatctggcaacgaaggcaacgatgagatcagtccatttgtccaaccctcagatagaaactcccactcccaattgc

SEQ ID NO: 37582 - DNA, 383 bp, Setaria italica
  Peptide Sequence Number=SeqID_103556
aaaaaaaaataaacatcgatcataactcaaactggtagcaattcatactacactcagcagaattaattcatagtgtacttaggagcagggtggtagctagactccgggcagcggatcgaagcgcggagtgggaatgagcacgggcggctgcttccgtgccgcgacgagcccctcggcctcctccatgtcgagcggcggcgccttggagtgcccctgcgggatgggcaccgcccagtcgaagcactgcacgagcgcggcgaggaacgccggcacagacaccatggcgaggcccatgccggggcaggcgcggcggccgctcccgaaggggatgagctgcatgtgctggcccttggggtcgacgccggcgccggcgccgccgggca

SEQ ID NO: 37583 - DNA, 492 bp, Setaria italica
  misc_feature (341)..(341): n is a, c, g, or t
  Peptide Sequence Number=SeqID_103557
cgcccgtcgtcgcccgtcgccacccaccccgccgcctgtcgtcgcccgtcgccacccgccgccccgtcgctacccaccctgccgctcgtggagggtctcccgtgtgcggcacagtgcagtggaaaaaggggaagaagaagatgggatagagaggatgacaagtggggccttaatttgggggcaacaatggcaatccacactgaaatcgatccttttttggagctgagagcacccatctagccaaacacctcatttttgttctggagttttggagcggagctggctccatgtggaattctggagtggagcagctccacccaaagttggagccatgccaaacnggaccttagatttctcacaagatatattaatttaatgttagaactgcaccatcgtttccattattcaccgttttcacgttctcgctttgtgtttctaattgtttatttggttatccaaaaaattgttattggttggttcagctcattcgat

SEQ ID NO: 37584 - DNA, 229 bp, Setaria italica
  Peptide Sequence Number=SeqID_103558
ttttttttttttttgttacctcgcagaaaaaaatacaaatagctcagagaaaccaagttacaccagtcattcatacaattttcctgattctagacctgtgtattatattacatttcgagttttcaactaatcagaaagaaatgttttcacctgtgaggatatgtagaaactagaaagatctccggcttattacagtgtgatacaatttttgtttccaactaaacacaac

SEQ ID NO: 37585 - DNA, 173 bp, Setaria italica
  Peptide Sequence Number=SeqID_103559
gtatttccaccattttctctctccttttgaccttgtgggtgcatagagttgaaatgtcatgggtgcatatatggtgaaaaattgaccttaatcactgttttgcatctttgttgtgggtgcatttgcaccccctaatcctaacgtagctttgcccctcatcagcaagtgttgga

SEQ ID NO: 37586 - DNA, 323 bp, Setaria italica
  Peptide Sequence Number=SeqID_103560
aaccaataggttgtttaatcgtgacttagctttctggcaagtagtgcagcgggcaacaaggcgctcgacgatcagcgcgcatccggggccaaaagaagtgggcagccagcacttcatgcgtcttgtagacgccaaagtgccccatgagaccgcctccatgcgcttcctgtaacaacaaacgacgaaccgagctagctggaacacacagcttgttagcgcgaaacaggaacccgtcctgtatgtgaaatttgccccatggtttgccatgaatacagtgggccgaaagcatcactttaaaatcagcatcatgcacatattgactt

SEQ ID NO: 37587 - DNA, 324 bp, Setaria italica
  Peptide Sequence Number=SeqID_103561
tactagcattgggatcacccatattagcccatgcaattgtgcctccctttacaaccagttctggtttagcaccaaagaaagatggtttccaaagaacaaggtcagctaattttcccacctgtccaaaatatgtaggatcagttagacctttaattgagatactaatagaggaaatgcttagccagtgtctcactgggtctgattacatatggtagggatattaataattaggattatactaattaatggtagaaccagttgcacctatgcagaagataactatttcagaaataacagtttgttgccttgttcctgatgcagatt

SEQ ID NO: 37588 - DNA, 2320 bp, Setaria italica
  Peptide Sequence Number=SeqID_103562
ctcaagattcccaagcgctggcggcgacgacttctcctccgctttatttgccttttttcttgccgcgctgcgacgaccatcacgagcgccgttccaatcccccgtcgcgtcgtcgacctccccactaattctgcgttccggtgcggcgagcgcaggtggtgagggcgaggagggatgaggctggtgccgagggaggcggagaagctcgccctgcacaatgccgggttccttgcgcagaagagacttgcccggggcctccgcctcaactacaccgaggccgtcgcgctcatcgctgcgcagattctcgagtttgtccgtgatggagataaaactgtgacatgcttgatggacttggggaaacagctgttgggcaggagacaagttcttccagctgttccataccttttacatactgtacaggttgaaggaacatttgtggacggaacaaaactaattactgtacatgaccctatttctttggatgatggaaatatggagttagcactgcatggttcttttctcccagtgccttcacctgaaaagttctccgggggtgatgtcgaagactatcctggtgaaatacattacagctctggtcgcatagttctaaaccttcaccgcagggctttaactttgaaggttgttaacaaggctgacagacctgttcagattggaagccattaccactttatagaggccaatccttacctggtttttgatagagaaagggcctatggcatgaggttaaacataattgctggaacagctgttcggtttgagccgggggatgcaaaaaatgttacacttgtaagcatcggaggtcataaggtaatcagaggtggaaatggcattgctaatggtcctattgacagttcacagattaatgaggtgatgcagaaggttaatgcaaataattttggacatgaagattatccagatgcaagggaaggttttattggtgatggtccatttgactgtactgttgatcgtgagaagtatgcgagcatttatggacctaccactggtgataagattaggcttggtgataccaatctttttgctgagattgaaaaggactttgctgtttatggtgatgaatgcatatttggaggtggaaaagttctacgcgacggaatgggacaagctacagggtacccagaatcttcctgcctagatacagttataacaaatgctgttgtgattgactatacaggaatatacaaggctgatattggtataaaaggtggacttatagttgctattggaaagggtggaaaccctgatgtcatggatggtgttcatagcaacatgattgtgggggtcaatactgaagttattgcatctgaaggcatgattgtaactgctggtggcatagattgccatgttcacttcatatgtcctcagttggcagaagaggcaatcgcaagcggcatcacgacattggtgggtggtggaacaggaccagcacatggaacatgtgccacaacttgcactccagcaccatctcaaatgaaattaatgttgcagtccaccgatcaattgccaattaacatgggattcacaggcaagggaaatactgcaaaacctgaaggattggctgaaatcgttaaagcaggagcaatgggcttgaagctgcatgaggattggggaagtaccccagctgcgattgataattgtttgtctgttgcagaagattttgatattcaggttaatatccacacagataccttaaatgaatcaggttgcgtggaacatacaatcgcagcttttaaagatagagccatacatacatatcacagcgaaggtgcaggtggcggtcatgctccagatatcatcaaagtgtgtggggtaaaaaatgtgttgccctcttcaacaaatccgacccggccatttactacaaacactgtagatgagcaccttgacatgctgatggtttgccaccacctggataaaaacatcccagaagatgtagcatttgctgagtctagaattcgagctgaaacaattgctgctgaggacatattgcatgacatgggggccataagtattatatcatctgattcgcaggccatggggcgcattggagaggtgataacccggacatggcaaactgcaaacaagatgaaagtccaaagaggtaggttacatggatctggtgagtctgatactgcccaggacaatgacaacttccgtataagaagatacatagcaaaatacaccataaatccagcaatagtaaatggtttttcagacttcgttggttctgttgaggtgggaaaattagctgaccttgttctttggaaaccatctttctttggtg

SEQ ID NO: 37589 - DNA, 778 bp, Setaria italica
  Peptide Sequence Number=SeqID_103563
aacggagggagtattacattgcctccaatattttaaatcatatgccaaacctatacataagagccagtgcataaaagcagaatggtgcttgcactaagaattggtgttgctagattttatatactattctatttgctcggacccagctcttctataggatcaaccttaaaaatgcatggaacgggtaaaatgagtccatttattgcataggaacggggtttctgaccacattgcaagggccctaatgcaccttcttgaaaaagcaaattgttgattctagaataggaagtaattccgagacagtggtactgtgggcgccggttggcacgtcaaaacctctccatcagcagtaactgtgtaggtctcagggtcaacttctatttttggaagcgcgtcattgagcttcaagtccagctttgtcaaacatcgaacaccactaacagcttccacccttttttccaatttgtagtctgttgcaactccagcttctttagcaaccttgctgacaaatgcaatcgagttggaacttccagcctttccaaatgcaccgaacataggacgcatcataacaggttcaggtgttggaatactagcattgggatcacccatattagcccatgcaattgtgcctccctttacaaccagttctggtttagcaccaaagaaagatggtttccaaagaacaaggtcagctaattttcccacctcaacagaaccaacgaagtctgaaggcatgattactattgctggtggcatagattgccatgttcacttcata

SEQ ID NO: 37590 - DNA, 430 bp, Setaria italica
  Peptide Sequence Number=SeqID_103564
ttgtaacggaataatttgagatccaccatgcctttcaaagtattcatccacgttggaaaagttctgctcccacagtgatctatcctcagagccttcaacccatcatgaggattgagaccttccaccacctcatcatgaggtgtagtatcactactccaacataactccagttcggtcagttttttctatttccaagacctgctgcttgtgcatctgctcctgtcacattttcaagcttgcttagctccagtataccgccaaggtccaaattgtgcaggtctctcacattacagcaaccggagtcggtacctaccacaaagtatgtaagcgtctgtagggaagtgaggtgtccgagctctgggggcatgctttctaattttctacatccgtgagtgtagaggtgacggaggccagtcaaatacttcagttg

SEQ ID NO: 37591 - DNA, 628 bp, Setaria italica
  Peptide Sequence Number=SeqID_103565
gctggtagctcccagagtgcaggaagctcttcgagctttttgcaatggactaatttgagctctaccatgcctttcaaagtattcatccacgttggaaaagttctgctcccacagtgatttatcctcagagccttcaacccatcatgaggtttgagaccttccaccacctctttatgattattattctgtgcttcctggtcactatcggtccaacataactccagttcggtcagttttttcttgtttccaagacctgctgcttctgcatctgcttgtgcatctgctcctgtcacattttctagcttccttagctccagtgtaccaccaaggtccaaattctgcagttctctcacattacagcaaccggagtcgtcggtacctgccacaaagtatgtaagcgtctgtagggaagtgaggtgtccgagatcagcgggcatgctttccaactttccacatccgtgagtgtagaggtgacggaggccagtcaaatacttcagttgctttggaagtcgttgaagactatgacagtaagaaaggttcagtgtttgcagatgatataggatgctaatgtcttcaggaagtgcttcaatatcacttctcgagagatccagatacctcaggtgatgaa

SEQ ID NO: 37592 - DNA, 729 bp, Setaria italica
  Peptide Sequence Number=SeqID_103566
aacagagggccgaagagcaggcattttcagatacctgaatttcttaccagactcttgttttggtactgattccttactatttaaagtttacatttttatctgggttttgttgctggttatattatttcaggcaaagatgttactcgaggctttcaacaaagatcgtgcctctttaataaattctattcaaaatgccactcaaacaactacacctgtcccccctgctgctccagatgcgcggacacaagaaatgataaatgagaaactgaaaaaggcagaagaactaggtgagagtggaatgattgatgaagctcaaaaattagttggatgaggcagaagcgctgaagaagctgagtgcccggccacagtctgttccagactcttcaaaaatgacagctcatgtccagattactgaccaaaagttgcgcctatgtgacatatgtggagcattcttgagcgtatatgacagcaggcttttgggcccacttttacgaggattacttttgcagctaaagaattgaccgccgtctggcagatcattttggagggaaacttcatatgggttatatgctcatacgtgagagattatctgaactgcaggaagaaaagaacaaaaagcggaagttagaccgacctgagtatgacagaaggtccagggagaggagtggggaacgtgagagggcttcaagcagggatcaccgcagaggagaccgcagcagcagccgtgac

SEQ ID NO: 37593 - DNA, 1721 bp, Setaria italica
  Peptide Sequence Number=SeqID_103567
cccttccctcgccgccgccgtctcgtctcgcccccctcgcaagcgaaaaccctaggctaggggacgggagccccgccccgcgccgcggcgccatggacgccatccggaagcagctcgaccagctcatgggcgccaaccgcaacggcgacgtgcgggaggtcagccgcaagttctacgaccgcgacgtctgccgcctctacctcgccggcctctgcccccacgacctcttccagctcaccaagatggacatgggaccgtgcccgaagctgcactcgctgcaactgcgcaaagaatatgaggaagccaaagccaagggtacagataactatgaccgtgaattggaagaaacaattgaacgacttattgtggagtgtgaaaggaagattcagagagcccttaagcgcttggaggaggacgatgctaaggcagccattgctatatctgtcactgaggttacacagactaaagaagtaatggagttatccaaacaaattaggcagaagatgaaggatatcgatgcttttgatcttgagggtaacacagagggaaaaattcgggccactgaagaacttgacaagctaaaagaacagagggccgaagagcaggcaaagatgttactcgaggctttcaacaaagatcgtgcctctttaataaattctattcaaaatgccactcaaacaactacacctgtcccccctgctgctccagatgcgcggacacaagaaatgataaatgagaaactgaaaaaaggcagaagaactaggtgagagtggaatgattgatgaagctcaaaaattgttggatgaggcagaagcgctgaagaagctgagtgcccggccacagtctgttccagactcttcaaaaatgacagctcatgtccagattactgaccaaaagttgcgcctatgtgacatatgtggagcattcttgagcgtatatgacagtgaccgccgtctggcagatcattttggagggaaacttcatatgggttatatgctcatacgtgagagattatctgaactgcaggaagaaaagaacaaaaagcggaagttagaccgacctgagtatgacagaaggtccagggagaggagtggggaacgtgagagggcttcaagcagggatcaccgcagaggagaccgcagcagcagccgtgacagggattatgaccgcagaagaagccacgatcgttatcatgacagggaaagagagagagaatctggtcgatctcgtagttatgattcaaggagccaccgcaggtcacgttcacgttccccaaggggaagttctagggattatgatcgatatgggcgtcacgaacgtcgagatcggtactagatgcaagaaaccttgtcgaagtttagggtttaccctaccctcggtgttcctgctggggaattcaagagagggtttaggtgactaccccgtgactggaaggcatcgactcttcatatgcattgcattataaccaagggataggatctgacataatcaatgtgctattatcatgtaaacagattgtgttgtcatgttttggtgcgcactcaaattatgctaagccccttgccaaatctgtcagttatgcaacgcaggtgatttctgaggtgggacttgtaacaactacagtaccactgtagaagttgcagtgcctgtggtatataaatttatattctggtcaaggctgttctaatttctgaaggggagaattcaaactcccaagtttt

SEQ ID NO: 37594 - DNA, 461 bp, Setaria italica
  Peptide Sequence Number=SeqID_103568
ggtcccgttccggcccgtcctcgtcttcgctgcttccctcttccgcccctccctcggctgaagagcggtcttctaccagcatggtatcatggtagagaacggagtacagctgacactgacctccactttgacgagcaccggaaaggcaagaatcaatggagacgggatgaataatggaccacatgacaaagagaagcaggaacgcaatggcgctttacaaccatcaaaaggccaaaaccagcagctgtgcacaacatgtgcaaaagggcattcttgccaatcggtcattaaccggacaagacaaatgcgtgctctgatcaactcaaagaagccttaccaagcacactctgtattcaagcacctggtggatgagggacacaagccttcgctggtcacatacacaactctactgactgccctgacaaaccagaggatgttcgagtcgattccatcactgctcg

SEQ ID NO: 37595 - DNA, 883 bp, Setaria italica
  Peptide Sequence Number=SeqID_103569
cctacatggaaattgctgtgcttacttgtcaaagaatttgtttcttctaaggcagagccacctgattccggtgactttcttctagccagagataaacaaataaattgtatccagagaagaaagaaatctagtagtagaaaagaaataacgttcaggaccatttaatatgcaacgaatatatcatcacgggtgcaaacaatttcatccaaccaaacaccatcatacaccttcagatccaatcctcagatcacattgcactaaaagttgcaaaccgttgcaaaaaacaccatgaactaactgatgtgcgcttcttcccttgcaattcctcctttctctcatccacacgagagacaagattacagaatcggaggtgaactacacattatgcaaactttacagtacccgagaaacctaaaagctatttgcacgacaccggtagcaccagggttcggaatcctttaggctctgatacaacactggaaatagctgaggaatttctttcttcccgtgggtgagccgtcgtgcagcggccggcggtggtggtcgtctgccgcgacggcggcggaggacttgtcgggctgcgccgccgcctgcggcttgccctgctgcgcctggaggaggtcctcgtcgccgccgaggctggccctggagagtgcatcaatagcaacagctttgagtaattggctaatctttgctagcatgggtcaattacatgcaatggaatccagcacaaaaaaattgtttgaaaagtcagtaaagctagtcaatcatatgcagcggaatgcatgatggcaaccagaggaaaagtttgctcagaagaagactttgaaattgtcatactgaaagtctagaaaatgcggtcctgatgggcatgtggggaata

SEQ ID NO: 37596 - DNA, 339 bp, Setaria italica
  Peptide Sequence Number=SeqID_103570
ctccctctctcgggcatgcttcgaatcacgtatagttttagcatatgtggactctgttatcaagagatccaatttgagacgatcgatttgtgcagccccaagatgtctatctggtgtcatattgtaatctccggtgtagaccatagcagcatctcctgcttttgcataaatcatggcagcccctagaacatgtccagcataatatgcacgaatcacaaggtctttatctacttgaacagtctgcttcgaagtccaagggtatgactttcttcatacacctaagaatatcttcatagctatattgctctcgccctcccctctctgactccattccgttta

SEQ ID NO: 37597 - DNA, 1562 bp, Setaria italica
  Peptide Sequence Number=SeqID_103571
tttcttacgcctagtcgtatatttctttttttttatgtagcggggaaccctggtttcgtcttaaaagcatgtggtacaggatgaagtcaccgcggatccagatctccaaacaacaatttttgcagagattctcatgatgatacaactttcaaagctctaaaaacaacaggcttcatgtgcaatggcagtcggattagttatacaccatatactttggtgtggcactaaacttctggtaacccttgatcaccttgttcacggcatcaaggaaatctttctctgtcactgttttcctgcgggcacgaatggcgtacatcccggcctctgtgcaaacgctccttatatccgctccagtggagttggggcagagccgtgccagaagctcaaaacgaatgtctcgctcgcagttcatggtgcgtgtatggatcttgaaaatttgggtgcggccctcaaggtcaggtagtccgaattctacctttctgtccagacgaccaggacgcagaagtgcagggtccaaggtatcaggcctgttagttgccatgagaaccttgatgtttcctctggcatcaaacccatcaagttgatttactatttccaacatcgtgcgctgcacctcattgtcgccacctaccccatcatcaaaacgagcgccaccaatagcatcaacttcatcaaagaagacaatgcatgctttctttgagcgggccatctgaaacagttccctaaccatccgagcaccttctccgacatacttctgaactaattcacttccaattacacggatgaaacaagcatcagttcgattggctacagctcttgcaagaagtgtcttgccagtaccaggtggaccatagcaaaggacaccttttggagggtcaataccgagcttgacaaacttttctgggtgaagcataggaagttcaacaacttcacgcatcttttcgatctgttccttgcatccaccaacgtcgttgtatgtcacatccggtttctcctccacagtcatcatggtaacacttgggtcaattttcggtggcaaaggaatttgaatctggtacttgttgcgatcaacaccgaccctcatcccttcctcgatatccgttggagaaaccttatcccccaacccaaccacaaactttgcaatttgttttacatttataacatatttggcatcatcggtattagggcttataatctttgtacaccttgctacttgtaatggctgttcttcttgcatcatctgtttatctgacaccaaatcccactggctaggtggagccagccctgtatcagactcctttatcccacaaaggtcattaattttcttggccatttccttgatctccttctcgaccttcttaatactggtcgagtacggcccaagcccataggtcttgagtagcgcgatgtcgtcctcgtcgagcgggcggggattcttctcgttcatgatatcatcctcaggctctggagccatggctatcctcccgagcgagcggcgccttctccggcggcgaggagaggcggcggcggtggctcaggtccgtgggtgcgccgtaaagaaa

SEQ ID NO: 37598 - DNA, 508 bp, Setaria italica
  Peptide Sequence Number=SeqID_103572
ggacgccatggggacttgctcggggagctcgggcctcgggagtgagcagcggcggcgggaggaggcgggggataagaagatgaggcgtagagatctgggaggaggagcaggaggaggagcgatggacgggaagctgccgccgccgaacccgaacctgccgtaccgggaggactgctggagcgagggcgagacggcggcgctcgtcgacgcctggggctcgcgctacctcgacctcaaccgcggcagcctccgccagccgcagtggcgggaggtcgccgaggccgtcaactcccgcccgggggcctccgcgcgccgccgaccgccgcgcaccgacatccagtgcaagaaccgcgtcgacacgctcaagaagaagtacaaggccgagcgcgcccgcggcgggtcctcgccgtgggccttctacggccaactcgacctcctcgtcgggccaacgctctccggcgccgccgccgccggcggcggcggcaagaagccgtccccgccgcgcgcc

SEQ ID NO: 37599 - DNA, 549 bp, Setaria italica
  Peptide Sequence Number=SeqID_103573
aaccaagctgcaatgtcctcgcgattgctctgggtgccttataaaatatgttagctctgttttgtaaattttccaccaataaatatgtccattaaacattccgtcaattagagtccttttcgattcacttgtgttggatgccaactcttcagttgtacttctacttaggagaactggtccgtcaatggctttttcctgataacattgtgtggaatgaaaagttttgtgttgtattttgtcaataaagcattaactccaaatttttatatgatgttcatttatcatatatgtcttggagatctttccagttttaactaagggaggagctggcttgagtggtagggtaaagaattatttgttggtttgaaattagtgacataattcgatattcagtactcttgcaaagttctatgcttttctgtaatactgcatgggtaatggagctttgaatactatgaagtaaagtatgagggtattccatcaaaagaaatgaggggccaggcatattactactacagaaacaacttgggggggcctgtacatagtgag

SEQ ID NO: 37600 - DNA, 233 bp, Setaria italica
  Peptide Sequence Number=SeqID_103574
gggagctttcgttgactgggaaaattccatgtggcatgttcaatagcatgtttgatttttctggctgctggcagaaagatgcagctgccaccaagtcgcttgcttttgatggctggtacatttcgctatataaggttgcactatccaagtctcgtattctactgcgtgatcatgttactcaagcagtgccttcaacctgggatcctgctgctctggttgagacacgcaaacgg

SEQ ID NO: 37601 - DNA, 1206 bp, Setaria italica
  misc_feature (1173)..(1206): n is a, c, g, or t
  Peptide Sequence Number=SeqID_103575
ttaatctgtacctacgctataagcctccaattgaagaacttcaccaatttttggagttccagctaccaaggcagtgggcacctgtgtacagtgacctcccccttggccctcagaggaagagacagagtagtgcatctttgtccttaagtttcatgggaccaaggctatatgtctgcacgaatatggttgatgtgggtgaaagacctgttactggactgcggttgtatcttgaaggaaagaaaagcaacatgttggctatccatcttcagcatctatgctcccttcctcagattctgcagcttcaggatgacccatacaaccaccgaacaccagaaccatatgacagcaagtacttagaaccatttggatcctggaagcggttctctcatgtctacacggaaccagtggagtctgatgacgactcctcaatcgtgactggggcacagttacaggtcagcagccatgggttgaggaaaatcctcttcctccgcctccatttctccaaagttatcaatgctgcatcggtcaagaatcccgaatgggaaggatcgccgaatctgggccagaagtccggactcatctcgactctcattagcactcatttctcgacagcggctcagaagcctgcccctcgcccagctgatgtgatcatcaactcggctgtgtaccctggcggtccacctgtgcctgtgcaggcaccaaagctcctcaagtttgtggacacagcagagatgttgcggggaccacaggacacaccgggatactgggtggtctctggtgcaaaactgcagcttgagaggggcaagctgtcgctgcgggtgaagtactcgctcttgacagccatggtacctgatgatgagtatccacttgatgaacatagttgaaactcattatttggatgggctagtgtgcatttaatcgtatggtgcatggcaagtaaaggttttcaatgtgcttaggaaggctttccaacatgtacatcgcctgtcgttcaattctgcctatttctgagcagagtgtgctgtctgtagttcaatgttttcgcagagggtgaagtgtacaacattctttgtatatacatgatgtttctacctccaacgaggggaagatggcacctgctattctgctcccatcttttctgaacattagtagaacttcgacgaatacactacnnnnnnnnnnnnnnnnnnnnnnnnnnnnnnnnnn

SEQ ID NO: 37602 - DNA, 1241 bp, Setaria italica
  Peptide Sequence Number=SeqID_103576
agcttcctccatcgtttcggcctctgaatccccggaggacagggcttcttgaaatttcaagtctttggccgctcggagctgctccgggctcctcaagatcgaggcaatcggagagtcggcagcattccccttagggtttccgagctgtgtgatggtcggaaatggcgcttaaggcctcggctcagggcgccgcggaggcggccatagcggccatcggccgtggctacgatgtcgtctcggacgtccgcctcaagtactgcaagggcaagctcgcggacccggacgcgcgcctcattgacctcagccgcgatgaggtccaggacgtcgtgctccccggcgggatcaaggtcgacgccgtccccaagtccatcaagtgcgacaagggcgagcggacgcgcttccgctccgatgtcctctcctttcagcagatgtctgagctgttcaaccgggagctttcgttgactgggaaaattccatgtggcatgttcaatagcatgtttgattttctggctgctggcagaaagatgcagctgccaccaagtcgcttgcttttgatggctggtacatttcgctatataaggttgcactatccaagtctcgtattctactgcgtgatcatgttactcaagcagtgccttcaacctgggatcctgctgctctggcaaggttcattgaaaagtttggaacccacttagttgttggtataaaaatgggagggaaagatgttatttatttgaaacaacagcattcgtcaagcctgcaaccagctgttgttcagaaacgactcaaggacatgtcagacaggagatttctggatgcaaatggacactatgatatgagtatcaaggatgcatatgggaaggataagagtgatgcaagagagcagcggctaagatttgtgcaatcaagcccatcaagttcttactgctcgaaggaggacttggtgatggtggttaagcggagaggtggaagggaatgggacaaagagatgcctcacagtgaatggataaacactgttcaattagaacctgatgtcatctcgatgacctttctacctattacttcattattgaatggagtacctggctgtgggtttctgaatcatgcaattaatctgtacctacgctataagcctccaattgaagaacttcaccaatttttggagttccagctaccaaggcagtgggcacctgtgtacagtgacctcccccttggacccttaggattgagacacgcaacgg

SEQ ID NO: 37603 - DNA, 1310 bp, Setaria italica
  Peptide Sequence Number=SeqID_103577
agccccaaaccctaacccccccaaccggtcccctcccatccccgacccaaccaaaccctaaacccgctgcccctcctcgatttcccgcctaatcctgcccccaccatcgcgcattcgcgtcgaattcgaacctggcattcggagctcgaatttgaattcgagctcgaatcaccacccgcctggagcgggagcgagctgcgggagctcgaattcgatgcggtgctgagcgtgggccaatcgattcgggccgggcggtggcgcggccggcgggatctgaaccctagcggccggccggatctgagagaccgcgccggcgaggtgctcggcggtatgagtggttgggaagggcgcagaggagaagcggagatatgagcggaggcggtgggagcggcaccggggacgagttcgggcgggcggtcgcgcgggccgcggtcgcgcaggcgctggaggcggccgggttcgactgcgcgcaccgctcggcggtggacgcggtcgtcgacgtccttctgcgctacatcacccacctcggccggtccgcggccttcaacgccaacctcgccggccgcgcgctcgccaacgaactcgacatcatccaggcgctcgaggaggttggcgccgacacggacgggttcgcgggcgcgtccgccacgggccgctgcctcgctggctccggcgtcgtcagggacctcatggcgttcgtcgacaccaaggctgaggtgccgttcgtgcggccgctgcccaggttccccgtgccgcgcgtgcagcagcagccctccgccagcttcgcggtggctgggaaggagaccgggatgaggcacgtgcctgagtggctcccggtgttcccggatccgcacacctatgtgaggacggaggcgtgggttgagccgcccgcgaccaaggaaagggtggacaaagtggagcaggtgcggcaacggaggaaggctgagaagtccctactcagcttgcagcaaaggctagcacaggctggtgctgaaggttttcatccagcagctgcgcttgcacaggatagcacggagaagggtaaggagatacaggcagctgggaccaagagaaatccatttcttgagccagcattgccgcctggggagaaggatgtatctgaggttgacatgcctcctgaaaagaagaaactctctgtccttgaggcatttgcgccagctattcaagctacaaccatcagggagattgatgctgggacagggttggatcaaaaccaaaggagcattgttccaaaagagagggtgccagtacacctcaagattggatttggtaataagccagtatcagct

SEQ ID NO: 37604 - DNA, 422 bp, Setaria italica
  Peptide Sequence Number=SeqID_103578
ggtggtggcaggtgtgcagcttcctcttggcttgagtgacagaggtgtcgagacaatgtaccggctgaacattgaggccctgcacttaaatcggccagtgatgagtatctccataggccatggtacactgatgaagcattcatgttttctacaaatgctgctcagaccgtttccaatgcttcaagcataatgtatgtctcaagcaatgactcctcaattgccccaatcgatgtctacgagactgcaagaattatgggcaacaacatggttgtggacaagaggttcaacgtatcgtggcgattctatgtccacccaaactttgattacttagtccgtcttcatttctgcgagcttgtctatgacaagcccagccagaggatcttcaagatctacatcaataacaagactgctgcggagaacta

SEQ ID NO: 37605 - DNA, 426 bp, Setaria italica
  Peptide Sequence Number=SeqID_103579
attgatgactgaattgctcgcagagtttctccaaacaatctcctctgatacattgaactttgaaacaagcttgaaataatttgcagtgacatcaaactcagaattgtttgcactgaaattcccatatgtggtagggaagaaatgcagtctgatgcagtaacttcctggcagcaaactaatggtataccaagttgttgtgctgaagaagcgggcagaactgtaaaccggcccgaagatttcatcggaatttctctttccggccagtggtgcggcaagcccagggctgctcaaggtaaaattccccccaggggccatgtcgccaatccatctccgcccatcagcatcaacagtgccgttcgagccacagctcagaagcagttcgcttccatgagctcgcaggaactgcaagctagaaaaatgcaatgc

SEQ ID NO: 37606 - DNA, 324 bp, Setaria italica
  Peptide Sequence Number=SeqID_103580
ccaagacaagtcctccggctgcaaactgctattctgcaaccctccgcgcacctagccgccgccatcgccgccatggaggacgacaagacgccgccgcagccgcagcccgaagtcgtcggcgagaagcgaaagagggaggagggttcgccggacgcggctaccgaagacgcgccacctgcctccgctgccttcggtgaggatgcggccagcagcggccggcacccgatgtggaagacgagcctctgctcctactttcgccgccgcggcgccggcgccgaagggtgcagccacggggagtcctgccgctacgcgcacaccgaggag

SEQ ID NO: 37607 - DNA, 1074 bp, Setaria italica
  Peptide Sequence Number=SeqID_103581
tttaattaagtagaatagtaaagaaaagaacaacaagaaccaatagtacttacttataaattacaaattactcctagtaaacagactgaagtgatgccaaacagtggtactgcattaagcatggcagagacagtgatgcaagctcctccgagaatttccagtggtcctcagttatcaatggacactcagaagatcgaagaaagaaccttaaggcagtatactctaagaccacttacacctccagcaagcaaatcttctgtgctttctctgaaaacaaaaggtacaaggcttggagatcctactggatctagtaagactctacaacaatttaaaatacagtctgccaatagttctattagagctccagttaaagccgatatttcaaagctttctcagtcaggaagtttccaagtcctcagtcgagagcagaacggtactgcacacactggcaaagactgccctatcaaacctgtcagtccacctccaactccttttggtttcaatggatacacagaaaaagccggttgtgagccaaaagttgaagattagcaccaatgaacgtcctctgcccctgcaaggtccatgcggcgacagaaaatcaaatgcaagagacgggcataaattctttgcaacgttacggaccaagtcttcaaatgattcgagcatagcctttgagtcagggaatcagccatctccatccagcttagttgatgtgaagcaggattcttctcttagtcctggaaatgatttctcctcattcccttctgaagtggaatgcacggggcaggggaagtgtttctgtgaagaagcaaattctcccgaggggtctcagaggcacctatctgatactgaggagagtattccatccctgaaaccaactgttgcagatgggatgtctcggcagcttctagtggaaagcagagaagcttactcatcatcggagcctgctgacacaggtgatgaaggatttcaggcatccctgtcagacagtgctgaaggcagtgtgtcctcaacacctgcagattctgatgatgggtggaataggtcccagtctggcaatgaggaagctagttc

SEQ ID NO: 37608 - DNA, 227 bp, Setaria italica
  Peptide Sequence Number=SeqID_103582
caccaccctcctgaagggcctgtgcgctgctaagcggtgggacgacgttgaggagctctttgctgagatgatggagaggaactgcatgccgaatgaggtgacttttgacatgctgattagattcttttgtcgaggaggtatggtggagcgagcgattcaagttcttgaacaaatgacatggcatggatgctcagccaacactaccttgtgcaatattgtcattaact

SEQ ID NO: 37609 - DNA, 316 bp, Setaria italica
  Peptide Sequence Number=SeqID_103583
cgaaatgctatggcaagtcaggttcgttagttgagatggagagggttattgcatccatgtcagatgctggtatccgcctgggcactggcgcagcgaacatcgtgctttcatgctacagctcctgccgtgatcattccaagatgctggcatggttaaagaagatgaaaaaactgcgcattgtgccaactacaaaagcatacaactttgtgctcaattcatgtcccacgcttgcttcagtggttcaagaattgaatccttcactcccactgtcaacgaccgggttggtcaaaaagctcaagtctgtatctacactagc

SEQ ID NO: 37610 - DNA, 1269 bp, Setaria italica
  misc_feature (152)..(152): n is a, c, g, or t
  Peptide Sequence Number=SeqID_103584
ttttttaagtaacagataatctttcttcttgaaacattaaaatagagttttactactctgcactaacttatatgagtctactttgattctctttcatccagaaagattatcttgaagcaactttgcatttccatgccccatgtatagtatanctgtaatgcctctcttttaaggcaaccacgattgtattcatcaatcggccagcgtagtatgctcgagggtacttttgctgcagctggggccactgcacgaagaactggtcagctatccgtagcttgtacagcagtaagccgctcaacgaaagcttcttcactcttgcaatgctttcaatgtagaaaatggaggaccatcctaaaccaagcaccttcagaacaaaagcacagacacagagagggaagcatgtccctggaccattgcagaatatctacaggagtaacagatcgttagtatctagagctcatgctgcacaatgggcacaaacaaatttgaacatggtacacaccacttgtggtctgattcttatcactagccacatagcatgcaatgtagctagcaatgttgttgcaatggaggtaaagtaagattggcctacttcacgactacgatatatctgcacaaagtgggcattttttatggtcttctctccactctgaaaaaaggataaatctagaatcatattcagatattccagaatttaactaggtaagaaacttcaaccatatctgtttcaacaaagaatggtaattgatctccacctgaatcaatgactgctcatagacctgagccttttgtagactcatattgtcagtaagtgcagcaacatagtaccttggcgtgaacctatccttctgaaccgctgttacaacattcatcatttctgcggtatgccctcctaagaaccaacttcattaattaatagataatcaacgtgctgcattatttttatgacttactaggagtagctacctaaggttcttccaagatcatacacacagtatggtaaaacagcaataagtttagtaacatattattgtagtattcacagttgagcatacgcaattatgcactgtgatgtgcaagaagagaatgagatagaatctacaaaaacaaagggggaaaaggagatgatcaaatatacatctgcctattttaggatatataaatgtgcattaaaataccaaacccgactattccagacaatatcaatacttgaaccaaacatcatggactgtgcacactacatagggtcaaagtttaaaaatttctatt

SEQ ID NO: 37611 - DNA, 964 bp, Setaria italica
  misc_feature (952)..(952): n is a, c, g, or t
  Peptide Sequence Number=SeqID_103585
tttttttatcaaagaatgctaaatcccaagttgtgtacagaatcaatcaccagcacaactaagaacagataatctttctcttgaaacattaaaaatgagttttacactctgcactaacttatatgagtctactttgattctctttcatccagaaagattatcttgaagcaactttgcatttccatgccccatgtatagtatatctgtaatgcctctcttttaaggcaaccacgattgtattcctgaatgtgtacaaaaattgtcagcgtgttcagaattttgggctggaaaataaagcatcccaatatcagatatggacaagtcttcacatcaatcggccagcgtagtatgctcgagggtacttttgctgcagctggggccactgcacgaagaactggtcagctatccgtagcttgtacagcagtaagccgctcaacgaaagcttcttcactcttgcaatgctttcaatgtagaaaatggaggaccatcctaaaccaagcaccttcagaacaaaagcacagacacagagagggaagcatgtccctggaccattgcagaatatcacttgtggtctgattcttatcactagccacatagcatgcaatgtagctagcaatgttgttgcaatggaggtaaagtaagattggcctacttcacgactacgatatatctgcacaaagtgggcattttttatggtcttctctccactctgaatcaatgactgctcatagacctgagccttttgtagactcatattgtcagtaagtgcagcaacatagtaccttggcgtgaacctatccttctgaaccgctgttacaacattcatcatttctgcggtatgccctccagatccgaggacgatgagacaccgcaatccggcggtgggccgacccggacaaccgggctggccgctgcgccaaagcacgtatacgaagcggatggcaagcaaggngacgagcaccgg

SEQ ID NO: 37612 - DNA, 551 bp, Setaria italica
  Peptide Sequence Number=SeqID_103586
cggccggggcgctgttctggcagctcctggcggaggggatggactcgtacggggacgggtacgaggtcgtgctgggccggaccgcgtcgtccaccgccggcgtcatcgcgacgcagagccggaggctgcaggggctcgccagggcgttcgcgcgcgcgcgcaaggcccagcaccagcaggggaaggcgtcgggcaaaggtgccaagggcggcaactgaaggtgatgctaataaggccgagatcagggtgctttgcagcaagaacgcgtgtttttttcgtgcgtttgggttccgttgtgtgtgacaacagtgtgcgtgcgcgtcgatgtctcgtcgagatgatttgaagattcatccgggagcggagttatacgtgtctcagtgtctggcatcctcctccgtgtattagagggcatgcttttaagtgttcttctggatcacgagaggagcgaagttggtgcaaggctgtggaagaagcggcctatgcttaaggttgtcactttctatgatttatgtgaagggatctgttgtactaataaaaaaaaaaaaaaa

SEQ ID NO: 37613 - DNA, 1329 bp, Setaria italica
  Peptide Sequence Number=SeqID_103587
accgggctggcctcgctcgctggcgccgcgccggcgctccgaaagctctccgttgcgtcctgcgccttcgggcccaaggccttcgtcgccgtgcttcaggcttgcccactccttgaggacctctccgtcaagcgcctccgtggcctcccagacacggccggtgccgccactgccattaccgaggagatcaaatttccacaggcgttatccctccgttcggtttgcttgaaggatctatatagcgccccgtcctttgtgccgcttgtggcgtcctcaccgaacctccgctcgctcaagatattgcggtgcaccggcgcctgggacctgccattggaggtcatcactgcacgtgctcctggtcttgttgagcttcaccttgagaagctccaggtgggcgaccgtggccttgctgcgctatcggcctgcagaaatctggaggttctgttccttgtcaagacccctgagtgcactgacttgggcatcatcagtgttgctgagagatgccacaaactccgcaaactgcatattgatgggtggcgcacaaaccgaattggagatttcggactcatggccgtggcacgaggatgtccggacctgcaggagctcgtcttgattggtgtcaaccccactgtgttgagcctccggatgcttggtgagcactgtcgtgcgctagagcggctcgcgctttgtggttgcgaaactgtgggggatgctgagatcatttgcttggctgagcgatgtgctgcgctcaagaagctctgcatcaagggatgcccggtgtcagatcgtgggatggaagcactgaatgggggctgccccagtttagtcaaggtgaagctgaagagatgccgtggagtgtcatacgagtgcatcgagaatctgaaggttaccaggggggaatcattttcgatcagtttggatatcgtgttggaccatgatgctgggagtgctagtgaaaatggtgtccaggagacagggcaggcacaaataactgagctggctgatcagatggctggcatggaccttccaaccaattctgttggcgcacaatcatcaactcatactattaacagggtgagtcgtgtcatgtcagcgatccggcgtaggtttggcaaccctccgccacagtgatatgagatggcaatgttatgaactgttgttattccttattttctaatcacattcatgtttaagcttattacattgcctggccggtccgtgcaagataagtctatggatgtttcttcatgttgattttagtggctaattgcatcagcattaggattttgcatactcttaactcaaatttgctcgtgttgctttgttaac

SEQ ID NO: 37614 - DNA, 228 bp, Setaria italica
  Peptide Sequence Number=SeqID_103588
tgagctcccccttgggcctctgcggcgcgttcttggggttggtgaaccaggtggtgtagaggaactgcttgtgcgggccgtcgtggtcgcagatgagcctgagcttctggcgctccctcatccaccgcagcatgatcttcatctgcctcttgctcgtcaggcctctaagcccgacatccttgacgtggtcccagacgtcggagatggtgaggcgggccgtgcctcccg

SEQ ID NO: 37615 - DNA, 1633 bp, Setaria italica
  Peptide Sequence Number=SeqID_103589
cgacgccgcgtccacggccgcgccgagcctgatgaggatgacggagaaggcgctcgaggagatgccgcactggccgtggcacgccgtcgtggacaccgtgaagcagtgccagcggctgctcccgctcgccgacaccaccggcgcgttcgacgcggccgtgaacgcgctggtgtcccacatggcagtgcccccgccggccggggacgccacgccgacgacctcctcgccggagagctcggcgttccggttctcgtgcgacaccaagagcagcagcctcagcctccggggttcctgcatcagccgcacctggtggttcgaggacctcgtgccgctccgccccggcacggtggagcgcgtcgccgcggcgctcgtggccaggggcactgaccacggcgtcgtcgcccgcttcctcttctactacctcaagtgccgcatcgccggcgcgagcgcggaggacaagagggcgatgctggaggcgtcggtcgccgtcatgtccggactcgaccggagcgccgtctcctgcaagggcctcttcggcatcctcaggatcgccgcgccgctgaagctgaccgacgcgtgccaggagcggctcgtcgccatgatcggccgcaagctcgaccacgcgacgctagacaacctcctcgtcccggcgccggccgggacgggcagcctgtacgatgtcagcctggtgctgaggttcttggaagccttcctccgcggcgacgcccgcgacgagccggcgaggctgaagaagttgggcaggctcgtcgacctctacctggccgaggtcgccccggacccgtccctgcgcccggccaagttcctcgagctcgtcacggcgctgccggctccggcgagggactgccacgacgcgctgtatcgcgccatcgacgtttatttccaggttcacgctcgcctgacggacgaggagaagatgaagatctgcagggggctgagctacgagaagctgtcaccggagtgctgcaagcacctggcccggaacggcgggttcccgacgagggcggcggtgcaggcgctggcgtcacagcacacggtgctcaagagcctcgtcctccgcgacccggcccagctgaagccggtgtcgccgtcccctcccccgtccacgggaaagcgccgcgagacatgctgccacgacgacgacgtcggcagcggtggtggcgagaacgacgggcaggtgatcctgtacgcggggcggctggacctgacgctggagaaccagaacctgcggtcgctcctggacgggatgcactggcgggtgatggagctggagaaggtgtgcagccggatgaagacgcagatgatcaagatgaaggccaggaggggcggcggccgcaccgccaggtcgctccccaggatgtgttcttgatccaccccactctgctgccatccgtggttatcataacctcactgtgccatagcgatgtacatagtgctagaattgatcaaatgcaggtcttagcagatctgcatgctgtatttcttcttttttggcttcatttttgccaagtttcctctgtgcatgtatgatgtggtatcagttcgtggtgattggaaaggagagccagtttgagtggtcctaaagtagcgaatcttatctgaaaatatatgtgac

SEQ ID NO: 37616 - DNA, 270 bp, Setaria italica
  Peptide Sequence Number=SeqID_103590
tttttttttttttttttttgttttgaaaaggaaaattccacataaactctaacttttatatacgtgcacagctgtcttcatatttaaaagttagacatacaaaataacaaatagggtggaagagaaggaaaaaccttaccccattggcaaccaagcattgatgtctatcatacacttgtagccataaaatcatctaaaatgcagactcaatgaaacaagatcagctatgcctaaaaaaaaagcacattcaaaaaatctaaacttaataca

SEQ ID NO: 37617 - DNA, 420 bp, Setaria italica
  misc_feature (5)..(5): n is a, c, g, or t
  Peptide Sequence Number=SeqID_103591
atcanctttagcacttccaatacattaagaagttcctgagctccccccatcctcaaccaccttcatctctttggtcatccactgcaaaacgacctaaccgggaagctcccatccgtttgaacaagggatccttgacacgcaaaagagaaatagattgctgaagtaggttatcccccatatatggaaagaattggtagccaactaggccagcagttcctagaaagaatatcttcaatatccatccaaatttcttctcagcttcctcctcaagcgccctgtcatctctctcgtcgtaggtgcagagactccgagccaaccggagccccgggaagccaccactccacccgctcgccgccaccccggcgccacagccgcggggcagtgggattgatcctccgccggaaacagcctccgcccgct

SEQ ID NO: 37618 - DNA, 389 bp, Setaria italica
  Peptide Sequence Number=SeqID_103592
aaggcaccacatgacgcgagaaaggctaacaagatctacaagaaggagcttgctctttctctgctcctgctgaccgctgcgactcggagcctcttgtctgctcaagggattcatttctacttccttctgttccagggggtgtcattccttgttgttggccttgatctgatcggtgaacagataagttgattctcccatgctattgtcgaaacagcatggaaagtacgcatatgttcatacatacagtgatgttgaagattatggacttcctattcatgcttagaattttgcttcagaattgcaactctgctcaaaagacaaagggaagtgcaattggttctgcagtctagttcagattcggggcagaaaccagaaaagcccaacaggaa

SEQ ID NO: 37619 - DNA, 197 bp, Setaria italica
  Peptide Sequence Number=SeqID_103593
ttacatactgctgcttaggttcattgctagcataaacagcatagctgtcgcctctatctcgcacagcaaggaccatgtcagctccagtatcatccccagtgaagctgtatccatttctaatgtgttcacttgggaggcttctgggtgtggcgggagaattcaatggatttaggaaaatgcacttgcttcagatagaa

SEQ ID NO: 37620 - DNA, 248 bp, Setaria italica
  Peptide Sequence Number=SeqID_103594
ggaatgtctgttgagacaccttgaatgcggtgttcagcgctttaaatggcaatactggaatcctttgtatgatcctgtcagcttatcattagtcagtgcgctttcaccaaaacaatttacattgaatggaaacaagaaaatccttaaagctcgacatgagtaatttgattttagtttgtattttataacttcttttcgttgactaacaccttgaatgtggtgttcagcgctttaaatggcaaaaaaaa

SEQ ID NO: 37621 - DNA, 1046 bp, Setaria italica
  Peptide Sequence Number=SeqID_103595
atcggccgtaccatctcgtctcctcccctgctcctctcctccctaggtcaccttgcctcgctgcctgccgcctcctccgcttcatccgacgccgaacaagggggaggagaagagaagcccgtgcgccatgttcaagaagttttcttcagaagatatatccggacagaatcaagttaaagcctctgtacagcgaaggattcggcaaagtatcgctgatgagtaccctagccttgaacctttgctagatgacttgctcccaaagaagtcacctatgattgttgttaaatgccaaaaccatctgaatcttgtggtggtgaataatgtcccgctatttttcaacatccgtgatggtccttacatgccaacgctgcgtcttcttcaccaatatcctgaaatcatgaaaaagttccaagtggacagaggtgctatcaaatttgtgctctctggtgcaaacataatgtgtcctggattgacgtcacctggcggtgtcttggatgatgaagtcgaggaggaaacaccagtggctataatggctgaaggcaaacaacacgcactggcaattggatttacaaagatgtcagcgaaggacataaggaccatcaacaaagggattggagttgataatatgcactatctaaatgatggcctatggaagatggaaaagctcgaataagaagaatacagtgagggatgctgaacttacagtatggtcatattgcaatgtaaggaccagtagaactatgtatctacacagctggtatcgtttgaacaaatgaagtatccagaagctacattttccggatagaagttgagtttactccgccccttttgtgttggaatgtctgttgagacaccttgaatgcggtgttcagcgctttaaatggcaatactggaatcctttgtatgatcctgtcagcttatcattagtcagtgcgctttcaccaaaacaatttacattgaatggaaacaagaaaatccttaaaaaaaagactacgaacaatagaagtaaatttagaatttaagttagtaatttaataaacttaaca

SEQ ID NO: 37622 - DNA, 870 bp, Setaria italica
  Peptide Sequence Number=SeqID_103596
ccttccattctttcccacacgtgtagcagaactcatagccacacacgcagatcatgtggtagcaaccctccgcaagttcaatcatgtgcttgcatttcacacattggcgccacagccgttgccgcgcgaggttctgtaactttacatcttctggacgagcatgggggtacctcctcttgtagtcatagcaactcatcctatcatgccatggcaccttacagctgatgcagaaagagcctctgcatttcacacacttcctcagcgtggctgcatcagcggccgtgtactttgagcaggattcttgcattggaagaatcacttccctcaaggacatcaaggctgaacacttcggatatggacagtaaatcttttgacttggaggaatttgcccctccctcacgcgctgcaccatgatctctaacagccatggtgacaggaacatctttgaaccctccacgcttagctttgtggcacaaccatcttgtgggcaagctgggagcattccattcagtagcttaactttcacatgctccttcatgcaggagaagcaaaaacgatgtgcacaaccttcaaccacatggattttggtaatgtcagtgtcttccaagcagatggtgcaggtctctcttctctccatgctagtgctagcattggtggcaagagctttggcaatcagaacagctattgaatctcttgctaattttaccacatagctgacttcggttggctcaacaaatgagattgcacattgatcaaatttccttcgcactgacagaacctgattgaccatatctgccaggttcttccctgacgggcgccaaattccaagcatatggttgtagagcgggcggtaagcggtggcaatggtga

SEQ ID NO: 37623 - DNA, 651 bp, Setaria italica
  Peptide Sequence Number=SeqID_103597
taggctggtccaggactcccagaatgtactccctttttggcatatgaacagtgcatactagatgatattcattattttatagttgcatgacatctctgtgtttattacatgattctgaatgtgtcaatacattttggaaatctaatgatatatgtaggcactgcttgctcgacatgtttaagatgtttttttacttatgcatttttaaatttgatggaagttctagctgcttgaatcttgagtgactaggcgctgacttgttagattattcaccttttttgcctttctgcagccattggtggaccaacaggagaaatccttgaaaccaatgcccaagttttgggtcaaatctcgataaatcttagcaatatgcaggtatccttttacttcaaggtgatttttgatcaatgattcgcctgtatttctctattgactatctgctcttccgaacaaggcctctgttttttttccatgtatttatttacttgtggttaatttcttttttttcagatacaggataacatctcactgctgtgccaaactcgggataatatactcagggtcttgaaagagtatgttttgaattactgttgtgttataattctgaaatggtttagtcatctcatattcccagtcacttttgttattaca

SEQ ID NO: 37624 - DNA, 1036 bp, Setaria italica
  misc_feature (965)..(1036): n is a, c, g, or t
  Peptide Sequence Number=SeqID_103598
aggaggtgagggggagcgaaccctagcaacggaggcacggcggcggcgctccggcacgacccgggcttggcgcgggagtggtcgccggaggagcaggccaccctcgacgagctgctagccaagtatgcatccgacgcgcctgtcattcgttatgcaaaaatagcgatgaagttgccagagaaaacagttcgagatgtagccttgcgctgcagatggatgaataaaaaagagagtggcaaaagaaagaaagaggaccataactcgtctaagaaaagcaaggacaaaaaggagaaggtttcagattcttcatcgaaaccacctgtacatatggctggtaggcctaatgttcctccataccctcttccagttcttcccatggacgatgacgagatctcgtccaaagccattggtggaccaacaggagaaatccttgaaaccaatgcccaagttttgggtcaaatctcgataaatcttagcaatatgcagatacaggataacatctcactgctgtgccaaactcgggataatatactcagggtcttgaaagagataaacgatgctccagagatcatgaagcagatgccgccgctacctgtgaagataaacgaggagctcgtcaactcattgctccccaggccgacggtaccgatgcagtagtgatagcgagacaaatgtatcctatgtagtcccaggagttctttagataggcagctgaaataaaaatgccagccctgatgcttgttcgttcgttctgtagctccatcctctcacctctcctacatgttatgttcagtctggatgctgatcacccaaccgtccccaagtcaggcggttggaacgtgtaccgagttaccaagggctgcttctacagcagtatcaggttccgactcttggcatgttttgtaatccatagctgtttgcgtaatgtcatggaatcggagtagccttcagctctaaaaggaaannnnnnnnnnnnnnnnnnnnnnnnnnnnnnnnnnnnnnnnnnnnnnnnnnnnnnnnnnnnnnnnnnnnnnnn

SEQ ID NO: 37625 - DNA, 707 bp, Setaria italica
  Peptide Sequence Number=SeqID_103599
agaaaaacaaaaaatacccggagcagagcccgcgcggcggtgggcgctccgtccacggcgccgtggaggtcacatggcccggctgattcgcgcgagctccttctccagctcgtccaggccaccaacctcctccagctcctttggtcccagaaagagcccatacgggacgccctcgaacttgtccatgtggtggatcttgtgagcggcagcgactcgccggaagtagggcacgttggcgatggggccgaccgggaagcggcggtggaccaggccgtcgtggacgaacatgtaggccatgccgaacagcgtaatcccgaggcccgcgccgaagcagaggccgggcacgaagccgcggtggaagaagccgtaggagaggagggagatggccggcacggcgttgatgatggcgaacacgtcgttgagctcgaagggcccctcccgcggccggtggtgcgactcgtgcatgtgccacagggacgcgtgccacagcgcccggtgcgcccaccgcgcccagaactccatcccgaccgccgctccgacggagagcgcaaacgtgccgaacatctcggtcaccggcacctcgccgccctccatttgccagctgaatcggtagtagacggcggcgacggccatggacgtgacgccgaggctggacatgacggcggcgaccaggtacgtccgccgctcggactgcttccgcgccttcc

SEQ ID NO: 37626 - DNA, 245 bp, Setaria italica
  Peptide Sequence Number=SeqID_103600
tccttgctttggcaaacatgagttaagtatgaattggtttctagaatggaacaatgctgtatccagtcttaatgtatgaagcttgctcatttgagtaaacatgactaggataatctgacacacgtctccaagctaaccttatgtagttatgtcctatgggtactagcgacactccacatgttttacagcaagaacttgaagtcacgaacatagtactttactgtagtatatggaatctagtaatg

SEQ ID NO: 37627 - DNA, 1961 bp, Setaria italica
  Peptide Sequence Number=SeqID_103601
caaaaccctagcaaaattctccaccactccatccaatcactcaaacccgccttgcgattcaatcgaagaatccgaccaggatgatgcccggatcagccgcgccggcggggggcgccgggatgttcgtcccggcggcgaccgcgggcacggtcctctgctgcatgtgcggcgtggcgatgcagccgaacccggccaacatgtgcgcgcgctgcctccgcgggcgcatcgacatcaccgagggcgtcccgcgccacgccgccgtggtctactgccccgactgctgctcctacctccagccgccgcgctcctggctgcgcgcgaccccggaatcccccgagctgatgcagatcctgctgcgccgcatcaaccgaccgctggcccggctccgcgtctccctctccggcgccgagttcgtcttctccgagccccactccaagcgcctccgcctcaagctccgcctccgccgcgaggtgctccacggcgtcgtcctcgagcagacgcaccccgtcgagttcgtcgtccacgaccgactctgcgactcctgctcccgcgcgcaggccaaccccgaccagtgggtcgccgttgtccagctccgccagcacgtgccccaccgccgcaccttcctctacctcgagcagctcctcctcaagcacggccaggcttcccttgcgatccgcgtcgccgccgctcccggcggcctcgacttcttcttcggctcgcgctcccatgccgctcgcctggtcgacttcctcgccaccgtcgctcctatccaaactcagacagccaagcagctcgtctcgcacgacaccaagagcagcgtctacaactacaagtacacattttcggtcgagatatgccccatctgccgcgaggacctcatcgcgctcagcccaaaggcctcccgggacatgggaggtcttggcccgctcgtcctctgtgttaaggtcacaaatgccattgctcttcttgatcccctcacgctgcgtgttcaccacctggaggagaaaaagtacagggtgtacaactttaaagcagctctgactagcaagcagctcgtggagtacattgtgctggacattgagcaagaatcgccggaaatttccattgatgggtctcggtaccaattggcttatgcacaggttgcccgggtgtcggattttgggaagaacgacaccatctttacagttaggacgcatcttggccatctgctgaatcctggtgatcatgcccttgggtatgatctctatggcgcgaacctgaatgatgatgacatggacacggctatgacacggtacagcttaccggaggtggttcttgtcaagaagagctatgagaagaggccacgcacacggagatggaagctgaagaggttgccagtggaggaagatgctgcgaacaaggccaagggcgaggaagagaagaggctagatgagtatgagtctttcctcaaggatttggagcaggacccagagttaaggtttacgataaatctgtacaagaatgaggactataggtcagagatggcatcaactgttggtgatgatgtccctacagtgccaattgaggagctgattgaggaccttacccttggcgatgatgaggaggatgaaggggatgaagctgtagcaggcatcgctcaatctgggatggtggaatgatcaatattgctactttgtttcttcattgctcactgggaaggcttggcgctcactgcaggtcatatgcatatgcctgagtcgcatctgtcagttatcatatattttattttccctgttactgatataagttaaaatgtggcggtgttccttaagttaagttttgaattccgttgtccattcaaatcgacattgtttcaacccttatcctgtattgggggcataacaatctgtttttccctttcatattgccacctgtcacagtgttttataagttctaatgctttgagttttaccataaaaaaa

SEQ ID NO: 37628 - DNA, 1830 bp, Setaria italica
  misc_feature (1)..(32): n is a, c, g, or t
  Peptide Sequence Number=SeqID_103602
nnnnnnnnnnnnnnnnnnnnnnnnnnnnnnnnttttttttagaatcgcaatcacgggggtgacaggacatgcttataaaagtcgacaaagtcatgaggttcgaccccattcactatgatcatcagctacgccactcaagtggtctctacggcaaaaaagtctcttccatcgcagtttcatttctggtacatgtaatgtgtacagaaaacagcttgagcctcagcagcaaggtgcaaaatgcttcaactccacccaaagggagatacctatcttacgtcgattgaatgacattactcagaagctccgacataaccattcgagttatttgaatttgttcccagttgtttagtggctgccattatcagccctgtaaaaggaggtgaaggtcttcgaggcctcgatttgaactctggatggaactgaacacctacgtagaaaggatgatcctgtagctccacaatctccatccgttttccactttcatcagaaccaacaaaatgaagaccggccttttcaagcatgggaacaaaagagggattgacctcatatctatgacgatgccgctcatctacatgtggaggactcccatacagttttgatgtaagacaatcaggtttgcggaagaatgttctcctgcagcccaacctcatcgtgtttcccatatgtgtttttgaaacctcaggcatgtacataacaacatggtttggtgtatccttgttgaactcttcactgtctgcatctcccaggcccaagacatgtctggacatctcaatcactgatatctgcatgcccaagcaaataccaagatatggaactttattctcacgggcatattttgcagccaatatcattcctgagattccacgatccccaaatcctccaggtatcaaaatgcttgctgaatctttaagagtttcccaggcttttgcatgggcatctggtgcatttattgcagttgcatcttcaagatctgaagctgcaatccactggatagatggctttaatgaacaggcaacactggcatgtaggagagccttcaccactgatagataagaatctgtcaagttagtatacttcccaaccaaagcaattttaacagagttcttaaggttgtcatatgactcagccatctctgtccaatcttgtaactcaggcggtccagcagaccctgcaaggtttagctgtttgattatagcttcatgagccttttgatttctaaggataagtgggacatgccataaatttggaacatcatggatgttcagtatgttctcgaccgggacatggcaaaattgtgaaagcttctccttaacagatcctattagtggctgcgctgaccggcatgctagaagatcaggagtcagacccaaggccctcaattctcgtacactgtgttgtgttggcttggttttctgctcaccaactacacccaataccggaacaaggctaacatgtatgaggcagaaattctccttgccaagagaaaaagacaactggcgcaaagcttcaatgaatggcattgactcaatatcaccaacagtgcctcccaattcaataacacaaacatcagctggacgagtctgcccatctacaggaacagaggacactgactgtatccactgttttatttcatcagtgacatgagggacaacctggactgtctttccaagataatcgcccttcctctccttctcaatgacagactgatatatctttccagtggtaatattgttgtccctggtcagagtaacatctatgaaacgctcatagtttcctaaatccaaatcaacctctccaccatcatcaatgacatacaaacaaagaatgaaa

SEQ ID NO: 37629 - DNA, 2060 bp, Setaria italica
  misc_feature (1)..(24): n is a, c, g, or t
  Peptide Sequence Number=SeqID_103603
nnnnnnnnnnnnnnnnnnnnnnnntccctctgtgccttggtcagttctctttagtttacatggtttttttccttaaatttgatcaacgttttataatgcataagaattttgaaatatcaagctaacatttacattactaacactttacattgtcagcaatcagcaacaaaatcaggtcacatgctctaatcacctggcagtatgcctgagtacatgttgatacactgataccagtcaactatctagattgagttgctcattggtcacgtcataaaagattaggaccctctcgtgaggaactcattggaaagagttgttgagtaaagctagtctagctgtctagactagaaaattatctatcatatggtatatgacatcttccccatccgaattaactggatgaatcctaacctggatgttatgatgggcgttgtattttagccagcttttatgaaagcatacatccacgcgttcccagctaacttgtgtaaggccacggatcatcctctcttctaagctatctgccagcgaaccttctacagactcctcttgctgatgatcctctgaatttccgttgtcaacattaataacatgaggatacttttcatcctttgctgttaacttaagttttggtaattcatgctgacgccgaattgacgatgttctccaaccaactatatgatcatatgttacattagcataggcaacacgacgcttaaaagagcgcaaagcagacatgaatttcccatcatcacagtcttcaaccatacggaccagaagtggaggcttcccatcatccctgtctgtaaggaataaatgtgtacctgttctcccaactataaaatgtgcagttcctgcagcagttctctccaaaactgggacaccgaaaagaaagggaagctgaagaaaaacacaaatataaaaaggaatcaggtcttagttactggcttactgatactgttttattattgaactgagacacgaccgcaatgaaaaaataactagagaaggaaagttaagctattcaggaataagaatgcaacacgcaacaaatggctgggtttctgacctgtttgtccatgtcgatagaaggactaagagttataaagttcagaatatctggaggctcatgagacttgggcaataaaaatgctaataataagataggagaagaatgtaccaggcgttcacaacttcacataagtaaataaccatgaaacttacttgtttattccatcttgagcccaagtgtggtgtagcagacgtaataaaattgattggttctaaaccagctattttaccagcaccaggtgtttcttgttcatcagagagcttatcagtatcaagagaagaggtttcattcgtggcaggttcataaagttttccgattgcatatcttgttactaaaccgccaagcgaatgagcaacaaaagatatcttcttcaagtttcttcttctctgaacaacttgtcgaacctcctcagctagcctttcgcccatcaaatcaactccatcatatgttaattttgaatgattgctctgactacgatgcacaaagactttccctggcaacctcttcacgaactgctccgctgcaaatttccagtccgccgaactcccgtagagcccgtttaccatgacgacgaggtggtccgcctcctcgccaccgatctcgtcttcctcgcggctcccagcggctttcccctcggcgtcggcctccgcctccgctgtcggaggcggtagacgctgcgacaggaagcatcgcatccagttcgcgaggtccagcctctcgtcccccggccgcggcttgcgcccgagaaagactcctaggtcgagcccgagcccgggctgcggccaccgcgagctgctccggctccggttgcgccccgggggcgcgctcggagactggcccatgagggaggcgtagcggcggcggtgaggaggggaacgggaggaggcggagaccggggagcacgtggcggaagtgtagaatctggagcacgtggccgaagtgtagaatctggaagacgcgggcatttcccggttggttgcgggtccac

SEQ ID NO: 37630 - DNA, 465 bp, Setaria italica
  Peptide Sequence Number=SeqID_103604
ctccgggcgggctccccggagctgcagcgggaggccgtgcgggaggccgtggaggacgccgtggcggggccgcgggccgaggccatgcgcgccagcgccaggcggtggagcgaggccgcgaggcgcgccgtggggcccggtgggtcatcggacgcacacgtccaggcgttcgtggacgaggtggcacggcgagcagcgtgtggtggcgccgcgggagcggctaaggcccgggcccaggagtcgtcagaggacgcctcctcgctcgtaggggtagctgagcggcaggagagagtggaggtagccgttccgtaggcggtgtggtgatcaccccgcgttgtgcgtggtgaaggtgaaaagtgaatcttagaataatgatccagtgattacggcatccctgggtgtttcgcaaacctaaattttgtttgttctaccgcgtttgcaacttgttcgttgctcctttgtcgt

SEQ ID NO: 37631 - DNA, 471 bp, Setaria italica
  Peptide Sequence Number=SeqID_103605
tcgacgtcgcggcggatggtgggggcgcgcaggagcgtgccccggaacgcgacgacggcgctcggggcgccgctggggctgggccggccgtcggcgtcggcgtggtggtcgcgctcgaagatggcgccgaagacggagccgtcgcggtcgtccaccagctcgtgcgccaggcggtactggaacggtttccaccactgctgcgccaccgccgccgcgtcccggcgctcctgccgctccagctccagcaggtacaccgcctcgatcaggtacgccatcaccatgcgcctgtagtcgtcgtccctccagctcgtgttggtgagctctctccatgtagcagtggagcaggacaagctcgcttgctgcgccattgccatggccaccaagctaatcagaaaccaaccaactagccaaccactgactctttctcttgaacactgatctccctgatccctgtgcctctgtgtgtttcag

SEQ ID NO: 37632 - DNA, 391 bp, Setaria italica
  misc_feature (34)..(34): n is a, c, g, or t
  Peptide Sequence Number=SeqID_103606
aaaaagcatccaagatcttgctccccggctgtanatttttgtatctaaacgaagagttaataggcgtacagtgcgtgaggccctgactaataaacaatggttccaagatattcaaggaaacttaactgtggatgctttgatggagtatctgaaactttgggacatcatagccggtgttgtgcttcaccaggatattcctgataaacatgtttggaggctgtcctcctcaggccaataaacatccaaatctgcctatgatgctctcttccagggtgccatcctttttgagccatataaacggtatttggaagtcttgggctcctcctaaatgccgtgtcttcatgtggcttgtggcccacaagagatgctggacagcagaccgattggcttc

SEQ ID NO: 37633 - DNA, 565 bp, Setaria italica
  Peptide Sequence Number=SeqID_103607
agctcgacgtcggcctcctcgccgtcggatactccggcttcgtggtgacgggcgtgtcgttctacctgcaggcgtggtgcatcgagaagcgggggcccgtgttcctggccatgtctaacccgctgggcctcctgctcaccatattctgctcctccttcttcctcggcgagatcgtccaccttggcagcctcctcggcagcgcgctcctcgtcggagggctctacagcgttctctggggcaagagcaaggaccacctgcaccagccgccgccgccgcagccgcagcctagtcaggaggcaccgaagcatcagagcaccggtggcgtctgcagcaacgacgacgacgacgaggagaagcaacagcagcacaaagatggtgaggagacgcagctcaaggacttgtttgcaatggaggcatcgccgctgcgtcatcaggtcggatgatcagagttcatctcagacacgcatatgtatacgcgtactgtatatgtacgtacgtatacgtgctatgatgtgtactcctatatatcctagtattatgcatttgtctacttagaaattccgcg

SEQ ID NO: 37634 - DNA, 250 bp, Setaria italica
  Peptide Sequence Number=SeqID_103608
cggatcgcgcgattccctccacggcgacagccggccgccccctccccgtcccgcccgctcgacgaggccacgccgagcggtgaagagggtgccactggggtcgctcgccctcacgcgatgagtagcgccgtgaaggaacagctccaacagatgtcgacgacgtgcgattcgctcctgctggagctcaacgtgatttgggatgaggtcggggaccccccactcggcgagggaccggatgctgctggagctc

SEQ ID NO: 37635 - DNA, 931 bp, Setaria italica
  Peptide Sequence Number=SeqID_103609
gatttaaggtttgttcatggactgaaacatcaggggcgaagggaaaatcatccagtgccagctataggcaacatcaatgtatttgcagggagaatcttgagcaccggtatgccttgtggccacaacctcagctgcagcagccacctgcctgagaggacgagccagcagcacctccagatgagttggggacagcgtagccaactttgattccattggactcgtttgatacatcaaatatgccatcttgaattttcttgtatattgttccagctgtcttaatgaatgcctcctcgacgttttgtgcagttttcgcagatgcctccataaagaccagaccatgctccttggcgaactgttcaccttcctcgtagctgacagcgcgcctatgagacagatcacatttgttccaatcagcatgactgtcatgttagcatttgcatgctgccttgcatcttctagccagcttgcgaggtgattgaaggtctccctcctggtgatatcataaccaaagggcaccggcagcccctctgtagtacgatctagtaatagatctgaatgattcttggcccgccgtgtcccaaatctggagcttgatgggcttgttgtcgatggtgatcatgcgggcgccgaactcgacgccgatggtgaggtcgtgcacgggctggaagcgcttgtccgtgaactgcagcagcaggcacgacttccccacgcctgtgtcgccgatgatgatgtacttgaagaggtaggcgtacgacatcctcgacggatcggatcggatcggccggtcccggcggcggtggcgacgctacggggggggcttccgggctgggagaagaagcggcggcgagttccggaggattcgattcgattcgaccctgttggaggggaagcggagggcgtgctggcgggatgaggttgtggaggccgaacg

SEQ ID NO: 37636 - DNA, 202 bp, Setaria italica
  misc_feature (198)..(198): n is a, c, g, or t
  Peptide Sequence Number=SeqID_103610
ggaagaggacatgacggccaatcatacaaatagtcaccagacaagatgcatgttttatatgctcattattgtgtcgatgcttacaagcacagtactggccccacacatactataacaccggagatgatagaatagataaacaagcagctagtgtcacggttggtaccgggataaggaggagcttctccttccggtgcnccgt

SEQ ID NO: 37637 - DNA, 464 bp, Setaria italica
  Peptide Sequence Number=SeqID_103611
cttgtggtgacatctgctcccagcggtgcccgttacccaaacccaccaaaccctgacaaggtgctttacatcaacaagaaggaggcgccgctgctgaaggtcgagaggggtgtgccagtgaagttctcagtgcaggctgggcatgatgtggcactctatatcacttcagatccgattggtgggaatgctacattgcggaataaaactgaggtcatatatgctggtgggcctaatgctcatggtgtactagcaaccccaaaagtgcttgtttggctgcctgatcggaatacacctgatctagtctattatcagtcactgtatgaacagaagatgggatggaaggttcaagtggttgatggaggccttagcgacatgtataataacagtgttcttttagatgaccaacaggttactttgttttggagtctgtccccggattctatatctatagcagctcgtggtga

SEQ ID NO: 37638 - DNA, 491 bp, Setaria italica
  Peptide Sequence Number=SeqID_103612
ttgttgagaagttgaagaacaaacctgcagcattgtgaaaagcatggaagaaggctactgcaggtagaggtagcagtagttcctaaggtggagatgatagagatatgaggagtctctgccagtaagtagtagaaacaggggttgcctagctggaggaaagcttttgtagatagctcagtctcatgataattgatttctagaacctgggacctgcttgcccactggaagtgagtataatgtagggatggatcatgtagcggagtgagtgccaagagtgattctttctctcggcaccatgttcatcaatctaatgatacactaacacaacaacaagtgcattttggaccttatagagtatgctctactgccggtcatagaatagcttattctaactgccggtcatagaatagcttattctaattgccggtcatagaatggtttattctatggtcagctatactctacagaattgatatgtccattcttgtatg

SEQ ID NO: 37639 - DNA, 373 bp, Setaria italica
  Peptide Sequence Number=SeqID_103613
tcgatgaatgacactccaggcacattctaaaattctttgagatgtcgtattggttcgtttatcgtttgtggaaattaacccataacacaccgcaatcttctctgtgtggtggcatgagaatggatcagcttctatattgcagtagggctcaatatctcgaggggagtacccagactgctccatccttgtagttaagtctttccatgtactcaaaattgcatcgattgcaggatgcgacagatctccagcctcgaaagagtgcacagctgtaccatggtataaccagctgcattgtctctcaacatctaaaccttgttctgtcatggcatccctcacagcctcagtggaatcccacaagcctgtgtctgcatat

SEQ ID NO: 37640 - DNA, 245 bp, Setaria italica
  misc_feature (29)..(29): n is a, c, g, or t
  Peptide Sequence Number=SeqID_103614
tttttttgtttttttttcagaagaaaacngaagtggtagcacagtgttacaaattgggtacattgtaggaccaaatgacaggtacaccacaaatccaggtgctagtaacactatgggcaatcaaacgacttggaattgcagggcagcaacagcaatgcaggctacacttgtctgaacttggcacacttgttcacaggcggacaggacaattggttgactttgtattctctcaatctaccattatt

SEQ ID NO: 37641 - DNA, 259 bp, Setaria italica
  Peptide Sequence Number=SeqID_103615
tttctacttttggttctcgtgttcacgcttgtcactggttggagcaccgccactcccctgagacataactttcttcaccacagggctgtggttctttagcagcaagtccacaacggacagtgcatagataatccttgctggtaccctttgcgtcagtagaatggtatagttcgtaaatccgagctgtgcttcgcacatatacccagtgaatctcatactttcccctgaaactaacagtgatctcgcagggaggggccgg

SEQ ID NO: 37642 - DNA, 470 bp, Setaria italica
  Peptide Sequence Number=SeqID_103616
ttgcgttctattgctgatcctgtttttgttgcttatcccaggagattgacatgccggagaagagggcaacagagccggacatggttgatgagtatgtggatattggtgatgagatgccgacggtgaattaccagtcggtagaaatcgagaaggatgcccaggtggctagcagctcaagcgggtctggaagtggatcatcttcatccagtggtatgtatggcagggcaaatgactagtatcacaacaattgctgatccgttgatgagtagctggtctaattcattaaaattccttgcagattctgactcggactctgattctgacggggacgatgctcgctctccggactaggtggtgcttcctgactgtaggattagcgatttgagtaggtgactgaggttcttttttggtgaggtattttgaggaatggtatagcaaaatggatggccctcgctcatgagtcggtgtga

SEQ ID NO: 37643 - DNA, 1362 bp, Setaria italica
  Peptide Sequence Number=SeqID_103617
ccccgccgccggcgctggtggaggcgatgcggaagcggtgcgcggagatcctgatgcggctgcgcaagtccaagaacagcgtgtggttcaactcccccgtcgacgtcgagggcctcaagctgcacgactaccgcgccatcatccggagccccatggatctcggcaccgtcaagcacaacctcgccgcgggccggtacccgtcgcacgaggcctttgccgacgacgttcggctcaccttcaacaacgcgctgcggtacaaccctcccgaccaccacgtgcacaggtacgccggcagcctcctcgccacgttcgaagggctgtacaaggaggccgtctcgtggttcgaccagcagcgcccgccaatcgagccgccaatgccgctgccggatttgcccgcgccgctgcagcatctgccggtttctgtgccggtgcaggctcccccgaggattgggggtgggaggaggcccaagcccaaggcgagggagccgaacaagagggagatggacgaggaggagaagcagaagctgagggtggagattgagaacctgccggaggagaagatgctgaatgtgctgcagattgttcagaagaggaacagtgatccggcattgacaggggaggttgtggagcttgattttgatgagctggatatcgagaccctgtgggagcttgatcgattcgtggtcaattggaggaaggccctaaagaagagccagcggaattctgtgatgaatggtgatgctgctgcgatgaatggggacaccattgatgtgacgattattccagatgaggatgacatggtgcaggtggatgtcaatccgcccatggtggttgaaattggagactcggagattgacatgccggagaagagggcaacagagccggacatggttgatgagtatgtggatattggtgatgagatgccgacggtgaattaccagtcggtagaaatcgagaaggatgcccaggtggctagcagctcaagcgggtctggaagtggatcatcttcatccagtgattctgactcggactctgattctgacggggacgatgctcgctctccggactaggtggtgcttcctgactgtaggattagcgatttgagtaggtgactgaggttcttttttggtgaggtattttgaggaatggtatagcaaaatggatggccctcgctcatgagtcggtgtgaggtgtgtttgtgtgtacctggtggttgttggtattacttggtagtggatagcttagatgtttgggtagattggaagactactactactgtaaagaagggaatataatccggaacaaagaggaaaggtagcaatgcattggcatttcatcttgagtttatataaaaaaaaaaaa

SEQ ID NO: 37644 - DNA, 352 bp, Setaria italica
  Peptide Sequence Number=SeqID_103618
gcatccgctagccggcgctcagtcgcgagggaggataaaaatccgccgcgtccgcctccacccaccgcgaagctcgcttctccgaatccccccttcgccttgcgagggggcggagggggtgtacacagccaccggccatggagaaggcggggcgccaccaccagatcatggccggcggcggcggcggcgggatgaagaaggtggggccggccgcggcgcccgcgatggggctgcagaagcagaactcgtggtcgcccgacatcgagcgcgacgaggcgtgggagcggcggcgccgcgggatgcgccgcgggggatcggcgctgcggcgcgtgcggagcgtcacggacgacga

SEQ ID NO: 37645 - DNA, 491 bp, Setaria italica
  Peptide Sequence Number=SeqID_103619
cggttatcatcaccaattttagagaatctctctgacacttgagtagttcatctagtagcttttccccacgattcctttcatccattactctactattggacagcctcaatccagataaagcatctgaaagatcagaatcagacatgtaggaagcatccttattggcattcatcttctctatatttgacatgaagcaattctgaacatttctgcgatattcagcattttctggatccatatctgtccaaagagaacctatgtcaaatgtagagtagttcgccatagcaccaccactataaattctgctcggtccaaactgccactcatccaagtctcctgtaccattaaacaggaggcctggtggtcccacagataaagatgcagaattaccaaaatgttcctgcgctccggcggccccgcggcgcctgctgacatcgtcgagcctcgcgccgaacccgagcccgtccatcccggagaagaacgacgccgca

SEQ ID NO: 37646 - DNA, 448 bp, Setaria italica
  Peptide Sequence Number=SeqID_103620
gaggagtaacgaggaaagttagggtacaacaacatacttgttgaaaaatgaaatgctgtactcaagagagtttcagatatgcaatcagatacttattttaggcaaaattgctcatatagcatttcttcagcctggtttgtgattttaacattatctagtctccaattttgctcagctagcagtaccccatcatgtttaaaaaggactgcccagattatatgtgaacctatctacaagttgccattaagacccctccctcgtgtcctgcactcctgcttgctctccggtgctcctccatccccaactccgaggggcatgctgtactctccgaggttggtcgactttactgcaccccaacctttcacctaatagccatatgtgttctcttgattctgttttgctgctcccatgctagcgcggccctacgtacccaagttcccatctccat

SEQ ID NO: 37647 - DNA, 1016 bp, Setaria italica
  misc_feature (929)..(929): n is a, c, g, or t
  misc_feature (962)..(962): n is a, c, g, or t
  Peptide Sequence Number=SeqID_103621
tgaaaaagagagacaactagacttcatgagcttatagccacgaatgctctcaataggcctggcgtgtatagcgatgtattcacagttaagagaatttaccacacatggcaccatatggagtacacatagctttacctattaccaccatagcacccacaagagacatcatcatgaattcttgatgtctgatgaaagaacactgtacctatccacatgatcttccctcgacctgcaatgtgccaggagttggctctcatccacctcccccgtgattgataactgaacaccatactccgataatctcttgacatccctcggattggggctttgccatgtaccgtcccaccacgtaggcggtaggagcggggtcacagcgcattggtgcggctggtgcccgcagctcaaaggcccggcatatgtgtcccagatatggctccggccaacctgcgtcgagagcccatggaccagcaggctactgtgtatgctgcttaagaacgtgaagtttgcacctgaaggcttcaggtcatatgtgttagctgcagccaatgctgcaataagttgtgcataggttgtccccacacgaggatgtgctccagtgataactgcgtatctggcacgtgatgctagaaagaaatcaacaatggctgcccaccttggagctggcccccagtctcttaaacgaaaatccagaggcgtatcatttccaaacatccagtttgacttgttgacaaacaactcataatcaaaataaattacctcagcaaactcgctgatgtctgactttatatcctggacaaatgatggtgtgtctgataccaatgccacccgaggagtaccctgaatatggcagatctgtatggctctctttatacaacttgctgcagcttgtcttgcttccactggcctgaattcacaatagtagttattcncaactgttcaaattgtagaacatttgatcgganaggcctgcaaactctcaagataaaaagttaaggtgcaaaacaagttcagtcaac

SEQ ID NO: 37648 - DNA, 1170 bp, Setaria italica
  Peptide Sequence Number=SeqID_103622
aacttaaacgactaggacaatttagaccaaactaatgtagaggtgatcctgttgctatcacaaattcattggagcgataccaggaaattgaacccgaactttctctgggacacgtgaatacaagcttttagctgatcttgctgcatcgatggatgaaggagatattgccaaattcactgatgccatcaaagaatttgatagcatgacacgtttggtatgttttgttgcaaccgctatgttttattttgaaacttcaagtcgctaatgggtgcttttccagtctctgttgggtaacctatctatctgtaacttcatgctttttaattgtacttatgtttggtaacggttatattagtttgacttaggaataaaatatacaattttagcctgaaattgcatctggatttgggtggaaaaaatatcagcaaacatgcaaatgtctatactacatggtaattctactgtttctcctggtcactaacctcacacaatgtgttgtgatacttttgcactggtcgtcaccctagctcagcagagtgcaattttaggggccagagtttagtatgattttcaaccttttatataacttgctatgggcctgtttgtttgagctttctggcagcttcttagcgtgaaaagccacaagctcaaacaaacaacaacttctcgtgcagcttccagaaagctggaaacctagaaaagctgagtcaagtttatgagcttttagctttgagctcagaaagctaaacagatcttctaaaagctagtctatgctagcagcagctttccaaaaaagctcaaaagctgcagataaatcatgtgttgcttctacaacacaggatgccacagagcattctctgagataacattgttaacttagaaactgctccaaaagggattattgcacacattcactatatttgatccttttctcccctgtatctaatatataatatgttggtctcaggatccttggaaaaccaccctgctcctcagggcaaagaacgagttgaaagaaaaaggaggacgatgaggacgacctaacttaagcattattgtaaaattcctatgatatggtttggtttgtgcctgcgtttcagcgttgaggctttggtgtttcttataaatgaacatcatgagattaatcactagtccggttgtacagtactt

SEQ ID NO: 37649 - DNA, 1418 bp, Setaria italica
  misc_feature (1405)..(1418): n is a, c, g, or t
  Peptide Sequence Number=SeqID_103623
cagacatcccacctctccgcgtggtgtgcgccgttccccttccccctcccccatcccctcctttccctccggcctctcccctcgccggcgaccgccgcgaaggagcaggcggaacagacaaaccgatcgcggcggtggaagcgatgggcgaccacgaggcgcgcggggacgacttcgagaagaaggcggagaagaagctctcgggttgggccatcttcggctccaagtatgaggacgccgccgacctcttcgacaaggccgccaactccttcaagctcgccaagaactggagcagagctgcatcagtgtacatcaagattgctaactgtcatttaaagggagatagcaagcatgaggctgcctcggcatacgttgaggctgcaaattgctacaaaaagttctcacctcaggaagctgcacaggcactaaatcaggctgttaatcttttcttggaaattggtagattgaacatggccgcaagatacagcaaggacattggtgagatatatcagcaagaacaagatttagagaaggctacagattacctggaaagagcggctgacctttttgacagtgagggacagtcatctcaagcaaacaccatcaagcagaaagtagcagaaattgctgctcagttggaacagtacccaaaagcaactgagatttttgaagggattgctcgccagtcaatcaacaataatcttcttaaatatagtgtcagaggcattctccttaacgctggcatttgccaactatgtagaggtgatcctgttgctatcacaaattcattggagcgataccaggaaattgacccgactttctctgggacacgtgaatacaagcttttagctgatcttgctgcatcgatggatgaaggagatattgccaaattcactgatgccatcaaagaatttgatagcatgacacgtttggatccttggaaaaccaccctgctcctcagggcaaagaacgagttgaagaaaaaggaggacgatgaggacgacctaacttaagcattattgtaaaattcctatgatatggtttggtttgtgcctgcgtttcagcgttgaggctttggtgtttcttataaatgaacatcatgagattaatcactagtccggttgtacagtacttcgatttgggttatcctgttgatttgctgtcaaaatgaaaatggtaccgtatgcttgtttctggggttcctgttacttggttgttttcgtatttgtgacgatcttatttgctatggtagtcctatacacctcttatttatttatattggcggtcctactttatacagtttttttccgaccttattgtgttactgttgtaaacatttaccagctttatgaagttcatgcaactggtggattttgcagttgtcttaaagttatgatgttaaaannnnnnnnnnnnnn

SEQ ID NO: 37650 - DNA, 852 bp, Setaria italica
  Peptide Sequence Number=SeqID_103624
agccacctgcccgcgatcatgcctgcggcgtccgcgaagaatccgttcccccagtcctccggcgcgacgtcgatggcgcccgtggcggccatgagcggcagcaggtacccgagcgatgtcatggcgacggcggagacgagcgccttgggcagcgtcttcccggggcgctccacctcgccggccatggtgctgacgctgtcccagtagttgaggttccagaagagcgtgttgaagaagagcttccagtccttctcgggcgccacgccgccccaccgccggggccggatcttgggcagcgcgacgccggacatgagcaggaacggcgagagcgacgcgacgcccagcccgacggcggaccaccccacgacagtgagccccgtgtagttgaccaccgtgagcgcgacgttgaaggcgacgatggtggcggtccggggcccgcctccggagacggcgggcacgacacgggcgaggtagtcggcgcagagggccgggaaggcggcgccgttgatggccccggacacgtacttccaggtgcccatgagggagcccgagaaggggccgaaggcgcggtcggcccagaggacgaaccccccgttgcccggcatggcggtggagagctcggcggtgacgagcgcctccgggatggcccagatgaaggggaagacgaggaagcccagcagcgcgtagagcgggcccgccgactgcaccgcgggctccgcgccgtaggggccacccgccacctcgaagaagatgaggaagatgagcggcaccagggacagcttcttgtgcccaccgcccggcgcggccgtggccgccgacgcggcgccggcgtcggcttcggcgttcttgtcc

SEQ ID NO: 37651 - DNA, 936 bp, Setaria italica
  Peptide Sequence Number=SeqID_103625
taacgtaggtaaaaacctgaaaggcaggttcgcgcaaagcggcggcggcggcggcggagcaagtagtcatggtgttcggccggagcaagtcgtcttcgtcggcgacgccgtcggcccctcaaaggctgcggcggcgtgctcggagctgcgcgcggcgtaccacgagtgcttcaaccggtggtacgccgacaagttcgccaaggggctgtttcagaaggacgactgcgccgaccactggcacaagtaccgcgcctgcctcgaggaacatctggaagacaagcatctgaggcaaatcctactggacgcagaaacttctgcgttttatgccaggcctgaggctgatcctccctcaggacaaggagctacaaagtgacattctctcactaaccacatgccatgtttgacttcacccaaccagaatatagggaaccttggtagatgaactagaaactccttgtatctggacacttgtgaggtccctggataatgtaacgttttagaagttgagctgacacttgattaacaaaattttccagggtcagagtcgtgtaccagctggaaacactgtacgaattgaggataggttgaacacgtgtttcaccaatgactttgcttttaccagagtttgttgagtaacagggtttcagagatggtatgttctcaagacttgctttccgacggtgatcttgggtttcatcagtcgtgacagtgacatggtcactcacccgacgtcaagtgtggagtaggccagtgtgctgcggttggagccttggagggaggagccttcttgtaactcgtttgagcccccccggtgagtgtggcaaacgtctcgagttgtaaaggcccttctaattctttttatgggtgttatatcagttatttttgcatattttaccaaaaaaatattaaactttgccctgggtagcccaacttcgt

SEQ ID NO: 37652 - DNA, 385 bp, Setaria italica
  Peptide Sequence Number=SeqID_103626
tgagaatccctaaaatgcgccggaaacacatataggaccaagtcatatccaccattcattttatcatccatctttctttatcctcataccatcaagacctctagaccatattatcacccacatctaccatagagtttttatttttcgaatataaaccatatttatctttcaaatcatccctcccaagtgatgctatttaagtgaccgcgtattagctctaagcaaactaagcatatgacaccgaaccgaacgaaaaaaccataaccttatggcaacaaggtataaaaggtttaaaataacaaggtaggtatatgcattaaagtaggatgtgtctacccggtacaaaatgacatttggactcataaaatcatcatcgcatgcataa

SEQ ID NO: 37653 - DNA, 384 bp, Setaria italica
  Peptide Sequence Number=SeqID_103627
aaaagataggtggtcacagcaaagtcctgtctccgaaaggaagaccaagaagaaacatggctactgcgctcaagctcctgattgtttctctcttcttctccgtttctcttcaaggtacaagtggcgagcgatgcggcacgtccagcatccaggtgcagaccatcaacacgggcgagacggcgtccagcggcgacatggagttcgaggtcgaggtgaagaacctgtgctcgtgcagcgtcaggaacgtgcgcctctacggcggcggcttcgccactacggtggaggtggacccggcggtgttccgagccgacgacggaggcgtctacctggtgaacggcggcgggccgatcgagagcatgggcgccgtgagcttccgttatgcct

SEQ ID NO: 37654 - DNA, 425 bp, Setaria italica
  misc_feature (223)..(223): n is a, c, g, or t
  Peptide Sequence Number=SeqID_103628
tcggtccctaggcccatcaccgttctaactatcactactgcttattactagattataaaccgtactatttagtccagcgtgaaggtaattttaatttctggaaggtttttttatatccggaatccgaggggtttgtcctccaaacccctcttagtccactcttagtgccactccaaggaagggttaagggtccctgaaggtgagagtgagagagcctttttancatgtactctagttagttgcaagcgtcagccatggtggtggctgtggtcttgtgacgtgatgtgttatgcctagtgttgggcttttttttttatggtccctactactttggtcgtttctcattccaacaatccagcatgggtcatggatatgaatgagaaagattgtatgtatcttgtgttcctgctcccaatgaatggatg

SEQ ID NO: 37655 - DNA, 670 bp, Setaria italica
  Peptide Sequence Number=SeqID_103629
atgctttcgaattttccttactagtataagttaacaggagggaaacgatgagaggacacataatggagaaatagaagacagaaaactagaagagaaagagatcaaccatgtggacgtaaacaaccctgagttggatgcccatctaagaagtataatgtacaaagcctaaaaaagttactccaataggagccaactcaatgaaattgatttagaccactggatggcctgtggaaacaaactggctattttggctaagcctacatgcatacttttgaaccccagctccaaagagtcgatgcaatgaagaagccagtagctagtacacgtagttaccaaatcaggctagctgtgaaccataaccagctcattatttgaataaaagggtgtgaacagtcagtttacaagaggtcaaatgtccattgcgttcctattttttcttctctctttttttcttttatttctatttcttttccatactattttatcctctctttttttcttttttctctcccatttcttttcctctttttttccctcacttatctggtgcttgcttgccccttatccattcgtttccttcctgccacatattatctccttgtcaaagcctaactttgcacaacttactctagggaaagtggggtcgggctaaagggaaaaagtaagggaa

SEQ ID NO: 37656 - DNA, 577 bp, Setaria italica
  Peptide Sequence Number=SeqID_103630
caggaaactgggataaaattgaagttcttgaagctgaagagactaggtttgaggtgtatgaggccaattttggccagtcacggtgggccatggtgacaacactaggggatgaccaggtgctgtttctatgtcaacgattcggcagatctgtaaatgtttctcataatgagatgccaggggatcgcatcttcttcatagacaatgacaaggggttttcctccgtttacaacaagggggcctctagttcttgcagtgtctacgacatgacagacggcaaggtgtcctcccctctgccaatggtgtcgtggaagcccggcacggtgtttgctacatggctcttaccctaagggctgaaccgctgaagtgatctgtcacggtgctaactgaatgcattgaccggttcgcatctggtcttcgtatagtgctatctggtataatggaagctgctaagcatcagtacttgtctgatcgtagtatggtggtctactggtgcctgtgatgatgactacagattaatcatgttatgctcaatttgtaaacacctgatgaaccttgaggtagcatgctatctgctgtt

SEQ ID NO: 37657 - DNA, 352 bp, Setaria italica
  Peptide Sequence Number=SeqID_103631
ggcacctggtgtttggttggtgaggagatggcgtcgccgtcggcgtcgcggcgcgtgaccggaggcggcagctacatcgcgtcgtggctcgtcaagctcctcctcacccggggctacgccgtgaacgccaccgtccgtgatccaggcgaccccaagaacgcccacctgggccggctggacggggcagcggggaacctgcgcctgttcaaggccgacatgcttgaccccgacgcgctggcgaccgcggtcgccgggtgcgagggggtcttccatgtcgcgtctcccgtgccctcggttaaggctgtcgaccctgagtcagaagtattggcaccagctgttaaaggcaccttga

SEQ ID NO: 37658 - DNA, 432 bp, Setaria italica
  Peptide Sequence Number=SeqID_103632
gtaacctccgtccacagtcgacctgagatgaaacatggccttgtgagggatcatgtcgagtaccactttaccactggggcggacacccatgtccatctccacaccggtcaagatggcaaagtagacgacagtcttcgctctccagcgagttcatgaagaaccttgcgatacaaaacctgcctgagcccaggttgactagttgaacacccacttgatctatatctagtcctcgttctgcccattccaccggacgctggaactcctcccagctgtggccagcagctacctgtggcggggagtgggcgtccatggtggagaggtcagcagcagccaagtgccggccatcgctggagaggccgaaccagagcttgaactcgggtacgtactcgaccttgccatggaaggcagcatccagttgccgaccttgtccca

SEQ ID NO: 37659 - DNA, 575 bp, Setaria italica
  Peptide Sequence Number=SeqID_103633
tttagaaaataaaataaaaataacgtaatagtaatttaaaaactcgtgtctgcggtacatgtggatttacaagcaccatacgaaaatgagattcacgtcgagatgttgtcgacggtaaagtctgtgcaaattctcgaaatcgatcacaatctggtatgagagaacgccaacgccaaggaaaagcttagttgggacatgcgcagtgattgctcaaatgccttgcttcagtgcattcatgatccatacatgcaacttattcagttcccatgggccctccagcagatcccaccgatataagaatggtttgccatgctcataatccattgggacatcatctgacgcaaagaaattgaggttttgatccttttccttttgccgagagacgctacgagttacagatttttcaccggaagatgaagccttcttcttcaatacgtttaaaaacttgtcgacgtctgctgatggagccttttcatatgtgttgaccatacgaggtgccgctggcctattgggaggtgatgccggcaaaggcgatgttggatcattaacttctaaatcatctacccgttcatcgt

SEQ ID NO: 37660 - DNA, 455 bp, Setaria italica
  Peptide Sequence Number=SeqID_103634
ggttcaaagctcgacgttgcactttgtgcccttggcttctggtatgagccttgttagctggaacaagaagtcttgaattaattaagctgggaaaaataatatgtttgttgtttgaggaagaaggctgattaatgaggtttaggtaccacaagaatcctcggcgtgaaatggaggccctgctgattgattctttggagcagctcgtcttcgagcgccctgacttggtccaggatgtagacgacctggccgccggtgtccggcaaccccaggaccttctcctggccgaagtatccatggatggagaagatgacgatgctgaagagcgacggcaccctgctgaagaagctgtccatgttggtagggtccggtgcctggagcacctcggagaggcagctgatggtctctctgcacgcctcggcggtgtcggcccatcctctctccagcccccactcctg

SEQ ID NO: 37661 - DNA, 290 bp, Setaria italica
  Peptide Sequence Number=SeqID_103635
tggtgtgctgatgtaatatggatggagtagacgaagctgagggagtggcagcggattaatgaaacgtccatctctgcgacgtagaattccactgaacaattgctcctgaatgtataccataaggtgcttcagatttgcttgcgttcttcaggcagtgctcctttccaagtactacggattcgaagcaaagttgtttcctgctttgacgtcagagttcctgtataaatttacagttcttatttcctcaaaaaattttcagttctttcaacgatcgaatgaaagcaaaagtt

SEQ ID NO: 37662 - DNA, 359 bp, Setaria italica
  Peptide Sequence Number=SeqID_103636
cggtcgcgtgccgtgcttgtggcaagtgggcggccccggggagggctacgaggagctcgtcgccgcgctgcccggcgacgactgccgctacgccgtcttcgacttcgacttcgtcaccgtcgacaactgccagaagagcaagatcttcttcatcgcctggtaatcctcgctgctctctgtctcgatttcgtttcgctcggtccctcaaacaattctcatcaccgcgcgaaaactctcaattccttctctgccatggcgatagtacaaggttttttcttaggaaaggcaatactgctaaacttggtaaattgcgctgcagaatcaattgatttgacgatccggtccatgaccattttacg

SEQ ID NO: 37663 - DNA, 268 bp, Setaria italica
  Peptide Sequence Number=SeqID_103637
gtcggcgacgatcttgagcgtgcccatgagcaggttgaggaacgccgacgccgagcggaaaaagcttgcgtcgaagaggaggacgaactggtccacgaaccgggacatgcacgcgacggccacctccagcgtgaacaccagcaggcgcacgaacgatttctgggagtggaacttggggtagtcctgcttgattcgaaacaccacaactgggcggccgtcgtcgtcgtggccggcgacgaaggccacgccgtcggcgagctcggcggag

SEQ ID NO: 37664 - DNA, 1196 bp, Setaria italica
  Peptide Sequence Number=SeqID_103638
atgcgttgtttagtcggtgcattgccgaatgacggtatactgcacgaaaatcacttgctaacaaaagagtagacttgaagagcaccatttcgtatctgtagtaatttacaagcaaaggaaatgcagtaagcacccttaaaaagcaccccttgctgggctcagagccgacaaaacaaaacttccaacattaaatctatacaggtggttccaaccataaaggaaaatcagcaccatgacccgtatcttgcaaatatgaatggcagacaccaagaacgcccaaaagcacacaatatgaagtccggaaactagtcttaaacaaacccacattgcagttttgtgtcatctcacaacaatgcttggttgtccatgatcttcgctcactggagcaaagcgctgtctgaccccaggtgtgaaatactgactagctgtgccattcgcctttgcaaaacctacagggctacaacttccacaaacttgtattttacacactatgacactatccatccatcttgagtgaactcagccgtcttatcctttgatcaagctcagccatgacaactgtctcctgctttttcctctcctttgtgattgtgtttgttgtcattgaaccaatcttgtcaaatgcgaacgtgagtagttcatcagggtcatatagatgatgagtggttgtttgcaaaatatcaatcacgtcacctatatgttggatgcgtagtagatcatcttctctcatcttgaaaattgccagagcaacatggaacaaaacctttgctccttcgttgaataaaacatcccacacccgaagggttgtctctgaaggcaggctctttgaaaagaggcacaagaaccattctgttgcaacaagtgaaacatcaaaccccattgcttcaagatgagaagcaatccttgggcatttcttagccaggagatctttgaacaccctctgctcaacatgacatccagaaagagtgtcagtatagcaatcgctgacaagtacattctcaaggagtacagcaagcatccaaaatgcatcttcctctttcttcatcacgagcaacaagagtgcagctacatagtttaggccctggcaatatccaacttctgaatcacggaatgagtaccctacaagtactcgtcgaagagatgcctggccttcctcactgttcaaccaaggatggcaagggaaagtccgaggaaga

SEQ ID NO: 37665 - DNA, 311 bp, Setaria italica
  Peptide Sequence Number=SeqID_103639
tcccagggcctagaattccacggcattacaaaaaacatgaaatttcatgatcttctgtaagcagattaatattgatgtaagtgattatcaagagcacattttcttccttgtatgtaaggctgtttgcataagctgattatgacaaataaatatgtgtgttgacagattggaacaactagggcaactgcagctgtataggcttatcatatgcagcagagaaccataggaaggaattagcaagataacctcttgtactgtatagacaagttctcagactgattaaggtagaaactaatttacgaaaagcactg

SEQ ID NO: 37666 - DNA, 871 bp, Setaria italica
  misc_feature (813)..(871): n is a, c, g, or t
  Peptide Sequence Number=SeqID_103640
gcagtccgtgcaggcgcaggcgcagccggcggcgaggccgaagcgcgcgggtggcgcggactccacggactgggtggcctcgtcgctgacgcggcggttcgggatcggcgccgggctcgcgtgggccgggttcctggccgtcggcgtcgtgtccgagcagctcaagacccgcttcgaggtcgcccagcagcaggccaacaccaaggacgtggagcaggagcaggaggtggtgctccccaacggcatccggtactacgagctgcgcgtcggcggcggtgacgtcccgcgccccggcgacctggtggtgatcgacctgcaaggccgggtggccggcggcggcggggaggcgttcgtggacacgttcggggaggggaagcggccgctggcgctggtgatgggttcccggccctacaccaggggcatgtgcgagggcgtcgagtacgtgctgcgctccatgagggccggcggcaagcggcgggtgatcgtcccgccggggctcgggttcggcgacgacggcgccgacttcggggaggagcacgtgcagataccgcccggcgccacgctcgagtacgtcgtgcaggtcgacaaggtgtccatcgcgccggcgtgaggcgcgggtagatagatcacagtcgccatgagacaagtttctcctttaatcgtcgagcttgcacactgtttatctcattaaatgaactgttttgggggagttttgcttctcagaaacagaatttttttaaaaaaaataaactttcttgcaagctacctaatcctatctttcaagttttcgttactgcctgtgctgtgtttccnnnnnnnnnnnnnnnnnnnnnnnnnnnnnnnnnnnnnnnnnnnnnnnnnnnnnnnnnnn

SEQ ID NO: 37667 - DNA, 337 bp, Setaria italica
  Peptide Sequence Number=SeqID_103641
agacccgacaaaggaagaatggaggacatggaattggcaacggaggaggcactgaagagggcagagatggctgaggcagccaaaaaggctgtagaaggtgagcttaagagatggcgcgagaaggagcagaagaaaactgcggaggctcagccttccacaggagaacatgcaggtacatctccgcctgtgccgcaggcttctggcgggaaagcttctgagaagaatgagggccatcaaagaacagcaggaactttcatctcactcagcttttcagactcctcaacctttcggcttagagaatcaaactcctcttttgagattgtgatatttgctgcag

SEQ ID NO: 37668 - DNA, 1716 bp, Setaria italica
  misc_feature (53)..(53): n is a, c, g, or t
  Peptide Sequence Number=SeqID_103642
tactccctgtgtcgtccgttggctagttctcttttttttagtttttttttttnccacaacatgcatatataaaattatatcagtaatttactgcaaggcgcaagcaactacaagcatattatacagattatagcatctgaccatgccttcaagtatggaaatttcaactcgcaaacaagagcttcatatagattacacagatttttccccaggaaggtacgatggagaactgctgccagcgtggcccttcttcttgtggaacatgctcgtgatgtttggcagcataaagctcttccttagtagcgtcctgctgtttctttgatggccctcattcttctcagaagctttcccgccagaagcctgcggcacaggcggagatgtacctgcatgttctcctgtggaaggctgagcctccgcagttttcttctgctccttctcgcgccatctcttaagctcaccttctacagcctttttggctgcctcagccatctctgccctcttcagtgcctcctccgttgccaattccatgtcctccatctccttgcgggcggcttccagtttcttgattgcctcgttctcactagctctgacggcttccacttgagccatagcagcagcaactttcatctcactcagcttttcagactcctcaacctttcggcttagagaatcaaactcctcttttgagattgtgatatttgctgcagactctgaagttgaggctcgagcagcacttgctctatccgagagttccttgatctgatcaagggcccttgcttcagctgcctttgcctcttctgcttccttcaaagccagctgcaacttttgctcagcctctgctaattcaacccgagctttttcagcttcatctcttagctctgtcgcactcttttgcatcatctcagcttcctgcagggcattctttgactcagaagacagctgctgaagggccaacatcaagtcatcagaagctgatgttgctttggattcagcagctacagctgccttgagctcggatttgcatttctgaagcttaacatgtagatcgccaacaatggattcagtttcagtatccttctctttaagctgattgtgctcctgttttacagcttctaactcaactttcagtgactccaccaaaccacgaagggaactttcctcctctgctactttctgcaacatttccttagcatcatccaactctgtgctgacaatagcaacagactctaaatcccgagcccgagcatcttctatctttttctgcatggatgcaatctcagaattggtttggtctaacttctctttgagactttcataagcagcaggatcaaaatcattcctcaaagatgacaatttcttctgcgtctcttccaaagcttgtttgtatgtggtcctagcaacgtccttctcagcacggatttgtgattcctcctcttgtgcttgctgtgtagctgccttaacgtgcataagtgactcttgaatttctgcaatctcattacgaagttgattagccttttccttgttggcttcagttgtgtgcagtgattcctcttcctgctgagctgcagacaacctcatatccaatgaggtttcaaaatctttcttgagctttctaagctcctgttttgctgcatcaaggtctgccaaagctacagcatactgctcccttgcactttccagttcctgcttcagagggccatctgtgccaagaccttc

SEQ ID NO: 37669 - DNA, 226 bp, Setaria italica
  Peptide Sequence Number=SeqID_103643
ttctagcaccaaaattcctgtatagaaggaaagatatagcattttggtgctagattactgcagtaacgtcacattacttttctctcggcatggaaattccattcctccgtaaccttactacaacaacgaacaaagaatgtggtattgattgctatgtatgtaactgatcattttaaaacccggtgcatcactcgtcccttgtctttcgccctcgaacaaaatctcc

SEQ ID NO: 37670 - DNA, 401 bp, Setaria italica
  Peptide Sequence Number=SeqID_103644
atttgctctttcacgacgccgttcaatatcatcgccggaaggtgtgatgctcgtcagcttaaatatcttggttaaaagatattcacgtagcctatctgttgaatgaggcacagccactgcaagtgcacgaataacagaaatagtagcttcatgcgatccaatcttcaaaggaaagcatccatttgaatgcgtatcttgtcaacaacctgtcaaagagttaaggacaaaaggaaatacacaaagtatgtaaaatttaaaggaagaaaataagaatcattctttaccatgtcatttttgaagtgctgagcaacagctccaaatgcatctatactagcatattttactgtcaagttgtgatcagagccaagagtaataagtgctggcaaaatatgagtagatgc

SEQ ID NO: 37671 - DNA, 412 bp, Setaria italica
  Peptide Sequence Number=SeqID_103645
attagttcctcaaccttgtaatacttgtccaggtttggaaacagaggaagaagcaatgccaggttatgtgttgcagcttcccttacaactgttgcagcatcttcgacaagttgttgcacaatagataaaatgagggaatctcgaatctctgggcgaacatacacagcaagttctccacacgattgagcaacaagcaatctgcgttcctcatattgatgatttatctgttcccaacattgaggaagtagctcagtttctgtcctcatctcaccaacactcttagctaactcaacacaagcctgcagccatatgacaaggaaaacagatataaatatgaaaaaaatatgatgctacaatttacattcatagcagcatacatccattatgatgcgtctttgttgtccatcaggcc

SEQ ID NO: 37672 - DNA, 3219 bp, Setaria italica
  Peptide Sequence Number=SeqID_103646
tttttaccgtggagtttttatcttttattgatatgaacaaatggaacaaagatacagcaactagagtcctagaaatatgcagctaattgaatacgtgcaaaatgctatatctttccttctatacaggaattttggtgctagattactgcagtaacgtcacattacttttctctcggcatggaaattccattcctccgtaaccttactacaacaacgaacaaagaatgtggtattgattgctatgtatgtaactgatcattttaaaacccggtgcatcactgtcccttgctttgccctcgcaaaatatctccgaagccgcccctcattatacgaccaaacctagtgctctccggctgagcctgcggattgggatcaggggcagcggtggtagcagggtcatgttgctcgccaccttctttcttcccaaggaggctgctctcaccaaagaaactgctgacggaggatgcgatcccaagatgcgcccccattaccttgctgaggctttccagtgtaccacccgactgttcacggcctatgatttctaatgcctccttgtgtgcagggtctagagcatcaggatcttttaacaagttctgtattgatggcagaagcagatcgcgtacacttgttgctggaagatctgtagcatctagagcccgcagcgcttcacagtatacatttgctctttcacgacgccgttcaatatcatcgccggaaggtgtgatgctcgtcagcttaaatatcttggttaaaagatattcacgtagcctatctgttgaatgaggcacagccactgcaagtgcacgaataacagaaatagtagcttcatgcgatccatcttcaaggaaagcatccatttgaatgcgtatcttgtcaacaaccatgtcatttttgaagtgctgagcaacagctccaaatgcatctatactagcatattttactgtcaagttttgatcagagccaagagtaataagtgctggcaaaatatgagtagatgcaactttcacatcaatgtagggtacaagtgctttcagtagagctgcagcatttattttcaggctggtatctgaactcacaaccatctcccacaaaatattgaagatgactccatggtgctccacaaataagcaaagaaaccgaactgcattaataatctctgtagtatgatgcatagaaaatgaaccatccttggtgttttggataagtacttttctcagatattcttctaactgttgacggctggaaggagaacccaaaataccagacaacaacaatgggaacacacacatgatcgcaagtttttcagcagttgaagttttcggacgcaagccacgaacttttggctggattgacagaggaaaataggtaaaatcaccactatcaatatcgccagctgctacaagaaataccggtagcatgatgtgctccaaataatctttaccgtagcacccagatacttccaaaaggtacttcgtgataatggttcttaagttatcctctttcacaggcaacaagcaggcaagcttgattaaatcaggcaggcaatcagtgtgcatccactcaaatgctgaccactcagagtcacctgttgaatacagttttaggcaggatgctgagaagaagttttctggtgtagagcctgttggatcaactggtgcaaaggggcaagtctctatagctttctgatgaataaatggtagcaactcagtcaacattcgaaggaggacatcaatgttccagcgctcttgttctcctaaaacacgaagatgagagtctattgtaccttcaacccccgaaataggtggacaccgctgagcagatgccaggatatgagccaatagcactcttgatatctgatccagtttacctccccatcttactacagcaggaacaagctccttgagtgcgacttccacaaccgccccagaggggtcacagaccaattggaacattagttcctcaaccttgtaatacttgtccaggtttggaaacagaggaagaagcaatgccaggttatgtgttgcagcttcccttacaactgttgcagcatcttcgacaagttgttgcacaatagataaaatgagggaatctcgaatctctgggcgaacatacacagcaagttctccacacgattgagcaacaagcaatctgcgttcctcatattgatgatttatctgttcccaacattgaggaagtagctcagtttctgtcctcatctcaccaacactcttagctaactcaacacaagcatccattatgatgcgtctttgttgtccatcaggccgttttatcaggttgaataatgtatgagtcaaggaatcccgtacatcgctatctggatgcttttctatagcacatatgatcaatggaagaagttcctcacgatggtttatgagcacatatggtacaatctttggaagtgcatctgaaactatctttatagtctccagagccatcttatctgaagatttttgtttgccttgggctctctagtttctcagtagataaatacacagatatgccatctgaactctcctggattttaccaatcatggaagctccatgcagactactattaagagttacattttctgatgagatattcgacatagatttatcttcttctgaagtaccatagcctccattctcatgagatgagcaagaaactggagcttctgaaactgagggaccttcagcactattttctatcacttggtgatctttctgtggatcctcagttagattgactgccgatcctagcttatttgttatggattcagatccttttgagtctccatctttattattcaatgttgctgcttctcccatagagttagcgatggaatgcgactccagatcatcactatttccaacaaacaattgcttgtttgattgagccccttcaatatacatcttaagggctgtaatttcagctctgcagtcgttcagctctttcctctggacatccagtgactgccttaagtcttgaaccattttttccttctcttttatctccttgtgcgcagcttccaaagatttcctcaaagcagcaacctgactattagccgcttccctgctcttggtcaaagagtccttttcagcattgagtcgctcattgtccttaagtaatgtttcattttcccgaagtatggattattttttcctctgcagcctctgcagtagatgaaaggtactgatagtagtaacgacgaagggcat

SEQ ID NO: 37673 - DNA, 330 bp, Setaria italica
  misc_feature (1)..(54): n is a, c, g, or t
  Peptide Sequence Number=SeqID_103647
nnnnnnnnnnnnnnnnnnnnnnnnnnnnnnnnnnnnnnnnnnnnnnnnnnnnnnttttgttatttgtaactgacaatatgttcctgttaaaagtaggataacaagatttcggtacagataaagctcagtgataaagattatacagtggccgagtgctgctaattaaaagcattagaactcagtgaatcaaagatgcagatgtgtgccgagataatctcctagaccatcaaaacaaagaaactccagtctaggctcagtacgaagcccaggcggctgcgtctgcacccattgcttgaggaaataacagacttggaggagcaggagctgatg

SEQ ID NO: 37674 - DNA, 449 bp, Setaria italica
  Peptide Sequence Number=SeqID_103648
ccgtagatgactggtggtagcagcccaaagaggatgtatgatagtatggctatcaccatgtgaagccaataatttgatcgccttccaagctccaaccagtagtgccccacttgctcacttctttccgccacatctcctgtgtttcgcaggtcagcaatctgtttgcaacaagggaaccttttgtcagatgtaggtcttacatggtgatcgcaaagaggatgtgtaaaattcaatccagccaagaaaagtatgttacattgtggtaaattaaaggaagccctccaataaggtttgccatgcccaagatgaatatatccactgcaaatgaacagcatgattacatcaacatcaggggaactaagtcggaaacagttttgactcagcaagaaagaaacttacgagtcttggcaccacttgctgctgctgctgatacaactgagagactcatg

SEQ ID NO: 37675 - DNA, 2287 bp, Setaria italica
  Peptide Sequence Number=SeqID_103649
ttgtttatttcctttacttttttaacttaggttaacttattatttgttctagtttattaaagtatttattacctgttcgtcatacagtggccgagtgctgctaattaaaagcattagaactcagtgaatcaaagatgcagatgtgtgccgagataatctcctagaccatcaaaacaaagaaactccagtctaggctcagtacgaagcccaggcggctgcgtctgcacccattgcttgaggaaataacagacttggaggagcaggagctgatgcaccaccatgatcgatgagaccgaagtgtgccaggagccttgtgatgagcacgcctgcgatgtacgacagaccagaacagctgaatccgatggacacgtagtagaggagggttgtgatgtatgtccttgacttgacatgtgccttcccgattgcaagcagcgcaatgcacaacagagatgcagcagcgaccaccatcatcttgttctccctgttgtcgctcgtcctgaatgacagtccgtagatgactggtggtagcagcccaaagaggatgtatgatagtatggctatcaccatgtgaagccaataatttgatcgccttccaagctccaaccagtagtgccccacttgctcacttctttccgccacatctcctgtgtttcgcaggtcagcaatattgtggtaaattaaaggaagccctccaataaggtttgccatgcccaagatgaatatatccagagtcttggcaccacttgctgctgctgctgatacaactgagagactcatgattgattcaacaaggccaccatacactatggctttcagtatgtcccattcatccctttgaactgatggtgcaggacaaactggtggctccgattcagtagcctcagggactgtcactactgaatgaggtgactgacctgattgaggaataactggagttggtttcccacccgtctggttgtcggctcctggcaaaatttttgttggcaatttaagttcaggattaaacaatggttggttgatatggttgataaataagttgtccccagaggctcctgttgtgtttccttgaatatcaccagcaggctttgagggagaaatttgttcttgctgtgcttcatcttgctgcacaattaccacatgtccttctgtctgtgttaatattcctgtctggctctgtgaagatgatgatgatgatgtgtggacagctacggatgaagatgcagatccatggcattcactgaacggttgtttactttcttctccattgtttccagtggtagtttggactttggaagaggatccagctagtaatggttggttcaattgttctgcttccccaaccgtggcttgattatgagaagatgatgcgctgtcttcaactggagctttatcattgttactctgtgagccacttaatagtggctccttcaatgaatctgcatcagttgattgctttggactatctactgtctggaaacaagaaagaagccaacttccacaatgttcagacgtctcttgtgaagcagaatgttgaacctgaacttgttgatttgcattactcctttcaaatatacggaatatattaaaaccacaacctgttggaatgaagaaagcgaagcatgataaacatctaaatactttaggtgactcttggtcatggctttcagtgggagtttggtttggaacattggcagaaggctcttcaagctgtggtttttttggtggttcatcacgttttgcttgtcttgctgttctcttcctctttttaaggatcacccttcgggttatgcatgatttgcagttcggacagtagaggtcatgagtctcttgttcatcaaggattttctcgagatcgtactcttcgatgtgcactttacccttggtggcattttcatccttctcaacttcaatttcatgaacttcagttctactcgtgctgccactggaaatgtcaagagcaccgttccagtttgtcaagatgttttttctctcgctaatggttgctatcactttgagcggctgcgtttcttcagctgcaacagacacagtttcagtgccgctggagatttcgtgcacaccattagagtgggatccattttccttagtttccaacttgccattgcttgaactgtggttagtttcttgatcattgacgttttcctctttctcagtctctttgccttctgcaattgaagtttcttttgagttttccttttggccgccaacttccaccacttccgtaacttcatcttcttcagcaccttctttgtttggcgaatagtaaaat

SEQ ID NO: 37676 - DNA, 460 bp, Setaria italica
  Peptide Sequence Number=SeqID_103650
gaggcctacctgacggcgtcgtgggccggcgagttcgacaacctctgcgactggtacgcgcacctgctgcgctcgtcgccggcgcagaccgtgcacgtccacgtcctccggaacgtgctcaccgccaacccggtcaccgtcgaccacatgctgcgcggccgcttcgacaactaccccaagggcgcgcccttctcggccatcctcgccgacttcctcggccgcgggatatttaacgtcgacggcgactcgtggctcttccagcggaagctcgccgccgccgagctcgcggccccggcgctgcgcggctacgcgacgggcgtcgtggcctccgagctgcggtgccgcctcattcctctgctccactctgcatccagcggcggcgagaagctgctcgacctccaggacgtgttccgccgcttcgccttcgactgcatatgcaggatctcgttcggcctcgacc

SEQ ID NO: 37677 - DNA, 412 bp, Setaria italica
  Peptide Sequence Number=SeqID_103651
gggaggtggagaaagcactgaagaatattcgagtttttgtgtgccatcgtgaaactgaccaaaggtaccatgtgcatggcttgactgaggagacaacagagaacctcaagtttcgagatcgcagtgggaaggattatatggtgctggattacttcaaggagcactacaaccatgatatcaaattcaggaagctgccctgcttgcagatcggtaagagcaagccgtgctatgtgccaatggagctttgcatggtttgtgagggccagaagtttcttgggaagctctcagatgaacagacctccaagatgctcaagatgggttgccaaagaccaagtgaaagaaagggactcaataaagggtgttgttgaaggagcatttgctgcaagagcaattcatatgctgatcaattcag

SEQ ID NO: 37678 - DNA, 1593 bp, Setaria italica
  Peptide Sequence Number=SeqID_103652
ggatggctactaacatgttagtaaactcaaatcaccacattcgaaatgtttaacgcaccaatgcattccccttcacttctacaaaatgaagtttttacgagttcatcaaccatccattggttagcagcaactataagcaggattaccatttcctgcaactacaaacaaacactccagaaacagttcacaacaacattcaacattcagcaacaacaggcactcgatggccccaggtgaagatgcacaccttcaaagccacttcatttgcttgacgcgttgtccttcgtcgacccatggctggaagccagcacctctgcacgacgttcctgtcccacctgtgtgcgctccacgaggtagtcaagtttggcttgaagcttgtccaacttctccagaaactcgtctggaccatcatcagcctcagctactgtcaggggccactcctgctcttgcttgattgagattccaatacctggttcttgcttgacagtaactccggtgcctgcaggttggctgctggttgcagcagattgagtgccatggccggggcctggtggtttggatgttgaactgagcttcaggttctctgcggatgggataattccatcctcttgagcttttgggctggaagcactgtttttggccgatggaggtgccaggacgacaggacctccctgagacagattcaaagctctgcatcctgattgctgcacacccccaccattatcaccatattcatcatctgacgatgactcttcatctgaggtgctcttctctgattcagatttagaatgttgaagtagacgagcagcatgccagtgttttctttttgcctgtgaaagaggtacagtccaaccttttgttagggaccactcaagagtaggcctcagatcattacaattagcacgataacgtatgccttcacctatgggaggcggtggcagctttacctcgaccatatttttgccgagtaacttcgtaattgtcccagaccaataacaacctgcagtgaaccaatcaaccagatcacctactttccaggcttcatcaacaattgctgtgacatcactatttgggaactgctcaggaacttcatgtccataataccattgaggaaaacaaggccttatcatgagttgagtactctctcttgaattttgattggagcttgttgggttctcttcaaagaccttaacccactccttctcttgttctgtactatagtcaatatactccaagtaatactccaggtatccagcagaactgttgagacgcatatcatgtaccttgcagcgaaaccatgcactcctgtaaccgatcaggaaagacttgagctctgcgagatccccaatcttgaacggaagtaacagatccatcgccagctatcaatctggataagttgcctgggtgaaaacgttgcctagggatggcctgagaactcgttcgatattttccagaggctacaaacgctatatagccggctatatcctcagatagctgcatttagcggtttagcaaaaaatacatgtcaaaattaagatgtcagtggattatgcacatctaagcacagaaccaggaacatttgagcacaaagaa

SEQ ID NO: 37679 - DNA, 424 bp, Setaria italica
  Peptide Sequence Number=SeqID_103653
ggttggagaagtttatcagaatatcaccattagctactattctccctgtccacagccagaccttgctcttggactgcaatctcattctgatatgggtgcaataacgcttctgatacaagatgatgtgggtggccttgaggtattgaaggatggaatgtggatacctgtggctcctttgcctgatggtatccttgtcattttggctgaccagacagagatcatcaccaatggaagatacaagagctctgttcatcgagctgttgtcaatgctgaatgtgcccgcttatcagtggcgacattctatgacccatcaaagtcaaggaaaatatgcactgctccacagcttgtgagcaaggatgagccacaaaagtatcgggatgtagtttatggtgactattgttctcaactttggttattaagtcta

SEQ ID NO: 37680 - DNA, 318 bp, Setaria italica
  Peptide Sequence Number=SeqID_103654
caaagttccagagactgcatgatgcaaaagattacaaccaagcacgatgaagaggatggatgtcataaaagagattaacttaggcctgatgagatatgggagaacttgcctcataacaaccaattataagcaaataagggtaatttgggtggaagacacacgaatgaaacttgttcccgctgcaattcagctcatgtatgcattcgacgtcattccccgacttaaatgaccacaccttgacagaaacttcttgctactggaggccatgataaaaggtcgttttatggtttacagatatgctgaaacctaaatctacac

SEQ ID NO: 37681 - DNA, 871 bp, Setaria italica
  Peptide Sequence Number=SeqID_103655
gtcgcagcagcacagtcacagccagcagcagcttcagcaacctgcgctctctggacagcagtctcaaagctcaaaccagcttcttcatcagcatggaaagtcaggagtaggaagcatgcctattgatggaaacttgccaaactcgtttggatttcctgaacaagcatcaaagaagagaaagaaacctgtctcatcctctggtagagctaatagttcaggaacagcgaacactgctgggccatctcctagctctgcaccctcaacaccttccactcacacaccaggagatgcaatgtccatgccacagctgcagtataatggtggcccttcgaaaccattgatgatgtttggctccgatggcacgggaagcttgacttcgccagccaacccgctggctgacgttgaccgtttgctggaagatggttccttggatgaaaatgtagagtcttttttatcccaagatgacatggatcctcgagaaactatgggacgctgcatggattctagtaaaggattgggttttactgaggttgcaaaagcccgtgtaagtaccaacaaagtagtttgttgccatttttcgttggatgggaaacttcttgctactggaggccatgataaaaaggtcgttttatggtttacagatatgctgaaacctaaatctacactagaagagcactcattactaattacagatgttcgctttagccctggcatgacccgccttgcaacatcttcctttgacaaaaccgtgcgggtttgggatgctgacaatccaggatattcgctccgtacttttacaggccattcagcatctgtcatgtcgcttgattttcatccaaaccaaagaagacatcgtttgttcgtgtgatag

SEQ ID NO: 37682 - DNA, 1027 bp, Setaria italica
  Peptide Sequence Number=SeqID_103656
ttttttttttttttttttaagtaaaaagttttaaacaatacaaataggaaaaatactttgattagtttgcgcaggccaccacaaagttcagtcagttgacaattaacccaagagcacatgccgcaactgatgggaacacagcatccaaaccaggttagttcaaccgaatggtccgcgtgatcaggtcagctgcccttccgccgtgagcaccaagggcagacgaacgttgctgttttcagtgtcatttccagagcttgacgagctgatcatggctcactgatgctactagccctgttgaatgtgacgcagcaagggctgcgaccatgccctcatgcgcgttgctgatggtcacggtgttcttctcccttatgtcccaaagttccagagactcataacaaccaattataagcaaataagggtaatttgggtggaagacacacgaatgaaacttgttcccgctgcaattcagctcatgtatgcattcgacgtcattccccgacttaaatgaccacaccttgacagaatcttcactgacagaggccagatagttacccgcagcatcccaacatactgattgaataatctgtacgtgtccctgcaaaggagttcgacaaacttgtagcgtctccgcatccagtatggatattgccttttctgaggcagttgctagatatttaccttggtgaggttgaaatctcaactgagtagcaccttcattgaaaaccctgacacaggtcacacagctaccattagttatgctccaacaccgtacttccccatcactatcacacgaacaaacgatgtcttctttgtttggatgaaaatcaagcgacatgacagatgctgaatggcctgtaaaagtacggagcgaatatcctggattgtcagcatcccaaacccgcacggttttgacaacttctgatgttgcaaggcgggtcatgccagggctaaagcgaacatctgtaattagtaatgagtgctcttctagtgtagatttaggttcagcatatctgtaaaccataaaacg

SEQ ID NO: 37683 - DNA, 469 bp, Setaria italica
  Peptide Sequence Number=SeqID_103657
aaacgaaacgctaacagtgttgctacagtattttgggtacctcaaagttgggcaaagcctcatggtatcttcagctagttcagcctagtgttagcagcgaaccctccagatgtagggcatcctcagatccaatgccatttcccgccgaccagagttaagaatgacatttgtccaattcgatgatcggtgcacaatcctcgagggtatgcggtcgctatcctcacctccagaggctttcatacccgccgcttgtcgaccttgaaagcgcgatgctcttctgagcagtggattctgaagctgcaagtgacataaagctgcgcagttcgtctgcccctgacattgagacacggaagggatgaagatcaggtgagtccaagctactttctggtgatgaagtaaggttgaggttcctgatggatgatgcaatgcttggttggaaggcactccttgcttcatgctgcaagtgggg

SEQ ID NO: 37684 - DNA, 573 bp, Setaria italica
  Peptide Sequence Number=SeqID_103658
ggcggcctcaacgtcctcctcgagcaggtctcccaccggccccccgtgtcggcgctgcacgccacgaacgccgccggcgacgtgcggctcgtctggtgccagagccccgtccccaagttccacggcgccagcatcgaggccgcggtgcggggccggcgggagctgcgcctgccccgccacggcgagcgctacgaggtcgactgccccaactgctcatccggctgctgcccgcgccgtccgtcgagtggtccggcgacgtcagggtggtgtgcgcggagtccgggctcgaggcgcagctcagctactgccggagccgctccttcctgggattcggcggcgacgccaggtgcgtcagggggagggtcttccggtcggcgtcgagggacgagacgatctacgagatcgatgggttctgggacaggaccgtctcgctcaaggacgtcagcaccggcgaggtctccgtgctctacgacgcccagcgcgccattagcaaactcaccacgccggtggtccaagaccacaagggcttggcgccttcggaatccgccgtggtgtgggcgaggtcagcgacgc

SEQ ID NO: 37685 - DNA, 310 bp, Setaria italica
  misc_feature (277)..(310): n is a, c, g, or t
  Peptide Sequence Number=SeqID_103659
ttctgggcagagatgatcctgtacgtctcgccatccgacgatgctcgggcgcacctagaagttcttgcaaaggagggagttcatcacgcacctttgggcgctgctcacgcatgccggtgtgttgaagcgaggacccacagagccaaagtgtgtgatctgtccaaccagtgcacaagtaacagtccatatatcaacctagtgcttgtaagtagtaacatcctagaatattgcctacaataatgttgggacagacctacttgtggaacaaaaaaaaaannnnnnnnnnnnnnnnnnnnnnnnnnnnnnnnnn

SEQ ID NO: 37686 - DNA, 1430 bp, Setaria italica
  misc_feature (1363)..(1430): n is a, c, g, or t
  Peptide Sequence Number=SeqID_103660
tgcctgtcatcatgattgccctactgctcgtggctcacagtcgactgcctgcacgtcaagcgtcaagatgatcataacaatcacagtaatcataagaatcacagtgtgatgtatgtcaccatagtcataacggttgtcttggcagtcctggaggcataccagctgtacctgtacatagcgtcaggttggttcaaggtggcgctgatacggagctacgtcaacgctccttttctgcaaagatgctgttgctttgagatgatcatacgacttctcttgatatggaaggcgtttcgcccatggaacggcagacttggccagtactgtctcctcaagaaacttggccgcaaaagcagggttaagaattgtctccatcatactacactacgcctggtggacaaggccaagaagggaagcaagaaatcagtcaagctgtccgaaaaggtgaagaaagccgttgttgattccctactgctaagcaatggctacctgacgggagggttaaaatcattggaaaacaatggcgtccatggtcttctcacatgggcatgtgatgctactgcaacagacggagcagtgactcgcaccatcctggtctggcacattgctacaacagtgtgcgagcaccagctggataaaaaagccagagaagaagatgccgtcaaaacagcatccacattatctaagtactgcatgcatctccttgctgttgcacctaacctcttgcctgaccacagctccatatcggaatccatacttgatcagtcaatcgacgaagcaggcaagttactcaaagaggccaaggagaagaagatcaagggaaagaacaagaagatcaagggaaagaacaagaagatcgagggcaggtgtgagatactaatgcaaattagcactgatgttgattgtgttggtgatgaaacaaggctcgttgcgcagggcgttcaccttgcaaggcaactgattgataacatacaagactccacaacacggtggaaggtgctatctgatttctgggctgagatgatgctgtacgtctcgccatccgacgatgctcgggagcacctggaagttcttgcaagaggaggggagttcatcacgcatctttgggcactgctcacgcatgctggtgtgctgaagcgaggccctagatgataaccaaaggatgttgttgtctgatctatccaacaagtgcacacgcaccagtcaatacatccatgtctaataagtctgtcgagtttgtttctcttttcatgtcgtgtctgttgtcagattttggtgagaatcgtgttacgattgctagttatgttgcacaaataataaacagtaagaaatccgaaaacgctgcagcttcatcgcagcaacaacnnnnnnnnnnnnnnnnnnnnnnnnnnnnnnnnnnnnnnnnnnnnnnnnnnnnnnnnnnnnnnnnnnnn

SEQ ID NO: 37687 - DNA, 475 bp, Setaria italica
  Peptide Sequence Number=SeqID_103661
ttttttttttttaagtcataccaacacattccgttccattccatggtcaacttttacatctcagattgcttatccaaaaaaaaaagaaaagaaactttcacatctcagactgcagatgaacgatctttacatctcctactgctttttacatcatgtcagattgcattgcaggcacggcgcgctgagtaaaaggagctcgaagactaataagctacttaatactaggcctgatttgatggtcaatttttatacataatgctcatccagatgcaagaatgaaagatgaaatcaaagtcttcagaccctgaggagggccgcgccgccggaggagctgccggccgcgaaaggcaacgaggtggtggcgccagcaccggagacgcaggtgctcgtgctccttgtggcgtccaagttgtcggcctcctcggcgatggggtcgaggcagagcgcggcggcgcgtcgcaggagctggcgctgc

SEQ ID NO: 37688 - DNA, 1087 bp, Setaria italica
  Peptide Sequence Number=SeqID_103662
gcatgtcccgcccgggcacgcagtttcccctacgtaagttcgtaactaccccgtcggtcttcccctagctgccggtcgcaccgctgcccgatcccggagaagaagttgaacgccaccgacaggttggtgatccgccgcaggccgcacagcaggtccggcagctcccccgtcagctggttgtgcgccacgttgagcacctcgatccccgataggcacgacagcgtccccgggaggtgccccgacagcgcgttgtagctcaggtccagcacctggatgctggggaggaaccccagcgcctccggcacgcaccccgtcaggttgttgttcaggaacagcacctcccggacccggccgccggcgtacccgtaggaggcagggacggggccggtcaggtggttgttggcgagcgtgatgacggtggcgggagacgaccacagcgtgtccgggatctggccctcgaactggttgtcgttgaggaacaaggcgtcgaggtccttggcgaagacctcgggcgggagctccccggagaagccgttgaagcggaggtcgaggtagaccagcgacgggatcagcagcgttgacgacgggaacgggccggagaagaggttgttgctgaggtccagctccgtcaggtactccaggtcgcggagcgagtccgggacggcgccgccgaggcggttgctgttgaggtggaggaacgtgaggtgggcgaggagggagaccgcctcggggagtgtgcccctgaggttcgcgcggttgaggtcgatcccggccaccaccgtgggcgcacccgcggccgcggcgccgtcgggcggcgcggagcagtagacgccgcggtaggcgcacacattggcgccctgccacgacgaaagcgcgccgcgggggtcctcggtgacggcagccttcagcgcctgcagcgccgtgtactcctggttcggcgcggacgaggaggaggccccggcggcggcagggctaggggacggaggcggcgcgccattgatccaggcggcaatggcggggcctaggccgagctgggaggtcggggcgggggtcagcagcactaggagcaggagcacggcggcggcgg

SEQ ID NO: 37689 - DNA, 421 bp, Setaria italica
  Peptide Sequence Number=SeqID_103663
gatgtgccctcccatgagactaacaaacctgaaatgggatttttcagagatgtcgccaagttagtgtgaatgaatgacttgaccaatgaatccagcactagaatgtacaaaagatcttttctgggccgctcaaaaggaagtttgagttaccaaaaacaaccccatgcagaaggaattacaaggagctgcaataatgaactacctcttgcatatggcaaggccaagaccactaccattgaaccctcggtttcctccactttgaggatgagcaaactttgtaaatcatgaggtagatcctgaggactaataccacagcctgtatcttttacctgaactttcaaattagaaatggtcatcacttgcaactggatgaaattctggagttctgaactctctcaaagagtcagccttcacaactgaa

SEQ ID NO: 37690 - DNA, 172 bp, Setaria italica
  Peptide Sequence Number=SeqID_103664
tcaaagccaccaccagcaggacggccgcggaggtgaggcgggaccaggtggcccattgccctcggctgctgcacagcctcctgctcaggctgctgctgttggtggccctcgctgggctgggattgttaatggtgatggcagtggcagtgtgggtgctcctcgccagggctat

SEQ ID NO: 37691 - DNA, 270 bp, Setaria italica
  Peptide Sequence Number=SeqID_103665
aactggatcaagacccatctgtacgggaagaaggacgacttcttcacgaagtagataagctccaacgggatcgagaaatacgcgagggctatgaagaagtccgagatgtactgatacttgacgagcagatcgtcggttggccatagtggctcgatacagtcgcatccgtccatccaggaagctttactattgcatcagttatcgcaacatttcctcgatcggcggcggcggcggcgtcgaggcggggccgaaagggtggcgggggaaaga

SEQ ID NO: 37692 - DNA, 2595 bp, Setaria italica
  Peptide Sequence Number=SeqID_103666
ctgcttcggttcgtcctcttcctcctctcgccgcccgcttccgcttctcctagggtttctcgcggctcgaatccaccccctgtaacgctccgtttcatctagggtttctcgcatcgtgcgtacacccgccccgcgacgcgccttctcctgcagggttttctgtaactctaggcgccatccgcccggcccagatctagctctctccgccttaccgcgtcatcttcctttcccttatcgtggagtggggatccgttcagatttcgattggattcttccttcgtcggtctttgtgatcactggtagcatcttcatcaaaggccttttgcaaaattatgcgatcttcatgggctgattcagttgcgaacgccgaggaatcggtgcccgcgactgttactgctactgcccctgctgttaatcatcagagtgggcgccccaccctcagtgcatacgtccctccccacctccgtggtcgctcagctggtccttcctctgagatccaggcagtgcctgctgcagctccagcaccagctgaggtacggtcagctgctgtacagccttcaggctacgcatctgttgttggtggtggctctcgttggtctggccctactggtggtggtggtagcagcgccatagttggtcctcgccagggtggtgggggtgggggtgggggtggtggtcgaggtggcggtggcggttggaactctcgccctgggtgggaccgtagagaccgcgaaccaaacccttttgccaatactgaggcttcagatgttgattttgaggctcaagagaacacgggcatcaactttgacgcctatgaggatattcccgtggagacaagtggccatgatgtccctccaccagtcaacacctttgcagagattgatctgggtgacgcgcttaatgagaacatacgaaggtgcaagtatgtgaagccaacacctgtgcagcgacatgccattcctatcgccattgcaggtagggacctcatggcttgtgcacagacagggtctggaaagactgcagcattctgttttcctatcatcagtggtatcttgaagtcaaggccaccccagaggcaaaggggttccagaacagcttgtccgctggctctgatattgtcccctactcgtgagctatctatgcaaattcatgaagaagcaaggaagttttcataccaaactggtgttagggtggttgttgcatatggtggagcaccaatacaccagcagctgagggaactggaaagaggtgttgaaatccttgtggcaactcctggtcgtttgatggatctgctggagagagctagagtatcactgcaaatgataaagtacttagctcttgatgaagctgatcgaatgctcgatatggggtttgagccacaaatacgcaagatcgttgaccagatggatatgcctcctcgtggtgtgaggcagactatgctgtttagtgccacctttccaaaagaaatccagcgtctggcttcagatttccttgctgactacatcttccttgctgttggaagagttggttccagtactgatttgattgctcagagggtcgagtttgtacttgaggcggacaaaaggagttacctgatggaccttcttcatgcacaaaaagctaatgctgctcacgggaagcaagctcttactttggtctttgtggagacaaagaggggagctgatgctcttgaggactggttgtttaaaaacggttttcctgcaacaagtattcatggtgacaggacacagcaggaaagagagtatgcattgaggtccttcaagagtggagcgactcctatactcgttgcaactgatgtggctgctcgtggacttgacataccacatgttgctcatgtcatcaattttgacctcccaaatgacatagatgactatgttcatcgtattgggaggacaggacgagcggggaaatctggtctggcaactgcctttttcaacgagggcaacttatcagtggcaaagccactatgtgagctgatgcaggaagctaaccaggaggttcctcagtggcttgagcgttatgcagcccgttcttcctatggaggtggtgggggaagaaaccgccgatcaggcggtgctagatttggtggccgtgacttccgccgtgaccgggacttcaggggaggaggtggtggtggaggttatggtggcggtggttacggtggtggaggttatggtggcggtggcggcggatatggtggcggctatggtggaggtgcaactagttcctgggactaaatgttgtctccccagtcaccagtgaggattgaaccgaaatgatcgcattctattgatgttaactgaacagatgtggagtttgtagtcaaccctagggtggttggtatggtagctggagaaaggcccctttttaccttattaatggttggttgttggcttattgctgtctctgttcgcctgtgatgagctttttctgagtgttgtccttgggttaattcggctgttctcacccctcattttccttgctgtagttctggatgctgtgtattattgggttggaggtttaatatttttctagtgcgtctcattgttatttattttactaccgataagtgaa

SEQ ID NO: 37693 - DNA, 2678 bp, Setaria italica
  Peptide Sequence Number=SeqID_103667
ccagataatgacataaaaacttgcttcccgcgctatttgcacggatttcatcttacacgatggatataatgggattacaacagagcaaacaacgagctacgggggtcgcgcacgagcgccccaccccccaggaacaagcaattcaatccgctggtaggatatactactcaatgaagcaagtcagcgttgccaccccaggtacacagccgcagactccatatgctttacattatttgtacattatatgcctgctatgacagggttacaaacaaaattagaagatcgaactaatcggtcccctacttggcgctacgccgtcaatcatcatttacagtaagctcatacgcttctttggtaccgcgatttcagggaagcggatcctttcccatcggtgagcgcttttgaaccagacaaattggagtccgcgctgcttggccagactagagggatcaactgctgctggtaggtgtttgtgttgtcgcacacgccgagcttgacgatgaatgttgcggtgcaacctcttcctgttccttcactgtcgagccagatgtgccctcccatgagactaacaaacctcttgcatatggcaaggccaagaccactaccattgaaccctcggtttcctccactttgaggatgagcaaactttgtaaatacatgaggtagatcctgaggactaataccacagcctgtatcttttacctgaactttcaaatagaaatggtcatcacttgcaactggatgaaattctggagttctgaactctctcaaagagtcagccttcacaactgaagctacaagtgttatgtgtccctccttggtaaacttaacagcattgcccgagatgttaagaatagtttgcatgagtctcttttcatcaccaacggcagataacggcaaatctggtgccaacataaccgatacagagagcctcttgatagatgctattggtttgatgaaactcatcacttctttgaaaacagcatgaagattgaatgctttaatctccaattcaaggcttccatcctcgagtttggaaagatccagcacatcattgatgagtgttgctaacagattgctacttttcagcactgtttccaccattagacgctgctcaggagtaagctcagtttccaaaagcaaggaggaaagggctattattgcattcatgggtgttctcatttcgtgattcataacagctaggaaatcattgcgagcacggatggccatctcagcctctcttcgagctaaatccagggcaacattctgctccattagtaaatcacgtgcccgcatggactcttcaaggatagccgcatgagatagtgcaactgctacctgatcagcaacgacctcaacaagctccaactcatgcacatgccatttccttgcactatcagatggaagcatcagaaccatgattgcaaagcttttagctgaaagctctggccaatcatttatttggaagtttgaaagatggagaagaggtacgcgcactgcagctacttctggcggaacatatcgccctgcaagtggtcttatccgtgccaaaggacatgtgtggggtataatgattgctcggttgctactgaacacttgattgacaacaggaaggttaattggtacagatgaaccgacagtaatctggtggcgcagcgtatgagaaagttgaaggcttgaaccacttctagatggcatccacaatgcacattcttccagacccaaggtccttcctagctcaacaagagtggtcttcaaaaatcgtatgcctatcaagtgtacttctgatttcatgggtaagcatcctaacatgtctaccggtctcctcctgcgtccttatcaatcccatctccctatcaagctcctcagctttattcttcaggaataactcccttgttttcacactcaacaagtcggggataatatgaacaagcatcagagctgttgcacaggacacaaccgccgtagaaaccttcgctatggtcatgaccatagcaacggtcttggtgtgtgtggtgaaagtccacaggtttataagatgggtcgctccacagagaactataaacgcaccaaactggatcaagacccatctgtacgggaagaaggacgacttcttcacgaagtagataagctccaacgggatcgagaaatacgcgagggctatgaagaagtccgagatgtactgatacttgacgagcagatcgtcggttggccatagtggctcgatacagtcgcatccgtccatccaggaagctttactattgcatcagttatcgcaacatttcctttccccactccaccagcgaacagtagccaatcgctccccccacccgatgcctcggtcccagccacagccagcagcaatcggaaccaagcacgctgaggagcgcaccagcaaggcccgaagcctacacccgcgcgagccctaggatcccctcccccttgcccacccacccaccagcccccagcgctcctccccccggatcaacccgagaaacggagagaaaccccagatccagaccgcgcgcgaggcgatggagagggcaggggggccagtacctcgatcggcggcggcggcggcgtcgaggcggggccgaaagggtaggcgggggaaaggactcgaggagcggcgagggtgaaagggaaagcggcgctgaaaagggagcgaaggggcgggg

SEQ ID NO: 37694 - DNA, 2435 bp, Setaria italica
  misc_feature (2386)..(2386): n is a, c, g, or t
  misc_feature (2399)..(2399): n is a, c, g, or t
  misc_feature (2415)..(2415): n is a, c, g, or t
  Peptide Sequence Number=SeqID_103668
ctccacttgttttcttgatctccgccgcttcctccctcctctcctcttcccccgcgtctctagggtttccacgccgccggattcgaaacccgcgctcccgagcagtgaccagcggggctactccattaagtgacctgtgctaattatgcgatcttcatgggctgactcagttgcgaacgccgaggaatcggcgcccgcgactggtgctgctaacggatccgttgctaatcacggcaacccccgccccacgcgcagctcctacgtcccgcctcacctccgcggccgtcctgctggtggtggctttgatgctcaagcaggctcagtagcgccaggaccaggtggcccattgccctcggctgctgcacagcctcctgctcaggctgctgctgttggtggccctcgctgggctgggattgttaatggtgatggcagtggcagtgtgggtgctcctcgccagggctatggtggtggtggtagccgtggtggtgggggcggtggtggtgcctggaactcccgtcctgggggttgggaccgcagggaccgcgagccggatccttttgccaaggctgaggcagaagaagttgtcttcgagggcgataacactggcatcaattttgatgcctatgaagacatccctgttgagaccagtggccacgatgtacctccaccggccaacacatttgcagagattgatttgggtgatgcgctgaatgagaatatccggaggtgcaagtatgtgaaaccaacaccggtgcagcgttatgccatcccaatctccattgctggggcgggatcttatggcctgcgcgcagactgggtctggaaagactgcagccttctgtttcccaatcatcagtggcatcttgaagtcaaggccaccgcagaggccccgtagttcaaggactgcgtgtcctctggctctgatcttatctcccactcgcgagctttcagtccaaatccatgaagaagcaaggaagtttgcatatcagactggtgtcagagttgtggttgcgtatggaggtgcaccaataacaaatcagctgagggagttagagagaggtgttgaaatcctggtggcaactcctggacgcttaatggatctgttggagagggctagagtctcactgcaaaacatcatgtacttagctctcgatgaagctgatcggatgcttgatatgggttttgagccacagatacgtaaaattgttgagcagatggacatgcctccacgtggcgagaggcagacgatgttgtttagtgctacattcccaaaagagatacagaggatggctgctgatttccttgctgattacatctttcttgctgttgggagagttggttcaagtactgatttgattgttcagagggtggagtttgtccttgatgcagacaaacgtagctacctcatggaccttcttcatgcacagaaggctaatggtacacatgggaagcaatctcttactttggtcttcgtggagacaaagaggggcggctgatgctctggaggactggctctacagaaatggcttccctgcaactagcattcatggagacaggacacaacaggaaagggaacatgctcttagatcgttcaagagtggagcaactcccattcttgtggcgactgacgtcgctgctcgtggccttgacataccacatgttgctcatgtgatcaattttgacctcccaaatgatatagatgactatgtccatcggataggaaggactgggcgtgcaggcaaatctggcctggcgacagcatttttcaatgagagcaacctttctctggcaaaggagttgagtgtgctcatgcaagaggccaaccaggaggttcctcagtggcttgagcgctacgctgcccgtccatcctacggaggtggtggcggtagaaaccgcagatcaggtggtggtgccagatttggcgaccgcgatttccgacgagacaggggtgccggtgggtatggtggtggcgccggtggttatggtggtggtggtggtggtggatatggtggagggtcatcgggatatggtggtggtggctattccggcgggggtggcggctatggtggtggtcagggtacgagcgcttgggactgattgctttccgtcctcagcgtgaagttgaaaatgaatcagcagtgatgaattgtgtctccctcgggggttaaatggatgcttggaaatgatatttgtaccttgactagatgagtacggtgttgggaaatgtccccttcgccttgggtcctggttttaatcttttttatgttttcagttgtactaggaattggcttgtgtgttcttttattattatctgaattggtcatcccgatatgttagtttttgtttacgatttcggtcttattcacgaagtaaaaaaaaaaaaaanaaaaaaaaaaaanaaaaaaaaactaaagngacacgcaacagggagtagg

SEQ ID NO: 37695 - DNA, 433 bp, Setaria italica
  Peptide Sequence Number=SeqID_103669
accggcgcgccggagcgagtccgagcaccggtccgtttttaggaccagcgcgtcgaggacggcctcggtgtccggtgccggggcctcctcgccgtcgaagatgccggaggcggtgacctcgaccatctcgtccacttccctgtccctccagccgcctttctttagcattgacccgagctcatcgaggtagttatcgacccaccgcggggttgaccgccggtgtggcgacgggcagcctgacgaggacgacgacgaggatgacgaggcggtggaggcttccgaggacgaggagtcgcggcggcggcggtcggatgcggcgtcgctccagaactcgatccagcgcggggcctggacggcgtcgaggctccggcgcgtgtacgacgacgtgttcgcgccggtcggtagtaagggggtaggtccttagtttcgttta

SEQ ID NO: 37696 - DNA, 578 bp, Setaria italica
  Peptide Sequence Number=SeqID_103670
aggtggttgtgaaaatagaaagcgaggaagatatgcttgtttacaagggagagcaaagtctctgaatcttccaacgcacataaccatagacgctggaagaacacagattgctccaaattcaagaacagtgatggctattcttgggcctgctgacatggttgatgatgtcactggtggtctgaagctattgtaaacttcaccttgtcagtattctcaagcacccaacatgggtgtttacagagatatgctggaattttacaatccacattggactcacacttctgatctgctgctgaagaatgaatctcagtctcattggttgactcgatcttgctgtctgtggatttattcaaaaggaggctgtttcttttttacttgtatcaactgttgtctttggagctcagatttcagttcacccagttttggtgtcgagaacttgtggaccattgtttcttctgtaacatagataagaaaaggtcccgctgttgtccctttctttgttgtccctataagcacagattatgtatttcgcaccactcatgagtcatgacttgacaaaaaactaaaaaaaaaaaaaa

SEQ ID NO: 37697 - DNA, 564 bp, Setaria italica
  misc_feature (531)..(531): n is a, c, g, or t
  Peptide Sequence Number=SeqID_103671
cggaccagtcctcggacgcctccacggaccagctgctgcagggcaagaaggcggcgtccgagccggcggcggccgtgggccgcggtgaggaggaagcggaggcgcgccaaggtcgtcaagaacaaggaggagatcgagacccagcggatgacccacattgccgtcgagcgcaaccgacgccgccagatgaacgagtacctcgccgtgctccgctcgctcatgccgccgtcctacgcgcacaggggtgaccaggcatcgatcgttggtggcgcaatcaactacgtgagggagctggagcaactgctccaatcgctcgaggttcaaaagagcatcaagaacaaccggggccgctccagcacggacgcggccggcaactcctccccgttcgccggcttcttcagcttcccacagtactccacctcgccggctcacggcggtggctgcagctccacgagcctcggcagctcaagcaacacgagcagcagcaatgccaccaccaacagcgacgcgtccgtcgcggacatcgaggtnacgatggtggaaggccacgcgagcctcaaggtg

SEQ ID NO: 37698 - DNA, 437 bp, Setaria italica
  Peptide Sequence Number=SeqID_103672
atggccaccaccaccaccacccactgctcctcctcccacctcgctacttatcgtgtctgcgctgctcctgctccggcgccatagaggcgtacgcgcacgtcgattggtcgaggccgccgatcgagctcgagggtggggggagtcacgcagcaggaggagtggtagcagactgactgggtggtgagttttgaagcttgagcggcaggaggaggtggagacttttggctccgccggacccccgatcggagatggtgctggatctcaatgtggcgtcgccggaggactcgggcacgtcgagctcgtccgtcctcaactccggggacggcggcttccggttcggcctgctcgggagccccgtcgacgacgacgactgctccggcgagatagcgccgggcgcctcctcgggattcatgacgcggcagcttcttccccgcccc

SEQ ID NO: 37699 - DNA, 258 bp, Setaria italica
  Peptide Sequence Number=SeqID_103673
gcaaaaccttaagcctcaaggctcaagcaagcaatcccccatcgatcatgatggcttccctcccatccgtcttcctcagcgccgccttcctcctcgccgccgcggcctacatccgcagctccggcacggttggcagcagcaccgccacctccaccacgcacctccacttcttcatgcacgacgactacaccggcccgcgacccaccgccgcgcggatcgtctccggcaggtccctcctacccacgttggcgtcgtcca

SEQ ID NO: 37700 - DNA, 541 bp, Setaria italica
  Peptide Sequence Number=SeqID_103674
ccccccacggcctggtgaggtcttgaaagaaatgcctttgtaggaatcatggatccgtaggtggttaacatgaatatctgagattccacccgacatctcgctgccaaatgcaagagcagctccagaagatgatagcagatccaccctgttgatatgaatgttagaagtaggccgcccaaaggaaatgccatacttgtcccatccacttttcaatgagatggcttcatgactaacactaactgtgctgtcttcaatgcatacgtttgaacatgaatctggaactatgccatcagtcaatggagcatccagtgcagtcttaatcgtcacattgtgaacctttacattactgcagtacactggatgtatgctccaggctggtgaatttaagaatgtcaagtttgagatcacaattttttcagaatgcagaaactccagaagatgagggcgactatggttcagctcatgggagcgcagccactgccaccatactgatccctggccgtcaataactccattattcccggttatgacaacatcagtc

SEQ ID NO: 37701 - DNA, 1505 bp, Setaria italica
  Peptide Sequence Number=SeqID_103675
cctagctgtccacaaccccacttgattcttctgcctcagggatcatcatgcagcttataatccgagcctcgcggccatgagagggggagtgatatgattctttttttatgcatttattgggaaagaattgcgaaacgatcgcgatggaggctcaacgtcactggattgtacaaggactggaacaagaaatggaaggatggacagggtactctatatgtgattatgctattgcaatggcactgtacctagaaagggagaaacagatagaagagcttgaggatggatcactaagctctctgcaaggttgagggaagacagattgggagtacccagaaacatttgaacatgaccaggaacctgaagtagaatcagcaaccatcgagaaattgagatttgacaggcaaatagctgtaaatggggcgccatcaattcctgacaaaactccaacagttgagatgtttgtgccgaccaagttcttcatggtgatttgattgatcactggtagctgggatgggtcaaaactgtcatctgggtggcttgaacagttaccagtgaactcgatgccaatatggacatcttccattttaacatcagagacgaccacttcctttatgtaacccccacggcctggtgaggtcttgaaagaaatgcctttgtaggaatcatggatccgtaggtggttaacatgaatatctgagattccacccgacatctcgctgccaaatgcaagagcagctccagaagatgatagcagatccaccctgttgatatgaatgtttacgtttgaacatgaatctggaactatgccatcagtcaatggagcatccagtgcagtcttaatcgtcacattgtgaacctttacattactgcagtacactggatgtatgctccaggctggtgaatttaagaatgtcaagtttgagatcacaattttttcagaatgcagaaactccagaagatgagggcgactatggttcagctcatgggagcgcagccactgccaccatactgatccctggccgtcaataactccattattcccggttatgacaacatcagtcaagttgtatccatttattaagcttcgatgtctaggaccaggaagatctagcccttggccataagatggcaaaggttccacaatcggccactgcgacgagtcctttgagccgatgatgacggcgcctttctccaggtaaagggtgaggtgactggtgaggttgaagctgccggtgagccagcggcccttgggcacgtacagctgcgcaccgcccttgtcggcgaaggagcggacatagaacacggcgttctggaaggccaccgtgttgagggtcttgccgtccccgacggcgccgaactcggtgatggtgacgctgtgcggccgcgaccccggcggcgcctggtcccccagccgccgcaattcgccgcggaccgagccgagcgcgccggccagcaccaatgccaggacaactactagacccttcatgagtccgtctccctcccct

SEQ ID NO: 37702 - DNA, 433 bp, Setaria italica
  Peptide Sequence Number=SeqID_103676
tggacacaacagctgtttttacaccagcccttctcaatgcctggaaaacgcgtcctgcatctggatcacagagatgccaagcctagcaaaacattccacattttgtaagcttagcagacatacacctaaagaaggtggtctgaaaacatttagattacacactttatctcaccttttcagtcgtatagtactgatacagttcctcaaagtactgcagatctgagcagcctgtagaggaactgactatgtattgccaaaagggtcttccatcattgacatacctggagatactcagatacattaagactggaatttgagttgtagtccatgcagcagcatgatttttaaagatatgagatctggaggttgaataactttaattacatattcacatgcttgggcgtgtaaggtctcaggcttacagctcattagc

SEQ ID NO: 37703 - DNA, 1107 bp, Setaria italica
  misc_feature (1)..(37): n is a, c, g, or t
  Peptide Sequence Number=SeqID_103677
nnnnnnnnnnnnnnnnnnnnnnnnnnnnnnnnnnnnntttttttagttttttttttttgttaaacaggccgttaattggacactcaaatgtgtatgtacatatcagtagtattcgatactgaaaggcctgtcacaggactaactgctctcagttattccctggggaaatggaaaatatgtacaaggcgccggggcaacaaccaacaagggttgacattatgtacaaggaggcaggcaacatcttttttttttccattcttttcattgcagctcatgtgagatgactctgcagtcaactcgttatacctcaaccccgatcctctctgcaacctccttgaaggagtaaacatcgctgccccaaagccaggcatcacagcctgcatccctagctccccataaatcgttcctacggtcatccccaatatgcacagcttcttcaggtttcacgcccaacagctcacatgccttcaagaatattgttgggtttggcttttctgctgcaacctcagcagatatggcaactgcatcaaaccagtgatcgcatttcagggcttgcaaaagtggccgaagacgagtgtcaaagttggacacaacagctgtttttacaccagcccttctcaatgcctggaaaacgcgtcctgcatctggatcacagagatgccaagccttttcagtcgtatagtactgatacagttcctcaaagtactgcagatctgagcagcctgtagaggaactgactatgtattgccaaaagggtcttccatcattgacatacctgaggcgcgatttaccccatggttgcgcataagcccgccggtacctcatcaggatctcatcctctgagtagtccaccccatacttttggccgatcgttctgtatacctgcgccatgggctcggtgggggcgaggagcgtgccggcggcgtcgacgaggatggccttgtgcgtgatgtcgccgtagatggcgcgccggtagtcgtagtactcccgcgcgcctgcgcccatgatctcccacctcgcgaccgcggcggccaccgcggcggcggccgccgcccccgcgtccacggtcacctccgccgcggccgtcgcgagcagccgcctctcccc

SEQ ID NO: 37704 - DNA, 323 bp, Setaria italica
  Peptide Sequence Number=SeqID_103678
cgagcggggtgggaggatccgagcccgccggcgccggcgtcgacggcgcttgcgtgtctcagggcggacccggcggccaagcgccggaacacctcccggtcgtgcatccacgaggtcgctgtcccgaagagctacgaggcggccaaggacgaggcggtgcacgggacgctggcgaacccggagttcaacggggagatggccaagcagtacccgttcaagctagaccccttccagagcgtctccatcgcgtgcctggagaggaacgagtcggtgctcgtctccgcgcacacctccgcagggaagaccgtcgtcgccgagtacgg

SEQ ID NO: 37705 - DNA, 1097 bp, Setaria italica
  Peptide Sequence Number=SeqID_103679
ttttttttgttcatcgtgccacggtcctggcaaatatataatcagatacgtaccttgccaaaaaaaataagcgtgcaaattgcttggcgggtccatcatttattccttcacacaacaaaaactctctggcgatatatgatcaagtcagaaagaaactcgtaatcacgcggcaacagttgccctgcttgtcagtatacaactcttttgcagcatcagttctctaaaactctctgcagtgtcggtgaggccggcattcagaagagcgtcgaacagcctgttgcaggcggagatgtcgaactccggagctttggaccgctgccactggtcgacgatctccccagcgtccttcagccgctcgcacatcaggtaggaggagatcacgcagatgtagttccggctcgtcatccgctgagaagtcataagcatcgatttccatatgtcctttatcctctctaggttgcccaggccggcatgtagaaggacgaggaaatcgtaggttatccactccctctggctgatctttgcctcggcttccaccagtgaatttccagagccaacaagctgactggcgtcaacgtaaatagaggcaagtttccggtacagtgtccatccttctttggactttggatcctttgacatctcgtcgagaattcctttgaagcactcgagatccatggaagcagcagctgcactgacccggagattgtaggtgaagagatctggagaaacattttgcctttttagttcttcagcaatgacctgaactttatccagctccccgacagaaatgtacaaggtcatcatttcattgtaaaccaggacatccatagacaggtttgcatccttcattctgccaaacagcctttcagctttgtctgtcatctttgatcgggcataggaatgcagaagtgctgtataggcttgtagagatttagcttcaggtggaagcttctcaaagaaatcttcagccgcattggcaccaaaaactctggtaatcaagtcaatgcgcattccatagtcactctcagataaatcagattcgtgatgtgtcttcatccagtccgctacctcgagggcgtgcttgtaccggcggacgc

SEQ ID NO: 37706 - DNA, 292 bp, Setaria italica
  Peptide Sequence Number=SeqID_103680
taacttaaagggaactaagtaagaaggtaggtactgaaccctgacacttgacgtcttgagcaaggatgccttctttgagagtgatccggaccttgtcagtggagttgctgaaggaatcggcgaatctgatcgcctatctctgttgatgggtatagcagcctcagatggtggcacggaatgtgaccgctgtgctggtgatgctgaacgtgcccgctgtgaaggtgcacgggcaatcgatcgcaacttgctgaatgaagcctgcttctctttagctttttggttgggcactgaa

SEQ ID NO: 37707 - DNA, 643 bp, Setaria italica
  misc_feature (1)..(118): n is a, c, g, or t
  Peptide Sequence Number=SeqID_103681
nnnnnnnnnnnnnnnnnnnnnnnnnnnnnnnnnnnnnnnnnnnnnnnnnnnnnnnnnnnnnnnnnnnnnnnnnnnnnnnnnnnnnnnnnnnnnnnnnnnnnnnnnnnnnnnnnnnnnngttaacaagagaatgatagctacatatgaaaaaaaaagatctggtcattacaaaatcagtaatccacctgctgcaaaacactaggtgcgatacagttggctgttagcgaactagatacaaggggacagagactacgaccaagtaatagctagaacccctccacaaaaacatttcaggtgttaccttttgcctaaggatgttgtcgcctatgcatagagagtaataaggcctactagattttacaagtttctgccgtctccctgaaactttgcctcaaaccaccatacactaagaacagatcccagattccatctgcggcaatgctttcagtgctatccagtgataactgactgactgaaatcttgtccaccaacagcgaccagcgactcaataaagcttatttctgtggttgaagttttccgacagagtgcaggtacactgagacagacacaaccgtggatccaaggaagaatgcaagggataaatggaaagctcagtgcatggttcagaatcatcaaaaccgtg

SEQ ID NO: 37708 - DNA, 1721 bp, Setaria italica
  Peptide Sequence Number=SeqID_103682
tttttttaagtagtaattgtattagtcttactattattgtaaaaaaagtattcttggttcattacaaaatctgtatgccacctgcaaaacactaggtgcgatacagttggctgttagcgaactagatacaaggggacagagactacgaccaagtaatagctagaacccctccacaaaaacatttcaggtgttaccttttgcctaaggatgttgtcgcctatgcatagagagtaataaggcctactagattttacaagtttctgccgtctccctgaaactttgcctcaaaccaccatacactaagaacagatcccagattccatctgcggcaatgctttcagtgctatccagtgataactgactgactgaaatcttgtccaccaacagcgaccagcgactcaataaagcttatttctgtggttgaagttttccgacagagtgcaggtacactgagacagacacaaccgtggatccaaggaagaatgcaagggataaatggaagctaaacaaaaagacagatacaattgctgtcagaagcattgcaactgaagttgaataaaccttgactatattatcagcatatttcatcaccattgaaacagcaattccactcagtgcatggttcagaatcatcaaaaccgtgatgaatgaatacccatggaaaaagcctttattcatgactgcatcataatcctgaacacaaattgcaactaaattgaagatcaccccaaaaatgtatagccaaaagttctgcacgttgatgtttcttgacggacgttttttaatgatagcttctgtatataccccagcaaaaccacttaaaagagccatcacaattgccatcatccaaccttgaataggagtttgaagcacatggtcagatgaaggattgagttgagctgtcgtgcaaccagcacatagaagaacaaatgctgcccactggatttcacttaactttttcttcaaaatgatgcggtacaagacaccagtgctgatgatattcaggttcttcaagatctggtatgctggtgcgtccacataagcaaagatatagtactgcaataagttcttcaccatataaagaacagctggaatcggatatacactgacttcatcaaaagatgtggttaacctattatcatcagtaacaccatggcggttccatgtcctaaatagagcagctagtgatagaaggcattttaaagcctcgaccgaaaaattagctgttgtgacactatattcatactttccggctctttttgaccacacaattaatattgcctgagaacttgttagcagcgtcaatgcaagagtaacaacagactttagcttccaactagacttgccttttgcacctcctgcagaactgagaccactagcgtttgcgctagatagcgacctcccactgaggctttctacatccttctgagataaatcatcataactctcctgatccttcaccctcctgtactccatcgccgcctctccgcttcgttccggcttggaagcgcttgggatttgaggggtcgagggagagcgccgccgcgcgcggcgtgtggggaagccggtgtgtgggtccccgggccaaggtgacacgggcacgggagccgaggagcgtgtagtgtggtgtggactgtggagcagcacggcggagagccggcgagggctggaagcgtcgagtgtgcgtggcaaatctgtaaatttcctgggttcagtgatac

SEQ ID NO: 37709 - DNA, 701 bp, Setaria italica
  Peptide Sequence Number=SeqID_103683
cgttcagggagaagccgagaacgacgagcaagccgccgccgcatgcaatgcgagaccaccggaagagcttggaggcagcggcgtaccatgacgttcttgatctgaagcagctgctcgacctggctgagaaggaaggccgggtggctgtgtacgggagcaagaggaactctgacaccagcagcgtgagcagcttcagtagcagcagcagcagcagcacgatcagcatcagtagtgccagctccagcggcggcgcgagcccggagctcgcctcgacgtcgaagcgccggttcttgccatggatgcggaggagcagggacttcgacaagaggagcaccgagtcgctctcccaagaactgccgatcaagtgcatggacgacgatccggccggcagctgggagacgcgcgagttcacgagcagggacgcggagacgaagctgaggacgccggtgttcttcgcgtccatcgaccagcgcgacggcagcgccggcggggagagcgcgtgcacggcgctcgttgcggtgctcgccgcggcgctccacgccaaccacccggcgatgccgacgcggccggagctggacgcgctgatccgtgacggctcgtcggagtggcggagactctgcgacgacgaagcccacatggcgcggttcccgaaccggcacttcgacctcgagaccgtcctcgccgcccggacgcggcccatc

SEQ ID NO: 37710 - DNA, 443 bp, Setaria italica
  Peptide Sequence Number=SeqID_103684
cctcacccattgcaccgccgatatccaatttgcttcagcatctcttgtgaagtctttaaactatgttcgctcattagttgcaagacatattccaaaattgtcattccaaccaatagtccagtcagttgcctcaaagcaggcacttccttcactttcatcattttttgaataggtccttagtttctcagctaactccagaagttattagcaacagagaacatcttgaattgaaggaatgccatagttcatccgatttgatatcatcagctagcgataaagttgatgggggtgagcctggagatgatagcaaatatatttcctttgacattttaagctggcgatggcatgtgtatggcgaacggcaggcatcaacttctgccagggaaagtgtttttgtcggtcttcaagattttcatacacatggttttcttgaagttggtgct

SEQ ID NO: 37711 - DNA, 550 bp, Setaria italica
  Peptide Sequence Number=SeqID_103685
caatcaagagggttgacaccaccaacgctgatctaagcatgattatgttcgagtacttctgctgatttgttggcagcaactcttccaaactcatagccagtgggattatggttaatgcatatgtgattatacgttaaggacatgcaggcaaaccataatgaaatagtatgaaaacatattaaagcatgtatggtatccttacaaaaagaatcagcttgtattttagagcataaaaaatgaaccaaaatttgttttcattaaaatacacttcctctgttccattttgagactaactaaacctctttcaaggaaatagtttgcagacaaaggatatttggttattggatttgccacctccaaacagcaacctttgaaaccactgaattgtctggtaagttgagcgtgaactgagactctgtggcttctccaaacattttgtatcccatcactgcagcaccggagtacaaaacagtagacaacccaatgcaagtaaaaagaatcgaagggaactgattgcgattcttcaaagacaaatagatgtttgggaaca

SEQ ID NO: 37712 - DNA, 419 bp, Setaria italica
  Peptide Sequence Number=SeqID_103686
tgttcgagtacttctgctgatttgttggcagcaactcttccaaactcatagccagtgggattatggttaatgcatatttggttattggatttgccacctgcaataaacatggggaagtgattaattaattattatagaaggactggtagtaaaaaaaacttttcaaattagatgaaataaatttaagaccggtttgaaaattctttatcgtggtatataactgtatgttgcacagaacagaaacttgtggtatacttcgaaattaacagatagaccattagcatcattaactgtacaagtaatgaggctcaatgtttaggcaggaaacgattaccgttgtccaaacagcaacctttgaaaccactgaattgtctggtaagttgtagtcgttgtaacttgtagtacttcttgttggtctt

SEQ ID NO: 37713 - DNA, 265 bp, Setaria italica
  Peptide Sequence Number=SeqID_103687
aataattttgataaattgtcgctctccagtatcagatactcgatgcaacaggcatacagttccacatacaggattatctgcaacagggaagccacaaacaagaaaaaactcaagttagcacaaaggtattcctcaactacacatcatattgaaaatgcgcagaaactgaatcacagccattgtttataatctgaatgatattataccgagatggctatacgaccggtggtgccaaaggcggcatggccaatatctgggtatgtct

SEQ ID NO: 37714 - DNA, 1047 bp, Setaria italica
  misc_feature (1)..(67): n is a, c, g, or t
  Peptide Sequence Number=SeqID_103688
nnnnnnnnnnnnnnnnnnnnnnnnnnnnnnnnnnnnnnnnnnnnnnnnnnnnnnnnnnnnnnnnnnntattctccgaaaacagatcaacagaatacaaatcatatttctagtttgttatttatgcatgatacaacctactaaaagccttgctacatatttcttggtacactaacatgcaagcatttcacatacatgtcgtaaatttattatgcatcagactcgctaaattactgggtaaaaatttgtcttgtatatgcttttcgtgtatacggtgggtgactggaataactgcaacatgtacactgatcaggtgtaactctggattatcctggacagggacgagtatgtccccacacacgcgcagcaaaccccgaccgccatgatgaatgagcaagctgcgacctggtgccaagtcacctttgtcttaaggattgccagaaagcacgcgcaaggtagaatataggtcacaagcatcgtgagcaaagaaccaaccaaggccatcacaagtcctgtcaaagctcgaaaatagaggttagattgtggatggtgtaacgattgagccttaccaaatatgtctacaacttaccaaagaagggtacagatagagcaatgaggagggttgacaccacaagggctgatctaagcatcattatgtttgagtacttctgttgatttggcggcagcaactcctccaaactcatagacagtgggattatggttaatgcatatgtgattattcgttaaggacatctatatagtttgagaatgtaataaaatcccaaaaatataaagaaccagcacgtattttggagaatccatgtttaaattagctaaatatagctgcataaaagaatgctctgaaatctactgagcaaacagttatagaaacagactttctctgctccactttgagactacaccactttcaacaaaataattgacacaccaaggatatttggttattggatttgccaccaagtaaagagaattgaagggaactggttgcgattcttcagagaagaatagatgttcggaaacaccccatg

SEQ ID NO: 37715 - DNA, 240 bp, Setaria italica
  Peptide Sequence Number=SeqID_103689
gggagacatggaacagtgcagcacaatatatccatcagttcttcttccaggatatcatatttggtaacacgtagtgattgaagcccatgtttacccatcgcagcgagagatgacttaaaagcttcctcgtactgttccgtatcacaaccaagttgccatctgttaagcatatctatgccaagcttcttcagcttggtcaagtgtctaagcgcttccacctaattttatggagtactgatt

SEQ ID NO: 37716 - DNA, 719 bp, Setaria italica
  Peptide Sequence Number=SeqID_103690
aacccacaggaaatccttgccactgttgtcagggcctcggagacttccaagaaaccctgaggtatcttggaagtctccgaggacctctaattgcgggctccatgtaacgaggagccccctccccttcaccttgtcagagaaaccctgaggtatcttggaagtctccgaggccctgacaacccacaggaaatccttgccactgttgtagagcccctccgccacctcggccatttggcctgcaccgggcgcggcgaggctgccgaaggagacgtacacgacggagtggtcaggcctcgcgtcgagccaggccttgctttcctccgtcatcggagtgtagaggtggaacccgtgcgacacgtcgtcggggaggcggttgtcgaggtacgccgacggcacggttggtccgaccgtcttggcacaccatcgcgacgccatgtactcagcttcctcgatctccaggtcctgcaaatcaaacaacacctcggccatttttttcaaaaaaaaacccagcacagatggagggggtcaccggcatggactagcataattacctcgatctccaggtcatagaacgagttgacgaggacgtggtctgccacctcgtacccctggcactgctgcagcaccaggtcaaggtaggcgcggcagccgccgtccggctccgtgaggaacgtcgggaaatcggccggtcttcgtagttcccgttcgtactaaggtac

SEQ ID NO: 37717 - DNA, 1113 bp, Setaria italica
  Peptide Sequence Number=SeqID_103691
ttttttttttttctccaaaaattaacaggacctttatagatgtggacgttaaacattttattgtggtgttctcacaagaaaattgatgtaagtttgagggaatgacaaattaaggatttattgcatggcactatgtgtaaatggccatataaagcaccacagctataaactcccaaagcagggtacgcggatcttttatttctccaaatgttgtgtactgccatttatcacttcaatcggattttgctgaggaactccacgatgttgctgtccgagcttccaccttcactcatggcctttttcgccttctggctccaacctgtagcattcttcctgtattcctcgctactttctccttccatcacctgcctcacacacctctcaacttcctccttcctcactacacctttcccatctggttgcaacttcacgccaacccgccaaacatcctcaatgtacttggcgtttgtcggctgatccgaccattgtggcattgctaccatcggcacgccaatgcctagtgcctccatagtcgagttccacccacagtgcgtcacgaagcatccaaccgcagggtgtgctaggacctctaattgcgggctccatgtaacgaggagccccctccccttcaccttgtcagagaaaccctgaggtatcttggaagtctccgaggccctgacaacccacaggaaatccttgccactgttgtagagcccctccgccacctcggccatttggcctgcaccgggcgcggcgaggctgccgaaggagacgtacacgacggagtggtcaggcctcgcgtcgagccaggccttgctttcctccgtcatcggagtgtagaggtggaacccgtgcgacacgtcgtcggggaggcggttgtcgaggtacgccgacggcacggttggtccgaccgtcttggcacaccatcgcgacgccatgtactcagcttcctcgatctccaggtcatagaacgagttgacgaggacgtggtctgccacctcgtacccctggcactgctgcagcaccaggtcaaggtaggcgcggcagccgccgtccggctccgtgaggaacgtcgggaaatcggccggctcgagtcccgtcgacaggccgggc

SEQ ID NO: 37718 - DNA, 408 bp, Setaria italica
  Peptide Sequence Number=SeqID_103692
tccatggatgcatcccccttttgtgtgctctaccgcaagtgcatttcccttgtttgtgctctaacagctagtgcatctcacttgtgcatgttctaacgcctagcacatctcacttgtgacttgtgagtgtactaaagatttccttaggatcaaatgttgcacaaacaaataactaggtatggaagaagctcatatctcctacccagacactacaaaataaaatgcagaattgcaaattagttatgagtagaaaaatggtgttgcaaagccgatgaaattgagcaattgtatgcttttgatcatcagggtatattattccttagcaaatatgaaaccggtcacaaattaaagaacaaagatatcaaagttctagcatactgcattctacataagatcaagcaaacctgg

SEQ ID NO: 37719 - DNA, 848 bp, Setaria italica
  Peptide Sequence Number=SeqID_103693
tttttttttttttttttttctttctcaaaaagaatctcaatatatggtcaatgctacacggattatttacaacagtaacctctatacatatttacagccatggcgttatatcataatatatgtaccagccacgatgaactaagtatgtgtacatcgtcaaaacgacgaagaaatgaatgagtaggaacaaaaagaacgcaggtgcagatgccatcccgagcaaagcaaacctatgtccaccgcgtgccctggtgcagacgtgtgctctgctcgcgcgcaacaaacggcctagagcgcgcggcggcacagcgggcaggacgcgtgccggagcagccaggcgtcgatgcacggcaggtggaacgtgtgcccgcactccggcaagctccgcgccgtctcgccggcctcgaagtcctggaggcagacggagcagccgacccggtcgccggtgtcggcgtccagggcggtgtgctcggtgaaggtcgtgacggggagcgcctcgatggcgtcggccggcatgcccttggcgccggcggcgcccgtctcgaacacgtccgccaatgttggcgcaatctccctgaacggtgagtccacggcgttcatctgcgcgcgcggtcagaacacaagaatcgcgttaagtttcaatttggctgaagacttgagagcttgatcgatcgaacagatgatcagcgcatcgcgtacctggctgtcgacggcgctctgcacggcggggtcaaccttctcacggacgaggcgcccggtcaggaggctccagatcacgtcaagctgatgatgaagaaatcgatcagcacaaatttcttcaattattttctgagtcgattgtattggat

SEQ ID NO: 37720 - DNA, 246 bp, Setaria italica
  Peptide Sequence Number=SeqID_103694
caatattattcatcttcgatgctttcctagcaatatgttatgcacccagtgaagtttcacttagatgcttctcttttctgtaatttatactgatgatgtgcatacccgtgtgctttgtgtaggtgagccaaagatctggtttcatccctggaagaaacagaaggtcacgaatgactccgtactgcttagacctacgacacctctgccaattacctactcaaagtgttaatgttccaaatatccgac

SEQ ID NO: 37721 - DNA, 504 bp, Setaria italica
  Peptide Sequence Number=SeqID_103695
cgaataactgtgctggctccgcgttaccgcgccgtcgccgtcaccgccgcaggacaagggcgcgcacccgtggcgctccggcgatccccacgctgccccgttgcatcagtgggattaagaaggtgtctagcagctgcgcgcgtccgcgctccccgccgactgctcggcggcgccgcgagggtgccaccccctgcgcagctggttctttaataatctgacgcttacctgtaatatgtcatatcctggggaaatgacaggaagcaatattatccgtcttcaatgctttcctagcaatatggtaaaccaacgatctggtttcatccctgcaagaaatagaaggtcacgaatgaccaggcactgcttagacccacgacacctttgcagattacctactcaaagggttaatgttccaaatatccgaccactgcctactcccaatgctgcagtatccagggatattaataccccattggttgaggaatctgttactgaggtggaatcgac

SEQ ID NO: 37722 - DNA, 447 bp, Setaria italica
  Peptide Sequence Number=SeqID_103696
gcaaagataccctactccgccgccgctcgtctcgatactgtgctggctccgcgttaccgcgccgtcgccgtcaccgccgcaggacaagggcgcgcacccgtggcgctccggcgatccccacgctgccccgttgcatcagtgggattaagaaggtgtctagcagctgcgcgcgtccgcgctccccgccgactgctcggcggcgccgcgagggtgcccaccccctgcgcagctggttcaagcttactgagggtctcagcgatgttcccctccttgccagaaagaggagctggatttttaaggttgttaatagatgccatcgtgatgttttggtgtatggtcctttctcctttgtggagtaccactccatcgtcacttgtttgtcgtccatatattcagttctgtctgaaacaactgccgtttagcttttgtaactatggtaaactggtc

SEQ ID NO: 37723 - DNA, 362 bp, Setaria italica
  Peptide Sequence Number=SeqID_103697
cgaagtacatcgagttaaccagctaatgctccggatttgctggattttgtgaatgatctcgagtttcacataaccactgtctcaagcatgtcctgcgctcaagcagtcgcaccttctacaatagcaatgggaactcctgggtttatggacttcagggtgcagcctctgtcaacactcttgacctacagttgccagaacacaagcgatggaccatctattacgctcaagtgcaatggttgccgaatccctccaagagaccattatgtatcctggctaatttgttgacctgccaaggcaaccagctgccgctgttggcttccagtttaacctgactgcaaagcaacatggagattaacagttga

SEQ ID NO: 37724 - DNA, 292 bp, Setaria italica
  Peptide Sequence Number=SeqID_103698
tagtcagtagcgattctgtaactagacaggcttcccgttcagcttcgggaaggggtcttgtttgctgaggacaaggaccttgctcttgtgagcaaagtaaccctttatgagattcttgtatataaggcatgccatgatacactccacctcatccacatccatgtcgatttcaagccatttcagagcttttacacaacgtctagcttaatttgatgtgccttggctggttccttctgcctctgaatgatatggattttctgactaatctctgatagacctgaagttcaagttt

SEQ ID NO: 37725 - DNA, 478 bp, Setaria italica
  Peptide Sequence Number=SeqID_103699
cttgtctgagcctggtcaggctagcatatctacgcgtcttctagatggctgggcctttggcttctcatcttctggatccttatcttccggtcaatgtatcctcggctcagacaagcatgcaaataaatgaacaactctaacaatcaatttctagcaatcaatgtacgactaaagaagatggaaaaggatggttcatggacatttgggaatcatcagattctaaggataatccccggataaaggatgaatgttttattaattatttagaaataattaatggataaatttgttgaatttctaagagaatttaataatataagaatggatttcctaggatttagacgggtggcataatggctaggtttggacgatatttggggttttcagttggacaacataatggctagatgggtcgatatatgtggtttgaatggggcagcatttcagcttggatttggatgatatttgaggttttcag

SEQ ID NO: 37726 - DNA, 276 bp, Setaria italica
  Peptide Sequence Number=SeqID_103700
cccggctccgctgctcccatggccgcgcctacctccccggcgagccccgccgcgggcctgaaggcgcccctcccgaccatgggagacatcatggcggcgtcgcgtgcgcagggcctgcgcgtgcgcctgcgcacggtcggccccttcttccgcgtcacggccacctgcggtgagggggaggacgcggtggagcttggccgcgccgagggcggcgttaggccatggcccggcggcgccgtgctgcacctcgactccatgcggatgacgcgcgccacg

SEQ ID NO: 37727 - DNA, 944 bp, Setaria italica
  Peptide Sequence Number=SeqID_103701
tttctagaggcaacagatctcgaacgtactatcatgaaagtagcaagaactacagttatgttccaaaggaatctcattcttacaatgataacaccaagaatgcccgacatgctttgccggataatgggaagaacagagtttcaaaaccgtctcgtgcccactatgatgatgtcaaaaatcatgacattgttcccaaagaatctcgtacttactatggtgatgctaaaagtcaaaagaatacaccaagagtagttcgaggaagaggctccaagcgctaccaaccacgtttgagaagcaatgctgatatatcttcaggacaaaataataaatctcaaggtcttgaagccacttcatcaaataccaacttgggacaaaaccaagcccaaacatcaaattctcaacctgaaccagttcatccaattaagcaaaccattgcctcaaacttgaattcggcttcaccaccattttacccttctcgatcgtccaatcaagaatttccagttagtcaaggagggaatgcacaacttagcagtaccctattaagaggaaaggcctttgtaccatctgttgggcatgttgaagctgctatgaagggaatgaatagacctgcattgtcctcaaatggtccatttcctgcatttcctgtatctagtaatcaagccaacagagattatgttcagcctgcccatccagttgttcaacaaaatccagttcaatcaccttctcaagctgtgcccaggatgcctgcccagatgttcggtgcaagattcagcaatagcaataaaatatcacctgtacaacctacaatttcgagtgatgacacagaactttcttcacctagtggatcaaaaaaatttgattctcgattaacagttggacaacctggtgatcaaggagaagagcgtacttcttttacatatggtggaactcatgttcttggggct

SEQ ID NO: 37728 - DNA, 244 bp, Setaria italica
  Peptide Sequence Number=SeqID_103702
cagcgtgtataatcttaaacctggctatactgcacactgcagttgacattgtgctgtagttatagagctacatgcatttttcttcccgaaacataggctcatacacctgctacaagcatataaaataaaaatgaacggtccagaataccttctgatcctcaagaggcgtgccttttacagcaaccaatgcattaataggaacgctctcgtgggtgtgtaggcaaggtggccagtgtgtgcaaca

SEQ ID NO: 37729 - DNA, 584 bp, Setaria italica
  Peptide Sequence Number=SeqID_103703
ggaagcagagcgcttgttctggcatggagaaccgtacacggcctgctgaaagcctcaccattgcctttggcatcacgatccgagcagtggcgatcatgcggatcatttcccagatttccacaggctgatgtagaacattggttagcatcccaagaaaaaaaagaatcagcaagtgtaatcctaaatctggctgtactgcatgaagttaacaattctaagctatatattatatagattatagatacatgcctttttctcatttgtgaaacggaggctcattcaccagctacacgcatataagatacaaaaaacaaggaacagtacagaataccttctgatccccaagaggcgtgccttttacagcaaccaatgcattaataggaacgctctctgggtgtgcaggcaaggtggccagtgtatgcaacaaccctacacggtcctcctctgcttctccaagaccaattattccacctgaacaaaagaatgatgcaccaaatttcatattgaagacatgccgaaacacttattagctagaaacaccagtgacttcagagaattacctgagcagatgcttattccagctt

SEQ ID NO: 37730 - DNA, 479 bp, Setaria italica
  Peptide Sequence Number=SeqID_103704
tgagccccgtggaagaggaggtcgaggagcggggagtcgtagacggcctggatctcgggtcggctccagtcgttccgcggcccgtcccgtatcgaccgctccgcctccgccgcggccgccgacgacgatgccgcagtcggggccgaggagaacccggcggcaagcggcgggcggaggctggagcgtaggctgcgcgccagcagtatcatggtcatgccttgcgcactggagatatcaacttgaggcgtggtggtgctcttcggctcggccggtgagcgggacgacaaggggcggagctaccatgctgctttccacttccaccccatgcggtcgtctgtcgtctcgttagcctggatggagcaggaccccgaatggaggaggggcgtggccgcgtggccggcccggagtggacgagggctgagggcgcgccgccgcttgagaccgagcagcggtgaggtcgggacgaagagacgggcagg

SEQ ID NO: 37731 - DNA, 1546 bp, Setaria italica
  misc_feature (1)..(75): n is a, c, g, or t
  Peptide Sequence Number=SeqID_103705
nnnnnnnnnnnnnnnnnnnnnnnnnnnnnnnnnnnnnnnnnnnnnnnnnnnnnnnnnnnnnnnnnnnnnnnnnnngagagaaattagagatggaagctggctgaaatacatcatatattggcattccctaattatgtctaatcactctcaagcgactaaacaatgtagtggtttctacaatacagtgtagtggtttctacaatacagtgctctagctagctaacactactgctagtttcgcactaacttggatacagagaatcggcaacgatggtctacattgaagcggcttgctcagacctctcggtgtcagcaggagctggtgcctcttcgtcgccaaagcttggggccttgggaattagaccaaggatcttgaacatagcctggtccgcatcaaagtcgttgttcgctgttgtgagaagcttctcaccggcaaagattgagttggccccagcaaggaagcagagcgcttgttctggcatggagaaccgtacacggcctgctgaaagcctcaccattgcctttggcatcacgatccgagcagtggcgatcatgcggatcatttcccagatttccacaggcttctgatccccaagaggcgtgccttttacagcaaccaatgcattaataggaacgctctctgggtgtgcaggcaaggtggccagtgtatgcaacaaccctacacggtcctcctctgcttctccaagaccaattattccacctgagcagatgcttattccagcttcacggacgtgctgaagagtctgcagtctatcatcatatgatcttgtggtaataatgttgggatagtactctcttgatgtgtctaggttatgattatatgctgtgagtccagccttcttgagttcttcagcttgctgtttctctatcatacctagcgtgcaacagacctccatgcccataccccttatttccttgacatattcaagaatctggttgaaatttgttttcctgccgatggtttctctccatgcagctcccatgcaaaaacgggtgctcccggcctcttttgcctttttcgctgcttctaagacagcatctttgttcatcaatttttgtgccttcaatccagtatcgtatcttgatgactgagggcagtaagaacaatcttcactgcacccaccagtctttattgaaagaagtgtgcattgctgcacttctctgaatctgtgaacatgtctgtggacctgagccccgtggaagaggaggtcgaggagcggggagtcgtagacggcctggatctcgggccgactccagtcgttccgcggcccttcccgtatcgtccgctccgcctccgccgctgccgccgatgccgcggacggggccgaggagaacgccgccgccgccccggcaagccgcgggtggaggatggagcgcaagctgcgccccgccgccagcagcatcattgccatgcctggtgggtggtcgacgccggcaaagggcccggccgaggcggggcgaatggcaccgccgctcgcccagtcgtcgccgcctggaaaggaagagcgagagagaagagaggcgg

SEQ ID NO: 37732 - DNA, 556 bp, Setaria italica
  Peptide Sequence Number=SeqID_103706
acagttttatttgccacatgttaatcaagataaacactggttgcattagcttatttagttatccggaggctgaaagtttactacatgattggtattcaagttttcttgagttggattctttataactctttccttgttagtcagaattgctgtccataagtggccatgtgaatgacagtagtttctcatgttggatctctgtagatacttgtgtgggatgtagtagtttcgtagttatttttttatctgtagtacttgctgggtaaattagggatgacaattttacccgcgggcatggataccgcgggtttcccgacgggcaagggtatgggtatgaattttcacccgcgggtaaaaacccataccctcgcccgcgggtaggacactggtatccaaccttacccgcaggtacctatcgggcacccgaaatacaactattattaccttgtcatctcacgtcttttataatgtttatgtatttatgtattattctcatgtgattgtgttaactacaaaaactaatacgtgagactggatttactttgaactatgagga

SEQ ID NO: 37733 - DNA, 1016 bp, Setaria italica
  Peptide Sequence Number=SeqID_103707
gacgactccaaagatcagctgcacctggataacagcattcctctgtctcctcagtggctctacgccaaaccggctgatggaaagatttcactgcctcatgggtcctcctttgagcctgctgaaagggaagtgaggatgctggaaggaactgttgataggaaagaacgaaggcggaatatatttgatgctgacagtagtcttcgttggcttgaagaggagagggaaacaagcttgcttgggaggagggagcgcaagaaggaagtggagcgggatgttgataaccgtaaaattgatcgtcgatctgacaatgtttctgcaagggataacactgattcacgtgcacctcctgcatctgataggtggaatgatggttccacccgtaccttggggaatgagggtcgccgtgatggaaaatggtcaacaagatggggacctgatgacaaggagaaggactctaggtcagaaaagaaggctgacgcagaaaaggatgaaacacatgctgaaaagcagacatttacaggaaggcttctgtctgagtctgattcccgtgataaatggaggcctcgtcaccgtcaggaaagtcattctgccgggactgcaacataccgcgctgctccaggctttggatcggagaaagggcgtgtaaaggactcaaatgttggctttgcccctggaagaggcaggggaaacccaaactcagtcacatccttcagccggccatcatctgcaggaccaattggtgctccagctgtgcacgggaagtctgcaaaagctgctggtagtttccgctacccaagagggaagcttctggatatatacaggcaaaaaaatatgatgtcatcctttgatgatgctaaactggaggaaattccttccatcacactctctacttctgcaaaaccactagcctttgttgcaccggatactgttgaagaggctcttctggaagatattagaaagggtaaagtcattagcagcgagggaagcaatgcaactggaaacaagaaagagagggc

SEQ ID NO: 37734 - DNA, 495 bp, Setaria italica
  Peptide Sequence Number=SeqID_103708
aataggttgcagagccaggaaagaacgaacgatacgaagtggacacagatgcatttgtctctatattggctctgcaacctattacacaactcgcatctgtccctattattgttgaggcttctaactcaaccacctgcgaacttctgaaatcaatcaatggcttaaatgtgcagcctgtggagatggttgcttctaaattgtttgtgcagtgctctaggcaaaagggccttctcaaaatatacaagcacttgcttaaccagcgcagtaatattcttatcttactgacatgtatttgttaataacaacttatgcagctatttttcacatctgggagcaaaactgtggtactcaggtctttcatgctttactttttttttcccattcatctttcatcttatggtttagctgctttagcacaatttctacttcaaccgcctgaaaatcattacactcgtacatagcggtcgaatttatttagccatgttttaatatcgc

SEQ ID NO: 37735 - DNA, 485 bp, Setaria italica
  misc_feature (1)..(1): n is a, c, g, or t
  misc_feature (23)..(23): n is a, c, g, or t
  Peptide Sequence Number=SeqID_103709
ngaaacagggtgaagagctactntttaaattgcagaacatccgcgaaatagcgtttaaagcatccacaaattcaaggagctaatctggaaggtatgctatttacaacgtgactcgtcacactttccacccatgttacgcgaatcactatcgcgggcagattcaacgaatctaacaaaaacacccgtgcttgttgcattacgaactttgtgttgactttgatgcaccgagatggtgcagcatgcagatcgaaggacgggtcaaaactactgccgccgaaagacatgctcctcgccggtgtcgtggttgacgtgccggatccaccggccggtcccccgggcgccgccccggctatgcaggctagcccccttacgacgccgacgtggagaacctcgacgcccttgccgatgggcaggtagacggagcgcacgacccttgcccggccgccatggacgccgcggccagcgccgtggcaccgcgccgcctt

SEQ ID NO: 37736 - DNA, 265 bp, Setaria italica
  Peptide Sequence Number=SeqID_103710
gccgttcgaggccgacgaccagtcggcgctcatctacctgctcgtgacgcagcggagcaggtggggcgacaagacgttcctggagagcacatacgagctcaacggtttctgggaggggatcgtggacaggtacgaggagctccggcggaaggggcggcctggcgacctcggcgacggccggtggccgctcgtgacgcacttcgtcgggtgcaagccgtgccggcggtacgcggacagcctacccggcggaccgatgccggcgcgg

SEQ ID NO: 37737 - DNA, 499 bp, Setaria italica
  Peptide Sequence Number=SeqID_103711
agactagctcaatcatgctctttgcagagcaaaagccggttatcatcacattcttgaggcggccatggcactgttctgaaaggcaccgtggacgtgagaaatcaccacctgaatcttcaatgatagaatcaggccttatggtcggcattgcaatacgtaagacgaaggtctccaatgcaggagaagcatcaaggaaagagaccagtgagtaaaaatcatagtccgagggaaatattagtgcgcacaacactatctccaagtacttgagctggagaaacttacaagatgccattggtgtattgcctgtctcagctcttgttgatagaacaagagttcgaacatttggcacgatcaatggaagtttggtctagcataatacagggcaccaggtgaatggtcatgacggaagtcaactctcctgacatgcaatgcatcctccaactgaggtacatagttcgggtcccctgcatagtaagaaaagtggagagtcgtttggggc

SEQ ID NO: 37738 - DNA, 510 bp, Setaria italica
  Peptide Sequence Number=SeqID_103712
ctatctccaagtacttgagctggatgaatttgccaaacacctttggtgtattgactgtctgaagaaataaatgtcccccgaagattaattgtggactgagtaattgagtattgtaaacataaaactattattctaccatcagtttcatttccagaacaatgaacttattgggatggataaaactgacctcatcacttgttgatagcacaagagtttggagatttggcgcgatgaatggaaatttggtactagcataatatagcgcatcaggtgaaaagtcacggaaaaaacttatttttctcacttgcaatgcttcgccaagcaagatatgtattgggcgcccagcaaagaagaaagtggagaggttaggggcattgctgtcaatcatttccagcttactgcaacccaccaaatgcaggatatcaagcttctgcagcagacaaggtatcttcaagcaaattatatcattgcagttgctaagccttagttgctccacagcacaagaattgg

SEQ ID NO: 37739 - DNA, 834 bp, Setaria italica
  Peptide Sequence Number=SeqID_103713
cttgtcaagtttgataagtgcctgcagctgggtaaggaggcacttatcaaacttgacaagcctcctatcgtacccacgggtagtgtctagtgtaaggcacgccagtgcctttgatttctcgataatacagatcgtgagctcaatcatgctcttcgcagagcaaaagccggttatcatcacattcttgaggttgtcatggcactgttcttgaaggcactgtggacgtgagtagccatttgagtcttcaataactgaatctcgccttattgtcggctgcgcaatccgtacaatgagagactccaaggcaggagaagcatcaagaaaagaaataagagagcagagatcatagtcttgggagaacgttgatgtagagacccatatctccaagtacttgagctggatgaatttgccaaacacctttggtgtattgactgtctcatcacttgttgatagcacaagagtttggagatttggcgcgatgaatggaaatttggtactagcataatatagcgcatcaggtgaatagtcacggaaaaaacttatttttctcacttgcaatgcttcgccaagcaagatatgtattgggcgcccagcaaagaagaaagtggagaggttaggggcattgctgtcaatcatttccagcttactgcaacccaccacatccaggatatcaagcttctgcagcagacaaggtatcttcaagcaaattatatcattgcagttgctaagccttagttcctccacagcacaagaattggatagaaaaccatatagttcttctccagtaatgtgtactgaatgcaattccaaatttgtcaggctactcatataacc

SEQ ID NO: 37740 - DNA, 2462 bp, Setaria italica
  Peptide Sequence Number=SeqID_103714
ttttttttttttgtttttttttttttttttacctacaactttaacacatgagatagatttatttacatggagtttcagtaaataaatttatcggacccacaaaatattgaaatattgcagatttcccccctgaacttggttatttggaaaacttctccaacatgctaaattaaaaaaaagatttgacaaccatactttctggcagaattacggagattagcactagctaaacgagggagagtagcaaagctatgtgaatcatagcttaagaaagggaaaaacacctaacatttgtcaccatatacacttgctacatggctcgatgactttcaggttcacagctgggggcactctcccctcgatgtatctctgaatggcaacgcgggcccttttagcctccacaagtgcctccttacccagctgcaggcacttatcaaacttgacaagcctcctatcgtacccacgggtagtgtctagtgtaaggcacgccagtgcctttgttttctcgataatacagatcgtgagctcaatcatgctcttcgcagagcaaaagccggttatcatcacattcttgaggttgtcatggcactgttcttgaaggcactgtggacgtgagtagccatttgagtcttcaataactgaatctcgccttattgtcggctgcgcaatccgtacaataagagactccaaggcaggagaagcatcaagaaaagaaataagagagcagagatcatagtcttgggaaaactttaatgtagagaccactatctccaagtacttgagctggatgaatttgccaaacacctttggtgtattgactgtctgaagaaataaatgtcccccgaagattaattgtggactcatcacttgttgatagcacaagagtttggagatttggcgcgatgaatggaaatttggtactagcataatatagcgcatcaggtgaatagtcacggaaaaaacttatttttctcacttgcaatgcttcgccaagcaagatatgtattgggcgcccagcaaagaagaaagtggagaggttaggggcattgctgtcaatcatttccagcttactgcaacccaccacatccaggatatcaagcttctgcagcagacaaggtatcttcaagcaaattatatcattgcagttggtaagccttagttgctccacagcacaagaattggatagaaaaccatatagttcctctccagtaatgtgtactgaatgcaattccaaatttgtcaggctactcatataaccaacttgggctgcacagtgaaaagaacaatccccaagcacaaaagtctggatggagcttcttatctccctactaaataaaagtaatcctgggaagttgtactttatcccacaactaaacactgatagatagatttctttgatcccaggtgtaatggcacattgaagccagcggtcaacataactaggttggagattcgaacaagggtaggtttccattacaaacctcttcactcccatgctagagtgattctgcataatgtggtcaactctacatatgaaatccctttttatttcatcatcattagatgtgttttcattaatccctagagaaccaacagaaataatgagatttggaaagcatctccaagaacgcagaaaaccacgagacacgcaggcggcctgagcagcatctcgcaatggcatgagggcgtgtatttgatgaagaatgtcctctggaagctggacctgtgatcccattgtttcgacgcaatgcgaaatatctccttctagactaggcgataccattatttgagatgccgaacaatttgatccatcacgagttatctggacttgaggctgcccctcgacggacagagccttcatctgctccagtatccccatgtccgtcgccccaacaatcaagccaagtctccgcaccctatggctcctcgccccctctgccgctcgtgcagcaatcacgggtcaggtttctgccgtgagaatcagtacgccacggtagcagggatatgtggagctgggtgaatctttatggtgctcggttaccgagtccggtgccagaacggcagctccaatgtggatgcaaaacgaatcgaggggataataaacaaggaaaggttcgatttaggcactagagcaatcgaaccgattaagttaaaaaaaatatgagccttccctggaaaccgccgccctggctggaagccgcggaccagcggccgccaccgaatcgacctctcgacgtcgagatgtcgcggaggagggcctcgtccggccgtctctctcagatatggcgacggcagagcaccggcggcggttgggagtgcagggaggccacggagcacgagcggcaaaggatctaggctccacccgcggttgggagtgcggagttgcgtttgcagcgacggatttcgcggcggcgggagggagatgaaatgcgacggacagggaggggatcggatcggatcgg

SEQ ID NO: 37741 - DNA, 189 bp, Setaria italica
  Peptide Sequence Number=SeqID_103715
gggacttaggaaaaagaggaattgagctgatgaaagatgttactatctggatagacttcaaagcactccaacacaatgtcgaatacacgatttgggtccagatcaaaatgaccgatcaatgactttataatgctgattgtaactgaagaagaattctggcaagccagatctgagccaacttgacaaagg

SEQ ID NO: 37742 - DNA, 371 bp, Setaria italica
  Peptide Sequence Number=SeqID_103716
ggttttgggacaacgattgaagaaacgtgacaggtggttttgaaaaagggtgaggtggaggtggtggagatggaggcggtgcatgtcaagatggtggaggtgtaggtgtctcagagaggaggtgtgatggaaatagaaggatcaggaatggacgcggaaggaagtgacatcacccgtggatgaaataggaggaagacaaaaaagatgtggactctgggagaatatgagggttgtggagaggggttataaaaagaaaggacggtcctcaacaaaggtcacataacgatagatacgtatgcgacgagaagaaggatcatagcagcgataacctttatgcttaggactataccccagaaaaacacactcaacag

SEQ ID NO: 37743 - DNA, 966 bp, Setaria italica
  Peptide Sequence Number=SeqID_103717
tgggtcggggggggatggccccacgggtatagtagggggagctggtgcgccctccgggtgcctgagaaaacgatgttcggccgtacgaataacgttggttttgacccgttttcgaggtattcggggtgtactccctcggccgcgctgcggccggactgtggccgctcatgcggccgtggccggccaagccgtggctgcagctcaagtgggaaggcttcttagctggctgcggccggccgttggtggcctgcggccgcctgggttgtggttgcgctagccgttggctggccgcgaccgccccaggtgggctgcggccggccatgatggaagtgatgaggtgtgtgcttgtaatatgcactgaaaacgggtgttctcacgctctgtggaccttcggccgccttcctcacaagtagactcgccatgcctagcgtggtgggatgctttggatcgcttgaccgtcgcgctacgctggcgtatgagttgtcttggacctgtgactgcttggaggccccccgccctagtgcggccgactcccggcgccagtgtcccttcagttgtgtgggcatcgtgctcgcgcctatgacgagtgcttgcgtgctgctacccgtgctacgggaagttgcattcgctaccggttgccttcgttgtgcccaccctctgggtgaggcacttcggttatagagcacttgcggcgtcacctcgtggtaccagctacatcggttggcaccaccaaggtcacctcgcttgtgctcttggtctcggatggagctaacgatatagggtgaggctgcttcggcgccttgatccttgaaaattcggtaccttcggaaaaacgactaccggcccagccaacgcctcgtgctgaagctggcgccggtttgtcgaggtcagcataacattaatcaccggtagaacttcattgagccctgccaaaacttaatacagatccatctggagttttgttgg

SEQ ID NO: 37744 - DNA, 447 bp, Setaria italica
  Peptide Sequence Number=SeqID_103718
aaaatactaccttcaaaggtgaagtccattcatgagatacatatattaatgtaagatcactacaacaatatctattgttccaaaataatgattagtttcctagtataagggtggtttgatactttgtgagtgttaagagagccctctataaggaggtgtgttgtaatcgtacattgaaactgtgatatagaaaattgtatttccatggccctgatctccacctttctatgcttctacactttgtactaaaatatctcctttttgttaaactgaattgaactggagttcattgttcctcctgtgaggtctaacttctgtaaccagattctgttggagattttacacaacctgtatgcgccctcttgaacatttactacagggaagctggcgctccttaaaatataataacttgggctccatatctttatgcagcaaagttgcggtcct

SEQ ID NO: 37745 - DNA, 363 bp, Setaria italica
  Peptide Sequence Number=SeqID_103719
gcggttgattagttgttcgtgatggtggtggtggaactgagacgcgcgcgcgtgcgtatatatagcaaggattcggacaccagggtgaggacatgcgagcttcacgggctatgtgtggtggcaatggcatgttcgtcatccgagggaggtttgaattcttttccagcgctatctgtatcgatgcgtcgaggacacccttgggccttggcgtaccaaacttcactagaactttctcattgataattaacgtgctgcctcctttattcccttaataaattgagccatggacttgatcatacttgctgtgcagcttccccgacaaacggaaacgctgtacgctgcgccattcttgcctgtcctggc

SEQ ID NO: 37746 - DNA, 434 bp, Setaria italica
  Peptide Sequence Number=SeqID_103720
gttttttttttttttttgtttctataagctcacaaaactattcttctcattcaattaacttcatagtagtactactacaatgcctcttgttttgcataacaagtaccgtgtttcagaagatggaaagctttataatgcaacagattatacaaatcaaaggcacgaactatgcaccggttatcttgtcaacaaaaaccacaagcatggcacaagatgacctggtataatgaatcttttgtagcttgctttctttcttctgatgatctttgggatttcaggaatgacttcatcaggaaatgtgccacagatcgaccatcacattagccgtatggatgacggtcctgtgacagcagcaacttctgagccttctgtgtttccgatttatacaagcctttgagctccttctttgcgatccgtgcttctctcttctcttc

SEQ ID NO: 37747 - DNA, 358 bp, Setaria italica
  Peptide Sequence Number=SeqID_103721
tgaatctattgaccgaaaattgtctagagaagaattatcagaggaagattatgctgagatttccctctctaaagagactgaaggaagagaagcagatcagaaatgagctgaaaaaaaggatggaactggagagaatggctgcatggaaaaatcggttggaagaatttgaaagtggccatcttcctttcatgtgcctgcaatataaagataaggattcagttcaccacactatccctgctgtatttattggaaacctcaactcgtttgctgatcaaaagattgcgaacatggtggaagaagattcacttggttcaggcaagcataaagctgatactggggaacaactttattgcccatc

SEQ ID NO: 37748 - DNA, 279 bp, Setaria italica
  Peptide Sequence Number=SeqID_103722
catcctttctcgcaagctccaccgaactccgacgaaccccacccagtccaccactcaggctcgtcggaagcgacaagcgatcacctcacttcctcacctcgatgatgcttccgctccgcctcctcctcctcctcgtcatcggcctcctccccgcggcggcgtgggccctggcgccgccccgcttcccggggccccaaccccgcgcgcggccgggagctaatgggatggggggctacgagtacgagacccggtacttccggcagcggctggaccatttca

SEQ ID NO: 37749 - DNA, 699 bp, Setaria italica
  misc_feature (679)..(699): n is a, c, g, or t
  Peptide Sequence Number=SeqID_103723
acaacggttcacagacacggttgagataacatccgcagccggccagcaatggcatccaagtcatccataggttccccggcatccctgttcgtcgccgtgactctcatgctcgcggcttccaagcaagcccaagcatggccaccagcaccggttccgcggtctgcaccgacacctgctccgacgcctgtaccgacaccttcaccggcgccatcccaagctttctgtcctcccggtttcaaaaacttactcgagctgctaaaagccattccagagtatgctgaaagaggcatcgttctgagtcctagcatttactctccgagcagcggtggccctggtatcgtcatcgcaccacgcacttgcgtgtgctatgctcccaccatcatcggcttagtctttggccccatcgaatgcgtgggtgcccccgcctgaacgtgagcttgcacgcaaatgaacctagagcaacacacctgtgtgcacctgtgttgcgcagctgtttacttaccagtaccactaccgtgcttatagtatgaataatttgtcatgcgttcatgtgttgacagcaagaagcatcgacgtgtttgttgtctgacttgtaacacatgttcatggtggttgtgtcggtgcccaaaataccaaatatacgtatattattgaaagcacaaataagtaaaaaaaaaannnnnnnnnnnnnnnnnnnnn

SEQ ID NO: 37750 - DNA, 255 bp, Setaria italica
  Peptide Sequence Number=SeqID_103724
cgatctattgatgcagcccaagattcgccgtaaaattagcaactgaaatcagggagatcaagagccgcgtcatagaggtgcacgagcgacgccgcaattataaggtcaaaattaggcgttgataagcctgtcacagcggcttcggatcctcgtttatccactccgtacctggaggtgaaagatcttgttggtattgacggggcaagagatgagataatcaagattatgacagaaagggaagaagtacccatgcag

SEQ ID NO: 37751 - DNA, 888 bp, Setaria italica
  Peptide Sequence Number=SeqID_103725
gatattcacattatcagccatacccttcgccataatgccaagtactatagagcaatgtgtttctgttctgaaaccaggtggcctccttctgtttagggattatggtaattgcttatagacatacaatggtataatttcacattgcttatgtcaaactagtctctgacagctctattttttattaggtctttatgacatgacaatgcttcggttcttacctcatcaaagagtagggtttcgggaatatatgcggtcagatggcaccttgtcatacttcttcacattggacactgtgagagaactctttcatgctgctgggctagtagagttggagctggagtactgctgtgtcaagtcagtgaaccgaaagaacgggaagaagatgcagcgggtatgggtgcatgggaaattccagaaaccaccaagctgacgccaactgtggcggtagcaacattagagaggtggttttgtctggccactttgttgctccaacaaagcgcggtgaagagtgaacgttttgttcccacaaacttcttcctctgctgtggaaattctgtggccctgcttcaacactagccattctagccaccgaatcagagtccctttgcacggactgcctggccgctcctcaatccctctccatagttgcatgctagcgttctctcgggtggttggacttggatttgatctggacccgttgcgttggagtatgctgcaagaatgtcgttttgcggcttgcgggagaaagcaaatgaactctagtgagacatgctcagacttgaaagctcacactggagtccttttcccggttttgctttcatgtaggtatgtaaggtcatcaaattttgttcagactggcttgaaagtttacttcgttttcctaaaaaa

SEQ ID NO: 37752 - DNA, 294 bp, Setaria italica
  Peptide Sequence Number=SeqID_103726
caaaacacacggctggaacaaaataatcccccaccgaaaacgaaacgggcgagccaaccgcaaccaccactcggcaccggctggcctgcggcgcgcgccatggctgccgtgaccagcaccgccttcctctgcccggccgccggcggcctctccccctcgccgcccttcaggcgcaatcccggcagcagcagcagccgcaggaggctgcagctgcaggtctgccactgccgccctgctcgggtagaggggctggaccggagggaggccttgctcggcgtcgccctctccgccgcc

SEQ ID NO: 37753 - DNA, 205 bp, Setaria italica
  misc_feature (1)..(26): n is a, c, g, or t
  Peptide Sequence Number=SeqID_103727
nnnnnnnnnnnnnnnnnnnnnnnnnngacctcaaggtcgcatatataatttacaatgcattcatcgtcttaaaaggatactactccctccatcccaaattgtaagtcattttagcatatttagattcataacctttgctatgtatctagacatagtgcatatcagatagatagtaaaatctatgaaacctaaaataccaaaacgt

SEQ ID NO: 37754 - DNA, 1242 bp, Setaria italica
  Peptide Sequence Number=SeqID_103728
tagtaatctctgctccgatccagctatttaggatactaccgattcattggagtcgttgcatctactccggtttgcccttcaatatagagctaccagtcaagatgtcctcagagagcctgtgctactggctgctgcttctcgtcgcgcatttctcgctctcacccagcagggccaccgccggcaaggtgtcagcgatcattgtgttcggggattcgacggtcgacgcaggcaacaacaacttcatccccaccatcgccaagggaaacttcccaccgtatgggcgagacttcgacgggggcgtcgccaccggcaggttctccaatgggcgcctcgccacggacttcttttcggaggcgttcgggttgccgtcgtctgtgccggcgtacctggaccccagctactcgatcgaccagctcgccatgggtgtgagctttgcctccgcaggcaccgggctggatgatttaacagcaaaaatcgcatcagtgatacctttgaggcagcagctggagtacttcaaggagtacaaggagagactgaaactcgcaaagggggagtccatggccaaagagatcgtcgcggaggctctctatgtcttcagcatcggcaccaacgacttcatcctgaactacttcgtccttcctctccgcccggcccagtacaccgcgccggagtacgttacctacctaattggcctagctgacgcggccgttcgtgacgcctacgacctcggcgcgcgcaagatcgaattcaccggccttgcgccgttcggctgcgtaccttcagccaggacgctgaaccacgacgagcccgacgagtgcaacgaggagcacaaccagttagcgatgagattcaacgccgagctgcaggaggccgtgaggaagctcaatggtgacctcgccggcgcgcaggtggtgtacgcagagacgtacagcgtggtgtctaccatcattgccaacccgtcgttctacggattcgagaacgtggcgcaaggttgctgtggcacaggactcatcgagacatctgtcctatgcggcttggatcgaccgttgacgtgtcaagacgcggataagtatgtgttctttgattcagttcatccgtcccagcggacatacaggatagtggctaagcatattctgaacactaaattgcaagtgttcttgtgacatctttaatttgtaaccgtgcaatttacaataaggacgtaccctctccgtttttaaatattaagacacagattcaaac

SEQ ID NO: 37755 - DNA, 288 bp, Setaria italica
  Peptide Sequence Number=SeqID_103729
ccccccccttgctgtccaccacctcactgtcttctccttcttggagctccgcgtggcctctactgctcgccgccgcctccctcgccgcgtgggcggcgacggagaagaggagcaggagcgacagcagcagggcggcggttcgccgtggcggcgattgcgccatcgctggcctcctcttgctggtagtttcttgggccagagaggaactgagggagagagtgtggtggttatgtgttagttgggtcgttggattaatggaggcggtgaggtgttggtttggagttgagg

SEQ ID NO: 37756 - DNA, 328 bp, Setaria italica
  Peptide Sequence Number=SeqID_103730
cttctacggattcctcatcccttgccaactcgacacctatggtgatactcagttcagtgatagcatctgttgtttcagagattggtctaggttccgatcctgctttcactgtcccagaatatgattttcgctccccaacaggtactttgataattgagatttccagcactgatgatccacttatattttacaaaacctctaatgattaagatgttttaacctgttgctgtttcatagcactctctaaataactttagatgtcaaataaagtaggtatgtccagctgctgatgtacaaaagttactgaaacatgacaacaaaatgtaat

SEQ ID NO: 37757 - DNA, 1066 bp, Setaria italica
  Peptide Sequence Number=SeqID_103731
tttgggtcctgagggccccagtgtggagattggttcttcgatagccaaaggatttggaaatgtgtttgactgggagggtgggaaaaggctgtctcttgtggcagctggatcagctgctggaatttcgtcaggtgattgccttgtattttaggttttaatgctgctgttgctgggtgctttttcgcggtggaatctgttttgtggccttcttctacggattcctcatcccttgccaactcgacacctatggtgatactcagttcagtgatagcatctgttgtttcagagattggtctaggttccgatcctgctttcactgtcccagaatatgattttcgctccccaacagaacttcccctatatcttttgctgggtgtcttctgtggattggtgtcaatcacattatcaaaatgtacatcacttgctatggagacagttgagagattacaaatggcaacaggattaccaaaggctgcatcgcctgcactaggtggccttattgttggtcttctagcacttatgtaccctgaagtattgtactggggctttgaaaatgttgatatcttgctggaatcacgaccatttacaagcggcctctctgcgactatattggttcagctcattggagtcaaaatattagcaacatctatatgcagggcttctggattggttggtggttactatgcaccatccctttttattggtgcagctacagggatggcatatggcaagttcatgagattcacatttacctgtcctgaaccactcttgcatgtcccattcctagatgtggcatcacctcaagcatatggcctggtaacatgtctgcatttttttccttcttctcaactaccttaataactgtctctttatagtgctatggtattattgttatgtagttacttttccttctctgaaagaatgtccgtatgttaactagtattccactccctgtctcaacttgcacattataatctttgataacaatattagacagtgttaaggaaagaatatgatcatttcttatgttttcttccttttgtataatcttcacaggtaggtatgg

SEQ ID NO: 37758 - DNA, 655 bp, Setaria italica
  Peptide Sequence Number=SeqID_103732
tcgtgctcttcaacctctcggttcatgaaatacgtgacatattttgggatggcattcccttgcgaggggcttcgtggctgagggaagagccgatcggtgaagtctggcagagagtgatatttgttccagtcagtggtggtgttgtagtaggaggattgaacgcattaagaagttctatcaaaaccaactcaaatggccatgtgtccaagatacagagtgcagttagaccattcttgaaagctgtggcagcatctttcacacttggaactggcaattcattgggtcctgagggccccagtgtggagattggttcttcgatagccaaaggatttggaaatgtgtttgactgggagggtgggaaaaggctgtctcttgtggcagctggatcagctgctggaatttcgtcaggttttaatgctgctgttgctgggtgctttttcgcggtggaatctgttttgtggccttcttctacggattcctcatcccttgccaactcgacacctatggtgatactcagttcagtgatagcatctgttgtttcagagattggtctaggttccgatcctgctttcactgtcccagaatatgattttcgctccccaacagagattgaaagtatgaggatatttacatgacttcataaatgtcagaactt

SEQ ID NO: 37759 - DNA, 1021 bp, Setaria italica
  Peptide Sequence Number=SeqID_103733
tggaaatgctgctagtgggcacaatatcattacaaaagaagatgtctcatataagtcctgtggcctgaagaatgcagagagtggctttaggctctcagttgggatggactccatattttctcagtaccatgctacagattccaagaaagattggattgagaacagcagctccgtctggagcccagatgatagcttttcaaaaccaaatgttatgcattcctggtcagattttagtagtagggagtcgtttagtggagcacctgccaaaggacctgttgtttccgcgaatgccacatcaggaaattacgttgaggatcttgaagacaatggagatcgtcctaccgcaacacggatttctggggaagagatacaaaaggtttgtgacttgctctatgagtttaaggatgacatgttgggcatgacctccatggcgaagggtacatgtaagagcagcccgtcccttgaagtcttacttgctgaatcatctgattctgaagcacaaatttctgatccggagtacattgacaatggtgctggcattggttcagctcgattgttccgtacattctcatcttcagatgacgatgcttctactgggaacgagcctttagttgatgttgctgacctgaccacaccatccgagccatatgcttctgccaagcctctggttgatttggctgatctgacaaacccttctgggacagatgcttctgctgtgaatgagctttcggctgatgtggttgatctgccaacgccttcagagacatgcttatgatgtgaacaatgagcctttgttcagtgtggatatctgccaaaacctctggagttttctggtgggagcagtagtggaggagaacatcctgacagtcttatataggcctatcaacactgatctacttgtcaaagttgcttagttggggtgtcctgtacagcggccatcgtttccgtctaagttgacacagtagttttgtacataaataatttccatgcctgcaacaatttactaaatacttatgatact

SEQ ID NO: 37760 - DNA, 652 bp, Setaria italica
  Peptide Sequence Number=SeqID_103734
cgctgccgctggactcgtctcgcccctcctctccttcctttccccaccccacctcatctccctccaaacagctcacgtactcgccaagaaacagagcaaggccagcacgaggccggctcgacgagatcaacccccaggatcagagatgatggattcctcagagcagaaggtgatcgggatcgcggcggcgccggccgtggcggaggcaggtaggccgtgctgcgtcgagtgccgcactaccgcgacgcccatgtggcgcggcgggccgacggggcccaggtcgctctgcaatgcgtgcgggatccggtaccggaagaagaggaggcaagagctaggtcttgacaacaaccagaagccacaacaaaaccaccagcagccgccgccacagcaacagccacagcagcaacaacatcaagatcacagtcaggcgccaaatgcagtcaaagataacaaaagtagcggcctgcaagtggtgaagaaacggagggtcctgatgggagtggaggaggctgcaatcctgctcatggccttgtcctcctcatccaggtccactctgctacatggctaggatctcaacaccacccaaaaggcagcttctgctcagtgtgtacatacaaacctgatacaggacgcacgacaagaaacaacaaac

SEQ ID NO: 37761 - DNA, 455 bp, Setaria italica
  misc_feature (1)..(82): n is a, c, g, or t
  Peptide Sequence Number=SeqID_103735
nnnnnnnnnnnnnnnnnnnnnnnnnnnnnnnnnnnnnnnnnnnnnnnnnnnnnnnnnnnnnnnnnnnnnnnnnnnnnnnnnncttttaacttaaaccttagaatacaagggtaattaagacaatatcagtgttgacactgaatgtgaaaactaacttggtccatggcagactggatttccaagaatcaatcaactaatctacaaaagtggagtactgtacttggttacaaatattgtacagcgtagcatataaatacagaagatgcatacagaatttgaatcttatgctcctggtcttgacaaaatttttgtggtcagaatcatctgtactgcgtctccatagaacctgctcatcaattttggaaagcttttcatcatctagcaacttccaagtctggatcgactcaacttccatccacgatctctgttccttttcttgagttcactgtaaatta

SEQ ID NO: 37762 - DNA, 251 bp, Setaria italica
  Peptide Sequence Number=SeqID_103736
gacggcctgcctggggctgactccttcaccccaaccgggcatgacagtaggcgtggcgaacggcgagcgcgttcccacctccggcatatgccctgcgacacctatctggatcggcgacgaattattcgcggtggacatctacatcattccattgcaaggctataagctcatcctcggttgtcaatgactccgtaccctcgggccaattatctaggatttcaccaccaactccatgtccttctggcgcacag

SEQ ID NO: 37763 - DNA, 632 bp, Setaria italica
  Peptide Sequence Number=SeqID_103737
ggaaatcatctcaggaaagcctccatattctgaacaaaagggctcacttgcaaacttggctttggagtgcattagggacaaccggagcatgtcttgtttgcttgatcctaacttaaaggcccacaaagaaaatgacctagaaatcatatgtgagttggttcaggattgcctccaaagtgatcccaagaagagaccaactatgagagacatcaccactagattgcgagaagtaatatcaatttcaccggaggcagcaacgccccgcttatctccactttggtgggcagagcttgagatcctttcagttgaagcaagctagcgaaaatgttcattctttcagaaacactgagattctgtgcatactactgcaatgcaaccctgtacatctctgttgtatgtttccatctcgtgttggaatttcgctgtctgcttgttacattttccccctccccttgaatttaattaaccaggatcatttttgtcatttcttcttcgctttccctctgtatactaaatctacatgcggtggaagtagaatgcttcatgccatctagggctaattgtaaccacgaaacgtgtaatggatcattttacggaaatatatatattctttgattgtttaaaaaaaaaaa

SEQ ID NO: 37764 - DNA, 354 bp, Setaria italica
  Peptide Sequence Number=SeqID_103738
gctccgacgacggagcgttcaggaggaactcccgcctccggttgcccccgtcgggccgccggcgttctcgtccgaagacagcagcagcctcctcgggccgctcctggacgacgccgacggcgacggaggggagggggcgttgtcccgctggtccgcggcagggccgccctccggcctcggcctcctcgccgcgctgctccgccgcctcctcatgtgcgcgccatcgaacccggagccctcgccgccttccatccgaccggaatctaaggcgcgaggcgaggagaatgtgggagaaaccgttagcttttcgcccaaattcgtggacaggaagtatcacagagcgtggatccgggg

SEQ ID NO: 37765 - DNA, 769 bp, Setaria italica
  Peptide Sequence Number=SeqID_103739
ttgcaggggtctcagcagctaaaaagaataaagaattacaactactaacaattgaatctttcatcctatcaaactataaaacaaaagtaacaaatctttgtttctcctttgtttttttgtttgctcttctggatgtataaaagaattgtcagactgtataatgaactaacgaatgatcactaacagcaaaagaaccactgaaaaaccctgttctttcttcttcacttaaccttctcttcccccattcagctttgctgagaatgggatgctgtggtggagacggacgcagacaccgtgcttcctcctccgccgccgtcgcccatcggcgtccatgcggacacggtgtacattggctggtccagccaccggagcgtgagcccctcgccgtcgccctgggcctgcacgctgtagttaccaggcgcgaacatcctcgcgatcatgcgcccctgcatcgcctcccggtcgccgatgccggcgttctggaacccgccttcctccatacgctgctgccacccggcgaagctctcgtgccgctcgaagcggtccgcggcctcgaacgccaccgcgttgcggatctcccgcgcgaacatctcctccgccttgagcctcgcggggctcgcgtccgacagcccggccgcgtccacggcgtcgaacgccgcggcgtagtaccgcagcgcgcgcgcgaaccgcgcctcccaccggccggagttgagggcgtcctcgtgctcgcccaggaggaggatggcggcgcccgtgctgcgcgcgagcc

SEQ ID NO: 37766 - DNA, 407 bp, Setaria italica
  Peptide Sequence Number=SeqID_103740
aagaatagttcccgttgcgcgattcgaacggcggcgagtggagaaaaattgggaggagggaggggccgagtgcgaacgcctcctcaccgccgccgccgccaccgccaccgccaccgccggcatcaccgtcgtctagtcggctataaaaccctgcccccgctagccttcccgtcgcagccatcccccctcgccgaaaccctaaacccaccctcccgttaggtcttcccccgcttccaacgatggcggaggacgcgtctcctccagcccctcagatgacgcctgaggaagtgcaggctgagaccgagctgcggctgcgcgacatcggccagcgctttggcgctctcccgcaggagaaggaagaactgctccggttactctcggatgctgagacctggttgtccgagggt

SEQ ID NO: 37767 - DNA, 289 bp, Setaria italica
  Peptide Sequence Number=SeqID_103741
gtttaccatacatatacgaaagtaaattgccgtttgaactattcttaggttccttattttaccatttattgatttagcaagaaataaaatcatttgtcggcctgtgtaattcacggtgccaaagataatcaagtatgcatgacagcatgaagatgaaatagatggcagcatggtgcaagctgcaaggcatctttgttcatgatgcatatatcattctgtattggagtatatttcaaaccatagttttgaacttatgaaacaagctattgaaacacctttagggcatgta

SEQ ID NO: 37768 - DNA, 399 bp, Setaria italica
  Peptide Sequence Number=SeqID_103742
ctcgtcggagtacggcgtggagcgcgccgacgagctggacttgtctctcaggctgtgatcgcgacggacctctcccgcggcacaccggcacactctctagagctcttgcacagattcatcgtcatcagtgtctctgttgcattcaggatgatgagtttctccttgcatacatgcatataccggagtttgtataataggatttcttggcaacaggcaaagataattttgtcgactcatcatccttggagagatttggtgtgctcgctctacagttgttatctcctagttcgcaatgcaattaagttagctactgaattttcagcgcgtatttggttgaaattaattttacggggctgggcttattcaagcgatttcaaagccgtgcatactcaattccag

SEQ ID NO: 37769 - DNA, 431 bp, Setaria italica
  Peptide Sequence Number=SeqID_103743
cacacacttccatttcctctctcagcatccacacagcagctcttagctgcttcacaaaacacagcagcgaagcacaaccatgaggaaggagatcataatccggatgcatgtcaaatccgacaagtgccaggccaaggccatgaaagtggcagcggcagttagcggagtggagtccgtgtcgctggccggcggcgacaagagcctcctgctggtgatcggcaccggcgtggactcgaacaagctggtgaagaagctcaagaagaaggtgggcgaggcggagatcgtggagctgcggacgcacgacaccttcgagccggcggcgctcccgctcccggggaccaagcaggaggtggcggccatggcggcggcgcggtcgccgtacagcaccccccaacaccaccaccagtggcagtacaacagctacgccgcgg

SEQ ID NO: 37770 - DNA, 284 bp, Setaria italica
  Peptide Sequence Number=SeqID_103744
cgcccctaaaccctcgcttctcccccgccttgctcaccaagatgctccgccgcgccgcccccaccgcggccgccctctgccgccgggcggtctccacctcggcatccccctccccaaccgcagaggccacggcggccgcctcctcctccgccgtgaactccatcctcctccgctcgctcaaggagcactacctcgaggtctccaagatggcgccgccgcccaagaccagcccgcccaagcccttcaccatcgtcaagggagccctggatcagcaatcgggcccg

SEQ ID NO: 37771 - DNA, 497 bp, Setaria italica
  Peptide Sequence Number=SeqID_103745
gtcggcgacgacgcaggtgacggcggggcggccgtcgcgctcggcctcgtcgttgagcctggcgacgaggtccttgaaccgcgggaagcaggtggtcatggtggagtggcagagcgccgggacgtcctgggtggcgtcggcgtcgcagggcgggaggccgtcgtcgatggcggcgaagcggaaccccggcgcgccgtcgagcgcggccggaccccgcgcgcgcaggtggcggcggtggttgaactcgttgttgacgaaggtgacgtggaagccccgcgcgtggaggagcttggccagctgcagcatcggcgtcacgtggccctgcgccgggtacgggatcatcaccgcgtgtggcggctggagctggcgcccctccccttccgccggcggcaacgaccccatggcttgctcggaccggtacggtggcgcgcgcggaagctgttgctggaactggtggagtggctacgttggtcgtgttccacttgcacttgagctcc

SEQ ID NO: 37772 - DNA, 1171 bp, Setaria italica
  Peptide Sequence Number=SeqID_103746
agtgtactctgcgtgtattatgtcctgaagaagcatttgttgtatttaaacctcgtgagaactgtccagttagttcaggcacttgattgtccctcacacgcctacttgcgttctctcccaatgccaatttcctcctggcagattggccatgcattacttgtctatcaagagaagaatcgggcaattcccaaactagtctctttgcaaattcaccctcttggcagtcaataggctcttctgaatcaacaataaccttccaaggggaagaggaaaggagattcatcatttactggcatatcaactagagatggcattagatgggctgtcatcacaacagagcgagcaactttggacagtgagtcggtgccttcttcaagaaccatctgaattgaatctgtggatagtccagaactctcaagaattgagtgtagtaatgtggtcgaattcagtacctggcgtaaaagagactttccaacagaagtttttgaattttcaaagccctggcatatcttctcttcaaatgtcttcatgaataatgcaatctcattcagactctcaccagatgattccaaggaaccactaggatcagaagggagcccaaatagatacctcaatattaacaggccctcaagattttcaccatactggctgagggcgatagcacctagtgtcaatgaataaattgtttctaccaaataatctgttggttgattagaaccaatatattttgtgagcttcttccagcacttgaacaatgaggaaaagcatctccaattatccacagttgacgagttatggttagcttcactctcatctttttcaagaacatcttggttggaagtatggatttgtgaaaatatcaaagctactgcacttctacaggtataagaagaagccaattccttgaatgccagcgaacatgctaacatttcccgtccaacaggcaaaacctgacagaacatcaagaggtgatgcatgatagaagagcactcatgaacagattcctcactcaggggctcttcagcaatagtcttctcattattaggtgggtcagtactaaagatatatgcaagagatttaaatagaggaatcctccatttgaacattagatcattcgtggaggatgctcttccaaaagtcatatcatccgaaaaagatgcactgctacaat

SEQ ID NO: 37773 - DNA, 718 bp, Setaria italica
  Peptide Sequence Number=SeqID_103747
ccatgtagtcctcccaagagcggcatagtgttgtaaaccattgcatgaaccgtcctgatgaataggcaggtgagagacagcacggtaaggtgatgaactttttaaggcatcagatagatccatgcatgcagctaaacactgaaaaggatcctcagcattagtccaccagcggtttccatcaacaggatttgctgctgaatcaaatatatcaagcagttggttctccacaaatgccagcttgccctcatgagaaagcttttcaacacctccaccatatttgttagccaaatgtatcttcaaccagcataatccagactttcctagtggccgcccttccgcatactctagaacacctcggcatagatctgaacctaggtgactcaaatgtgggtgcatagggtatgcacgaccacgaaaatccaaattatgagggtaataaaatccatcctcctctctcattttacgagcaaccgagagtttaagttcggtatcacatcgctcagcatgcaattcacggtttgtttctttgccttctttaaactccacttccatttctgcatttcatctgggtcctctgattctggtcgttcaggtagaggaatatttgccttgtcaaccagcccggcaatgcctccacctcgactccaaatagtctcaacaacatcatgaactcttcgattgaccctccatttagtactcccgaggatatctaacgcct

SEQ ID NO: 37774 - DNA, 248 bp, Setaria italica
  Peptide Sequence Number=SeqID_103748
cacgtacccagcagccagcaggttccttcttgatcttttcgcaaacctttagccgcggcagatccaccggcgcctgagaagatgccggtgaaggtgttcgggtcgccggcgtcggcggaggtcgcgcgcgtcctgacctgcctgttcgagaaggacgtcgagttccagctcatccgcgtcgactccttccgcggatcccagcgcatgcctcagtacctcaagctccagcccgcacggcgaggcgctca

SEQ ID NO: 37775 - DNA, 643 bp, Setaria italica
  Peptide Sequence Number=SeqID_103749
ccggaccaggtgcggtacgtggtgctcaaatggaccttctgcttcgccatcggcatcctgaccggcatcgtcggcttcgtcgtcaacctggccgtcgaaaacgttgcggggttcaagcacaacgccgtctccgcgctgatggagtcaagtagctattggacagcgttctgggtgttcgccggatccaacctggcgctcctgctatttgcgtcgtccataacggcgttcgtgtcaccggcggccggcgggtcggggatcccggaggtgaaggcctacctcaacggtgtggacgcgccaaacatcttctcgctgcggaccctcgctgtcaagatagcagggaacattgccgccgtatcgtcttctctacacgttggcaaagcaggaccaatggttcacacaggggcgtgcatagctgcaattttcggccagggaggctcacgcaagtacggcctcacctgccgttggctacgctacttcaagaacgaccgtgaccgccgtgacctggtgaccatcggcgccggcgctggggtcgcggccgcgttccgtgcaccagtgggtggcgtgctgttcgccctcgagtccctctcgtcatggtggcggagcgcgctcatctggcggtccttcttcacgacggcggtggtgg

SEQ ID NO: 37776 - DNA, 318 bp, Setaria italica
  Peptide Sequence Number=SeqID_103750
caagtccacctgtgcactaagcaagcatggtgtgcagattccatgtcattgcctccagctggcagatcaatcagacgtggtaaaaaaagacctccggtgaacaaagatgcaagtttgatggtgcggagtgtaccatctggaaagaaggacctccggtgaacaaggatgcaagtttgatgatgcagtgtgtatcatttgcaagttaagtgattcgagtgagaatttggtgctaaagtaatggcttgcaatgcattttactctttggaacttacaagttggttagtcctccatccattcttaaatatagcttagagtata

SEQ ID NO: 37777 - DNA, 735 bp, Setaria italica
  Peptide Sequence Number=SeqID_103751
ctgcaaaggtcgaggagaatgtcttgtctattggctgccctgacccagggtgcaacacaccatccttgcaccctgggtcagggcagccaatagacaagacattctcctcgacctttgcagcaatgtactggctcacacaactgatgcagaaggtgtgtgtgcatccgtcaataggaaagacttccccaatgtgcactgtttccatgcagatggaacagtagaagtcactgctgatcattgcatcatcaccgtgagagcattgcccaagctcttggagcgtgccatccagtggttttttccctttgcggtccatgccttcagttgaggtcaaagtgccatgaggcacactgatctcgtgatacgtctctgtcttgcacaaagattcacaagaagccactgcacacctgggcagccccgtggcatctgtctcatgtgcatattggcagaagcacgcaatgcagatgacatggtcacaattgtcaggtatccatgacgcttccaatgattggatcatctgtttgcaaactgcgcagacattctcactctcaaagtgagttgagaactggagaacctcttcaaactgcaaatcctcagccagcgcagaatcaatcagctgacatagcaacaaggtccagcattgttgtgtagtgctgctctattgctctcttggttgaaccttaatcaatacctggccgaggcctcagtacttgctaactcccgtgtgctgctaacggt

SEQ ID NO: 37778 - DNA, 412 bp, Setaria italica
  Peptide Sequence Number=SeqID_103752
tgttttaagatgccctggactttgatttgacatctaaactggtttggaatcaaacagtaaactgggctttcgtgcctctcgcatcctagtggctttaatggcagtgtgctctttgaaattgccttgtttctgtagtgttcatctaacacttgcggtctcttagtaccagtactatttaaatcgttatcatatacataatgacatctaggtgaagtttttcttagttatttttaagaaagacaaactatttacccttttcttttgctttgggctttgtcatgttcaggcctatggtagtgcttaggtagtactctaaataagattgggcacaacagagattggtaccatttgcatgaattcagcttaagctctgctctttcaattgaaataaacagacacagacaggtttgtc

SEQ ID NO: 37779 - DNA, 736 bp, Setaria italica
  misc_feature (1)..(119): n is a, c, g, or t
  Peptide Sequence Number=SeqID_103753
nnnnnnnnnnnnnnnnnnnnnnnnnnnnnnnnnnnnnnnnnnnnnnnnnnnnnnnnnnnnnnnnnnnnnnnnnnnnnnnnnnnnnnnnnnnnnnnnnnnnnnnnnnnnnnnnnnnnnnnaactttaaacatgatcctcttcttttctttcttctcgtcacggttgagttgagtaacatgagaaataaaagtaagttcaggtgggagcagattacaattacattcatcaaccaattatccgaatatatattcatcacaacaattatttcttagttaccaaatgttgacagatacagagggatgctctctatttaaggcagcatcagttaacatgacccgagcggaaagtgaatacacgcattattcctcttttttatcttctgcagcagcaccgtggggttcaaccaggggttttgattcactcgcaccttcatcgttcttctgagcagcaggtttgtaaggacaggcaggtggggctctctcaggtctcctgtattcccatccaaatagccgatacacctttctgaggatgagatcgaagaggtaggggagggcgttgaccaccgggatcaggaagaggggcagcaggcacgcgacgcagaccatatcgtcagatcggtcggcagcggggtggatggatcttctgtctcctggatcttcttcttctttttctttaccttgatgcttgctccgctcgtctcctccccctcctcgtcgtcgtctaggtgtggtaggaa

SEQ ID NO: 37780 - DNA, 884 bp, Setaria italica
  Peptide Sequence Number=SeqID_103754
cgccttctatcctcgcgccgccgccgccatctacgccgagcgccgcttccccgtcagtctcttggagcatcaaccatggcggagcagactgagaaggcttttcttaagcagccgaaggtgttcctctgccccaagaaggccgccaaggggaacaagcccggcaaggggggcaacaggttctggaagagcattggccttggtttcaagactcccagggaggccattgaaggaacatacattgataagaaatgcccgttcactggcactgtgtcaattagaggtcgcatcattgctggaacatgccatagtgctaaaatgaacaggactatcattgttcgtaggaactaccttcactttgtcaagaagtaccagaggtatgagaagagacactccaacatccctgcgcacatttcaccatgcttccgtgtgaaggaaggggatcatgtcatcattggccagtgcaggccactatcaaagaccgtgaggttcaatgtgctcaaagtgatcccggcaggttcaaagagtggagcagtgaagaaggctttcactgccgcttaagacatgatgagtaaaccgtcgagggcccggaaaagcttgtcataacattttgatgctgcctagccttttttttctccatatcaattgtgtactaggaatttgacttgaatcacttccagagcttgaaatcttgaaaattcgggaccctgtgtgtatgtgattgcttagttccctacgatttcagtcatatggtcctgagaatgcttttctaggtgtcatttgtttggaatgtttgcatccattgtgggcttgtggcccgtatcggcttcgttgggggtcgcactgcccgcatcatgtgattgcaataaatcctgtttgcgacttaa

SEQ ID NO: 37781 - DNA, 925 bp, Setaria italica
  misc_feature (889)..(925): n is a, c, g, or t
  Peptide Sequence Number=SeqID_103755
tgtacttgtagtaaggtctttttctttaagtctagtccgtaaggttgtttccttcttcgtcagtctcttggagcatcaaggcatttcttcgtctccacagctcccgccgccgccgccgccgccgcttgaggtcagcgcgttcctctacaccgggcatcggcgcctcctccttcgcgcggcgaccatggcggagcagacggagaaggctttcttgaagcagcccaaggtgtttctctgttccaagaaggccgccaaggggaacaagcctggcaagggagggaacagattctggaagaacatcggccttgggttcaagactcccagggaagccattgaaggaacctacattgataagaaatgcccattcactggcactgtgtctatcaggggtcgcatcattgctggaacatgccatagtgctaagatgaacaggaccatcattgttcgtaggaattatcttcactttgtcaagaagtaccagaggtatgagaagaggcactctaacatccctgcgcacatttcaccatgcttccgtgtgaaggaaggagaccacgtgatcattggccagtgcaggccactgtccaagaccgtgaggttcaatgtgctgaaggtgatccctgccgggtcaaagagtggtgctgtgaagaaggcattcactgctgcctgaggaatacatcaaagattctgaaagctatgagattttgatgtcccattctgtattgcaattccatctgtcctaggatttttactgagaaaatatcgtctgaagttaaagtcaaagagcgctgaagttaagacaaaaaaaggttaaatgatgttttgtttcagtcagtatcattttgttgctggttgtgaataagaactagccaacggacgacacagggagtannnnnnnnnnnnnnnnnnnnnnnnnnnnnnnnnnnnn

SEQ ID NO: 37782 - DNA, 230 bp, Setaria italica
  Peptide Sequence Number=SeqID_103756
gccactgcccatgactaatagactctgcatgcaccgttttgttacacaagtgtcagtatgggtgtgaagaactctacctttgatcttttactagaactataccatcaattgacattttgctattgacaggttacattagcactgctataaatgatggtccagggtgtttgatgttgaggtgtcctgatccatcctgtgctgctgctgttggacaagaaatgataaatgca

SEQ ID NO: 37783 - DNA, 431 bp, Setaria italica
  Peptide Sequence Number=SeqID_103757
aaccactagaattgagtttgaagaacatgatggattcagtgagaaactgcttaaactgttcattacgtataagcctgatggaagctacttcatcgaggtgattacttttcataggacagaagtacctttaatgtaccttttgcatatttgaacttgagttgatggaagctacttcatcgaggtggttagtactctgctaataggcacatggtccaacctgatacgatcttacataatcgatagccacaacaaaaatatctggcagaacaactcatatggcctacatagtaaaagagagtatttctaaacccactaaaaattggtttttgctgttgaaacgaagacagggcagtataatgtatgttgtccaccatgtggcttttaacaagccactagaaatgggctttaacaatacaatactcctgttcttt

SEQ ID NO: 37784 - DNA, 229 bp, Setaria italica
  Peptide Sequence Number=SeqID_103758
ggtgggtgcgaggtgaggatgctgctgaagcctgggaaagaaagatgaatgctgatggattcagtgagaaactgcttaaactgttcattacgtataagcctgatggaagctacttcatcgagactgaagatggcacttctggtttggatgtcaaagttgatcacaagggtgaccatgattttcgtgtagatgctgctggcctgcaaactgatgtgactctagcttatta

SEQ ID NO: 37785 - DNA, 685 bp, Setaria italica
  Peptide Sequence Number=SeqID_103759
tgtaattctaattacgtagtcttgtactaagtaaacttgttcttgttattggttacaataatacacctttcaggatgcatcactttgctaggcaaccactagaattggagtttgaagaacatgatggattcagtgagaaactgcttaaactgttcattacgtataagcctgatggaagctacttcatcgagactgaagatggcacttctggtttggatgtcaaagttgatcacaagggtgaccatgattttcgtgtagatgctgctggcctgcaaactgatgtgactctagcttattattcaaaggataatagcgagcatatacacatttggcatgggaagcatcatcaccattacagacagactctgagaactgagcatgtagttgatgatacctcccaacctagccatgcttctgagggggaaagtcacatccaaaagggagtgttctggcaccggatggctggtttggttgtgaaggttttgcttgaagatggggcacaggtggaggcagggcagcctgtcatggttatggaagcaatgaagatggagcatgttgtgaaggcacctcgcgctggatatgtggagggcctgaaggttactgctggaccaaacaaagtttttagaactactaagtagtaccttttacaactaatttaaaggaactaaattaacttagtacgtaa

SEQ ID NO: 37786 - DNA, 1090 bp, Setaria italica
  Peptide Sequence Number=SeqID_103760
gaaagagtgtccacaataaactccactgttccagcattgtagtaaccaactgccttcaacacaaagaatccaataagtgaccctttgctgcagacacagcagctccaccaatatgagaacgaaactcagctgtaacatttggagctggagcttcctcaataatcttttgatgtcttctttgaagactgcagtctctctcataaaggtatattgcatttccatgttggtcgccaaatacctggacttctacatgtctgggttgagtaatatacttctcaatcaatagtgtgtttaccccaaatgatgctgcggcttcccgttgagcgctcagtacagaatccacaaactcttcgggccgctgaactatcctcatccccttgccccctccaccatgggtgggcttgatcaaaactggataaccgattttatcagcttcgagtttcaataactcaatgtcttgttcagccccgtggtaacctggaactagcggtactccagcagcacccatgatcctcttggatgcactcttatcacccatatctcggattgcagatgcaggcggtccaatgaatttaagcccctcggcttcacagagctgcgcaaaatcagcactctctgaaagaaacccgtaccccgggtggattgcctgggcgccggtgcggtgtgcggcgtcgatgatggccctggcgtcgaggtagctctccctggcgggcggcgggccgatcctgacggcctcgtcggcggcgcgcacgtgcagcgccttccggtcggcgtcgctgtacacggccacggtggcgaccccgagccgccgcgcggtgcgcatgacccggcacgcgatctcgccccggttcgccaccagcaccttctcgatccccgcgcccggggacgccgccgcggcaggagaagtgggggcggaggaggaggaggaggaggagaggagccgcgccgcgaggaggagcgggagcgggggcacgggtgagccggggctccggccgcccccgcggcggcggaggtggaggcggagcaggcgggaggccatcgctgcctcggtggtcggggaattcgagcagctggagtggagccgcagcag

SEQ ID NO: 37787 - DNA, 1798 bp, Setaria italica
  Peptide Sequence Number=SeqID_103761
ccaacatggaaatgcaatatacctttatgagagagactgcagtcttcaaagaagacatcaaaagattattgaggaagctccagctccaaatgttacagctgagtttcgttctcatattggtggagctgctgtgtctgcagcaaaggcagttggttactacaatgctggaacagtggagtttattgtggacactctttctggagaattctacttcatggagatgaatactcgacttcaggttgaacacccagtaacagagatgattgtcggtcaagatcttgtggagtggcaaatacgtgttgcaaatggagaacgcctaccactatctcaggagcaggtcccattaaatggacatgcatttgaagctaggatatatgctgaaaatgttccaagaggatttcttcctgcaacaggaaccttacatcactacagaccagtcccttctgcctcaacagtaagagttgaaactggagttgaagaaggagatactgtcagcatgcattatgatcccatgatagccaagcttgtagtatggggtgaaagccgcagtgctgccctagtcaagctgaagaaatgtctgtcgaactttcagattgcaggcttgccaaccaatgttggtttcctccaagaacttgcaagccatagttcctttgaagaaggcatagtcgacacacacttcattgagcgttacaaagatgatcttttgagtacttctacaaaggcctcaggtgaatcgcgtgatgtagctgagcttggtgcaattctggctgctgcatgtatttgcaagaaggatcacattacatctaaagaatcaatacgagctgacaagaaactgtctgtatggtacaataatacacctttcaggatgcatcactttgctaggcaaccactagaattggagtttgaagaacatgatggattcagtgagaaactgcttaaactgttcattacgtataagcctgatggaagctacttcatcgagactgaagatggcacttctggtttggatgtcaaagttgatcacaagggtgaccatgattttcgtgtagatgctgctggcctgcaaactgatgtgactctagcttattattcaaaggataatagcgagcatatacacatttggcatgggaagcatcatcaccattacagacagactctgagaactgagcatgtagttgatgatacctcccaacctagccatgcttctgaggggaagtcacatccaaaagggagtgttctggcaccgatggctggtttggttgtgaaggttttgcttgaagatggggcacaggtggaggcagggcagcctgtcatggttatggaagcaatgaagatggagcatgttgtgaaggcacctcgcgctggatatgtggagggcctgaaggttactgctggccaacaagtttttgactctagtgtccttttcactattaaggacaatactgcgaactgagatgcagcatcccagaagctgtccgactacagcagtatcaaacaattcacggatgatccaggagttgatcgacaacgctggcattcagatagaaagcaaatgaataaacaggtgggtgggttcatctgcgggcaagcaacctgctggaccatgaactcccagcggcatactggtatcctggaccatggatggcacagctctctcgtagtcttgtggtacaaaaggtgcatcataattcatgttaattccacaatttgttatagagacaagcttgtctaccatcttcatctctttgggtttggatatgcataaagcaccaaccacttttagctacacgtgcatagg

SEQ ID NO: 37788 - DNA, 726 bp, Setaria italica
  Peptide Sequence Number=SeqID_103762
gtgcgaaggcggagcggaccatcctctcggggtctccgctggccgcggctgccgcgacggagtcctgctgctgctggttggtggcagcaaaagcgtcatcattatgctgctgaaggaggtagatccttagcgcgatgtcgccggagacgcgtgagaagagcccccgcttctcgagcgggtacctctggaggactgcctcctcgggggatcgcgcgacggaggcggcggcgttgatgcggacgcggccgaggaaggtgtgggggcggagtgcgttgtggtcctggagtcgtcggtcgtggaggacggagacgtcgatggggagggaggggaacctggcggggtcgcggacgtcgaagacgagggtctggttccagtaggggttgcggtcggcgggcttggtggcggttcgctggcgctggtcgtcgaagtcgacctcgacgtaggggttgcaggaggcggcgccgtccttgggggcgaggtcggaggcgtcggagatctcgacggcgagcttcatatcttctcggattcgatcgatcgatcggtctgcagtgggtgggtgggtggtgctggaattggcagttggtgggaggggaaatcgatcactcgagaaggaatgaaggttagagttggaggaggaggagcaggctgatcatgatgatgatcgccgtggtggtggtggtggcggtggaggattccattccatggccaggtgagtgaatgaagtgg

SEQ ID NO: 37789 - DNA, 185 bp, Setaria italica
  Peptide Sequence Number=SeqID_103763
tcaccgtgcaggatggccggcacgcagtcgtggtggaggtacgccacggcgtgggcgacgccgagcgcgacgtcgaagcgcgcgccccactcgcccgccggcggcgcgcccttggcggcgaggccgccgtggaggagccccgctcaggctgccgttggggagtagccgtagaacagcagccgggt

SEQ ID NO: 37790 - DNA, 399 bp, Setaria italica
  Peptide Sequence Number=SeqID_103764
accaccaaacccaagagttaaaatctggttctacagcatatggaaagttaattttccaccacgaatccaaccagatgacacccaaccttctcctgcaaaccttaaataaaagagactaaatacacctaaaagtattttcctttgggggaaaaaatacaagagaattaatgtactcctagaaccctaagcaggagaggctaaggtgacagcccagagatcatctaccaacttcaatcgagaatcaaaatagcccccagaactggacagtttcttaactgaacaggtcgccacctcttttcctctttctcatcatgggggatgccaccctcaacaattaggtaacctaaagtaaaggtaaaagtaaaagtaaagtaacctaaaaaataaattaacccttaa

SEQ ID NO: 37791 - DNA, 462 bp, Setaria italica
  Peptide Sequence Number=SeqID_103765
cgcggaatccatccccggttcggtgcaggattcgttggatttacctgaatcacttttggtgcgaggagtaattgtcagcgccaattccatcgagcttgggaaaatccggctctttggtagctggatttttggccagttcgaagcagcatcagctgcaaggcgaggatgcgaggagtgcggcggagtgctcgcggggaggcgtccgggaaggcgcaccgcgagctagaccggttcgacatggccaacgaggtgttccatctcaccagggccaggtcggagctctgccaccgggctcgaggcgccacttcagcccgccggaagaggcccttctcgacgttcgagctcttgtcggcgagggagtgcggccgcacgggcggcgccgggtttgctgcggccgatcgcgcctatgttggcagcaggtctactatttcccgttaccttaaaggtttccgttttggttta

SEQ ID NO: 37792 - DNA, 607 bp, Setaria italica
  Peptide Sequence Number=SeqID_103766
tttttgtttgttcctcgtgcaaaaggaatcaaagttttttttttgaaatggaaaaaggattaaagtacatatacaacgatacaacatacatggatgccggcagagtagacccttcacaaccggcaacaatcatccgtgtcacatggctcaaccaagcgctacaggaaaagttattgcagtattttttcttttccaagaaaaaagaggagtacagcggtagctacagaaactgaagcaagcagggggaaaaacaacaagcagtagaaacgggggatgatgacgcctcacgcgcgcatcagagggagatgaagccttccttgacgaagaggccgaagaggaggacgacgaagcccgcggcgatgcactgcgtgctggtcaccaccgtctgctggtacgccagcagcgtcacggcggcgcccgcgcacccgatcaggaacccgctcaggttccggtccatgcttcctctcctcctccgccgccgcttctcgcctccaatcgctcttccgcttcttgcttcttggatgctgttgcgtgtggtgtggaccgtggacgagacgagggatggggaagaaggaaggggggattaaggcagcaaagtcaacggctt

SEQ ID NO: 37793 - DNA, 555 bp, Setaria italica
  Peptide Sequence Number=SeqID_103767
caagaatgaacattaatgagggcttgcctacatcagtacagtgcattaattaaaacacaaagtttactgacttcagtttgtatctgctacccagagattctttccaagccgttgccaaattattgagtgggtagaggacacagcaagccaacaactaaaaaattataaacccctgcaattcaaacagaagacccgtaccctaaatgattctaggccaaaatgcaacaaataagcccatgccccaccgaataatgcaaaattgccaacatacgaaaacttccgcgccgagttgacgaaacttcgggaacgaagtgattctcatttcaccaaacaacaaccctagatcccaccagatcaccgcaccgcgcagcatcccaccgaaaatccccaaaccctagcatagcaaacatctcaaaacacaaccaatccccaagacgctcagccctaaaatgttcaaccgcgtagacgataaaacacgtcccgagaggacgacggtttgcggccagagcgagggcgggttccgctcgactcacctcgcgcgcgcttcccgccggc

SEQ ID NO: 37794 - DNA, 291 bp, Setaria italica
  Peptide Sequence Number=SeqID_103768
ggccggaaaactatctgatgtggccattgaagattctctttgctctgttgcaagtgctgaccccctaggttctggggtcacagagcatatggacagcagcaaaaatggtgatggcacttgcaatgatgggtaagtctgggtgcaacttttgggtcaatcaaatggtgtgcctgcttaccaagagagggggccccaagcttacatggacgaagccatgagcgcatccatattttttgtaccttttgagttcgactcagcaatttagtctattatttggtctagtaaaagtaa

SEQ ID NO: 37795 - DNA, 3781 bp, Setaria italica
  Peptide Sequence Number=SeqID_103769
ggcaaaagcaggtagaaaatgcgaagaggagttgcgatttgagaagcgagttacaaggtcagctacagttagacagagggaagtttctggaagctcatgccaacataccacaaatgaggctacattaggaagcaaagggaggaagagagatgttgttgctcactatacaaggaaagtgagcagtacagtatccccgaaaactcaccatgctgagctggtagagcgtaataccattatgaagaagcaaacagtgaaaggaaaggttattgatcgaagagacttaggtgtcactgagaatgataatcatgcaaatgccacagagaatgaggaatcagaaaatgaaacaaaggtaaatttgaagtcgcaaccacttgcgagaagcatcagcattgtcaagaaagcaactgaagctgctgtttctgcagtggatcagaatatctctggttcagccatcactgagaaaaatgatatggagcatacggattctgatggagttaaatccgaaaataagactcctgtgcagaaaccagaaatgtctgttggtgcgaagattgttgccagcaagaagaggatattggaatcagggcttgataaaattgctggaaggtcaccaattgccatgccatccatgaaaaagacaagaaatacatcttctgatccagatatagagcaaccgaataagtcttctggagagaaggttgttgggaagaactgtgattcaggaaataaacgtgttctgagggaacggcagcatcgcaatcaaacaagtttgtcgagcagatcttctaaccgcactaatcaaaatgatatcaagctgacacaggatcaatctgatgatgatgagattggccgtgatacttcctacaggagaactcgtagaggacgtagtcgtgatgctgctgcccttgtcgtgccacaacaagatgactctagtgattctgaagaagacattgttgtgaaaaagaatcagcagaaaaggaaaaaatctgggcataaacaaaaggctggatctaagttgaagcatgcttctgctcgttccaaagctggtcgtttgggtaggcctgttctgactagttctgaatctagctccttatctctgcaagcaggaaaggggaaagtgaaggtgcctgaaggtaaggggaggtcagatagagcttccactatgaacactgcaagcccaagtgagcagataaatacaggaagtcttcgcgaagaaaagcaaaaaataagtgatgagataaaggccatacttctaggtgctggttggacgattgatttaagacccaggaatggtagaaattacatggattctgtgtatatacctcctagtggcaaaggatcttactggtcagtcacaaaagcatattatgcgtttcgtgaaactatggaatctgagcaaaaggacagctctaaaggccagagtttatcaaaaaatctgttggtagccctggcaaaaggcaagcctctaattcttcaggttgtacattaacagaggatatccttagcaaattaaaaagagttgttgtaaacaaacgaacaaccaaagtagagattcaaaggctgagaaagaaagcatttagaaagggtgcgtcaaaggtaaagaggaataagattacaaaatcgagaagactacatttaggaaatgatagaaaaaagcgaggtggctgtgctctacttgctcgtggatccaacaaggagtctgacagcagcactgatggttttgttccatatgagtggaaacgtacgattttctcctggttgattgatctggatattctatcggtgaacactaagttgaaatgtatggatgaaagccactcaaaagttttactggaaggtatagtcactagggatgggattaactgcagctgctgtagtgaggtccttgcagtgcttgaatttgtggctcatgctggcggtgacgtgaagaagccatacagaaacatagttgtagatggggctggacattgatctcatgcactgtcttactaatgcatggaataagcaatctgattctgaaaggcaggatttctttcctattagcattgagggtgatgaccccaatgatgacacatgtggtatttgcggcgatggaggcaatttgatctgctgtgatggatgcccctcgacattccacatgagttgtctaggactggaggcacttccctcagatgactggtgttgtgcaaactgctcatgtaaattttgtcatgaacattctagtgatgatactgaagacattgctgatgctgattcttcattgcgtagttgttcccagtgcgatgagatgtatcaccaagcctgctctcctgagattgattccataaccagtgattccgatccatcatgcaatgtattctgccaacacagttgcagacttctgtttgaggaattgcagaatcttctgggagtcaaaaaggatcttgaacaagaattttcatgccgagttattcagcgcatccatgatgatgtaccagaaacagttgtcgctttggacgaaagggttgagtgtaactccaagattgctgttgcgctttcgttaatggatgaatgctttcttccgattgttgaccagagaactggcatcaacttgatacgcaatgttgtgtatagctgtggatcaaattttgtccgattggatttccgtggattctatatatttattttggaacatggagatgaaatgatagctgcagcatctgtcaggatacatggaaccaagttagctgagatgccgttcattggtacccggaatatgtacaggcgtcaaggaatgtgccgccggcttctagatggaattgaaatgatcctcagctctctcaacgttgagaagttgatcattcctgctatatcagaacttgtggacacctggacatctaaatttggtttagtccaacttgaagattctgagaagcaagaagtgaaggctatcagcatgttagtttttcctggtacaggtcttctccaaaagccattgctgaagaaggctttacctgacaaagacccatgtccctcaggagtgggtgccgtttcctctgcaaacaaggccggaaaactatctgatgtggccattgaagattctctttgctctgttgcaagtgctgaccccctaggttctggggtcacagagcatatggacagcagcaaaaatggtgatggcacttgcaatggtgatgtttcacaacagtctccccatccttgatgggtaagtctgggtgcaacttttgggtcaatcaaatggtgtgcctgcttaccaagagagggggccccaagcttacatggacgaagccatgagcgcatccatattttttgtaccttttgagttcgactcagcaattagcatattggcagaaagaggtttgcagttttttttggaagatgccttgcagcggtagccctgttgttttgccagagattgatgattcaattgactcgtctacctggacttcagaatcagcctgtgcagtactgaaaagcgtgaactccgaccatctaacttcatgtgcagctgaaaactcagcatgtagaatgtggatgatagttctgttctgttttccccctttttggtcgttaactaaactccgagggctaatggagccaccagatagtcgtaaatgttacaccagttgttaattagttaataactttatgttttttgctagcgcaatcccgcaatcatctctcatttctgtaacatatttctcatctctgtaagataaactaatgtatgcgttagcgagaaactgtccacctgatctgtcatgccaaacaaaaaaaaaaa

SEQ ID NO: 37796 - DNA, 958 bp, Setaria italica
  Peptide Sequence Number=SeqID_103770
taaaaacctttgtgaacttttttcctgtagaatatagagaagagcaagaagtcatgctcggacaggggttacatttcttggaatgacgacatggagaaggctcttcttgacacatttgtggagtactataacaagggtgacagatgccaaaatgggtggaagtctcatgtctatacagctactatcaagaatgttcgagaaaagtgtcatgtggatatcacaaaaaacaacatcatgttgaggaataagacctttaacaagcactacattatcatcaatggtatgctggaatcaagtggatttggttgggattggaacaagaacaaaatatctattgatagtgattctgtatgggaagcatatgtgacgaaaaacaaagaagctactgggtacaggcacaagactgtcttgtattgggactcaattagcttggtgttgggtaaagaccatgctataggtgaagcggcaaagactgcagctgagagctcaaaagacatgagtaaggaagatcttagtaacaaagagcccacatcatcggcaacttcaggaagtttaaagaggcaacggtcaggcgactcttttacctctatgatggctgaaaaaatggacaagtttgctgaagcactaaaggaggaagcccctaaaggcccaacatcaaaagaaattctaaacacactgaatgaggtacaaggattggatgaagacactttgttggacctatttgatatcctgactggtgatgcacgcaagtacgagtctttgttggcgcttccggagaagatgaggaataggtggcttctaaaacagctcaacaagtgaagaaactagttcatctatatcaagtgatggataatatctattgaacttgtaataatatgtagctcatctgaaagtattatcttgtattttatcttgtattttcctagctggagtatgtaactcgtgtatgatgtgtttc

SEQ ID NO: 37797 - DNA, 317 bp, Setaria italica
  Peptide Sequence Number=SeqID_103771
gtcgtgctcttctacttcctgcgccaatttgagaggacgccacccagagtcaccccgacgagagcacatcaagatggtggtgtggctgctgaccacaatgctcactgctgccttctcgtacaaggtggcggagatcatgccgctcccggtgcaggtgttggtgtgggccatttccagtgcgaccgtgctcggtggtttctatgccttcttcctgtaccaggagggaactagcaaggcataggtaatagctgtgggatgcaaaagcttccgattcctgtgttctgctttgtccgtccacctgttctgtgaacacgcca

SEQ ID NO: 37798 - DNA, 491 bp, Setaria italica
  Peptide Sequence Number=SeqID_103772
cccgcgacggcgcccacgacccgcccgagatgcgctctgcgttcgtcgacctcctgctacagggggaggagggtgaggcagcggtggcggctccgacacccgtgtacgtggcggcgatcgacttgtcctcttcagaggagtttttggagctagtcaaaagtgctctacaagcagctcttgaagctctttcgccgggatcattatttggacttttgacatttagcagcaagataggattgtatgatgtccaaggtccgatacctattgtgaagaatgtgttcatccctcctgattctgatggcgccttaccaatcgaccttgaagacgtcatgcccctctgttcatttttggctcctattgatagttgcaaagatcgcataactgaagcacttgaaacgattaaaccaatgtcttcctgggatgtagcagcaaacacagctgaaggacaggatcatgtattacatcatacccgtggttttggtgttgcgttg

SEQ ID NO: 37799 - DNA, 390 bp, Setaria italica
  Peptide Sequence Number=SeqID_103773
ctgactcaacctctgacagtttgtagcatcagaataatctccgtgaccggctccaactacacgagaacgaaggccacggttcagaaggcctctctatattttgcgaggagcacaagtcatcgcaagtaattcttcttcacctcaacctgtaatcttattatcgatcgctacagagtaatagcaagcaaagatggagacgccgccgccgagccgcgttcgtctggcgtgcctggccttcaaccgcggcaggtactccgacgcgccgatcctattcagcctgtcggagaggaaggccgtcgcctcagatatggacgatctggcgggcaacaccacctgggcgaccccgcacggatggttcttggttcgccgccctaccccggccaccttcct

SEQ ID NO: 37800 - DNA, 440 bp, Setaria italica
  Peptide Sequence Number=SeqID_103774
cccgaacggtcgaacactggtggaagcgtttgcttgccatccatggcgacttctactgctgctgctgctctgctccgcccctgcccgggagttcccgcagcgttgcagttgtcggagaggtggtctccccgtgcggttgctgggcggacgacgaggaggagaaggggagcggcgggggtcgtgcgagcttgcttcaaccctctcggggacgagcgcatcctccgagaagccatcaaggagccagtagcattcatgggtggtgtgtttgctggcctcttgaggcttgacctgaatgaggatcctctcaaggaatggatcactcggacagtggaggcttctggaatagctgaggaaaacagctctgaagaatcaagtgaggcagatcaaaatgatgcacctcaacaaattgaaattgagtgaggtgcactggctaccttttg

SEQ ID NO: 37801 - DNA, 494 bp, Setaria italica
  Peptide Sequence Number=SeqID_103775
agcgaggccgaggagatgaccccggaacaggaggaggagaaatacttcgagtggcggagctccctggtcgagaagctggaaggcattgagctcaatctcgagggagtcaagttccggatgaccatcgagatcccgccgtcggaagacttcaggacgatgaagaaatcgtgggaggatttctactcctccgagctactcaatagcaggaatccggtgaggaagatagcgagaaggcctgacactattattgtccgtggagtgccgtccaggtggtttgcagagacaagagtatcatccaagccatccacgctggtcacacacactattttctcagctctcggtaaaataaggactctaaatattgccaatgatgatgagttagaagccaaagaagatggagccaataaggagctcatatctggactcaattgcaaagtttgggtgcaatttgagagctatgatgacttccatgatgcaatgaaggcgttatgtgg

SEQ ID NO: 37802 - DNA, 611 bp, Setaria italica
  Peptide Sequence Number=SeqID_103776
tagtttaagtaaagtacctaaaagtaaagtaattaggtaagtacaaagaagatggagccactaaggagctcatatctggactcaattgcaaagtttgggtgcaatttgagagctatgatgacttccatgatgcaatgaaggcgttatgtggacgctctttagagaaggaaggatcgcggctaagggtagactatgatgtgacctgggaccgcgaaggtttctttcgtattgctcagtatgaacctgctcgtagcaatgtaggtgagaaggatgcatcagcgtcggttcatggccggaagaaacattacacttcacgaattgagtcagatcataggaagagatttagggattgatgacacaaggcatggtatgggaagacattgctatgttatgagagggaaaacggctgatttgtatcattgtattgctccattctcagatttcaactttttttccacctttcattgtcaattaactaacagaaaatcattctgatagttactgatttgtagttataactatcagtattgtcctggttgatgcccagacggcagatatcacgacaaaacgaaattgttttttcgtgtctaagaatccacagcacattgagc

SEQ ID NO: 37803 - DNA, 417 bp, Setaria italica
  Peptide Sequence Number=SeqID_103777
cgcgcagacgccacaaaatccaaagacaggtcagttcctcagcacaggtagtatttccaagaaaccgcaggcagatcgcgatggctgcttaccttggcgcggcggcggtggggagaagaggtcggcggggaggaagctgtcgacgacctccgcgtcctcgtcggcgtcgagcaggccgagggcgccgtagtcgctgagccagcggtcgcggaaggccggtgaggacgcgaccaggcgccaccactcgggggagaagtcgtccacctcctgctccgccgccgccgtctgcaggccgcggtaccgcaccccggaaggcacgaacggctccgcccacgggttcagcctcccgccgctgccgttgaccgactacaaccaaccgaccaatacggactaactactacttaggaactacttaga

SEQ ID NO: 37804 - DNA, 665 bp, Setaria italica
  Peptide Sequence Number=SeqID_103778
ctcgctctctgcaccgcgcagacgccacaaaatccaaagacaggtcagttcctcagcacaggtagtatttccaagaaaccgcaggcagatcgcgatggctgcttaccggcgccgccggccaccctccgcggcgccttctccgcgtacctcggggcctccggcggcccggcgtgcgcgcgccaccacttgtcgatcccccacgccgccacctcaaggcctgcgccgcccctcttgccggccgcgctttcctcccgctcgctctcttggcgcggcggcggtggggagaagaggtcggcggggaggaagctgtcgacgacctccgcgtcctcgtcggcgtcgagcaggccgagggcgccgtagtcgctgagccagcggtcgcggaaggccggtgaggacgcgaccaggcgccaccactcgggggagaagtcgtccacctcctgctccgccgccgccgtctgcaggccgcggtaccgcaccccggaaggcacgaacggctccgcccacgggttcagcctcccgccgctgccgttgccgctcaccaccgccatcggctactctcttggactcttggtgtgatctgcttcacgcgggctcgcactcgcaagctagctagctatatagctcggtagctcctcactcctgcgctgtggattgggcacggagat

SEQ ID NO: 37805 - DNA, 1525 bp, Setaria italica
  Peptide Sequence Number=SeqID_103779
tctttctagttgtcttagtagtatattttgagaaaatggatcctgaggactccagtgagtttgaggaagaagaagaagaagaagatgatgatgatgatctgatgcttttcatcttgccagctttatatctagcaactactgaaactgaaactgaaactccacgccaaccatcaaagcttagtgatgctactggaattaaaactacaggtcaagcaccagtgtttggtgatgcaaaatggatttgcaaagtgcttgaagatgaccgaggccaaggctatggtaaacttcgagttgagcctcatattctcctagaactttcacgctatcttaggtcaaacaatcttttgagaaatacgaaaggtctttctgtagaagggaaaattggcatatttatttacatgttatctcgaaatgctagctttcaaatactaagtaacagattcaagcacagtacggaaactatccacagacatatcaaggcatgctttgatgcagtcacagcaatgactggtgaattcgtcaagccaccttcaactcaaacccactggaaaatatcatctgatccatgttatggcgcttactttgagaattgtattggagcaattgatggaattcatgtccctatgacactatcagatagtgaagcagctccataccgaaatagacaagaatccgtctctcagaacgtgatgcttgcttgtgattttgatttgaatttcgtctatgtttcttgtggccgagaggggtctgcatctgatgcagcagtcttatattctgctatagaatctggatttgaagtcccaataggcaagtactatctggttgatgggggttatgcaaacactccatcttttcttgctccttatatagaagttccttaccacactaaagagcaagagcagaacaatgtccaaccacgagactacagggagcttttcaatcttcgccatgcacaactgcgtgggcacataaagcgtgctgtaggcctgctgaagatgcgatttccgattctaaatgttgcaacatcttaccgaaaggatactcaactgaaaattccagcagcggcagtagttctgcataacataattcagagacaaggaggtgatgaagaattgttgagtgaccaaacaatcccatttgcatcccgtaaacctgtgactcttcctagtggtgatgatacgtatggctacgatgttgcagctttcaacagtgaatgcaacatgggcaatgcattgagggatggtattgcacagaggatgtgggcagattatgaaagaagcatgtacatgcctgatttcacaatagaagaggttggcctaaaagaatgtcaaggcgagtaaaagaccactcaatttgaagctgcatttaggttttaggtgtcacatgctacaggcggtttgtctgatgatgatggccagatccttgcccctgatgcatttgcagatgtgatcaaagatttctatggcttctggtagaagatggaagtagttatgccttgtaccaagttgactcccacctgtaagct

SEQ ID NO: 37806 - DNA, 369 bp, Setaria italica
  Peptide Sequence Number=SeqID_103780
aaaacaaaccttgttatattcaaggtacaaggatcttccatggtttcatcacttcatgtaattttgaagaactgcacgagagagatcatctgctgggtttagtgaaaagttgaaaattccctcgtttcttgaattgcacgagaacaagtgagagagacctagctagctgcgcctatttacatttggctggtgatgcctgttaaccgattcgttaatcttctcttgggcgtgctgttggccaattcccgtcgctacatcaacatctcggccggcggggccaggttgaggtccagacccaggcctaccagaaccgacgacgacggcctcggcctcgagcagctgctcatcagctcttcctcgctcttcagc

SEQ ID NO: 37807 - DNA, 318 bp, Setaria italica
  Peptide Sequence Number=SeqID_103781
ctttcattgggagcatttccatgtgccttggaagaagaggcattccactgaggtttcccttgtggcttagaattctgaaaattcctcttcttattttggctcagataatttatagtatcaccggatgagcccttaagcctctcttcttcttggacgcacatagctatcatcttttcaacaccccacttttctggttgcgagttgtaattcacagcaaaagcctcaaaaactttcggtagtgaaggtgaaagaatacaagaattagtaaaacttaattaagtaaaaggtaactttaacttaaggtaaaagtaacttaaa

SEQ ID NO: 37808 - DNA, 472 bp, Setaria italica
  Peptide Sequence Number=SeqID_103782
cctaccaatccaagttcatatcagtggcagagaggcataacaatatagtccctaaccactgaagcggtgcagccttgcttttcacgtttcttcacttcatcctacaatagaaatgcagtcctgggaggagctagaactgaattcagatgagttcacaagctgttcctacttccctcatgcaacatccaatccatgcaaacatacaaattactacctttgccagatgaaaagaaaatgaagaaatgctaagaagcagagtattcatatcaatgaaattagtgttaattaaaattctcgatcattggtgctagcaattggattaccatatctcttatgccaccacccaccagcctgcaattttgtcagggcgttgctgctagagctttcctatcactgatgtggtcccagtttgctgcatcaccaccttaaccctcatcttagtgctatcaaacttcacccttgactcgatctg

SEQ ID NO: 37809 - DNA, 309 bp, Setaria italica
  Peptide Sequence Number=SeqID_103783
agttcaacccatcaaccatacgaagcaacctcttggagagcgggttgagggagaactcggggatggagaggaattcgtcctcggagatgaagcccttggcgctgcggtcgagctggcagaagcgctcgtacagggacacgatctcctgctgcgagactgttcaagcaagaaaccatcagcgtcgtttaaagaaaaaaaaacattatcaatcaccgaaccaaacaatacaacagtagaagaaagggcgccaatccggagaggcagaaggcatctatggctgctcacacaggtagttgcagtgctcctgca

SEQ ID NO: 37810 - DNA, 706 bp, Setaria italica
  Peptide Sequence Number=SeqID_103784
tttgaatcatattatgtccacttgacatgtcactaattaaggctaacagttagttgaagatgaatgcagtaaatggtaatactacaaatctacaatatcgttttcacaaaataaaggaaacaaacacataacattgataatgagatccagaactttatgaaatgacatgcgagcacctctctttgttcctcagacatgaatgaccctgtttggtcccgtaaaacttctagcaggtccttgaaggttacttttcccttaccatcaatgtcataaaccttaaatatcaattcgatctcctgccgaagactggcctttgtactgaaagtagaaagaaaggcaacaaaatccttaaagttcaacccatcaaccatacgaagcaacctcttggagagcgggttgagggagaactcggggatggagaggaattcgtcctcggagatgaagcccttggcgctgcggtcgagctggcagaagcgctcgtacagggacacgatctcctgctgcgagaacaggtagttgcagtgctcctgcacctcctcgatgtcgtactgggtcagcatcgacgacgcgttacccatggctccccctttcactttgccccctactcctcgctcccctattcgttccggccggcggccctcttgtcgttggaaccgagagcgcggcggattggtcagttgtttaacctgatccgaattgctctgaa

SEQ ID NO: 37811 - DNA, 485 bp, Setaria italica
  Peptide Sequence Number=SeqID_103785
tttttttgctgaaccaaataccttcatcttacagcattctgtacgagtacgaccttcatctcacggtaaaggcgtttcccgtgcattcgaaacggcaaacagcagttctctatactgcgcactagccagtcagccacattacagcgcaatcgatcacatgccgtaggcatttacaatttcgcagggcgctacaccacagccctctgaacaaaagtaggtgcaggatatacacacgcctaaaacaagtgttttgtcttcacaggacaagttcatgcacttgttgtttgcgcagcagggaacgatcataattccttttgtgtgtgtgtgtgtgtgtcgcagagcgacgtactttcgcgagcgatgagcctcagtttgccggctccactggttgctgcccagcatttgtcacctctggtagctcttgcacctcacttttgctgctcagttcagtctctgtgataggatgtgtagtggaaaccccatca

SEQ ID NO: 37812 - DNA, 417 bp, Setaria italica
  Peptide Sequence Number=SeqID_103786
ccaggaaaaatacaagtcggatattcatcttatgccagcagaggacggtggcattggtttcgctggcgtgaatctgtctagtctccatttctggtccaggaagactgacaatgaaggtgctgccggatgggcattaatcaggataatcgacatggcgatgctcccaatatctcataagctagctggagatatgttattgtggtcatctgtagctggatttgctgacgatagtgatgtacttttcctgcactcagaagctggtgtcttcatgatcaatctcaggtctaagcagctcaaggaagtgcctcaagcaagtgacaatgccatttacatttatccctacacaagcttctactctcgtggtcccgacattatcaaggatgataaagatatggcattaaagtaccgaaagaagaa

SEQ ID NO: 37813 - DNA, 265 bp, Setaria italica
  Peptide Sequence Number=SeqID_103787
ttccatcaagtagaacattattataacgcttcagtgcagcaattgcatcactcctccgtgtaaacaccacctctgcagtgccctttagaaattaagaacacatattaataatataacaattcaggcaaataaacatagctctaataaaaaaaaaggtcccagtgacaagagaaggtaactttaagataacatagtcatgcaacgtttcatcaaaagagtgaaagacaccacagtacaatcaataatcaccacgtaaatttcttgg

SEQ ID NO: 37814 - DNA, 1074 bp, Setaria italica
  Peptide Sequence Number=SeqID_103788
ttaataaacgacttacaagtagacaagcaaattgcatcactcctccgtgtaaacaccacctctgcagtgccatttgggcggccataaccatcgtagtgaacagcaaagcgtttcaaatgaccaacttctgaaaatagttcctttatatcctcattagaaaccccatagtccaagtttgaaatgtacagttttgtaccagtttctattccactagccgccatactatcactaaacagatcaggtctccaggtcatgtctttggttctgctaaatgactgaaaaatgccaaacatccaacatgagggtacatgtcattataaaagaatctcctcgaactgtttcatatcatgccaactatcaggaaccacattgacaaagcatcgatcttttgggaagagtagcaataattaactgagaaatagcaaaactatgcagtactgcattaagttaacatctgagagggaaagagctccaccaatatcacaagcccaggagacaacagctagagcacttgctcaggaggcagcctagaagaacttcagtgggagtatggatcaaggaacacaatccgaagttgtcagataaagggcacattgaatttccaaacatacgaagagggtggatggagtccgcccttcagccctcatgatttataggcattgaattgaaagaaatccacaagcttttttcacttatttccttccatatgtttgaataaaaggaggtgttccaacaatgcttccattagagatgaccactggttactttccccctccataaacacaagcttacgctctaccgcataatttctcattagagaaataccacggtaatgtctgcccctccaggcctccaacaataaatgatgctctaaccgacagaggttgcattagtgacagacatcacagttactcctgccccctccatataatgaaagcttagaggtactgtcctcgttcatttttctactttattcaggaatctgaccatgaacaaaaacatagtgacagttttgatcttgccttagcaattgtgcgtgcagacggtcgggagctaaccccgagaggtcctcga

SEQ ID NO: 37815 - DNA, 1478 bp, Setaria italica
  misc_feature (1)..(11): n is a, c, g, or t
  Peptide Sequence Number=SeqID_103789
nnnnnnnnnnntgtttgggctaaaattcttagcatggtaaaccttctaggcattaacttaacaccatctctagcattgcagcattcatgataatctaaaaaagcaaccggtacacaaaataaacacttcagattgcgagttcgggcaatcactacacactaggcactacggtggtctttcattcgagcttactacagggaaggggaatagttgtttcctcaaaccaaccaaatgagaaagaagttctatgctcccagaaaatagtatggcgcaaacagctacaccacaatcttccagcagaccttaaacgaagcacaacacgcccaccagcatttatcttcttgcgatcaatcggttttcatggcctcggcatgataactttccaggtctttatccagctcatctgcggtcttctcaggcttcctccctctgccaccacggccctggaactgaccgcggcccctgccacgggcctggaactgtccacggcccctgccacgagcctggaactgaccacggcctcgaccagcttggaaaccaccacggttgttaaacctgttgctcggattacttaaaggcctactgcttgaacctctgccacgttgactaaactcaggcgtcataacaactgttcttgtagctctgccattagatgccccaacaacatttatacgaggtgtcatgggcaatcctaagtcacttccaatgacttctatcttcatagcttttccatcaagtagaacattattataacgcttcagtgcagcaattgcatcactcctccgtgtaaacaccacctctgcagtgccatttgggcggccataaccatcgtagtgaacagcaaagcgtttcaaatgaccaacttctgaaaatagttcctttatatcctcattagaaaccccatagtccaagtttgaaatgtacagttttgtaccagtttctattccactagccgccatactatcactaaacagatcaggtctccaggtcatgtctttggttctgctaaatgacttagcaattgtgcgtgcagacggtcgggagctaaccccgagaggtcctcgaggaggcagtcctgatcttccacgcagggcatgtccacctttaccaccacttccttggatacggccagtacccctatctccaccccttctggcataatatgacatatttaaagttattctgtcaacaaccaagtggcaaactccaacagtgcactggcaactcttgcggcgcgcgagggggtcggcggttggggtggaggatatgcttcaggcggccttggtctcctcgagcctccgcccgactccgccggatgcgtctgggaggagaggggaggggatgcgtctgggaggagaggggaggggatgcgtctgggaggagaggggaggcggcgcgcggccggaatcaaaaccctagctgtcgtccccgttctctggatttcttctgctcgggggagaggggggcgaataaaaacg

SEQ ID NO: 37816 - DNA, 978 bp, Setaria italica
  Peptide Sequence Number=SeqID_103790
caaattgctcgatgatgcatttctaaggaattctaaccaaatacaggggactatctaatctgtgtaccaaagcttcagcaaacttgtgacctttagaagtatatgcatgactactggatgacagatcaatgtgttctcaacttgcagccaccaaattttggagcttcgatcttggttgagtcgcattggacgctttatttgaaggctcaacagagctgttcccatcgacaatacaacaactgattggcttctcaaccttgccaaatggcacaggtttacgagagtatatctcaacgaatctggttgcagcatctgcagactccagcttaagatatgcaaaacccttacagataggatcacgggttttcttatttgcggaaactgctggatctatagataaaagaccaggaaaccctttaaaggccttgcttcaggtccttgtgtatgtttttcttttttgggaggttccaaacacgaacttgaacacctttgtcattaagatctgagtttgtttctttggcggaaccgttcccctcccggcgcttagccgaggtcgcatcgcctctgctccgcgccccgccgaggcccatctcccggagaagctgctcctcaatgtcggtggagtatgtcttcccctcgccaaaccccatcggcttgggccgcgtcgccaggaactcctcctcgtctaccgccatctctatctcctcctcgtcgtcgtcgtcgtagtctccgtcctccgcctccgtctcctcctcgtcgttgtcatcggaggtgggggcagccacgggctcgcggtggcggcgcccgtatttcctcaggcgcgggaacgcgaaggggagatgggagcagcggagccttgaagacggcggaggccgcgagaacgcggccgacgacgccggcgctgccgctgctccggtggcgcacaccgttggcggtaggagcaggagtggcatttcgctgttctttttttttctttct

SEQ ID NO: 37817 - DNA, 821 bp, Setaria italica
  Peptide Sequence Number=SeqID_103791
tacgtatttgtttgttatttgttatttccgttatttgtttttccttttttggttaagttagttatttgttaccgttagtttaggttattccgggtctacgtaactttgttagcccttttcttgagctcttcttgttcaccctgagtactctctgtttccggttcacggtttcggtgtcggtttctttgacctgaggtatggttacatcgaccctaacgatgtgatgatccgatgttcctttggaagagatgaccgagtaggatccgggcacgaacttgtagggggagctcggcgatgccaggatgtagtccaccctcgtgccgtacttgcaggtcccctgcacatcttgtcctttggccacaaccacgacagcttcgcattctccggcgaagtccttggcatcgacgtactgcttccccttgaggtacttcatcacctctaccttgggcgtcggcttgccgatctcctcgtagtacttgacgatgtcggcccagcgctcggcggagtagtcggtgccgtcgagcgcgttgaggccgccggcgaggatgtgcggcccgtcgccggagcggatgatggcgtccacctgcttcatccgccacccctcgtcgaggtggtcgaggtgggtgcagtggaagttgatctccccggcctccggcacctcgatcgtggcgcgcagcacgttccggaagtcggattggtcggcgacgcgggtgcgccttccagcgcttgatgggccagcgggagagcacggcgttgccgtactcgggcgcccagctctcggcgaagacgtagcgcatgccgtagtccccttcggttcgtta

SEQ ID NO: 37818 - DNA, 398 bp, Setaria italica
  Peptide Sequence Number=SeqID_103792
cactgcttcatcgagtttggggcagttcgcggatttccctcgaggaacagggagaaatttttgctctagggtttggatgcgaggatgggtccggaggaggccgtgaaggagcagaagaagaggagggagatggaggatgctcacgaagtcgggaggtgcccaagctgcggctatggcgcggcgggactgaagatggtggtgtcggcaagacgccggcgaggcgcaacgcaaggagattgcgttcttgtattgatgcgtgctttagctgtcgttgggatgttaatatggttaatttatggtatggcaaagatgtacattaatcttggacccgagcggcgatggatcttctactcggtggtggtagagggcatagttgtcatggttggaggcggaatgtt

SEQ ID NO: 37819 - DNA, 1447 bp, Setaria italica
  Peptide Sequence Number=SeqID_103793
gacacaggcagcggcggcgacccctcgcggagccgttcaaagaaaatcatcgccggaatcgtcgccggctcggccgtcgcaggggttacggttgtgatggccgtcgcgctcgttgtcctcagggtgcggcggaggaagaagcccgagaagaagccgtcgagcacctgggccgcgttctcggcgagcgcgctgggctccggctcgcgctcgcgcagcttcggcaagagcaacagcggcggcgccaggaacaacacggtgacgctcgggcagagtgccgccggcgcggggtaccggttccccttcgcggcgctgcaggaggccacgtccgggttcgacgaggggatggtgatcggcgtcggcgggttcgggaaggtgtacaagggcacgctgcgggacgagacgcgggtggccgtgaagcgcggcaacaggcggtcgcagcaggggctcaacgagttccgcacggagatcgagctgctgtcccggctgcgccaccgccacctggtgtcgctcatcggctactgcgacgagcgcggcgagatgatcttggtgtacgagtacatggcgaggggaacgctccggagccacctctacgactccgagctgcctcccctgtcgtggaagcagaggctcgaggccagcatcggcgccgccaggggcctgcactacctccacacgggctcaaacaaggcaatcatccaccgggacgtcaagtcggccaacatcctcctcgacgacagcttcatggccaaggtcgccgacttcgggctgtccaagaccgggccggagctggacaagacgcacgtcagcaccgccgtcaagggcagcttcgggtacctcgacccggagtacttccggcgccagatgctgacggagaagtccgacgtctactccttcggcgtcgtcctgctcgaggtgctctgcgcccgcccggtcatcgaccccacccttcccccggaaacggtgaacctcgccgagtgggcaacgaagcggctcaagaacggcgagctcgacagcatcgtcgaccagcggatcgccgggacgatacggcccgaatcgctcaagaaattcgcggacaccgcggagaagtgcctcgcggagtacggcgtggagcggcccgccatgggggacgtgctctggtgcctcgagtacgcgctgcagctgcaggaggcgtcgccggacagctccagcacgctgaagctgccggaggcgtcgccgggcagctccggcacagacaacacgcagctcgttcccggcgttgcatccaagtaccaacgcaaccagtcgaccgccagcgatgggactgcggccaccatgtccgcgaacttgggggacctcgacggcatgtcgatgaggagagttttctcaaagatgatcaaaagcgaggagggtaggtgaagccaaaattaccttacgcatcttcacatcatcccatgtacagaactgcaag

SEQ ID NO: 37820 - DNA, 784 bp, Setaria italica
  Peptide Sequence Number=SeqID_103794
ttttttttagtttgggactcatgcgcatcaacatgatatatatccacgtggagatacatcaaactgtttattttcctttatttctccattttcataaagaaaacaactactacctcaattcttaaatgacgttatttacggcaagtaaattatttcattccaacacgtgtcacccggtgagaggaagttgccacgtcggacgcgcgccgatgacacagtagccagcgttcagctagctcaggcgtcgacgaagacgtcgagctcgagcacggcgttggggtggtcgaggctgacggtcttccacagcacgtaccctcgcgccatcctgaacctccccgtgccgccgaccaccgacagctccctcaccggcgcaccgatgtcgtccctgccgacgacggtgacggagctgccggcgtagggtcccgaggtgagcaccacgttcatggtcaccagcagctcggggttccccgtcgacgcccagatgtagtgcccctgcgcgcgccccaccgccgacgacgacctcgacgcgctctccgtcagcacgtcgtcgatcacgacggtgtcgccgaagtggccccggggaccgttcagcacctgcaccgccgtcggcgacgggcccgtcagcacgtcgtgcatgtagaagtggaggtgcgccgacgccgccgagacgggccgcgtcgccgggccggcggcgaggatgacgacgagcagggcgacggagtagagcttgcacgaagccatggcgaggagggggtgtgtccgtgtgtccgtgcgtgtttttcag

SEQ ID NO: 37821 - DNA, 576 bp, Setaria italica
  Peptide Sequence Number=SeqID_103795
aataccaaagaatcttgccatcaaaattcagaaatatggattgaaggacttttacaagtaaattgatgtgacaggaaaatgttgtgtaatctaaatggtacattgataatcgagctgatggaaaaatgttgtgtaaactaaatgctacattgatgcacattcagatagaacccttcaagaagtgcatcagttcagagaaactgaacttgaactatttacgaaagttatgcaaactctgaacaatgacataatgtttcagcactatgctttaggggagatatgcatactaatatttttagtagcaagcttttagagaatttaactctgaactatttttgaaactaaactgagtgccggttgcaaaaggacagaaatctattccttgcctgtgttcattcttcatcagtataaaaaggaagtgatttttgaatcaatcaaaacattcctggacggctggaccatattcctgaagtacttggtccaagactgtctgtcaggccacttttgacaatggcatcgccgacgggtaaaaactcctcgattctacctgtgcagcacctcgccggaacaacgcct

SEQ ID NO: 37822 - DNA, 293 bp, Setaria italica
  Peptide Sequence Number=SeqID_103796
gattgagctcgcatccatggcgatgcggctcctgtccccctccacgccgcccccgcacttcccgagccccggcacgaagccacccgcctcggcggccgcagctctgccgtcgtcgtcgtcgtcctacttctccctccgcctccgccgcgcgcgcgcggctgcagctgctggcgcggccgcggcaggcgggcccgaacgggagtgggggccggttcggagggggagacgatgggcggggcgttcgacgaggggcctcgcggagatcgcgaagaaggtgccgctcttcgagccgg

SEQ ID NO: 37823 - DNA, 248 bp, Setaria italica
  Peptide Sequence Number=SeqID_103797
gggattttggaccagaaactcatggagatcctctgctctagccttctgctagagcttggcagcctcaggcggattgtctgagataggagtagctcagattcacccagcgttggggctcagcttctctatcctttcctccccctttagcccagcggtgttggttgttgctactgtgcttctgtcttccatggcggcagtggcgtcgtcttctcctccggcggcaattgttgggccgcagccgacgtggg

SEQ ID NO: 37824 - DNA, 396 bp, Setaria italica
  Peptide Sequence Number=SeqID_103798
gaacccgcagcttcgccttgacagggcggtgctctgaccaattgaactacaatccctgcggggtgtatggcatacctattcttaaatagaaccataagaagattcgattcgtctgttgtgctctaagaaatagacgaatcatatactacatacccacataggatatgtgggtatagtgagagtggcataactagtatgttgcgattttttatccctaaaaataaacgataatctgcctttccataagaaaaactcttttctttataagataaagaatcagagagatatggattaagaaaaaatttccccatttctctttatcctttatttctatggatcagacattttttttcttccatacaaaataatggatttagttcatattcacgaagccct

SEQ ID NO: 37825 - DNA, 493 bp, Setaria italica
  Peptide Sequence Number=SeqID_103799
cctgtatgtccacatcagaactgatggtatatgctgatgtgcttggttctagtgaaaacaatgtgctcaagtcaaccacaatgatatctggcaacaagtccttccacgagggttagccggtgaagactaaagaagtaaggagtatgcaggaaacctccgcatacccattggtaggctatttgctataatacgggtgttttcttgtctctcatctcatgggttcagcaaagggaattgcaattaccaccatgcagctggtattgatatggagcataacatccaccatcatgttggtcgcatccggagctcgtcctccctctgctgctagtcttgcgcactgccccaaaacctgtggaaatgtcagcatctggtacccctttggcatcgggcctggctgcttccgacagggattcgaggtcacctgcaataggaccaccaaaccttggaatctcttcttgggtaacaccaccactcaggtgaccggcccggtcct

SEQ ID NO: 37826 - DNA, 631 bp, Setaria italica
  Peptide Sequence Number=SeqID_103800
acgtccgctccctcctcctcgccgccgccgcctgccggggcctccgcacctgcgcctcccacgcgctcgctttcctcccctccttccacctcctcgaggtggcgctgacgcatgacctgctgcgcccgctgctgccgccgaacccgagcctgcggagcctgcgcctggactgcgctcgtctcgaggacgacgccatcggctgcctcgcgcgctccagcctgcacgagctgctcctgctcaactgcgacaacataagcggccgactgctctgtgagcttggcgccacctgcagagatctcagggtgctttctctcaactctcttggtgagcgtagggggctggtggtaaatttctctgatctacaggaattgctcaatgggtgctctcagctagagtcactgagattggaacttgatttctcaacttttgacgaccccaactttggtcatgtgtgggcgtctgcttcccaaaggctatcgtctcttgagatcggttatattccaatgataatgttgcttgagtttctgactgctgttgtggaagcacgacaacacatggattatgttaaggcaccggtcttctttcctagccttcaaaagctatgcctcactgtggatttcataacggacca

SEQ ID NO: 37827 - DNA, 264 bp, Setaria italica
  Peptide Sequence Number=SeqID_103801
tctatttctaaagttgtaatgataaggcgtcagaattgcatgaagaagtaggctttcattaggatcagcgcaaataccagaattcagatttggtaaagcttgataagaacgcctgtgatcaagcattcaacctgccaacatttaagtagaagctacagcatattgctgtattatttttcaatgtggatatactaatacttcctaatttcatatgatcggataatctttatgatttttattccaccagcaatcaactgtgcagtg

SEQ ID NO: 37828 - DNA, 325 bp, Setaria italica
  misc_feature (270)..(325): n is a, c, g, or t
  Peptide Sequence Number=SeqID_103802
tgagatacggcggcgccgccagcatggtgaggaggaaggggaggattggcaatgggggatcatgtcggggctggggccggggctcactgtcgagactatagttatgcatgccaccgctggcaggaggaacgaagactagcttatcctagcttcttgcaaggatgcgtattgcgtaacgtggtttgggtgtgactaataaattgaaaaatggcaaatttatagaaagataaatgagtattactctgttccagaataaaaaaaaaaaaaaannnnnnnnnnnnnnnnnnnnnnnnnnnnnnnnnnnnnnnnnnnnnnnnnnnnnnnn

SEQ ID NO: 37829 - DNA, 668 bp, Setaria italica
  Peptide Sequence Number=SeqID_103803
ttagatggatggttcaaaggcaggcagccaccttagcacgatgaagaagtttcttattgtatgcattacttgacaaatgactgatcagatcatccaaaatagcagtatcaaaccatttcaagactacactgcttcgacaaggtgcactgtgctctttttgccccttcgaaccatttggggcaggattagaagtctctgcaagcaattttccttgcaagaacaactcatgtgacataatttcgaaaattttaccttgacagtggtacctcaatgaaaagttctcatcaacagcagcaatacagtcaactgggcagatatcaagtgtagcacgaatacaccttgataaattatcccagaatgttatcgagcttctcagcttctccaatacgaataaaaattgaataccactttcccataaggccttgagtaagtcaagaatactaagtaacacggaaggagatctattcatgagctcaatggacctcacaatatagtccaagatttgatcaacaagtccagcattactttttgaagtaagaactgaagatccatcgttctgattattggtggaagaattatgatcagttgacttcatactctgctccatcaaggaattaagaaaagcaggctgataacgagcagtctagtacgttctaaaaggtttgtaa

SEQ ID NO: 37830 - DNA, 653 bp, Setaria italica
  misc_feature (631)..(653): n is a, c, g, or t
  Peptide Sequence Number=SeqID_103804
taaagaatagaattgggtcttgaacattcctacaagtaagactgaagatggatcttcctaaaacagttgatagtggcagccggattgagctggaacagatacagtgctgcatgtatatgtgttcattctcttggcgtaacgttggtgattgaacctctgaacttcctgacaactgcagctgatgcatttggttgcagcttctttatccacgaaggtgcatacgcttcattttcttggttattatgcacagcagtttggaatatttgcggcacattgaagcaaagctaattcaattagcgtccaattgcgaatgctcactactagagtgttgctccggccactgctcacacaacaagaacctacatcagagaagttttgtacatttttattttgcattttttttctttcgtagtgtgatcagcctcctgggaaaaacctgaaatagtttaggtacatgattcttgcttttgagatctttatatgtacagaattctgcttgtaagcacgtgaggattgctgagtgcctcacgccacactctctatcgggacttctttactagtcctggctacaaagttcacaaatattttcacgttgctttataccgtatgatttgttgtggtatttggaccnnnnnnnnnnnnnnnnnnnnnnn

SEQ ID NO: 37831 - DNA, 1349 bp, Setaria italica
  Peptide Sequence Number=SeqID_103805
ttccatccttactgaagggccattggttcaagaagctcattctcttccaaagacggagtggcataagtcacctctctcacatagcacacgcatttacgattgtggggactctatacaggatatgttgatcgagaaggaataccatgttgagcttgttggccatgtttttaatgataaggaactgattgtcaggtacaagacagatattgacaaccaaaggatcttctattctgatctaaatggctttcagatgagtaggaggcagacatatgataagattcctctacagggaaattattacccaatgccatcacttgccttcttgcaggattcacttggtaatcggttttctgtacactccaagcagtcattaggggcagcaagcttaaaaactggatggctagagattatgttggatcgtaggctggttcaggatgatggccgtggtctggggcagggagtaatggacaaccggccaatgaatgttatattccatctcctcagggagtccaatgtctcagctttgcctaaaacccacagtttgcttactcttcagccatctctcctctcgcaccgtgttgggcacacctgaactacccaatgcatgcttttaagagcaaaaaacctcatgaaaaatccttcaagctgcctcaacagtcattcactccattaactgcgtctttgccctgtgatgtgcatatcgtgaacctgaaggtccctcagcctttaagatttcctcattctgaagcagccgacccaagatttgctattctgttgcagaggagaggctgggacgcctcatactgcaaaaggggtggactgcagtgtacaacagttggggaagaaccagtaaatctgttctacatgttcaaagatctgtcggctgtgagtgtgaaagcaacttcgctgaacctcttacatgatgaccctgaaatgctagggtaccttgagcagatcggtgatgttgctcaggagggaaacgttcttatctcaccgatggagattcaggcatacaaattagacctacagccaccatcaccgcaggagtagtttgcctgcaagttagacttaagatgggtcttgaacattcctacaagtaagactgaagatggatcttcctaaaacagttgatagtggcagccggattgagctggaacagatacagtgctgcatgtatatgtgttcattctcttggcgtaacgttggtgattgaacctctgaacttcctgacaactgcagctgatgcatttggttgcagcttctttatccacgaaggtgcatacgcttcattttcttggttattatgcacagcagtttggaatatttgcggtttatttctttcttacctt

SEQ ID NO: 37832 - DNA, 2339 bp, Setaria italica
  Peptide Sequence Number=SeqID_103806
gagggacctctacgatcggatccagttcctcgacgtcgacggcggcgcctggaagcaggggtgtaaggtcaagtaccgcggcgacgagtgggacggcgagaagctcaaggtcttcgtcgcgccgcactcgcacaacgaccccggctggatccgcaccgtcgaggagtactacgagcgtcagtcgcgccacatcctcgacaccatcgtcgagtccctctccaaggattcgcgcaggaagttcatatgggaggagatgtcgtacctggagaggtggtggcgcgacgcaccgcggaagaagcaggaggcgttcgctaagcttgtacgtgatgggcaactcgaaatcgtgagcggcggatgggtcatgaacgatgaggcaaactcgcactacttcgccatcatagaacagatgatggaggggaacatgtggctcaatgatactattggagttgttcctaaaaattcttggtcgatcgacccatttggttattcatctacaatggcctatttgcttaggagaatgggtttccataacatgctaatccagagaacgcactatgagctgaaaaaggagcttgcagtgaaaaagaatcttgaatatttgtggaggcagaactgggatattgaagaaacaactgacatatttgttcatatgatgcccttctattcctatgacattccacacacatgtggacctgaaccagctatctgctgccagtttgactttgctcgaatgcgtggtttcagctatgaatcctgcccatggagatttgatcctgttgagacagatactgacaatgtgcaagagagagcaacaaaacttctagatcagtacaggaaaaagtcaaccctgtacagaacgaatacacttctcattcctttgggtgatgatttccgatatgttagtgtggaggaagcagaagtacaattccgcaattacgagaagctttttgattacataaactctaacccccatctcaatgctgaagtcaaatttggtaccctggaggattacttctccacactgagagatgaagctgaaaagataaactattcacgcccgggtgaattgggttctgctgagctgcaaggttttccaacactttcaggggatttcttcacatatgctgatcgaaatcaggattactggagtggttactatgtgtcgaggccattcttcaaagctgttgaccgtgtactagaacagacgctccgagcctcagagattctgggttcatttgttctaggatactgtcagaagtttcagtgtgctaaactccccatcagcttctcacacaaactgacagcagcaaggaggaatttggctctttttcaacatcatgatggggttactggcacagctaaggatcatgttgtggtggactatggcactcgaatgcacacttcactgcaagatctacagttatttatgtccagggctgtcgaagtgcttttaggagatttccatgatagatctgaccctacattgctatcacattttgaaccagtgcaggaacgttcaaagtatgatgttcagccagtgcataaggttcttgaccctcatgaagggaacgcacagtcagttgtcttttttaacccactagaacaaacaagggatgagattgttatggttgttgtaagtactcctgacatttctgttctcaattcgaatggttcctgtttgcaaagtcaagtttccccagagtgggagtttgtcagcgatgaaaagatttcgacaggccggcaccgtctttattggagggcttctgttcctgcactaggtttggagacctactatgtggttactgggcaggattgtgaaaaggctgttcctgctgttgtaaaaacattcacagcttcacagcgatttccttgccctgaaccatatgtttgttcaaagctggaaggcaaaacagtggaaatgaagaactcttattacactctttcttttgatgtaagtcatggccttcttcagacagtaactcgtctcaaggatggggaacaaactgtgataggtgaagaaattggcatgtacagaagccatggaagtggggcatacttgttcaaaccaattgggcaggctcgctcaattgtagaggaaggaggacatttcatccttactgaagggccattggttcaagaagctcattctcttccaaagacggagtggcataagtcacctctctcacatagcacacgcatttacgattgtggggactctatacaggatatgttgatcgagaaggaataccatgttgagcttgttggccatgtttttaatgataaggaactggttgtcaatatctgtcttagtaacctgaacaaattacaagttaccttaa

SEQ ID NO: 37833 - DNA, 427 bp, Setaria italica
  Peptide Sequence Number=SeqID_103807
gcaggcgtcggcgcaagcccgagcaggggctcggcctcgccaagcgctgcggcgtcgccgccgacgactccacctgcgccaagtccgccacctccgccgccgccgccggtgcaggtgcagccactggcagcggcactgctgcatcttcagcttccactggcggctctgcttctacagtgaccaagccaacagccaacggaggcgcgacgcatcgcttgagcttgaccggagcgtcggccttggtaggcttcagcttcatctggtgcaccatcatggtctgataggagttaccgagctgcttcaaattttcctggagcagtatttgagtacctagcatgcatagtaccggcacaattctttggtggattttggacctgtgtaatgttgttctacatgtgcttatcatctggctattgtttcatttcgc

SEQ ID NO: 37834 - DNA, 932 bp, Setaria italica
  Peptide Sequence Number=SeqID_103808
cgcagccggaacatggggcggatcccgaaggaaaccagagaatcgccggtctgccctgagtcatcctctgctcttccaactgaagccttggtcgtggcgtcgctgtccgcgcgacggacagggagatgaaaagaggcggcggcggtgtgaatatgccgggagatgatgggtccctgcctccccaggatacttcgcccccgttccaccaccgggagcctcctcacgcccttccattccatctctgttccgccgctccagggtccgggagaagaaaagtagtagctccgcctccgcccatgccagtcctaccttacggtacccaaaattcttgactcgctcgctccaatcgctgtgacgagtacttactgctacgtttcttcaaccatttctcgcctctcagttccagcgcgtcgcttgtgccatgaataaccacggcatcgttctagccgccggcaccgagctcagctggggatgtagctgaattctgtaatctctggatgctcatcatacgtgccaagaacacgaggatcaatcccctcaaacgagcagcgaaggaagtgaccaggcgagggaagcagagtagatggaagctgggtttctgtggaaagagagcggcgaccaagccggtgcggcgagaatgtccggcgggcacaacaagaacaagaacaagagcctcgagtgggatctgaacgactggaggtgggacgccaacctgttcctggccacgccggcggcggccgcgccgtccgagtgcagcagcagggagctgagccgggcgcagggggagatcgacttcggcgtcgtcgtcgacaagaggaggcggctctcgccggaggaggacggcagcgccggctgcagcaacgattccgctgtggcgaatggagacaacggccatgtggtgtctgttcagaggaggcggagcagtgaggagg

SEQ ID NO: 37835 - DNA, 534 bp, Setaria italica
  Peptide Sequence Number=SeqID_103809
aattccctacaatacagaattcagagttccaaatcagtgatgctgcgtcatggtccataacgaattaacgataccatgagccataagaaattggtcctgagaacaatttatttgtaaagacaacaaagtcgtcctggaagcgccaggacaaaaaggtcaatgcaaatagctgcatgactgagaagagccaggaaaggcaccggccggtgatccgccaaggcacatggtctgcaattctagcatggtgaataaagcagagggtgattagtacccacacatacttagtgcaccagacagctaacattaccataagccttcatttgcaacgcacgttacgcaaagttttggaggcttgtcatttcgataaatacatgctgggcatggcaaactgcatcctacagcagggtgttgaaaactaaagtgcagaaagaacacatatgcatcaaccaaaagaccgcagcatccagtaaataccgaaaacagagcagccaactaatcatgcaagaaaagagcaggcgacggggacaatcagaa

SEQ ID NO: 37836 - DNA, 1291 bp, Setaria italica
  Peptide Sequence Number=SeqID_103810
gcggcggagccaaccgtcgccgcccctgccccgggattctgggctctcccggcgcgggcagacttcgggcagctctggagcttcgccgccgcgccggagatgatggtggccgccgcggcggccgcggccgcgccggccatggcgggggaggcgtccgcagccagggtcgggaactacctacccatggcgcagggcaacctcaacctgctcgcctccttctccggagggccagctccaactgctgcgaccgccaccgtcggacgggccgaggaggagaccgcacgctgaggatactagtctcatctgtcatctccactccaccactctagggttttatttagggttcctttctccggtttgcttgcttggcgttcgcagctctgtgtgtgcaagtgtcactcacctcagctctactcacttctgccctggttctggtcgtcccagccacgtcgccttccttccttgctccccccttgtgtgggttaattgagcaagagcacctgcaaaattgctccaccttgctcatgccctcaatttcattggggggaaaagaggagacaaaaagcttgccctgttgtttccaaccccacctcaatttcctaggaaggtttagccgcttgctcagtagtaggtctcttgtgtcactccacccctggttgcagtgcagttcagtgtcaagcatccacagctagtccttgtcgaggagcaaatcttgtcctggtcatggggggtgtgcgcgtgtgataaaattctagtcagtgtgtgctgttgctgtcgaaaactcaaatgcagtctcctttctgttcgttccaacaagaaggggaagaagacgacttcctctttgttggacagggaaatggcgtcaaattgccgtccatctctgcagcaggtgcatcagctccctacaggaaggcaggtaggggaagaagaagaaaggaaggaccttttcttaccacaaacaaacaaacaatggaggctggccctggctgtgagttgtccacttgttctgctcatctgttctgtctccttgctgtcattttgattgttaccttttgtgctcttatctggattggattaagtcatactgcttctgcttggggagattgagaacactagctagtctagtagtcatcaattgctggtagtaggtaagttgagctcatgtactgaatgtatgtatgcatgtatgtatctatgtacggattgtttgttgatcaggtcatgaattaatggacaaaaataagaatggaaggggggaaaaaaagaatcatgaatgaacaaaaaaaaaaaa

SEQ ID NO: 37837 - DNA, 388 bp, Setaria italica
  Peptide Sequence Number=SeqID_103811
tcggcgaggaggaggtggactgcaagcagcgggagagctcggcggccgcggcgagcttctccggcctgctgcgccagctcaacgagctcgagcagagcgtcgtgacgtgggggcggaagagcaccggcaagggttgctcctcgccaccggcgccgccgccgcctccaccgccgttaccggcgcggccagtgaagcaacgagtcgtgcacagcggcggcggcgacagcaaagaaggtcacggcagcttctctccgccgcctccacctccaccgccgttaccggcgcggccagtgaagcaacgagttgttgtgcacagcggcggcgacagcaaagaaggccacgggaacttctctccgacaccgccggctctttctttccagccttgaga

SEQ ID NO: 37838 - DNA, 533 bp, Setaria italica
  Peptide Sequence Number=SeqID_103812
agttgcagtaataataagatggtgcctagggatcttcaattcatcagcactgccggcctttttgttttttcacttgcctgtgtgactcagcaccagcagccagtgatctcttcacgtgcatcaagcatgccctgcgtggctgtgtcaaaactggatcaagattcaagatccggacctcagatttgctttcaccgctatttccatcataaaaggccagtgatagaggaaaacacagaagttaactacttgcactgaaattggacatgtccagtgactggcacatgtgcaaagaagcagccacttccattcaattagtgaacagccattatctgcaattcagcatatcctattaaggacaacagtggttgaatatatgatcatctcctgcatgttgtattctcaaacaaacaaatatatagagtcatcagaatctgtcagcaaatatttgtcttactttccagatgcactgtactctaagaacaatgacacttgaacaaatttcgcactaagaaaaaatttaaaaaactaaaaaa

SEQ ID NO: 37839 - DNA, 430 bp, Setaria italica
  Peptide Sequence Number=SeqID_103813
agacattacatgatttggtcaaaatgaaataggttgagatatcacaaacaaacaaactcaacccaaatagtatcatagaaagattcatgattccaggcctggtagtctgggagtgagatgtagtggtttctaacaaaagatatccattgccatgctcaaggaaaaaagcaccgtgaggatgatagcttgtgcccaagtccagtgcagatgcaagaagttaagagtacaatcacaggcagagataaatagtacttctccttggtgctcccatgctctgaaaagcaaataatttcagagaattatccaagcaaaagcctttgctgcactgacactgaagtaaattctgagcagctagtcaagtattcatacactgatagcccaccaccttcacaatgcagtcgatttaatcttctctgtatgtctgaactct

SEQ ID NO: 37840 - DNA, 611 bp, Setaria italica
  Peptide Sequence Number=SeqID_103814
tattctcgcctgctctccgccgtcgtcggcccctcctgctccgtccccggcggttgccttcctccgtcggtcaagcggcacaaatcgggtagatccaccacgggaggcctcttccgcgccggcggcggactattcggccccactgcagcgctgcggcaccggggtgaacgtggccgccagggatcctggtcgccgcctagcacgacagccgggatccgggctctccgccgccgcgaccttcaccgtgcccccccaccccgaccccggtcgcctgccaactaaagctggaggaggtcacccggatccaccatccaccgcatccaagccgtgccgctgccgtcccctgacgaagcctcccttctacatccacgttcatggttcacattcagttgggtggggcaacagattcttgacttcgttctggcgtctgctacaagcctagtagcagcccacccgtgacgaactacctacggtgcccacactggcatcgtcatccacttcttcgtgctctcccccacccgtctgtccgtacagtttccgtcacaaacgtgccaaaacagctgctaagatggtttgcagccatcccaactggaatgaggccacaacgaaaa

SEQ ID NO: 37841 - DNA, 1418 bp, Setaria italica
  Peptide Sequence Number=SeqID_103815
ttttttttaaaagtaaaaacgtaaaaaataaaaacaaaaattttaaattaacaaataaagtaccaattacaaacccaattttaattacaatcatctttttttttgtcgaataatcatcttattgaaggatgtagtgatatgatcaactgctctggtccagtactactgcaacagtgcaatccaagaaccgtttccatgactcccattcggatgtaggcagctcatttaagagctagctcttgcagacaagctgcttactatggtgttgagccaatctttagcaatgtagtggtaagctgcctccgtcaggtggacaccgtcccagaacagacgggtggatggatcctcgcatgtcgttgcagctttgtcgccacaaacgattgatagattgtagtggtacctcccaggtcctccacagcaaatggtaagagcgtcctttttaaacccgaatttgtcaggcgacttgaccatctccgtgacgtggttgaacagatcggtgtggatgatggtcacgtcggggtgctttgcccggagcttctcgatggcctcccgcagcagcgagttgtggagcatcacaatctcgttgggctccttgaggcagccggtggtggcatcgtattccgacgcgtcggcgtcggcgaaggtgacgaggaccggcggcgcacatccggacgggatcatcccggggacaacgagagtcttggctccatgctcgattactctctcggcgcccctcgagatggtctggatgagatctgggacgaaggctctgatttcttgaaagctcttctttccaaaggagtactggtagtcgttgatcccgaattcacccacgatgaagagcgatttgccgaagaactccttgcactcttggtccgttttgcacagcgaaggcttaagctcctcgaaccagccaagctgcacttctaggctgatgttgagagggaacgggttggcgccgggggcgtccccgatgtggaagaagctcgagttgagaccggtggcgctgccgacggcgaagttggcgccctgccggaagctccccttgtgcgacaggtacggcggcacgagaggcaggcccaggccttgagcgatgaagtcgatgacgaggcggccgttgcagttgcggccggtggggcggccgccgaagaaagtcatgccgtagggagggcgcatgacgacgtcgaagatgttgtaccagccgaagacgacggggttgttgccggtgtccgtgaaggagtcgccgaaggcgaagatggagtcgaacggcgccccggcgcggagggacgaggcggtcgtctccgcctcggccgagaggaagacggcggcgacgacgagcgccgccgccacggaggcagcaggcaccaacctacgaccaccacccatgttgatgcctcagtgtatatacgtgttgctgc

SEQ ID NO: 37842 - DNA, 502 bp, Setaria italica
  Peptide Sequence Number=SeqID_103816
aggatacacgcattgatatagtaagaaattacaagattataaccatgggaggccttagccaggaaaaaaaaagaaaaacaacagaggactcacccggttggattgggacatccactcaactgaaatatgacctccccactccactcgtcctggcagcacccaccaacaattaccctcatctaaacaccgaaacctccgtaagtgaccctgcgtcgacaagggacctgacaggagcatactgccaccccaccgaggagacccccgccatgcgggaccctccgtcgaagtgctgctgcagacaccacactccacctgacaaagtgatatcactagatccggatctctcagaagctgcctcgcagccgccaccacggtacacaacgcgcgagggtcttgccacatccgccgttggactccatctcgctctcgcgcgggggcctcgccacgctcatcccagaactccacgtcctatatccgttttcttcgttgtttgtctttacta

SEQ ID NO: 37843 - DNA, 419 bp, Setaria italica
  Peptide Sequence Number=SeqID_103817
tttttacgtaactttaacaacaagtaattgccttaatcctatagtctcagaccatggaaggaattgttcaaactcacaggcactactttcctcaaaacagatgggcaaacagagagagttaatcagtgtttggaaatgtatttgtggtgtgccatgcaggattccccaaaacaatggaaaagttggctcctcttgctcaattgtggtacaactccaccttccacactgcattaggatgctctccattcgaggctttatatgggcatgaagctgagttgggcactgtagtaccagagcaaattgatgaacacatacctgttgttgacatgatttaagaaaagagaagctcagttcacatcactgaagcaacatcttgcagcagctcgaaatagaatgaagtgttgacagttactgttctg

SEQ ID NO: 37844 - DNA, 488 bp, Setaria italica
  Peptide Sequence Number=SeqID_103818
ctttccttcgagggttctggttctctgctggtggtggcaatcggggtgcttctgttgttggtggtgtgctggataggcggcggcagagagctggggttggtcgctgctgccgccgctgccgctgcatggagctccgagaagaaatctggactgtagctctctgcaagggcaggtgcggcggcgctgtcttcctcgatgatggggtagtggatccagggcacggtatcatcaagatcaccgttgtcacgggtggcgtctaggccggaagagaagtcgtgaaccgatgttaccaatccaccggcgccgaagacacctcccgtcttgaacagcgccacggggtcgcttcccggctgcttctcttgagcccggctgctgctggcagcagcgcaggtgaagggcgggaacgaagtctgcgtctgcttcctccggccgtgcaccactgcctgcccgttctcccatagcagctcggcgaactcgttgccgtcgga

SEQ ID NO: 37845 - DNA, 824 bp, Setaria italica
  Peptide Sequence Number=SeqID_103819
atataattgttcggcgcattctgaacatatgtagcaaatgaaaataatacaaaaaagcaacatagtacacttttaactttaggaccacgagtgaagcaatcccactgagactgactcaactatgaatgaatcaatgaattgctataacagcaaagcagcatttgtgcacttcttttcggttgtgacactatcttggtacatgttcacaaaaaatcggggtaactcaagaaaagttgctctgcattttcccgccccttttacaaagtttagataactgtccctttcccgccaacttatatcttcccttccaactcttcacactaaccctgagcaacagctcagctgtcctatctaacggcttgttcttccttgtcatcattgtgatacctccacaagcgagaagaaacttttgtgctctcccacttgaatattgctacaaaccatgtagatgaggaggccaaacaacaaaacagcagcttgaaagggctccgtctttgtcaatttccaatccttgttaataagactggagcagtcgctccccaacaaggaccgggttgttggcatttcctgaagagggtctgatgatcaaggagttccctatgcctgtgtagactgagttggcatccgagtatggttgtgctcaccctcatatgtcactatgagcattgatgaatcatctacacaccgttcaacatgcttccttgctgggcagcccctcacgctgctgcatttgtagtaacccctcttcaatgtcgaagcaccttgaggatagaaaacaaatgcagatagcatcagaggagagatgcacttggataaagcgtgtg

SEQ ID NO: 37846 - DNA, 1450 bp, Setaria italica
  misc_feature (42)..(42): n is a, c, g, or t
  Peptide Sequence Number=SeqID_103820
gttgttgtcctttggtctagttctcttttttagttttttttnttttttttttttggttcaaatcacaccaacaacttgcacctttcattctggaatgcttacacctggaaaacccatatggtcctaacttgtcagcagtcagtacggaccacctttgatactggaatgtattttggtcaacaaaagaggtggtgatctttcgataaagcaaaagcaacacacacaggcaagtcatcgcaagtgaacttgtgcacgctaaaagccaatcccgccatcctaatccatccttgcaaccctttttcctcaatttttgctcagtcgctcacttcttttcctcaatctttgctttcaacccccttaaaacttactcgcgaagctcaccagtcactatcgaatgccagattttcctttccttcctgcatcatctttcaattatatgtgccacagctcacaagataggtgaacagcttgaatgtccccactatagcatctgtaacagcatgaagctcaggaggggccaagcagctcatcagattctcaaatggctccatgttggttgctgttgcattcaaagatctccggactgagtttctacatgaccagcttggccatccagcaagggcatggcctacagcctacgcttcctgtatggagtgctgcgtcttactgattctctaggtctgggcagactgtgcgggcagccgggtatggttgtgctcgccttcatatgtcacaattagcatcgctgggtcatctacgcagcgctcaacatgcttccttgctgggcagcccctgacactactgcatttgtagtaacccctagggtgaggagaacccttgattggcttctgcccatacttccgccaagaatattcatccggagggatatcagcaattttattgctaatggctggcacttttatcgacctcttaattcgcaatttcctcctctttgagcaatggcacctgccagtagtggcacacttgcctgtgccatcctgcccccgacccatgcaccgtcgcttgggtgctcggtgcgcatcagctgggtcgcttgccaccggcgcaccaaccaaatggaacggccgcttcccatccaagctagcaacactcccatccatactcaaggatgacatgaacgatctcgccgacgacatcgttccagcaccaccactggggctagggctatcaaacttcaggctgatcccactattgctcctcttgaacatctcggcctgcagcttctgccgtgaaggctgctggtggaatgggtaccgatgcgctacgttcccaatctggaactgcaccgacaatggctggaccatcttcggagctccatacggatgagcgccgctcttgctgctcgagctggccaaatccagccctcgtgggtctggcacgccaccaatccgagcgcgcaattgttgtctattaacttagttagtacggt

SEQ ID NO: 37847 - DNA, 1453 bp, Setaria italica
  Peptide Sequence Number=SeqID_103821
taaacctaaaacaaaaaagaacgaaagaaaagaaaaacttttagtagactactacccaacttagaataattgctacaaaccatgtagatgaggaggccaaacaacaaaacagcagcttgaaagggctccgtctttgtcaatttccaatccttgttaataagactggagcagtcgctccccaacaaggaccgggttgttggcatttcctgaagagggtctgatgatcaaggagttccctatgcctgtgtagactgagttggcatccgagtatggttgtgctcaccctcatatgtcactatgagcattgatgaatcatctacacaccgttcaacatgcttccttgctgggcagcccctcacgctgctgcatttgtagtaacccctaggatgaggggaacctttaattggcttctgcccatacttcctccacgagtattcatccggaggtatatcagcaatcttattactaatggcgggaaccttaattgatctcttcacccgcaacttcctacttctctttgagcaatggcacctgcctgtcacagcgcacttgcctgtcccatcctccccacgacctgtgcatcgcctccttggggcctgctgtgcattcaccgggtcactcatcgcaggcccaccgatcaaatgaaaagacgatgacttgccatcaaggctcgccacactaccatccatgctcaaagacgacaagaaggacctcgccgatgacattgtccccgtgccactggtgctatcaaacttcaagttaatcccactattgctcctcttgaacatctcagcctgcaacttctgctgctgctgatgcgggaactgataccgtgaagacacattgctgaactgaaaatgtgcagacaaaggctgaaccagcttgggaggtcctccaagagggtgtatgctctgtgcgtccaaggctccagtcctaggatagacctgcgcggagctaggagaaggatgggcgctattcaacaccaccaccggggtgttactatccaggaagcctttctgagttaagaaccctggattctgtcttctactgacaaccttagctctaggatggcttctgcttgttcctgacggtcctgcttctcctcctgctcccgctcctcctccattactgagtagggagaccaccttcctaaacttggcacatgcttcatccgtcccagagctatgctccttgcctgtgcggggtcatgaggctgggagagcaaagcaagcaccctgtggcagctctccacggctgctctgttcgcctcctccacttcctccattatacacgcacgaaaaacaagcagaatcctctcttgaacacttcacaagcacctcagaatatatccaactccctcagaagcagatctcgaagacgatccagagatgccagggagcgaatccagggccgtgacccggcagtcggagggcgcagtcgtcgccacggaatg

SEQ ID NO: 37848 - DNA, 491 bp, Setaria italica
  misc_feature (296)..(296): n is a, c, g, or t
  Peptide Sequence Number=SeqID_103822
aaagaacaatccctggtctgagtaagtagcagttctgtgcaaacttgttttacattgtttgccctctatggtcaggttttgatagttgagactgacttggatgctcatactttgttagtccgagtatgcttaatttgtcaactcccactttataaacatgctgcatgttgaattatctgcagctggtatgttcaaaaggtcttccaaacatctgattgcattagcgttggtttgttttgaaaactttagacaaataacagccttagcagttcataccgttgactattaacatacanttttttaaaagaaaagctgtccattgttagcaactaattctgcctttcctgttgatttgctaacaatgcaaacctgattgagccattaatgtgatgcaggggaagctgggtggacacctgatcagtggggccattctaaatcacgttcagcattctccccggattataatacttatagacaacagcttactagcc

SEQ ID NO: 37849 - DNA, 1632 bp, Setaria italica
  Peptide Sequence Number=SeqID_103823
tcccatcctcctcccactctgacgacgacgacgacgactcgctccacacgttcactgccgcgcgcctcgacggcgcaccgggtgggggctccgcctccggccggcccccgaagccggattcctcgtcagtgtctgccgcagccgcagctgctgcagcggcggcgggaacggggcctaagcctgagcctggctctgcggccgccagcgacggtaaggaggaccccaaggggctgttcactgataacctccagaccagtggcgcgtacagcgcccgcgaggagggcctcaagcgtgaggaagactcgggaaggcttaaatttctctgctattctaatgacggtgttgatgaacacatgatatggttggtaggtttgaaaaatatcttcgcccggcagcttcccaatatgcccaaagaatacattgtgcgccttgtcatggatagaactcacaagtcaatgatggttatcaggaacaatattgtcgtgggaggtattacttatcgcccttatgcaagccagaggtttggagaaatagcattttgtgctattacagctgatgagcaagttaaaggatatggaacgagattaatgaatcatttgaagcaacatgcacgagatgctgatgggctcacacatttcttaacctatgcagataacaatgctgttggttattttgtaaagcagggttttacaaaggagatcacattggacaaagaaagatggcaagggtacattaaagactatgacggaggaatattgatggagtgtaagattgaccaaaagctgccatacgttgatctggctacaatgattcggcgtcaaaggcaggccattgatgagaagatcagagagctttctaactgccatattgtttattcaggaattgattttcagaagaaagaagccggtattccaagaagactgatgaaaccagaagacatccctggtctgagggaagctgggtggacacctgatcagtggggccattctaaatcacgttcagcattctccccggattataatacttatagacaacagcttactagccttatgcggatattgttgaagagtatgaatgaacatcctgatgcatggccattcaaagagcctgtggattcacgtgatgttccagactattatgacattatcaaagatcctattgatttgaggacaatgtcgagaagagttgagtctgagcagtattatgtgaccttagagatgtttgtcgctgacatgaagagaatgttcaacaatgcacgaacatacaactctccggatactatctattacaaatgtgccacacgacttgagaatttcttctcgggcaaaattgcatcacagcttgcacaagcctcaaccaagagctagattggcgcaggttcaccggacagtccttgtaaaatttttctgtatctgttatagtcgttgcgtcccttgttgtgccgtacagcgctgaactgttagcttagcatgttttcgtgattgtaaccagtaggactaatcatgattttacatattgcggcttaagctggggtttctgattgtatccatacaataatagagtgaggagatcagcccttgaagaaactatgtcaaacatcattatgtcatcatcggttcttcatttttccag

SEQ ID NO: 37850 - DNA, 567 bp, Setaria italica
  Peptide Sequence Number=SeqID_103824
cgcacctcctagcctccgccggcgttggtcatcgcggtaatctaatttaatcccttttttgatcttgtggcggtggcgattgctaggtttaaactcatcaggattgttcctccttgttgaatgtccttgtatttatagttctcgacgtcggattgggtgccttcggggccaagtatctggaaaataactctaggatcattgagggcttcctcctggtgaaaggaagcatcaaacggggctaaaacgagtcatgccaatcagcctggaccccatcggccaatcgacctgccctattttagcctccaatgtccgatcgcttcatacaaaagttgtagatctcgtcgagctatgcaattttccctataaattcacctcaatcgaagttcggatgaggaagatatggtccatgcaattcttagctcctcctacaggcctgcagttcgatgttcatgtttggaccttccaatatccaaagttcgggcccaagtctaacttggaaaaaaacccttcatttatgtcatattccctcactagctccatggtagttttcattcttgtaagtaaacc

SEQ ID NO: 37851 - DNA, 1153 bp, Setaria italica
  Peptide Sequence Number=SeqID_103825
aaaggacagcaagttgataacatcactaacaatatacaaatgaagcaatctaaaacacaaaaaaagaatgagtgggacctgttcgaatgacaaaaatgctgcataccacccgaagattacagtgtagcctaactggacacctgaagggaaggtaagaagttaaatcaagctcataaagtgcagaaaacaggtgtccacaactgatgaaacagaagtaatctacaaaacttgatgacaaggtttaagaaagatatgtggagaactaaaagactaatatgttggaagatgccaatttgcatgccaagcatactaaaaggtcaaaaaatgcaggtttctagctacacaatctgtacatgtaataagtcctgatgcctaaattgtaaccaatctcaatcgagaaattaatacttgtgaaataagcgtgaggttgtagcaagaagtatgaagatatgaatattaagatgataggattaatgccatggtaatccattgcatattgcaaaccacatagcatggctcttcactcttcaggcaggcagtacattgtgaaaactggagaccatagtgcaactagtttgaaggtaaatttgtatcactgaagaataaacacattgaactagtatgttgtagttctccttgatttcagcaggaacaaacattatttcaatataggtccaaaagtctgttctgagattctgacaccaatattaagttaatctagctcaaaaattttcttctcataccattgcaggaaggtactaaagggaaaaaaagaatgtaatggaaaatacctacaatcagtagtgacctcataaaattgcatccttgctgttgtagctcgaacaaatgatttaagtgtgctgtcaacacaaaggttcagttaatgtaaaagagtccaacaacatcaacagcagagaatgtatatgcaaccccagatgtgcaattttgatttataaaccaattgcaaattagagaaagaaaaatcagaaaatgttaggttaaatcggatacatgtaaggttggtctcttcaaaatacaaaattagtacaacattatagaaatgtatagaaatttacctagactgaagaagactggactcaaaaaaataattgtagacattttgaatccaccacataaaagaagttggttatta

SEQ ID NO: 37852 - DNA, 699 bp, Setaria italica
  Peptide Sequence Number=SeqID_103826
tttcttctatttggtttaagtttatttttaactaagttgtattgtaaattggaattctctgcaagtctaatctcttagcccacaacaagggaacaatatctacaaaaatgttttacaacaacagtatggaacactgaaatgaaaaataaatgaaaaacctgccagcagtggctgctatcagcttagtgtttcactggttagtagctgaaagtcaggctcaggatccattgctctccatctagttctgcactatctccaattacaaaaaccatgccagcacctgcaacgatctaacctagtgttgtacagttcaggacttgttgcagggaaaaggagccaaaagaaacatactgaaccagccagaagtgctaccgacgccactccttttgtccgtggtgacgaaaaaacaggcaaacccatcatattgcaaaagacgtgagcaacaataggagacaacagattccctgttcgaatgaacaaaaatgctgcataccacccgaagattacagtgtagcctaactggacacctacaatcagtagtgacctcataaaattgcatccttgctgttgtagctcgaacaaatgatttaagtgtgctagactgaagaagactggactcaaaaaaataattgtagacattttgaatccaccacataaaagaagtggtatcatgcacgccctgaaaaccagctcctcggt

SEQ ID NO: 37853 - DNA, 459 bp, Setaria italica
  Peptide Sequence Number=SeqID_103827
gttgaaggccgccattgaacactaaacctggacattgaacagataagtcaggtagacacagactagcatgacgtagaacggctaccacaaagataaaaaaatactctgccacgaacatttccaagatgttaaccatacttaagcgcatttaagctagaagtcagataacacaccaatgagcctaaaccaaaccggcctagatagaaatcacatagcacaggaatttagaggatctgatttcttcctggcgaaggaatacaaccaggttaatgtaaaacctacagaattcatcgaatcctaaaattggcaccagcaaactgggagtcagatggcgcacgaacgagcctaaaccaaacgggcctaggtgaaatcacatagcatagagaggatcgggttcttccacgcgagaatcctaagattcgcacaagccaaaacatatccccaacaaatatgcactaa

SEQ ID NO: 37854 - DNA, 469 bp, Setaria italica
  Peptide Sequence Number=SeqID_103828
ctcccgtcgtcgctcgccatcgacggcgcggcgagctctacgaagaagacatcaaacgatactggaaatctctcgggggtaggaaggaggggatgccggaacatcatgaacaagttgatgcaacacccgattgctggcaagtcggactgttgcaaaacagatgaaacatccaaagccactgttgcaacacctaaaaataactaccgcaacaccgcccgtcgctaccaccggagcacgcaacagtgctgtcgctgcaggagtcccgccggcgcaggctgtcgggtcccgccgctcgccggccgtgggcaccagcgccgccgggccctgccacttgctggccgaaggcgctgctgagcccgctgcttgctggctcgtgtagtcacaccggtggggatcgtggcattagcaggaaggggagaggaggaggctgtgcttgtagaatgaatggtcgcgggcttgcggcgtgaac

SEQ ID NO: 37855 - DNA, 6564 bp, Setaria italica
  Peptide Sequence Number=SeqID_103829
ttttttttttttttaattttcccaataaaagaactcaatagatcaggtcaaaacatgattcaggtccaaactagtactagtacagatttgaaactgtatttttaaatttttattagtgcaacttacaaaagatttgatgcatatgaccgatgccatctacaggtaatgaacatggttgatgttctacagttcagcgcaagggagtagattgtgactgagcatattagatgcatatgatcgatgtgatatacaggtaatgagcatggctgatgctctacagttcagcccgagggagtagattgtggctgacagtcagcctcacaggtactgccggaggctttcgccactgagggtttccatctctttcaagatctcctgcgacagtgtcttgacaggaagctccacatcctcgagtaattcgcctaggaacgggatggtttccgggagaagaccgacgtattcctccttcaggtgttggaccatgtacctgacaaccttcaggcccagcaatttggggcgaactttatcgctccttgtctgcatcagcacctcatggttaagaggcttccaaagaacatccgagcgtgccgtgactgccatttgccccaagcacaaaacaatagcttcatctacttcttcaaccgatggagcatccacagctgattcaatagattctggtggttccacaacaaactgggaaacaatcggctttaagagaacctggaaattagaggaatctaggaccttctgctcattatcataaaggaaacacttgtgtaaggacttcaaaatcagagctctaagattccacagttttagtccccataaattatccttctgttcaacttgaacatcaagtttggccttctttttcttcttttgcttgcaaccggccaaagcatcttctaacagatattgtacagatccctcaagtaggtacttgaagtaaggtgtaaacaaggacctgtgttgttcagcaagtttgttgatcaatttgtaaaaagaaattgcacggtccaaacttttcttcgatgacgattgatcaacttcagactcggcccattccaaagtgcgaagaaatagtggcctaaaagtgccctctgtaagcttcattgtgagagtgattatggcatgaataatactttgctccacaatattgatattcttcaaagagtcaggatgttggcgacggatatcaagagcggctaaacaatgttcatatattttcacatggtaagttcctacagccagcctgtccattgtactaacaagactagcaagcatttggaatgccaatgaaaggctagcttccccacaattaggagcaacagagtacagatccagtaaaggaggaagaataagccggactggaactttctcagtcagtagcttccgaacatcagctgcttttgcatctaatctggtatccatatgagaactacattcaggatgcaataccaccagatcaagtatttccttcaaatatggattaacaaattcacccagcttttccacaaccacctcaatcgttgtcagtgaagatagcagcatagctgtatcttggttcgaaagcctggtggttgctttagtagaaccatgggcataacttccacttgggcaacatgaaacctgatgtgctattagcattatatttttcacgactaatgggagttgtggtaaagcttttgatccaagcacatctatcagagagccagcagtatgaattaacccggaagacatagctgcatcagcagagccaatgtgattaatgattgttgagaggcacttgctgtaaactggatcatcagaggggtattcttttgctagcgtttcaagcgaagaaatagcagcaattttcaccgaagtatccgaatcaaccactctgtcaatcaattcaagaatctttaagcacaagttgctgaaatatggaccagatatcttgtccactttgatcgcagtaataacagagctatgcttcagttttcgtgctttgctttgcttgttctgaaccaagctgtttcctcttgcagtttcggacaatatcccaagtgcctttcttttcacaagactgtctgaatgatccagcaactgagtaattcctctgaaatatgtcgaagcactcatccatcctgtaatcgtcttgagtattgtgtttgcagaatctctgagttcttttataatatcaccagaaatatctctctttttatctttggtatacacagtacacaggacaacttcctccataagtgctccaagagaaccctggataaaattagcagcatcgtcagcttcaagctcaaaaatcaactctgtgtcttgcaacttagacagaacaagcctcattgccaaatgtagcataagatgtacaccttgcttctcatgcaccctgatttcttttagtagcttactcaaacatggaaaccataatttataggaatattggtcagtaacattggcagccaatccatattcccactcctgtgacaaagcactcaagcttccatgatgctcagaaagagggtgtgaaatccgctcaaccaacgagtgcagcagatgcatgatcacagtacttaaattactttcctttcctaaggtcctcaagatgtaaaccatgagcgtcaaccgcctatgttcaggaatatctgctaaagctttaataaatatctgaagaagcttttctatacttgaggtccttgataaccaacatggaactaagacagatagtaaatcctctaaaacacgttgagaatggctatcatcctgttttatagcatccccaatagcaacaaataaatcaacaatactctctgacaccacttgcgggcaagcctttcccaaagaagctatcaaggaaaacccatgattccgagttcctacatccttgacggaccgtatgtactcaataagaagatcaacatctgagctgctgaacattgcaccttcgtggctcgaatgcagtgtatccgtaatatctttgaggaccagcagtatcaagtgctgagattctttcacggagctggataaatcaggggtttcagatgaggtatcatgttggttggtatgctgacaaacaatccctgaaacccattggtcggaacggagctttgatagaatttggaaaagcggctgtaatagacatggcctttggttcacatctttcttaagaaacaaaatatctagaagagagacaagaatagaagctataggtctttctccaaataactcttcaaaactgctagatgcatcacgactcagaccatcctttctctttgttctttttgactgtcctcttgcaccaccaagcgcaacaatttaattcaataaatttcaccacaatggaagcatgaacattaattcgcagtagagcatcccgtgtggcatttcgaatttcgatgttctcagttcgaaacaaagaaataaggcgcccaaatactttttccttagtgtcagccttcaaattatcaaagaacactggttgaagagtccgcagggcagtaagacatggcattacaacaacaggatcatcaggagccagagcatcaacctttaatgctctcaacagaggttcggacatgttaaaaccaatatttgcatgatctgctaccgacaacaaaacctccaaaagcaagcataagatttgcatttcatgggtggataagttcttagaatcatgctgattctgatattgatcacgacagtccagaagatcaaagaacaaagacttcacatcctctgcctgaagtaagatgcctcctactcctttcaggactgacagaagcatgaactttccataaggagtgagctttaaagcggagtgcaagatgaaatgaaggagagcatcttttgttggctggtcaaatctttcatgaaggttctcgggaactgtcatgtctttgcgtgggcttagcattgatgagatatatgcaggaagaaattttgcatccgaggatatcatggttttttggttaaccaatgactcaaggaaaataccaaatgttggagatgacatgcattgaggcaatttgatggtgttaccatttcttggtagagaagtgctcaagcgctgccacaccaaagataacccctcaatacacttaacagcagatgaccttatatccctgttctcatgagcaagtgggagaataacagaaggaaagccgagtagaagcttcatgcatatgctttcatccaagatactactttcagacgaagcacacttagaacaaatagaagcaagcaaacggagactctccacttgaactctatctgacaaatcttcatccagaaagtactttgaaataaattgaaaaggtgctccagtgcaattaatgatgagatactgtaagtgcttctgaaagatatttttgccaggtgacgtaacaaagaagagaaacaaatcatcgagcattgcatttccaccactgccaatcatcgagttctgcttaatataggaggactgcacctttagaagaccccaaaatatacagacaatgattctagcattcaatgcctctgtgtcactgttgaaaatatgctttaccaattctatactgcacttctccagcttgtcaatgcttatctcatcaccaacaccattatcttcaggctgtacgtgatgccattcatccttcaggaatggcaaacaagcttcacagagactcacttgcttgtccaaagcttctgagggaactagtgcttgcaataccacgagtagaaacacagttctagaaaatctagttcctcttccagagttagccaaccactccacgtgcttatttgggttagccaggaaagtttcagcaaaagctacgatattcttcatgttaatggaagcgatggagtctgcactcatgttctccttcattttctgaacagtgacctcatcatatacaagagaactactcgtgtagaattcccattgtattttcttagctagctccaaggcctttaagttcactctaagagtctttgggtgaacaataagaagacgaaaaactactgcagctatgtccttggcatgttccatgtgatgaagttgatattccataaccatcttttccaagcaagaaacagcgacatcagacgcctttgacgcttttgaaccacctttgttaatgattttgatgcacttggtgagcacatcatcatatgcttttagtaggcttttcaggactggcaacagcagctagtccttctatggacaaggcagcttggacaacacttagattatcatcatacaaactgcgtaatattgcatcttgtatattgacaagtttccgtggatttagagtactgttggtgaagatgccagatgtagcaatttttgagagagcagactggcgaaccatagcctttggatggtccagactgaaccaaatgtttgaatcagatatttcagttggcattttcttgctgtcatcaaacactaagccgaacatttcagatatagaatcccctcccgttgagttaatttcagatttctcaagaaatttacgaatagcatcatgtagctccaatggataatttatttcgatcgcactcaagattttcttagcccaaatgcctgcacgatctatatctcggtttccagtggcccgagataccttgctacagctgccaagaaccttgctcacaattctttcaacagatttctccattggtagagtctcaatagtctccatgaagtgtgtgtgacaggaatcatcagaagcgctgtagtcaaccaatgattcaacgtaaagcctaatgaatctctcgatattgtactcactggataatacagaaagtacaccagaaaaatccctgatgtccttcaaaatcacaagtgccttcttagggaagtcatggaccgattgtgactgaacaagacttataatagccatcaccgtgacacgaagccatggtaagtcaactgactcaaatgcatcatgttgtgcagtccttgcaacaaagaaaatcaaattttgcacaagttttggtgctagagttgcccgcgttgcaagtactccaacaatcatcagagcaccagccttataatcctgatctcccgttatttccggattaagagagtcaaacacaaatcccaataccctctgcactatatctgtgtcaagcttctggacagcacccaagcactccacaatcacagcagtgcaaaagcagacgactgtccttgagtgactgaattcctttgttggtgaagcgtagttacagagggtctccagcacagccttatccctgatgcactgctgcactagaacactcctgggtggcggtgcacctgaggacttcacgccatcaagaaatgcccacttactattccctaagttgagcaactgcacaatccgaacaaatgcatgtgtatcatggtacggcagtgcgctcagcagcaactcatccaaattgtatacatgcaccaggtatcggcggataaggtattcaagtgtcttcggggcagatggaagatgcaaatagccagctagaaggcgaaggtaggtggagatggacttgttgagtttgtcattctccttgggtgttagctgttcgcggttcacctctaggcta

SEQ ID NO: 37856 - DNA, 1470 bp, Setaria italica
  Peptide Sequence Number=SeqID_103830
ccaacacagagcaaaagagaactagctcatcagcatggatgcgactgtgaagtgtggcaatgccggctacggctacggctatggcgcctacggctacggctacggcaacagcaagccccagatgaactaccaccgccaaagcaccgagtccgtgaccaccctcgtcacggagatcaaccgcatgagcgtcaacgacaagcccggctgcggcggcgccggccccggcggcgtgcagaagcaggcggcctacaaggaggaggaggtgttcgtggagcaggaccaagggtcttacggcggctaccatggtggcggcgccgtgcagaagcaatcatcctacacggaggaggcgtatacgacgtgcgagggtgccgcagccggcgtcaagaaccacggctacaagcagaagtacggcgaggccgacgttgggtacggttcccactacggcgccgccgccggcggcgtaaagaagcaaggctacgagcaggaggcctgcgggcaaaccaacgcgggccatggtggtgctcactacggcggtgctgccggcgccttgcagacgtacgcctacgaccagcaggcggcgtacggcgtgcagcagcacggctaccagaaggacgcgtacggcggagccgtgaagaaagacagctaccagcagcacgagtcgtacggcgactgcggcgcagggtatggcggctctcactacggtggtggcgccggagtgcagacgaacgccgcctacaagcagcatgagaagtacggcgaagccgacggagggtacggcgcctactacggcggcggcgccggcgtgaagaagcagcaaggatacaagcaggagtcctacggagaaaacggcgctggctacggtgctcatcactacggcggcggcggcgtggagcagcacggctacaaccagaagcacaaggatgcctacggcggcggagcggtgaagaaaagcaactaccagcacgagtcgtacggcgactgcgacgccgggtacggctctcactacggcggcggcgccgtccagaagtacgggtacaagcaggacgtgtacggcggcaaagccgccggaggtctccagcgcggcgcgtacggctacggggcgcacgggaaggcgggcaggacggacttcgccggcggctacaactacaacctcaaggcgtacgacagcgagaatgagagcgagagcgaccccgacgagagcgactgcgaggagcacggctacggggcgtacaagcacgagacgcacggggccagcaagcagggtggcctgcacggctacggggcgtacaagtacgacaagcacggagccggcaacctcggcggcggcggcggcggcgtgcgccgctacgagtcctacgagaaacacgaggagctcgccggcggccgccgctaccagtcgtaccagagcaccacccaggagtacaccggcggcggcggcggcggctacggctacggcacgtgccccccgct

SEQ ID NO: 37857 - DNA, 681 bp, Setaria italica
  Peptide Sequence Number=SeqID_103831
ccctgcgcttctggatgccttcccggctccggtgggtgtggggaaccggggatctggcatccagatgcataaacctcttcctaataagtagttcttagctaggttagggttagttacccatggtagagtcgatgtggtatggccatgggttcttctccttcccgttattccttggtgatggcatcaattatggtgaaatctctgatggattagctgtgaggtatgtattccactgcttgataatgttgaaatcgggttggtgtgcatggatcccctttttgagttattcgttgctcctcgattgggtcttgccattgaggtggcaggcgtctgttcctgttctttgtgacggagttacgggcgatggccatctgccagagcgttcagtggttcaagtgcacggtcacttgcttaccgtgccactcttgccgttttccaaaattgaagcatcttcgtccgccagggagtcggcttccaacctcttccttggtgcttttctctgcttcctgcgatggggaagtaccgagcagaggcggatccaaccggcggcaccggggacaagcaggagctccatagaaggacttcgatcttaatttatttttctttgaggggttcccttgcaaggagctgaatgtaaaaggattttgtcatatataataccagtccaaccgggttttctca

SEQ ID NO: 37858 - DNA, 795 bp, Setaria italica
  Peptide Sequence Number=SeqID_103832
gagctgctgaggctcttcttcgatccggcttctcctcgccggttccctgcgcttctggatgccttcccggctccggtggtgtggggaaccggggatctggcatccagatgcataaacctcttcctaataagtagttcttagctaggttagggttagttacccatggtagagtcgatgtggtatggccatgggttcttctccttcgttattccttggtgatggcatcaattatggtgaaatctctgatggattagctgtgagcatcttcgtccgccagggagtcggcttccaacctcttccttggtgcttttctctgcttcctgcgatggggaagtaccgagcagaggcggatccaaccggcggcaccggggacaagcaggagctccatagaaggacttcgatcttttcgaggggcagctgaatgtaaaaggattttgcatatataataccagtaattcctctgctgcatcagcaacattggagagagacgagggcaatgggccttcaagttactctgtgctaggctgatgggcaacaagtcagctggaaaagggtaagttcatctctctcaaatgttcatctgactaaattcaacaacccactttgtccacttatagtctatataaaatttagtttaacttctccaaactatttcaatggatctaatatatcctcaaacgtagtattttttcttttggttctctatgtgggcaaggatcatatggggtgctgactcatcaggacatgttatcctatattagagaaatccttcaaattttttaaaaaaattaaaaa

SEQ ID NO: 37859 - DNA, 1026 bp, Setaria italica
  misc_feature (990)..(1026): n is a, c, g, or t
  Peptide Sequence Number=SeqID_103833
cctatcccctgtgtgccttgcctaactaagactactactctctactgtagcggcggaaaggctcttcatcgatccggcttgtcctcgccggttccctgcgcttctggatgccttcccggctccggtggtgtggggaaccggggatctggcatccagatgcataaacctcttcctaataagtagttcttagctaggttagggttagttacccatggtagagtcgatgtggtatggccatgggttcttctccttcccgttattccttggtgatggcatcaattatggtgaaatctctgatggattagctgtgagctgctgatgtacttcgccggcttcaccaagcagatttgggcttttcctctgctgcatcagcaacattggagagagacgagggcaatgggccttcaagttactctgtgctaggctgatgggcaacaagtcagctggaaaaggagtctccacctatgatcctacgtggcttggcttcgcgcggaaacggcttcgttctcaataagcagatgatgctcaagatcttaatctgggaaaacgagaacgggaaagtgtcaaagtgttgttgatgcatgtgactgggagggacgggaagaaacggatgctgctctggctagctcaagggcctgccgcctcggccagtacagtactaccagcagcgacgacgacttgacagccggaggaggcttggggatgagtcgtctcatctgcagttactacagggtggcagttggtctatgagcccccttgcgaaccatgcagttccttgacttccttctgaacgcccgaggggagtggatcaggaaaatgttataaagagcagccacactttgtggagaaaatctcttgactagcatgaacatgagtacatgattgacgaagtcaaaattaaatgagatatcactcccgttcaaacggccaaggtatatatgaacggaacaattatatttatatcaataccccattattctgctgggcctnnnnnnnnnnnnnnnnnnnnnnnnnnnnnnnnnnnnn

SEQ ID NO: 37860 - DNA, 439 bp, Setaria italica
  Peptide Sequence Number=SeqID_103834
ctgaaacgacgacgactgcatgcaggcgaagggatcgatgcgtgcgaggggaggacgacagataccactcgatataggatttttgctgtgcttctgttcatgtaaacgcatcaaatatggtaaagatatacttgcaaatttccatgtcactatgtatttggatcctagctagctagctaaagggggtatgaactccattttgctgctggggcagggaaatttcttaattccgtcagttttccctttccatttcgggtttggtttttggacacatatatagcactgttcaatgttcatgcatggtctccactttgtacgtacatcccatccaaaacagaaattagttctttcagtcaacccaaaagcaacgagtacaaagtgaattcaatcattgtactaattgtaaagctaagtccagttgctcactgcacttctacac

SEQ ID NO: 37861 - DNA, 1898 bp, Setaria italica
  Peptide Sequence Number=SeqID_103835
ggccgaaggagcaggcggtgccatgcagcacggcggcggcggcggcgcggagtgtggacgaggtcaggaaggcgctcgcgcggcacgtgaagctggggctcgaccgctccccgcggcacacgcggccgctgctcgcggcgtgcgcgctctcgggctggccgggcggcatggagctcgcgccgtccatcttcgagtccctcgacgagccggaggccttcgactacaataccctcatgcgcggccacgtcagcgtcggcggccgcggcgaccgcaacccggaggccgtgctgcgcctctacgttggcatgctggaggccggcgtggagccggacaactacacgttcccgttcgtcctcaaggcgtgcgcgcagctcgcggccctgcaagaagggaggcagttgcaggcgcatgtcgtgaagctcgggttccagcacgacgagcacgtgcggaatagcctcatcagcctctacggcaagtgcggtgagccggcgatggctcgcctggcgttcgaccggatgcgacctgacgagcggacgacgacggcttggagcgcgctcctcgcggcgtacacgagggcggggttgtggggcgagtgcctcaagtcgttccgcgtgatggtgcgggaggggtggaggcccgacgagagctccatggtcagcgcgctctcggcttgcgcccacctgggcgcctacgacgtcggccggagcatccactgcgcgctgctgaggaacgccgcgaggctgaacaccatcatgctcacgtccctggtggacatgtacgccaagtgcggctgcatcgacaaggccacggcggtgttcgacgccatggacgacaggaacgcctgggcgtacagcgccatggtgtccggcctggcgcagcacgggtgcgggcggaaggtgctgcaggtgttcgacgcgatggtccgggagggccacacgcccgacgcggccgtgtacgtcggcgtgctgaacgcctgcagccgcgccgggctgctcgaggacgggctgcggtgcttcgaccggatgcggctggagcacaaggtctcccccaacgcgcagcactacgcgtgcatggtggacctgatggcgcgcgccgggaagctggacgacgcgcgcgcgctcatcgggaccatgcccacggggcccacggacacggcctggcgatgcctgctcaacgcgtgccggatccacggcgacctggacctcgccgagcacgccctgcaggagctgaggcgcctcggctccgccaacgccggcgactacgtcatcgtcgcggacatgcacgccagggccaggaactggagcgccgcggcggcgctacggacggaggcggtgaacgagggcctcgcgcggtcccccgggttcagcgacgtggaggtgcaaggcgaggtgcaccggttcgtgtcgcaggacatgtcgcacccgcggaggcgcgacatctacgagatgctccaccagatggagtggcagcttcgcttcgacggctacgaacccgacacgtcggaggtggcgctggacgtgggcgaggaggagaagcggcgcgtcgtcgccgcgcacagccagaagctagccatggcgttcggcctgctcagcacgccggagggggcgccggtgaggatcctcaccaacctccggatgagcaaggagtgccacgcgtacagcgcgctcatctcggagatcttcggacgggagatcgtcgtcagggacaggaaccggttccaccggttcagacgtggcgcgtgcacgtgcggagattactggtaacggtctgaccggtgtggaacgtgattggtgatgtaaatatgaacaatcattagttccttttgtttccagatattttgtatatgatgccttttatgtgaatgaattacacggtagttgaaactaccgaataacccc

SEQ ID NO: 37862 - DNA, 590 bp, Setaria italica
  Peptide Sequence Number=SeqID_103836
ggaggcaaagagggggggtgctcggcctattttctcagccattttcatcatgaccattatggtggattgaccaagaaatggtgccatggccccatctattgttctgcactcacagcacgcttggtaaagatgtgcctgtcagtaaattccgattatatttgtcccttggagcttgataccgagtatgtcatagagggagtgacggttaccttgttggaggccaatcattgccctggtgcagctctaattcacttccgactaagtgatggaaagacctatctccacactggggatttcagagcatcaagatctatgcaattgcatccactcctccagagaggccgtgtaaatttgctgtacctggacacgacatactgcaatcccaagtacaaattcccaccccaggaggatgttattgattttgttgtgaggacagctcgaagatatctaacgtagcaaccgaaaaccctcattgttgttggagcatatagcattgggaaagagaatgtgtatctagcaatttctcaagctttagatgtacttaacagtttaaatttaaaagatcgcttttactttggaacatgcaggcc

SEQ ID NO: 37863 - DNA, 470 bp, Setaria italica
  Peptide Sequence Number=SeqID_103837
tcgcctaggtgataaggcggtggtggctcgcctcgcctcgccttaacgctttaaaaaccatgattgtaacaattgatttgtattgaaaatcaaatagaaggaggaggaggaagaggaggaagaggaagaaagagaagaatctgaggaggaagaatctgaagacgagtctgatgacaagcctaaacataaaggtactgaaggtattattcagattgaaaatccaaacttggtgaaagcaagaaatataaaggccaaggaagttgatcttggaaagacaactgaactctcaaggcgcgaaagagaggagcttgagaaacaaaaagctcatgaacgttatatgaagcttcaggagcaaggaaagacagaacaagcacggaaggatttagaacgtcttgctttaataagaacagcaaagggacagatgctgcaaagaaacgcgaagaggagaaagctgccaaggagcagaggaa

SEQ ID NO: 37864 - DNA, 598 bp, Setaria italica
  Peptide Sequence Number=SeqID_103838
gcaaggaaagacagaacaagcacggaaggatttagaacgtcttgccatgcttttttattatttcctacttgagcatccggatggctgcatcctgtggatatcctgctaaaattgacttggttctgataacctttctttcaaataattgcagctagtggtacttcaggtcgcccacgcacctttaagaaggaggaggaggaagaggaggaagaggaagaaagagaagaatctgaggaggaagaatctgaagacgagtctgatgacaagcctaaacataaaggtactgaaggtattattcagattgaaaatccaaacttggtgaaagcaagaaatataaaggccaaggaagttgatgtaagttggtggctactggtggcatctttcgtttttctaatattcgtatttccatcctgttataggagactaatcagatgatttgtgttaatgctagtaccatgagttgcctgttttttctccctctgttatcgtgtctatattgctattgaaataatccttgttaattgttattatttttaatcatgcataatctaggaggaacatctcatgttatctagctgtctatgaaattcatcattat

SEQ ID NO: 37865 - DNA, 466 bp, Setaria italica
  Peptide Sequence Number=SeqID_103839
tttattttctttagttgttcgatttagaagctcagtcacctgtttgcacgatccgtttggtttgggtacatattcggcttttcataggtttggttgctttcttcatccaatgatgcagtaggacaacatgatgctattctgttattaatttcctcgcaccttttattttgccatcactgtcagagatcttcacgtaaaagtgtttctgtgaagtttaaacgcagtgagaaatcgaaggcacgctgtatctggcctcggacaaagggtctttagaggctgggtccaggaagaaatgctacaattaacctcttaccatgcttttttattatttcctacttgagcatccggatggctgcatcctgtggatatcctgctaaaattgacttggttctgataacctttctttcaataattgcagctagtggtacttcaggtcgcccacgcacctttaagaagaaggaggagg

SEQ ID NO: 37866 - DNA, 618 bp, Setaria italica
  Peptide Sequence Number=SeqID_103840
cgaaaggtgaactaccatatttggctaaatgaggaattttcttattttgtcttaataagttcatgaaattttgatgcttattgtttgttttttgtgttttattcattccttcccattatcatttggcatgaggaaaactgctaattcaagcctgtgggtagcacagaaataaaatacgcaacggataagcagataggtgttacaggatgaaggctttttgcttttgtgccagattgttagataatgaggatacatgctcatgaattgctggagattatttaatagtcttattttattttactgcactaccttgatgttcacttctcttggggtaggacattcttgatgctaatatttaatggcttaatgaaaaatggcagtgatgttgggtgggaggacctcaatatttgtaaacttcttttgctatgaaacgttttaggtctgtgactctgtttacatgttatcatgtttgttttatagagaggagcttgagaaacaaaaagctcatgaacgttatatgaagcttcaggagcaaggaaagacagaacaagcacggaaggatttagaacctcttattaaagcaagacttcttaagtttacgttttggttcttttttcc

SEQ ID NO: 37867 - DNA, 1301 bp, Setaria italica
  Peptide Sequence Number=SeqID_103841
tagttttaccgaattccttccgcgcggttcagtgcccacccccgcgtgcagcttaggcgaaccccctccgcctccgctcctcccaccgcgctctctgtctatctgcgaccgcgcttcgcccgccgccgccaccatggggaggggaaagttcaagggaaagcccaccggccgccgcaacttctccacccccgaggagatcgctagtggtacttcaggtcgcccacgcacctttaagaagaaggaggaggaggaagaggaggaagaggaagaaagagaagaatctgaggaggaagaatctgaagacgagtctgatgacaagcctaaacataaaggtactgaaggtattattcagattgaaaatccaaacttggtgaaagcaagaaatataaaggccaaggaagttgatcttggaaagacaactgaactctcaaggcgcgaaagagaggagcttgagaaacaaaaagctcatgaacgttatatgaagcttcaggagcaaggaaagacagaacaagcacggaaggatttagaacgtcttgctttaataagacagcaaagggcagatgctgcaaagaaacgcgaagaggagaaagctgccaaggagcagaggaagtccgaagcgcggaagtaactgcaataattatggaccacgaaggcatgagctgcgttgattggatatttatttccaatgcatctgttatcttttaaactcgatctctattcccataaaatatgtatttacagcagtaacgtagtcttgtggtcgtggcatgctgtaaacttgagcttggcaaaattgaaatgtagtaagatcagcttgtgtaaaaaaaaaaaaaaaaaataaataaaaaatgaaaaatggcagtgatgttgggtgggaggacctcaatatttgtaaacttcttttgctatgaaacgttttaggtctgtgactctgtttacatgttatcatgtttgttttatagagaggagcttgagaaacaaaaagctcatgaacgttatatgaagcttcaggagcaaggaaagacagaacaagcacggaaggatttaggtgcttattctatgttatgcttgccatttctttcttctaggtctttttttccctggatgtacttaagtatttctatcatacacaaggccacaacctgtaatattggcttctggaggtatcatgacaattttcatttcattttaatggaaacatgcattgcaatgaagtagtctgatgctagtgcaatcatgcaataatcttaccttctcttctcttcagtcacaggctattaagatcttactttagtcttagc

SEQ ID NO: 37868 - DNA, 750 bp, Setaria italica
  misc_feature (731)..(750): n is a, c, g, or t
  Peptide Sequence Number=SeqID_103842
agaggaaatctttgtttctctcagtttgaaaactgagcatagtgtgctcgagactataaaccggttggagggtgcagtgtttgcttggaaccaaaggattttagaggaaaagagcaagaaatccccagcacggcattcctggaacttcataaaggatagttcgtcagaacttgacaagatgtcggtgtgcatcgaaagggtcgacactcttgtgcagctcctgaaatccagattccccaacctgcctccaacctttatagatgttctaaaggtccagtacaacgtggacgtgggccacgccatcgtagaggcctactctagggctcttgttggggtagcattcagcatactgtcccgggtggcggagatactgctggaggacgacctgatcaagaagcccaacacccccatggcgacgctcaagttcgacctctcctccgacgtgtaccttgcgggcatcacggagacgccgccgggccacatccggcggtccctcatggaccagatcagcatggtcgacgggcgcttcgacgccgtcgccaagaagaaaggggtgaagcagctgaggtggtgaggaccgagagtcggctgttgtgaatcttttggcgatgtgtacagggtgatgcagggcccagttgtccgctccacaaggtttacctttactaatagcgtactgatgtaatgtgttttgcaaccgagtttatagcgcactgttaagagaacaaaaaaannnnnnnnnnnnnnnnnnnn

SEQ ID NO: 37869 - DNA, 1648 bp, Setaria italica
  Peptide Sequence Number=SeqID_103843
agtagacacagcggtggggggtgctatcctatctttgcgagatcgcagcgcatttaattttttggcagcagtttgcggtctgactgccggatctgctcctcattcaaaccctgatgctgtggtggtatcgtttcttcttcatgctgcaaagttactggtggtggtggtagcgctgcgcggctggggaggaggaggaggaggaggatcggcggcggaggagggcggagatgaggatgaagacgctggcgtgctgccggcggcggccgcaggacttcagcatcgacatggaccaggacgcccgacagggtgatgacatataatggcctcgagacctgcattatcaatagttccgcctatgacgatgatagtggcattagtgcaacaacaggtggagatggctgtgttaccactgattcccttgatgatgaagtctcaagttgctctagtaaagatgcctctggttcttccttctcttcccactgccttagcaagcaggaggagcatttatttgatgagttgggtacacccgttgcagttcatctacttcctttcaaagggaagaagccaatcacatataccttgagtgcttcagatattgaaaacatgaaggaaaaatttgcaaagctattgctcggtgatgatacttcaggaggagctaggggcgtttgcaccgctctggccttgtccaatggcataatcaatctctcggcaactgtttttggggaactttggaagctggaaccattgtgtgaagagaaaaaaatcaggtggaaaaagaaatggactggttgctgtctcctacaacttatatggtggagctggttccgacgaagcaaagtggggctgatggatgcacatttgagattatgactccaaaggcccgttcagatgttcatgtgaaccttcctgctcttcagaagcttgatgcgatgctcattgaagtgatggactcaatgatagatacagagttctggtatgaggagagcggtagcagagctgatgggcgggggaaacttactggtccaaggaagagtaaaaagtggtggctcccatctcctcgtgtccctgagcaagggctatctcaatttcagcgaaaaaggcttgtttttcaggctaagcttgttcatcagatcctcaaagctgcaaaatccatcaatgaacaagtcctattccatatgcctattcctgcagctgttatggatgccctcccaaagtctgggagagctagcttgggcgaagatttgtatcaagctataaccacggagtatattcctatagaggaaatctttgtttctctcagtttgaaaactgagcatagtgtgctcgagactataaaccggttggagggtgcagtgtttgcttggaaccaaaggattttagaggaaaagagcaagaaatccccagcacggcattcctggaacttcataaaggatagttcgtcagaacttgacaagatgtcggtgtgcatcgaaagggtcgacactcttgtgcagctcctgaaatccagattccccaacctgcctccaacctttatagatgttctaaaggtccagtacaacatggacgtcgggcacgccgtcgtagaggcttactctcagattttgttctattacattaatataaatatattcaaatatcaaaaaaaaaa

SEQ ID NO: 37870 - DNA, 855 bp, Setaria italica
  Peptide Sequence Number=SeqID_103844
gcgagacgacggcgacgtcccgtgctccgaggcggcaatagacactgcagcaccgttgtacagcctcgtctccatcgaccgcacgctcggatcccgcgcggacaacagctgatttgggcgcgcgcgggaggctgctctcctgcgtcgagcaagctgcttgcgtgctcacacggaccgccaggaggagctccgccaccgccgattcgacctccgcaggcgctgaatcaagcttcgcagccgctgaatcgacctccgccgctgtcgattcgagctccgcaggcgctgaatcgaccttcgcgggtgccgaatcgagctccgactccgacgctgtgtgggcctgcttcctgccgggcaacctcccgccgctctccgacagggagctctctcccgcgctgccgtccaagaaggagctcttcatgcacctctctgacagtgatagcgccgtcctcctcgccgaccgcctcacggcccgttcagatgttcatgtgaaccttcctgctcttcagaagcttgatgcgatgctcattgtgctaggatcatgccatatcaggagtacctaatgaagaatagaattttccatgccataccagtcctgctggaagcaaatcatcccaagttggaatagaggaagtgatggagttcgtatggatgaagagttgatagcatagaaagaaatgtgtttgcgttattcttggatccatcattttaatgcttgtgttgctgtgcaatattttgagtagtacttgattggttcatgactcgcactgctcttattctagagcaaaatctgttctggttcagtattgcagtatttctaacatctgtgacatgcacatttgaatcagttgctcttaa

SEQ ID NO: 37871 - DNA, 443 bp, Setaria italica
  Peptide Sequence Number=SeqID_103845
aagtacttagacaataagggacgacgggaattactagggctagtctaggaaacaaggtcaggatagaatcagattgaagttatcctgtgagtacttattctatttctgaatgcacttcttctgctgcagggatgtatatcagtaagcatgacactgcaccagacaagcttttgttttgtctgcagccatttggcttcaggccagaaagaaggtgatgaattcaggagaaactcggatgttctagagatactaaggctcacaatgttttctaggatttgtcggagaactggaagaagaatcccagagaaaattcttgaacatgataaggtgatatggcttggggatctgaactaccgcattgcactgagctatgcagataccaagaagccttttaataggaaaataattgggatgccctttttgaaaggatcagcttaaaatcg

SEQ ID NO: 37872 - DNA, 463 bp, Setaria italica
  Peptide Sequence Number=SeqID_103846
atgtatagttgcaaagttacgcttgagacttctcatataatcttaaacccgaggcaaattttttgtattaacagcaagtgcaacctggtcgtaattcgcagtctaaagaaatatgtaaatatagaacagaataggaacaggaaacttaccaaaaggagtaggattagggggaagacactcttcttccagcatcttatcagaaatctgttcttttctacccttcttttggtcagattttggacaaatgccagcttggtgatatagttaggcaaaacacaaataagctggactcaaacaggtaatgcactcttctgagtatagtaaataaatgtggaaaaggtagaattccagtgttttgccttggaagggttctgctaaagcaaagcaatattcccctactcttctacgagcacttatgaaatccaataaaccatccacagagagttttctttgtttcaggtgg

SEQ ID NO: 37873 - DNA, 423 bp, Setaria italica
  Peptide Sequence Number=SeqID_103847
atttctctcagtcagtccgctttatctctttcccctatccaagccagaaacccccggaaagccccgagaacctcccctgccatggcgaccgccgcccaggccgccgccgccgccgcggccttcctttcgttcctctcctcctcccccacccaccacaccgctccctcctcctccgtctccctcggggcagcccctatcctacgcgtctccctccgggccgctgccacgggtggcccacggctccccttccacctccggggccgccgcgtcggcgccgtcgtcgcccagctccccaccacgtaagaagaaatgctgatagtccagcctgtcacctgcgttaatcatcgctcatctcgggctgttattttttcttagccttaaatctcttggaagttagcacatcgatacgctagtttgcttgtg

SEQ ID NO: 37874 - DNA, 278 bp, Setaria italica
  Peptide Sequence Number=SeqID_103848
cttatcacctcgcttggcgtaatacacaaccatcagaccaaattccctccttgatggcttgggtatccgctcgaaagcagagacgacggcctgccagtcttcgggccgcgactccagcaccctccggaactcgcggcacgcctcgtccctgcccttgtgccacggcgagcgaggctcccgccgctccccgccttccacccagcgcgcccgctcctccgctctggccctccctttcctcccgtcgtcgagtcgcacggtgagcgacttcccccggaatt

SEQ ID NO: 37875 - DNA, 462 bp, Setaria italica
  Peptide Sequence Number=SeqID_103849
ttagtttttttttttttttttgtcagtgacgcgaagaactttattgactgggaccagactgcaacctgcagacgcacacgatcgctgaatcgccgcaggctgcagcgacatcaaccgcggaaacaaggacacgaccacccataactaccaaaccaacacggactcggacaccaccgccaccaccaacgacgacatgcactagcgcgtgctaaacgactgcgatttccgcctcggcggacggaacgatttccgcctggttcttgagtaggtagtcgtcgaggtcgtggaacgtcttggtggcggtctccttgatgacgtccgggtcgggcacctgctcgctggccttgtcgaactccatggaccagttgacgacggcgccggcctcgccctccttggccggggacaccttgagcgttgattctttgtaagtttctttgttagtaagtttgtacctagtcttct

SEQ ID NO: 37876 - DNA, 948 bp, Setaria italica
  misc_feature (1)..(14): n is a, c, g, or t
  Peptide Sequence Number=SeqID_103850
nnnnnnnnnnnnnnccctgtgtgtccttggtctagttcttttttttttttttttttttttttttttttttttttattcagtgacgcgaagaactttattgactgggaccagactgcaacctgcagacgcacacgatcgctgaatcgccgcaggctgcagcgacatcaaccgcggaaacaaggacacgaccacccataactaccaaaccaacacggactcggacaccaccgccaccaccaacgacgacatgcactagcgcgtgctaaacgactgcgatttccgcctcggcggacggaacgatttccgcctggttcttgagtaggtagtcgtcgaggtcgtggaacgtcttggtggcggtctccttgatgacgtccgggtcgggcacctgctcgctggccttgtcgaactccatggaccagttgacgacggcgccggcctcgccctccttggccggggacaccttgagcgtgatcttgaagttcttgtagaagttgaccagctcgccgtccaccacgctgtacgacaccaccctgttctcgtcgtcgacaagctccaccttctccttggcgaacgtcagcatcggcaccccctcggcgtacttgaggaggcggacggtgccggcggacttgccgtcgccctcgacggtctcgatgctcttgtactgctgggggaagatcttggggaacagctccgtcgagtcgcgcagcgccgcccacagcttctccgccggggacttcacctccaccaccagctcggccttggaacccatcctagcttgcagctgagctctaccacctcctatgctacgaactgtgcaggtgagtgctgtgctcgctgagactgccaagcgagacctcggcccggcctttatatagaaccagagagaccagctctgacagtgactgctgttcttcagaggagacgcaggcagctgcttacttgtcttgt

SEQ ID NO: 37877 - DNA, 247 bp, Setaria italica
  Peptide Sequence Number=SeqID_103851
ttttgtgtttccctttttcctttttattccacatctcactagcttcacaaatccacaaataaagcatgcgagcatgccactagaaatgaatgagacggggcacaactaaaacaagcccctattttggagtatgaaactgcagcacacagagaaaaagaaaccagttgcacacgcagcaacatcaccatctacaattctacagagacacaagcatatcctgatcctacacactataacaattactaca

SEQ ID NO: 37878 - DNA, 312 bp, Setaria italica
  Peptide Sequence Number=SeqID_103852
cggcaagaagaagaagaagaagggcggcaccgcccccgccgcctccttcagcgccttcaacgccctcgaggaggcggacgaggaccaggacgaggaggagcccgccccggctgccgcggccgggccggaggccaccgctgatgccgacgatgacgacgacctcgatttcgacttcagcaaggccaagaagaagaaaaagaaggacaaggtaggtcgctctgcgcctggcaaagacgaagacgacgaggctgctccgccgccccaccgtggctgaggaggaagatgaggatcccttggtcgctggtgcggcag

SEQ ID NO: 37879 - DNA, 448 bp, Setaria italica
  Peptide Sequence Number=SeqID_103853
cctacccttcctgtaaagccaccttggtgattctggcagcatcagcatcagtatgaactggaccagggcaggaacccctgcaatgccaagcatccacctccaggttcctggcaccttagtgaaggctagattaatgaggtatgccaagaactggccaccagtgatgagaagaccatttgtgctcacaagagcacctctgatcctagcaggcgaggcttcagagatgtacagaggagctgtcatggaagccattccaacaccaagaccaacaaagaccctcccaacaatgattactgtaggtgttggggaaaaggccatgatcacagcacctccaaagaacagggcatcagcaattatgatggaaggcctccttccaaacttgtcattcatccagccaccaaatgcagctccaactatagctccagcaacggccatactcactatttcg

SEQ ID NO: 37880 - DNA, 301 bp, Setaria italica
  misc_feature (260)..(260): n is a, c, g, or t
  Peptide Sequence Number=SeqID_103854
aggcgagtgcgaggtgttcgtcgtcgacctcctcgccgtgccgctcgctgagctgtgggcgccgctgcgggatctgttcgagcggcccgacgtgctcaagctcgggttcaggttcaagcaggacctggtgtacctctccgccaccttcgcggccgcactcgggcgggatgccggattcgatagggtggaagacgccatggatgttaccaacgtttaaactaccacaagggccatgacaggcagaagaagcttccaaaggngaccaagagtttggcaacaatttgtgaggagctgctcagta

SEQ ID NO: 37881 - DNA, 552 bp, Setaria italica
  Peptide Sequence Number=SeqID_103855
ggccgccatctccccaccttcccccccgacctcgccgccgccgccgctcacctcggtggcaccgccggcgaggcagcacctcgccggacacccaccccctctcctcgatctgttttccttccctctccgccgatccttgtagccgcatccggctgccctcccacggaaccctagatctccgataccccgcgcgccctcccgccgacggccacccgatcggaatgggccgccatctccagtaaggtccagcgacccaggagtacccgcctccgccttcgcgcgtgcgcgaggcgccgccgccatggcgatccgcatcaccatgtcctactcgggctacgtggcgcagaacctggcctcgtccttcggcctgcgctgcacctccgccgccgccgcgggcgctggcgctggcgctgcacccggcgcggggtgccgcttcatccaggacgcgttatcccgccccttctgcctcttcgcgtcctcccgccgctccgactcccaccatgacgccgaggatcacaaccacccgaagcccagccccaaggctctgcccca

SEQ ID NO: 37882 - DNA, 578 bp, Setaria italica
  Peptide Sequence Number=SeqID_103856
tgatgcaaagactgtcttcgctgctgtgactgtgccgctgctctatagatcatccctagctgagccggaggtccattccatccaagtccatgtacccaacatttgatgttggtgaccgaatccttgctgagaaggtttcgtacattttccgagagccggaaattttggacattgtgatctttcgtgcacctccagtccttcaggcattgggctacagctcaagtgatgtgttcatcaagagagttgtggctaagggtggggacatcgttgaagtaagcttttatcccaatggtacgtgatggtaacttgttggttaatggagtagtccaggatgaggactttgtgctggagccggctgactatgtaatggatccactgagtgtgcctgaaggctatgtatttgtacttcggggacaacagaaacaacagctttgattcgcataactggggacctcttccaatgaagagcatcctagggagatctgtgcttcgatactggccaccatcgaaaatatcagatacaatatatgagcacgatatggcgcaattcactgtcgctacctcctgaccatgccatt

SEQ ID NO: 37883 - DNA, 1928 bp, Setaria italica
  Peptide Sequence Number=SeqID_103857
ggagtaccgttgcttcgtcggcggcctcgcatgggccaccgacagcgagtccctccagcttgccttcgcctcctacggcgacgttgtcgactccaaggtcatcaccgaccgggagactgggaggtcccgcgggttcggcttcgtcaccttctccactgagcagtcgatgctcgaagccatcgagaacatgaacggcaaggagctcgacggccgcaacatcaccgtcaaccagcgccgccgccgcgggcgctggcgctggcgctgcacccggcgcggggtgccgcttcatccaggacgcgttatcccgccccttctgcctcttcgcgtcctcccgccgctccgactcccaccatgacgccgaggatcacaaccacccgaagcccagccccaaggctctgccccaggccgcctccgcgggaggtggccactcgctgttgctcccgcggtcgtcctccacgaaggcaccggtcgatgagcccccggcgtcgttggcagtggggctgctgtcggtgttcgcgtccgggatgggttcgactggtggcattgcgggggcctcctccctcgcggcgtcgccgtcaatatcagccggattcagccctgccgcgctcctcccgttcctgcaggcgaccaagtggctcccctgcagtgacatcgtcaccgctgccacagcgtcccgcagctcaggacgcccagcaggtgcctcgacggcgcctgcatcccgcgcagcaggtgcctcaacagcaactgcacctcgcgcagctgcaccatcaccgcgtcctgcaccacgcagagctgtcccattgcccggtcctgcacctgtgccgtcacctgctgtggctgctccttccaaggtgggcattcaagcattggttggtagtgccagcattgcctcaggttcagctgggattggtagtggcgccatcgcctccggtgcagctgggatggtgaggaagagcggtgctagtcttgccactggtgcaagggtgagcaggagggccggttggctctcaaggtgggtgagctcatgctcggatgatgcaaagactgtcttcgctgctgtgactgtgccgctgctctatagatcatccctagctgagccgaggtccattccatccaagtccatgtacccaacatttgatgttggtgaccgaatccttgctgagaaggtttcgtacattttccgagagccggaaattttggacattgtgatctttcgtgcacctccagtccttcaggcattgggctacagctcaagtgatgtgttcatcaagagagttgtggctaagggtggggacatcgttgaagtacgtgatggtaacttgttggttaatggagtagtccaggatgaggactttgtgctggagccggctgactatgtaatggatccactgagtgtgcctgaaggctatgtatttgtactcggggacaacagaaacaacagctttgattcgcataactggggacctcttccaatgaagagcatcctagggagatctgtgcttcgatactggccaccatcgaaaatatcagatacaatatatgagcacgatatggcgcaattcactgtcgctacctcctgacatgcattgtggcaatgctgcatggaaaatccagccccatttttccttttttcggccgagctttactgacaagtgataagctgagccacattttgcattcttatttattagttgtcaccttgctgcagatgcccattggcagcttggctgacattagttttaccctccttatgggcagctgctcttttgagggcaacaattcttgtacgctgtagccctagaagaaaccccccagaatacatgtttgtaaaggcagagcatcacatggcaaattatgttctgtttttgagacatggggatgatgttcgaaacttgtgtaaaggaaatagaaaagcataagattgctca

SEQ ID NO: 37884 - DNA, 919 bp, Setaria italica
  Peptide Sequence Number=SeqID_103858
gccatcaagggttctgaggtttatcgccgtcccagcgagggcatccaccagagggatctcctgctttacaagaaggttgttcccatcaagaatgtacacatcgtggggcttcaagtcaaggacgaaggtcaggtcctgtgccaactggccatgcagcttgtcgcctttgttcggaaatgtaatcttggttcctttcttccagccaggcaacacttccactgccaagatctctgtttcaacttccactcttccatctggctttgcaacattcctagtgatcttcattttcctttttgttccattgtacaactcttcaagagtgcaaggtaatgttttttccacaggcagtggcttttctgcctggcttgtactagcaccactctccttccgtgaactagaaggagcttcactcctactgttccttgctgaagtccaatttgatctttgctgaaatcgcatccggtcttggtcgacagaataagtcttgttgcttgccatgaactcggcaaagaaatcatctgggtcactaggattgtaccggaaattacttggaccgcttgggccagcagctgtggaggagcggctctgtgagccaggtggaggcatcccctttaagccttcctcaccatattgatcataaattgcacgcttctctggatcacttaatacctcataggcctcagttatctgcttgaactttgcctcagcctcggcacctccagtcgggttcttgtcgggaggccacgtcctcgcgagccgccggtacgacttcttgaggtcctccagggtcgcattgcgattcaccttgaggatgttgtagtagtccattcccatctggtgggtgttcgtcgcctggtgccggcgaagggcgcggcgaagacgtggggaagggcgccgccgctagcccagtcgtcgccgg

SEQ ID NO: 37885 - DNA, 523 bp, Setaria italica
  Peptide Sequence Number=SeqID_103859
caaaactgcgaagtagttgaagccagaattgccgagagaagacacaagaatggaggaggtgctgaatggtttcatcctcgtggtcgcaaaaggggcaatactcaggatgagggagaccccttctagcgagtctatcagctgtccaacaccgattatgtgccactaaccaaaggaagaatttgcacttcctgggaccccaattcctccaaattagtgtgctcggctcaaactggacttctccaaggaaaagcctcgtatgctgacgtagtagagaactatcctgaattctcaaatttccatttatgaacatcctcagcctctggtagacgcaatgtttcctgaaccatgtcccaaatatccagaaattctgacaggaccgctaccgagtagtgcccctggatatcctgtatccactgattgtccagcaatgcttcctgaacagtacgcttcttaacccgcctcttgggtacagttgcaaacaaattgggagccaatagctgaatagaggacccttgcaaccacc

SEQ ID NO: 37886 - DNA, 354 bp, Setaria italica
  Peptide Sequence Number=SeqID_103860
ctgcgcgtcgcccaccttctttcgcagcgcttcggtgagcttgatggagtcgacgccctcgccgacgacaacgacctggtccttgccgtcgccggcgagcgccacggagtcgacgccgcccgtggacgccaccagcgccatcgccttggaccggcacttgtcgctgctcatctgcaccttgatcacgatcttttgcttcgccatggctgattcctcggggctgcgcggtgctccaagcttgaagaactcaaacgcctcgcgactattgaggtggaggtttctggagtgcgttggtacggaaacagaggcggagtggagagaagaggttggtttcccgcagttggttgctgtgtg

SEQ ID NO: 37887 - DNA, 460 bp, Setaria italica
  Peptide Sequence Number=SeqID_103861
ccggctgcgagtagtagccgtaccggcggcgcggtggtcgtagaccaccgggggcgtcggcgggtagtggtggtaataccactggttgtactcggcgacggggtcggccggcttcttctcctccttcttgttctcgccgacctgcaccagctgcgcgtcgcccaccttctttcgcagcgcttcggtgagcttgatggagtcgacgccctcgccgacgacaacgacctggtccttgccgtcgccggcgagcgccacggagtcgacgccgcccgtggacgccaccagcgccatcgccttggaccggcacttgtcgctgctcatctgcaccttgatcacgatcttttgctgaaaattaatgaaagaagcagagcacgttagcctctcggtcgccaagtcagctggtggctggagcgtagtgcagaaaggaggaagaagctgatgcagatgaccaggaggagat

SEQ ID NO: 37888 - DNA, 521 bp, Setaria italica
  Peptide Sequence Number=SeqID_103862
cgcggcgttcctgctcggccacatcagattcagggctctcttggcttccaacgcggccaggcgacgccgcgtcagattcagggcggtccttctcagtaccacggcgtcgccgggcacccgcagccgcagcacgttcttgatccttatcaccacttccaggaagcggtcttttaccactattcagcgccttcgttcgtccgtcttgatccccggcaaggcgaggagattatccacgtggagaagaagccgcggctggcctacggctcgccttcgccggcgccacagccccagggcggcgccgacagcgacatgtccagctgcgtggtccaagcttccacgtcccaggaacaaggtcaaggctgcgacacggacgccgaagccaaggtcttccaaggagagcctgtgctcacgccgtcgcagccgcaagagatccccaggacggccgcggcggcggcgcccgcacctacgttccacgtgtcggccacagcagcgccggagctcgacggcctacgaacggacaa

SEQ ID NO: 37889 - DNA, 162 bp, Setaria italica
  Peptide Sequence Number=SeqID_103863
ctctaaagtcttggtctctgtaatctcgcctccctacaagttggtaggcaagaagatttatggaaagaaagattatgctaccaaagaacaaaagttggatggagctacatagacacaaggcaacacagaagcccattgagcttaccacaaccttgagtccta

SEQ ID NO: 37890 - DNA, 478 bp, Setaria italica
  misc_feature (46)..(46): n is a, c, g, or t
  Peptide Sequence Number=SeqID_103864
ctgcgagttcatcgatgatcagggcgccatcgacgtctcgcccgcncggggtcacctgtggagcctcaccatcgcggagtgcaattacatcaccgacatccacgccggcagggcctccggcctcccctccttccgcctcagcagtgccttactccccacctacgacatcccgtccactgcgccgcttgaagacctttacatctgcctacgggggcataactacaatcctatcaaacaatggattaaggagcttccccacctcactgaccttacggtcctcaccatctgcagcatcgccctccggagagtttatgcgttgactcgtttcggctcagctaattgtttggccaacttcagaagcttgccaagcttaagagagcctgcagctgctcatgtttgcaatggccagcaccaatctcgcgcatatctacatgttcctcaagacgtgccagtgtccccagctggagaggctctttgt

SEQ ID NO: 37891 - DNA, 396 bp, Setaria italica
  Peptide Sequence Number=SeqID_103865
acttgatagcagattcctatgttctgtacacttctgtgctcgtggggctcctgatgtgcaagttggtactgttatttattcactccgacttcgtctgttaaattgtatgcttaatgttacagtgcatttacatgggaccatatttgtatctgtagatggaaacaaaatatatgcgtaacttgatagatcaactcagtagtttgtttgagtttcaattcaaaccttagtattcatgacttgatagatcacctcagtagtttgagtttcatttcgaaccttagtactcacgctgttccaaattctaagtcgttttggcttttgtagatacgtagcttttgttatgcacctagatattatgctatttctagatacatagcaaaaaacttatgttttctt

SEQ ID NO: 37892 - DNA, 1792 bp, Setaria italica
  Peptide Sequence Number=SeqID_103866
ctctcgttcactctcgtttgccacagccagcagcctatcagcatcgctcgctagcttccagctccagcaacagcttgtcgtgtgcgttccttgactcgcatctgcgctgcgaacaatgccggccatggtggaggagctccgggctgcggcggaggcggagccgcacttcctggtggtgacctacccggcgcagggtcacatcaacccggtgcgccacctcgcgcgccgcctgctgcgcgccacgggggcgcgggtcaccgtttccacggccgtgtccgcgttccgcaagatgttcccgggcgaggacgacgacgcggcggcggagggccaccgcgacgccgcgggggtgtggcacgtgccctactccgacggctacgacgccggcttcgaccgcgccgtgcacgaccacacgcactacctgtcccaggtcaagctcgtgggctcccgcacgctctccgccgtcatcgcccgcctccgcgatgcgggccgccccgtcacgctcgtcgtctacacgctcctcctgtcgtgggtcgccaacgtcgcgcgcggccacggcgtccccgccgcgctctactggatccagccggccaccgtgctcgccgcctacctccacttcttccgcggcaccgacggcgtcgacaaggccatcgccgccgcgggcggcgacccctcggccgccgtcagcctcccgggcctcccgccgctccgcatccgcgacctgccgtcgttcatcaccgccacctccgagaacgacccgtacgcgttcgtcgccgacatgttccgcgagctcgtcgacatgctcggccgcgaggacagccccagcgtgctcgccaacacgttcgacgccatggagcccgaggcggtggcgtcgctgcgggagcacggcgtcgacatcgtccccgtcggccccgtgctctgcttcctcgacggcgcgacggcggcggccggtgccaagagcggcggcggcaacgacctgttcaagcaggacgagggctacctcgagtggctggacgcgcaggctccaggctcggtggtgtacatctccttcgggagcctgtcgatgatgagcacgcggcagatcgaggaggtggcgcgcggcatgtcggagagcggccggccgttcctgtgggtgctgcgggcggacaaccgcggcggcgccgccgatgtggacgccgcgtcgctcggcggcgagcgcggcatggtggtggagtggtgcgaccaggtgcgggtgctcttgcacccggcggtggggtgcttcgtcacgcactgcggctggaactcgacgctggagagcgtggcgtgcggagtgcccgccgtcggggtgccccagtggacggaccagggcaccaacgcgtggctgctggagaggctgggcaccggggtcagggccgccgtcagcgacaaggacggcgtgctggaggccggcgagctgcggaggtgcctcgacttcgcggcgtccgagatggtgcaagccaaggccgtcttgtggagggagaaggcgcgcgccgcggcggcggagggcggctcgtcggagaggaacctcagggagttcgtcgggaagcaactcaccgccggcggcaactaggctgatgtctcgctctcgatcgcgtcgatgcattgctctatgtcgatactaggatgaactcaacaagaacatagtacacggcacttaatacttgcattattgttgtttggatctggttccgattaaagtaagctaggcttgttactgctacttgggaaacatcaaaatcggcacggtgtgctcttcatggattttacggacacaacg

SEQ ID NO: 37893 - DNA, 363 bp, Setaria italica
  Peptide Sequence Number=SeqID_103867
tccgcacaatggcactgggcataagctaccaggagacttggtaatctgctttccatagttccattctaactgctacactggacacaaactaccaggagaataaacccaaaagttatcacaatacattatgctcatagctggatagttgctgaagcaataaacctgaacattgtgtaggaaaagcatggcctgtgttaggattttgaagaaaacagtcttaaactagagatgctataattcaaaaaccaaggcaactacttcgtatctcctgtgtatgatcttgcttgccattgaatcagatgtatatgactaactaatgatgaaaaaaatagaaaagagagacaaatgtatgtagtgcaattc

SEQ ID NO: 37894 - DNA, 835 bp, Setaria italica
  Peptide Sequence Number=SeqID_103868
tctccgactcagtcgcactagtggatgatgctcgtgtacgatctcatgcccaacggctcgctgcaggacgcgctgctcgggaagaggtgccccgacctggtggccgagtggccgcgccgcctcgccgtcgcccgcgacatcgcctccgcgctccactacctgcattccgtcgtgcagccgcccgtgatccacggggacgtcaagcccagcaacgtgttgctggatgcggacctccgcgcccgcctctcagattttggcctcgcgcggatcaggtccgaagaggaggatgagctggagagcggtgcgattggggccgatgcggatgggaatggcaatcctggcggtggatgtgacgaggatgtgtcagtagccggcgagagcgtgactgctatcgtggtcaacggggaagacaatgctgccaagtcgccggaggatgatgaggcgttcaccacagcatctcctgcagaggccgcatccacttctgaatgcgacaagactagtgttggtagcggattaaatgcccgaagctgcaatggtggaggagctgcaggatcaggaactgggagtgattggtggtggcgtcaggacaatggcggtggtggtggcggcggcggcggcgttaaagactatgtgatggaatggattaggtctgagattaagaaggagcggccgaagaatgattggattgcaggatcatctgcaatcacccctgttgtttcaacggagaggaagaaaccaaagcgtagggcgcgggagtggtggcgtgaggagtatgcagaggagctcactaagaagcagaaacggcgggcccttgccaagtcgaagagtgacgctg

SEQ ID NO: 37895 - DNA, 386 bp, Setaria italica
  Peptide Sequence Number=SeqID_103869
aaagaccaatacagataattcaagaactcttaccatgtcaccctgtagtggtcatcttatccccattgtcgcggtagtgatttgtcagcaaaagagtaccatgacatgagctcacctgttgaatggcggtgggttcttctgaaacgttcctggagcaaacactggtaaggactccgtggttcgcctcctgtctccaccagcgtcattttggcgggcagtgagctcccaactttcctccagtcgtgctcttgtgcctgcgtcatcactcctccgagggccagcagcagcagcagcacctagaagtggtccgccaaagaatatcgactgcccagtgtatgccaacctctcagacggctgcccagatggcaatgctgaggagaggcgtt

SEQ ID NO: 37896 - DNA, 247 bp, Setaria italica
  Peptide Sequence Number=SeqID_103870
cgttgatgatcatgccgagcatcttcagcctggggaggtgctccttggaggggagctcgtcggcgccgcagacgtcgaggacctcgcggcgggcgcgctcctgccactccgggtgcatggcgaggagcacggtggcccaggtcaggaggttcgtcgtggtctgcttcccggcgaagaagaatgtcttgcattcctccagcatgtcctccaccgggatcgccgccgccggcgccagcgcccgcgccct

SEQ ID NO: 37897 - DNA, 261 bp, Setaria italica
  Peptide Sequence Number=SeqID_103871
gccgtagatgaggttgtgggagatgttgaggtgcacgaggccgcggcattggccgatgtcgccagcgccgctgatggtgttgtcggagaggtcgaggctggcgagcgcgggcagccgcgagaagttgccgaacgccgggccggagatgctcgcgcgggacaggtcaagcgacgcgacgcggccggcggcgtcgcagcccacgccttgccacccgcacggcgacgcatccgattctgaccacgtgtcgtaggcgccgcggtt

SEQ ID NO: 37898 - DNA, 1201 bp, Setaria italica
  misc_feature (1187)..(1187): n is a, c, g, or t
  misc_feature (1194)..(1201): n is a, c, g, or t
  Peptide Sequence Number=SeqID_103872
cagcaattattcgcagatattgcattgaaggtggatgatcgtgcccgagatgcgattatgagcgagaatgatgatggcattgctccattagatgaacgagaagatggttggctgtgcttctatgaaattcttgctaatcattttgttagagtgcctgaaagcgggaggcgtatacttgagttgatagtgcaactctggagccagtccttcgcgtccaacatattttcccttcttctccacaaatggttgtttgaagcccctcttgatggaaaggaaataccactaagatacagctctgctcttgttcaaggtgctacaaatgttttttggattgacatacagacaaatacaagacattttctctccttgtatcattatctccttgaagatgttgctctagtccctgaccgacttaataaaatatcattacaggctggtagagaccttttccttctgctctctagattcatgttcttctatgatcaggatcatttgctctctcgtttcctagagcattttcccacttttccaaattctttcttggttggtggtccagcagattactttgtaattgatctcacagatcagcttcaaaagctaaaaattgagccagtgctactgcactacctctcccgcatgagcatacttcaagggttggaactgaggttgagtacaagcaccagattaaaggcctgcctctacagcttcacttctcctggtggtcctacatacccaacacgagcggtgcggcatgcagcctggaatacactggatttgcttttccctattggtcgctaccctaggcatgtgataagcctgttcttccggctgctgtatccatggtactggccttcctcttgctggaacttcgtgatgacctgtgccatgactgtctactactacatcctaaacctgctcgtctcaacctgggagagcctgaggcggcctagtcaccggagaacgcacgaagagtgaagacatcttgtgttgttgttttgttcattttcttctgtttttcgtgcaagcagtgtagtaaatatagtagcttttgtgtttgtgcaaagaacatgttctgtataaactgctacgtttgttcagctgtctatataggacgaggaacaaaaggtaatgaaggagagcatgtgcatttctgacttcgaaaactaaacgggtaaaaaaaaaaaaanaaaaaannnnnnnn

SEQ ID NO: 37899 - DNA, 834 bp, Setaria italica
  Peptide Sequence Number=SeqID_103873
aatcaggataagatgaatataggggtcctacttgtttctcgcattgcaccttgtaacacttgtcccttgatccatagctgggtcaagttttagctaatacttccaagttggatttgtaaccagttgaggagtacttacaataagctggaatttgatctttcaagctctaaaaagcgttacatggagcttgttgaacagagagacaacctgagaagaggcagggaagactctgaagagagggaagctgctttggaggagctgaaggctgtagagctacaccataagaagctcaaggaggaactggctgcatatgccgatagtgatccagctgcactagaagcaatgaaggatgctatagatgttgctcattcagcagctaacaggtggacagataatatcttcactttgcaacaatggtgttcaactacattcccgcaagcaaaagagcaacttgaacatatgtacagggaggtgggtataactgaagattttgagtatctgcagtgatgttcaacaacctgccctgttacagcgttgtatgtaatcttgctcgccacagaatgttggatctaccgtaggtacaagttaatccgtgttggtgttatgtgagcaattggcgcagttgtccacagtacatggttttagtatatttcacatgtttgatatgcgaatcagatgcctactgaatgttgtcagggaaaatgttccggctcagctggatgccagtgaatgatatgatctagatgcatctagactcaaaggcaggcgagattctatgacaagggctgaaatttgtcatagggaaatgtaggtaccatatgtatgtaaaattga

SEQ ID NO: 37900 - DNA, 348 bp, Setaria italica
  Peptide Sequence Number=SeqID_103874
gaacagcagcccaggggtgagctgtgcctgcgtgagcgtttgagcaagctaggcgaagcattcgtacttacagatatacatatacatatatacatatatagatatataaagatagacagagtgattcttgctggctccatgcttgtgagatgagacttgcgagtggtggtcgatgatggcgggggagctcgcgctggccgctctggcgatcctgctctcctcgctcctagccctggtgctgagccacttcctgcccttgctcctgacccgaaggcccccaggggcagcttcggatggccgctgatcggtgagacgctcaggttcctcacgccccatgcttccaacacg

SEQ ID NO: 37901 - DNA, 1117 bp, Setaria italica
  misc_feature (1100)..(1117): n is a, c, g, or t
  Peptide Sequence Number=SeqID_103875
gtcttctgctctgggctctccactctttctccttcctccgccgtccgtccccgcgcccaaacacaacccgccgttgctccggcgcccgcccgcccgccccccacgatggagacctcgttcctccccaccacgctcccgaccgctaagccgctccccgcattccgaaccctgtccaccgccgcctcgctccgcccgcacccgcgcccccgcacctccaccatccgcgcggccatcacccgtggccgcaaggaggagacggtggccgccgtccgcgagcagctggaggggtgctacctcctggcgggcatcaagtacgagggcctgacggtgaagcagctgcagggcatccgcgacgcgctcccggagacctgcagcctgctggtggcgaagaacacgctggtggggaaggccatcgagggcaccccctgggaggcgctcaagccgtgcatgaagggcatgaacgcttggctctttgtccacaccgaggaggtccccaccgcgctcaagccttaccgcgccttccagaaggaggagcgcgtcgaggagaccaacgacttcgttggcgccgtcttcgagggcaagttctacgggcctggcgacttcaaggcgctcgagaccatgcccagccgcgccgaggtgtacgcccagctgctcggcgcgctgcaggggcccgccacgtccctcgtcaccacgttgcaggcgcccgccagggacgtcgtcgcggtgctctccgcctacgtgcgtaagctcgaggaggaggctggctctgcatagcgcggttgcgaaatggttgtcatctctcgccctcccttctgttgtagatttccttgtacctttacttgctcccaatcacatttgaattgaatcacaattttccattttacaatgtgttgcctgaatttcctgatagtggcatactgctgagtctgagtgtattagtagcatttcctgcttgcaagtctcatggtttaggaatcagtataaggtcatatatgaggtttggactgtgactaggtaatgctgaatatttggcaattgatttctgtgaaaaaaaaaaaaaaaaactgtgttactgtaccagtgaaaatatgattcagacnnnnnnnnnnnnnnnnnn

SEQ ID NO: 37902 - DNA, 738 bp, Setaria italica
  Peptide Sequence Number=SeqID_103876
aagtagaagaaaaagtacccatattgagttcattggaagatctggcccaactgcatgcactcggaagtgtcatttctattctttctgaatcatctacatatttgtgtaccagagtccttccaagagcattttacacagttggtagatattttgggaacatcaactgactatgaatctcggcagttgaatacttgcaatggatcatcttctgcagctgacaactatggggccctctatttatctgttcaaatgcttacatcctgtagagaagtggctttggtatcatatgctgattgttcttctattaaattagcgaaggagtcctggtggcttatcttagagaaaaagttggatcggctaatccatttccttggatcatttttaactattgattctgaatctatgcagtcaatgttcagacaagaatatgtctcatgtgctgtgaagggcttgttaacactagcaacattcccggaacagtgctcacctttaacggcaaatgcttatgaggatattctggctatgcttacttcagtaattataagcaagtttgaaaatgttgatttatggagattgtcattaaaagcattgactagcattggttcatctattggggagttccatgcttctcaaaaaggaagtgatttactgccgaacagttgttgacaagatttgtttctttggttgaatcttatgatggcccaatgcctctcagcctaagacttgaagcaagttatg

SEQ ID NO: 37903 - DNA, 1225 bp, Setaria italica
  Peptide Sequence Number=SeqID_103877
agtgtgccttgtagtttcatttgagtaggcatggttattccacagcagtgaacataaatccagctcatccaatagagaagagataaaaccatctatggaaaccttatccacatcaaacaggcaatgtgcacaggacggtaatgttgttggcttatctgactggacatatgatgacataaggcatagagaagggtctttactctcaagaagctggacgaccaaccgtatagccgtcgtgagaaagttgcaactctttggaaagagaaacttgtcaccacacatggaaccaaagacatggagagccaacagagtccacaaaagattacttttacccatctgaagaactttgtacgaaacctctaaaacaacatccactctctccacttccacacatattgaagccaacagaatgcaagcagcgataaattgatctactttcgcaggtttaactgaaatctgtataccagcttcgtcatctaattcatgatccttgcttgcgccaaatgccttctgtcccattttttcacatactataacttctttgttcagaagaaaatcttcaatcaaggatataagaacatcaagctgatcccctctcagaatagtccaccttgtttccatatgagacttcacacttaaggaaaaagctgatgaggcaaaatttccatccgccaaaagtttcttctgcgaatctaagatcccacaacaaaagggaaaatatgagggaaaccttctcatctgtagatatcaaagggtcggttgatactttttaaagcaatggaccatcaatggaagattccttagaaagatctcgagattgagaatccagcatctcccaatatcttaatatgttgatcatggtgcttcttttcattcttgtagatacaactaagtgcattggaggtctttcggatccacaataatgcccaagcatactaattgagtccaaattgtttggcttggtcactgttgtctcacttgccccaacattagattgcagtaaagaatttgatgatctgtcacaaatcttatgtgagctgtttttgctaggcacttccttggacaaatgctggaaatgcaaaatggaatttgaatgaccaacacagctacttcctgataacactagtctgcctgtatcagaattcccggccacatcctcatgcaaaaggctgccgaaagaagcgtttgttggcataccagccaaaccggcactacaagaaacatt

SEQ ID NO: 37904 - DNA, 270 bp, Setaria italica
  Peptide Sequence Number=SeqID_103878
ttggaatggcatttatgctttttgcttgtattccttcagttcaaatgagccagattgaacaaatgcaattgctttggatcacactggtgccagtttgcttactgagtctattggttctctttcttctaccctccgtttgtgtttagaaaaggctttcagcctttgtaccatgaaagttttgagattttggtacttttggatcgtgacagccagatgattctatttctattattgtgttttacattagaaacgttaaaaaaaaaaaaaaaa

SEQ ID NO: 37905 - DNA, 399 bp, Setaria italica
  Peptide Sequence Number=SeqID_103879
ttcaggttcttcgagatctcctcttccttctcaggagtcaaaagtgatggcggtctcggacgccatataactgatagaagtgatcctttgacaccttgtaaaggtgcttgccattgaaggaccatatttgaaatccattctccatctcatggactgaggtaactgcagttgcaagataccttccagtaggatcccacattatgtctgttgccataaaatgctctcctgttgccatagtttcaagctcatcaacattgtagaattctagctgcccattaaatcccttcagcccagcaagaacaatgaagcggccagcaggagaccaaaaacaatgcattagcttgcttggccttgagagtcgtgagctttgagacacggctagtgttgtttactagtgcg

SEQ ID NO: 37906 - DNA, 556 bp, Setaria italica
  Peptide Sequence Number=SeqID_103880
tacttgtaggttaacttgtctagtttgtctaagtattacctttcctagttaggtattccctactatttaattaaactaaaccgtccgttaaagttgcttcttaagtttaacaaagactacaatacatcaacattgtagaattctagctgcccattaaatcccttcagcccagcaagaacaatgaagcggccagcaggagaccaaaacaatgcattagcttgcttggccttgagagtcgtgagctttgagacacggctagtgttgtttgctgttcgcatggtgtagaaactgacatcaggcctagggccatcgccatgaatgatagcgaagcgatgccctttaggttcccaggcaaatgcaataatcttgtcattcttattctcgagttcaaggacctcaattgggatgtctctctccttaattctaaacaactcaaacccatatttaggtggggtggtggaaaggatgataaatattttgcaaggcttgggaagaacataatatctatcatcctttccaccaccccacctcaattgggatgtctctctccttaatt

SEQ ID NO: 37907 - DNA, 480 bp, Setaria italica
  Peptide Sequence Number=SeqID_103881
ctgatacgttctcccttcttgacaagaagtccctgaaggtagaacgtatcagtttcatagacagatattatgttcttcccaagccttgcaaaatatttatcatcctttccaccaccccacctaaatatgggccatgagacaccagaaacgccaatattaccgccagcggtaaactcatcagcacttcccttgaagtctcgcatcactttcccagtccttacatcaaagatattcaggacaaccctatgtgtgtctcgagggttgctgggctcatggctgctgtatgtgatcaagtatctctcaccaggagaaaagtcaatcagttttaccattggatgagcaaaaacgcattaaccgctcaaagccattttcaccacccacacctgtgatccctgcctatgaacggttgccaagtatgttccaagaggggaccactgaatgaaactatctgtccagtactgttttgaaacacaagttctg

SEQ ID NO: 37908 - DNA, 2590 bp, Setaria italica
  misc_feature (1)..(54): n is a, c, g, or t
  Peptide Sequence Number=SeqID_103882
nnnnnnnnnnnnnnnnnnnnnnnnnnnnnnnnnnnnnnnnnnnnnnnnnnnnnngtaccaaacacattgttaactgtgccaaagccagacaaagattagtaatccagcagcaaaatttgatatctgaatgcatgatccgcaaattcaagcagcaagtgtacagacaacaagtaaaacgatcagcaaactgtgcgcttgatcactgagcctattatgcaaagcaacagcgatgaactttgacacgacggaaaattaaaactcagcagattctaacataagcctttcactcctgatccaggtcgaatgcgagaacttcttccgtgacatccaccacttcctccacctcaacctccttggcctcgtactcttcctcctcgtcactggcatccccatccctaagctccctcctatatgcacgctcctcctcatgtatctgcttccacttggcaacccatgagtcccattcttcctggagctgtgtccgcctcttgcgctcctgctcgctcagctggttgaatgcatcctggtcttcttgctcgtacttcttgctgtacttcttcaggttcttcgagatctcctcttccttctcaggagtcaaaagtgatggcggtctcggacgccatataaactgatagaagtgatcctttgacaccttgtaaaggtgcttgccattgaaggaccatatttgaaatccattctccatctcatggactgaggtaactgcagttgcaagataccttccagtaggatcccacattatgtctgttgccataaaatgctctcctgttgccatagtttcaagctcatcaacattgtagaattctagctgcccattaaatcccttcagcccagcaagaacaatgaagcggccagcaggagaccaaaacaatgcattagcttgcttggccttgagagtcgtgagctttgagacacggctagtgttgtttgctgttcgcatggtgtagaaactgacatcaggcctagggccatcgccatgaatgatagcgaagcgatgccctttaggttcccaggcaaatgcaataatcttgtcattcttattctcgagttcaaggacctcaattgggatgtctctctccttaattctaaacaactcaaacccagtgtaggtgctcttctttgtttttgtatacctatcaacctggacagcaagatattctccattattctgccaatacatcttgcagtcactgacactgaaaaggtttttctgccgcagctcctctttgcctggaatttgcacaagactcacccttgcaggctgattcccaccacccatttcaggcacaaaaagggatatgattggatccgtgggagaccagctgaagtccactacattttctaccttcagggacttcttgtcaagaagggagaacgtatcagtttcatagacagatattatgttcttcccaagccttgcaaaatatttatcatcctttccaccaccccacctaaatatgggccatgagacaccagaaacgccaatattaccgccagcggtaaactcatcagcacttcccttgaagtctcgcatcactttcccagtccttacatcaaagatattcaggacaaccctatgtgtgtctcgagggttgctgggctcatggctgctgtatgtgatcaagtatctctcaccaggagaaaagtcaatcagttttaccattggatgagcaaaacgcattaaccgctcaaagccattttcaccaccccacacctgtgatccctgcctatgaacggttgccaagtatgttccaagaggggaccactgaatgaaactatctgtccagtactgtttttgaaacacaagttctggtgcctgctttctagcatcattccagtaaacttcggtcaatgtaccagcacggatgacaaattgatcgcgggccttttcatcagttagccacttcagaagattttctccaggagtgtacggctttatttcagcaggcgtccatgtgtcaggaaccttcatgtacttctcaaagtcatcaagcatattaactgcaaatatatgagatttgtcgagtttgtacccatttgttttttcccttgcaagctcagcttcctgaggggtattatactcgatgaaacagtagccatatgtcttctttgtctctgggtttaccggcatccatagaccattttcttttatcgctccaatttggctgtagatcttgcgaataacattctccagcttctcaaacttttctggaggaacaaccggcagattgtccacgaccataatgttggataaacccatttcaagttcaggagggtcctcattccgaagtacctcctcgtcgtcactgaggatgccgaagtcctcgccggccgggagggtgatggagtccagatcgacggcggagaggtccaccgcgagctcccgcgcccgcgcttcgagcccttccatggaggttgtcagcgccatcttctcctacatacgacgcctcaaaccctctgctagaacgagagaggaggtgggggtgctcgcgctgtgtggcggcggcggtggcggcggcgcgggggaggaggaggtgtgtagggctgggatagatggagcctggggttttgg

SEQ ID NO: 37909 - DNA, 251 bp, Setaria italica
  Peptide Sequence Number=SeqID_103883
tgatcatcatctctccatgaaccaccaccacctatcacctgtcccgagtcgtcaatcttcttgctcctatacatgatcttggccgccgagcctgtcgacggcgcggaggaagcagaggtggagctccggcgtccagcggaggcgagggttcttggaccggacgtaagggcgcaccgacgacgacgaagggttattcctgccgctgctgtccccgccgccggcttcatccaccgtgctgctattgctggcgg

SEQ ID NO: 37910 - DNA, 786 bp, Setaria italica
  Peptide Sequence Number=SeqID_103884
ccatgatcctcttgatctgagcttgcattggacattggaccgcggcggcaggataataagagaataaagaggtcatcatcaggttgtagctggggcagagaagacgaggagaatgctgctagggataatgatcaacaagtactggagagtgctactgatactgggttatctctttctttgttctcatcgtatccacttcttttgtgaggaccggtagtggcggtgccctaggtgtcaatatggacaaagggaaagcgcatccaacaagaacaagtactcttgatctcaccatatgatctagtgcggtgtggtgatatcttgtggtacttgtccatgtgtgtgtagaggaagacacgtatgcgtacaaatatatatctgcataggtaaactcaaaagatcaatacacgcatgtatacatgattaatagctctacctatgcagatatatatttgtacgcatatatgtgtgtctttctctagacgcatgcacatggacaagtaccacaagatatcaccacactgcactactagatcacattcatatggtgagatcaagagtacttgtccttgttggatgcgcttctcccctttatccatactgacacttgtcctcgcaaaaggaggatacgatgagaacaaagaaagagataacccagcagtatcatcagtagcactctccagtacttgttgatcatcatccctgctggcatttccttgtcgtcgtcttcttctctgcccaagctacaacctgatgatgatcttctttatttcttctttattattcctt

SEQ ID NO: 37911 - DNA, 396 bp, Setaria italica
  Peptide Sequence Number=SeqID_103885
tgagttgcacctacatatatacaagaatgaaaatggatcgaaatcatcacgagctaggtacatgcatgctaattcagcggagtagctagctaataatttggatggtgaggtgatgacgatgatctcttacgatcttggccgccgagcctgtcgacggcgcggaggaagcagaggtggagctccggcgtccagcggaggcgagggttcttggaccggacgtaggggcgcaccgacgacgacgacgacgatgggttcctgctgctgtccccgcgccgccgccggcttcatccagcagctcaaccgtgctgctattgctggcggagctcccgtcacggccgccgccgggaggcatatcggcggcagcatcctcctcctcctcctcggcctcgccgctag

SEQ ID NO: 37912 - DNA, 193 bp, Setaria italica
  Peptide Sequence Number=SeqID_103886
agacaacatcgaaattgaattcagacgtagccacttacaaacatgggtaaaaatcaaaagatcaatacatgcatgtatacataattaatagctctacctatgcagatatatgtttaattttacacacatatatgtgtgtaaaaattaaacatatacatgcatgtatacataattaatagctctacctatgcag

SEQ ID NO: 37913 - DNA, 1081 bp, Setaria italica
  Peptide Sequence Number=SeqID_103887
ttttttttttaattttgaattcagacgtagccacttacaaacatgggtaaaaattcaaaagatcaatacatgcatgtatacataattaatagctctacctatgcagatatatgctattaatttacacacatatatgtgtgtctttctctagacgcatgcacatggacaagtaccacaagatatcaccacactgcactactagatcacattcatatggtgagatcaagagtacttgtccttgttggatgcgcttcttcccctttatccatactgacacttgtcctcgcaaaaggaggatacgatgagaacaaagaaagagataacccagcagtatcatcagtagcactctccagtacttgttgatcatcatccctgctggcattttccttgtcgtcgtcttcttctctgcccaagctacaacctgatgatgatctctttattctcttattatcctgccgccgcggcccgatgtccaatgcaagttcaagatcaagaggatcatggtggttgctgtgattatcctcatcgtcgcgttgttgtagtagtggtcttatgaattgatcgttttgatgatacgatgaacgcccagcttgaagaatcgaagctctggaaacatactgatgatgagcacgagtagttgtaaggaacacatcggcttgatcagctgctgatgagtagtagggtttggatccaagaagatggtggtgatgaccatgaagccagttccaataatgaggccatgcaccaaaccttgctgacaatagggtagtagcagcaccagtctgggcgtgatgcaaggaaagatggccgaggttgtacgcttgtcgacccccctcttgcaactcatgatcatctctccatgaaccacctatcactgcaaagagagtagtaattgtacctgtcccgagtcgtcaatcttcttgctcctatacatttggaggtggctcttgacatggcctatgctaagccctttaacgttcatcagttgaagaaccagcttgggagttgcacgatcttggccgccgagcctgtcgacggcgcggaggaagcagaggtggagctccggcgtccagcggaggcg

SEQ ID NO: 37914 - DNA, 1412 bp, Setaria italica
  Peptide Sequence Number=SeqID_103888
actagggacgtagaatagacaaaggaaaagaacggaccgaaggttagtaacatttttttttttttttttagacatcgaaaatgaattcagacgtagccacttacaaacataggtaaactcaaaagatcaatacacgtatacatgattaatagctctacctatgcagatatatatttgtacgcatacgtgtcttcctctacacacacatggacaagtaccacaagatatcaccacaccgcactagatcatatggtgagatcaagagtacttgttcttgttggatgcgcttccctttgtccatattgacacctagggcaccgccactaccggtcctcacaaaaggaggaggatacgatgagaacaaagaaagagataacccagtatcagtagcactctccagtacttgttgatcattatccctagcagcattctcctcgtcttctctgccccagctacaacctgatgatgacctctttattctcttattatcctgccgccgcggtccaatgtccaatgcaagctcaagatcaagaggatcatggtggttgtgattacccgaatcctcatcgcgcagcagtggtcttatgaattgatcgttttgatgatatgatgaacgcccttgaaggatcgaagctggagcactgctgcaagtagctctggcaacatactgatgagcacgagttgtaaggaacacaccggcttcagctgctgatgagtagtagggtttggatccaagaagatggtgatgaccatgaagccagttccaataatgaggccatgcaccaaaccttgctgacaatagggtagtagcaccagtagtctgggcgtgatgcaaggaaagacggccgaggttgtacacttgtcgacccccctcttgcaactcatgatcatctctccatgaaccacctatcacctgtcccgagtcgtcaatcttcttgctcctatacatttggaggtggctcttgacatggcctatgctaagccctttaacgttcatcagttgaagaaccagcttgggagttgcacgatcttggccgccgagcctgtcgacggcgcggaggaagcagaggtggagctccggcgtccagcggaggcgagggttcttggaccggacgtaagggcgcaccgacgacgacgaagggttattcctgccgctgctgtccccgccgccggcttcatccaccgtgctgctattgctggcggagctcccgtcgcggccgccgccgggaggcatatcggcggcggcggcagcatcctcctcctcgtcctcctcctcggtgtcgccgccagctgacgacgactgcagctgatgatccatcatagacgacgatgctgatgggtgagctgaggtccaactaggatagcttagtctcccttgtgacatgcatatatatcttgttgctattatattt

SEQ ID NO: 37915 - DNA, 620 bp, Setaria italica
  Peptide Sequence Number=SeqID_103889
tctgcagctgtatgccgttctctttcttcagctatacattcttgtggacagcactttcatatcttgttacctaaagttctggagtgcttatctacaaatttcttactgtttcaaaggcatgactgcttcttgagaacaggaagctattgttgcatctagctcgctgcttgagctatcatttcaaaaggcagctatatgttctacagcaatgcaccgaggagcagcacttgcatcaatgtcatatatatcatgttttcttgaggttgttcttgctgctgtgctagaatctccagagtgcatccctgacggatcacctggtgtggtcctaattcaaatcttggcacgctgtggtgaaggtttattgtctaatgtactttatgctctacttggtgtatcggctttatcaagggtgcataaatctgccacaatattgcaacaactggctgcaatgtgcagtttctgtgagagaacgacatggaaggctgttcttagttggagttctctttgtgggtggctacaatcaacggtgaagtcattgccctcagagtatctaaagcaaggggaagctgaaatgaataaattaccgacaagtaggactagaaaggtagattagaagaata

SEQ ID NO: 37916 - DNA, 1507 bp, Setaria italica
  Peptide Sequence Number=SeqID_103890
atgtcttcttggaatatttttggccacttcttgaaaaacttttccgatcatctcatatggagaatgctagtttatctgcagctgtatgccgttctctttcttcagctatacattcttgtggacagcactttcatatcttgttacctaaagttctggagtgcttatctacaaatttcttactgtttcaaaggcatgactgcttcttgagaacagctgccaacgttattgaagaatttggtcacaaggaagaatatggggctttgtgtgttaggacttttgaaactcttagctctgcgtcctcaatatcaactcttaattcttcttatacgtgtgatcaagaaccagatctagttgaagcatatacctactttacatctatgtttatccgctgctgtccaaaggaagctattgttgcatctagctcgctgcttgagctatcatttcaaaaggcagctatatgttctacagcaatgcaccgaggagcagcacttgcatcaatgtcatatatatcatgttttcttgaggttgttcttgctgctgtgctagaatctccagagtgcatccctgacggatcacctggtgtggtcctaattcaaatcttggcacgctgtggtgaaggtttattgtctaatgtactttatgctctacttggtgtatcggctttatcaagggtgcataaatctgccacaatattgcaacaactggctgcaatgtgcagtttctgtgagagaacgacatggaaggctgttcttagttggagttctctttgtgggtggctacaatcaacggtgaagtcattgccctcagagtatctaaagcaaggggaagctgaaatgataattccgcagtggctgaaggtgcttgaggatgcaggttctgactatcttcacaggactggtgataatatcagaaatcatcaaggatacatgcaagggaagggtggtagaacacttaaacgcataatcagggattttgtggaaagccatcgaaatgccccaaccccctgcccttcatgatatgcggatgaaactgatttcatcagtcctgatagtggagtgcgcggtccgtgttgatcctagggtttgacctccatatacaaatctttaagtcggaaaatgggctacttgcttgttccaatgacctggtttggactttggggttttgtcttcctctgtatagcaagtcaccaaagggcaaaagtggagcaagttgtcaaaccagcctactcggaatgaaccgggaaccccatgggccaatgtgttcaatggtccttttcaaggttggaagtccaaagttttgcttctccatgggccatgaggggtatactggaacatttgggtatactggatgctttgagagaagacggagaggtgaatgcaataactgtatatatcattcttttgcgattagcaatgtacaaaacattcttctttgttcatactcaacttttgagctcacatgggcaaagttaatttcaaatgtatatatctgttacttcaaaaaaaaa

SEQ ID NO: 37917 - DNA, 239 bp, Setaria italica
  Peptide Sequence Number=SeqID_103891
atctgctgttcatttcttgtccaaccataatagccaacatgatgcaaatattcgacactgcagataaaagttgtaagtgccagattgctcgtatagtatcatgaggaaatggaaaatttatatttgctaaaagttatgtctttcaaaatttggtgatcagaaacatagtttatcatgatgttcagaaacattagtttatcatgcatacagtgacagtctagtactgccatctcctgaaa

SEQ ID NO: 37918 - DNA, 706 bp, Setaria italica
  Peptide Sequence Number=SeqID_103892
gcaggggtgaaaatgtacaggcagttacagtgcagtttcctccaaaacagacttgcatgaacatgtaaacagcagctttcaaatattttgacagatgctacatgctatttgttcctacagaactagccatgggggaaggaacacttttaaagggaagggaggtcagtaatgccattgctagcccatgttaatgttaattaagggcaaaaggtagtgtaggaattcaatgtctaggagatacgccaacatatccacaactataaacggtaactttaaaagtaaaatccattcaaactttaaaagtcgtacctgtagttcaggatatatagctagctctaacttaagatgcctggttggagtccgcacttcacggggtaaaaccacagcccaaatttttcgtgtcataaactgcggagcaattgcatccagaaaagcaggagcataattctccctcatccatccacaaaaaagagaaatccgtccctctatggcccgtacaacattaacatggcccttttctcttgccaattcaagggcagtattgcaatcatcatttggtatgaaaggattagctccatgcgtgagaagtaaatggacagtctgctcaagtcctttcttagcagcatggtgcaatgcagtcccacaatgtgatcctatttaattgagcagtttaggctccctactaccttcaaagttgtgctttttt

SEQ ID NO: 37919 - DNA, 2073 bp, Setaria italica
  Peptide Sequence Number=SeqID_103893
tttttttgtttttttttttttttttggtagagcagcaaaaagtatattttatttccagttctgtgtggcttaaatccacaacagaattgtcttacacttatatacacaccactgaccaccgtataacagcccgagcagatcacattacacgaaagtcataatttacagagcagtacgaactgcataattcttagatagagacgttcccatcaaaacttgttgcgagaaccatccagttgccaagtttccaggctcaccatttcaactcctcaaacagcatagaggcgaacaacctggttgatcgtggcgcggcagatagggcacccccacttcttggactctatgtccttcaagcaggacatgcaaccagccatgtggccgcacggaatgcaggccccttccacgggggcatccaaacagataacacaggtgccggagggagtattgccgctgccgctcgcattagcctcatcttctccaggtcccacagatgctgccacagtaccgccttcggtggtagcaggcatgattacatcgacaggagtggaatctatggatgggtactgaacagggccgctgtagaaggtttcttcggcaaatggtggtgcagttggggtcggaagagctggtagtgcttcctgcggaatcacaaccggtgggttggtttgtgttttgctgggtttcgatgaactttggctagagcttgttccaggcacgtcccatccattgtatgtgctgctgctgcttggagcgtcaacccgggcttgggattgcccgctcgtctttgatggtgcaggagctgatggtggtccccatccattgtgagaattgcttggagggataccccagccattggtgttgggagtggatgcatttggttgaacattgggcactccctccgcaatagctgactgaattgaggcattgatagccatcgctaattcaacatcctccttggtgggtgcagatacttctgaaggtgccacagatgagtttgcaggtactggatttggcactgggagatttgctggtggtgctggaaccgtgttggaaacctgcaccatgccacaacatgcatggtaaaacctttgaagctgctgtttgtcaccttcataggccggtaagatcttgtatcgagtttttgttcctttatcaaaaatgacaacggaagggtcagccaggttaagctttggttcctcaatttgcgatttccatagtttaactatagcacgaggtttagaagcctgtagttcaggatatatagctagctctaacttaagatgcctggttggagtccgcacttcacggggtaaaaccacagcccaaatttttcgtgtcataaactgcggagcaattgcatccagaaaagcaggagcataattctccctcatccatccacaaaaaagagaaatccgtccctctatggcccgtacaacattaacatggcccttttctcttgccaattcaagggcagtattgcaatcatcatttggtatgaaaggattagctccatgcgtgagaagtaaatggacagtctgctcaagtcctttcttagcagcatggtgcaatgcagtcccacaatgtgatccaggccggtacgcgttgacattggctcccaactcgatgagcaccttggcgacgccgagcagatcgggccgcatgcaggcgaccatcaggggcgtcttcccctccttgtcaatccactcaaggcccgcgccctgcgcgcggagggtccgaatcccgtcgacgttgccgtagttgacctgctggtacagcagctcctccttggactgctgcagccccatcccgacccacgaaatagcccaatcggaggaggaggaggggattctctcgatcaaaatcgcccgagcaagtcagcagaggatcctgcgagtcgtgccgtcgcgggcgcgggtggggaaccgaggggcttccggagtggtgaggcgggcggcgatttgggggaaaccagcccggagatccccgccgcgggaggcgagcgggtggttcccggggaggcggagggggattgatttacgtaaggggaggacgggcgctaatgggacgaattat

SEQ ID NO: 37920 - DNA, 1032 bp, Setaria italica
  Peptide Sequence Number=SeqID_103894
tagtctaaagatgtaggattgaacagacaccaataggaagatcactatttcaacaaaagctgaccgtgatgttatcttaaaaccgtagtcatacttgtagaatccaattatttcatacaggtagtcaatttgatcacacatgccagaactaaactgcccaacataaggagattgataggcaagtgacaaaacaatgagagcaaaattatacatccttaaatacttgaaaatcttattcttcttcttcaatatttcaagtctcattctaaagaaaaccagagcaaatccaaggtagccaaggtgcagaacatcatactctagtgtaccggtgatagcgattaatgccaaaactatgtctaataaatggcaataagcataaagccgtacatagtcaagaaatgtccaaaagctttttgtttccaatgagaggtccctccaaactactgcatttttcctttgggacatcatctggcgatatgtatctgagtctgagaagactgagaagcggtctgagcgaagcttaaaagaggaaaatataaacacaacgtagtagctaatcagcattcgagggtcatcgacagttatcccgagccagcattttgagcagtagtcaaagaaaatccttgaattcttccagcattcacggcaattgacttcaatgtcattgatatcatgaaaccaaggcatcacatcgttccaaagagcaaaatattcgagtattaggacagaagcaaacagaaatacaaaaaggggccacactttctggattagatctctgttcataagaatgcagactacgaggcacacgatatagaagatcgataccacattcaacaatgtaaagcttgccaataataacacaatcatgttaatttccagacctcgcagtttgaaaagattttctatccagaacttcatgtaacatttgaatgttattttctgagtttcaaatctttctcttttcagagaaataattcttttctttatcccagttgtgactttcttttgacaatccccaaatctttgcaaagg

SEQ ID NO: 37921 - DNA, 210 bp, Setaria italica
  Peptide Sequence Number=SeqID_103895
ccttattttacaggatcagctactggtctatctgagcccgaacaaacgatagtaaattaatcaacaacagaactattttgctgtggtaccaggtcagcactttttgactactactgctgtttcttaattgtttttttaaaaaggaaacatttgtttttatattatttttactgaattggtcacagcaaaccaaattatagtggggtggaa

SEQ ID NO: 37922 - DNA, 616 bp, Setaria italica
  Peptide Sequence Number=SeqID_103896
ctgatcattccctattttgatgttatcttctatacttgtgaattcattgttgtaatcagctttctactgcctttggagtttggacagctatactgattgtggctgttacacgtgtgatttgctgaagtgacattaccctacatacttctgtgattgtttgaactagttaaatacttcttctgtgattgtttgaactagctaaatactttatttgcggatatagtttacattattttttgttctattgacatgatcagtccacggttcaattggctctcaattttttgtctccggagagtttaccagagtcagtccggatggcccaagagatccgttgcctgccgaatggtcatgttgcaaaactgaagatgcttgaggtgcgttgtgatctgcaactactaggcaattcaataatgctaatcatccagtgtgaatgccttttcattaatgatacaggtaaaaaagatctcctctatatgagctcagcagttagacaagataaaaagcattagaaagctgattacagaaccgaattctatcttgtgaaattttgatgacaataatgtcggtaatttcatgagaactatcagatttttaacaaaaaaaaaaaaaaaaa

SEQ ID NO: 37923 - DNA, 2089 bp, Setaria italica
  Peptide Sequence Number=SeqID_103897
gtatgatttatgccttgattgttgtagagacatacggcgttctcgggccactattgcaagaggagaagataatgaagatcatgttgaagataaaagtagagattcttttagtaaaagagcaagactggaaccatctacagaaagtgtaaatgacaagtcatgctctcagcaaatggatctaaataatattgacattaaatctttagttcctacatggagagtcagcaatgatggcagcctcacttgtgggcctcatgaggctggtggctgtggttcatcaaagctggtgttaaggcgaatattcaaaattaattggattgctaaacttgtaaaaagttctgaagaaatggtcaatggttgcaaagtacacgatctgcaggatggatgtttgtcttacagtgatggcagacggttagacttaattggtcagcaaaaccttggtctcccaaaatgctcaaacagtgaagacattagtgggaattgcgtgtactctcctgtattggaggacttgaaacatgaaggcatcatgcattttcgtaagcattggataaaggcggagcctattgtcatcaggaaagcatttgagccttctctatcatcaatctgggaccccgtaagtatttggagaggtatccaggagatcatggatgaagagatgaatgaagatgtaatagtcaaagctgtggactgctcaaaccgatcagaggtggatatcgagctcaaacagtttatcaaaggttattcagatggtaacaaggggggtgatggccgcttgttgatgctgaaattgaaagagtggccccggcccagtgtcttagaggagtttctgttgtgccacagaccagaatttattgtcaattttcctcttgttgatttcattcatcctagatggggtctcctaaatctcactgccaagttaccgcaagatgccttacagcctgaagtagggatgaagctgctaattgcatatggaagtcgtcaagaacttggtcaaggtgatccagtgatgaatctaacgattaacatggatgatgtggttcacatgttaatgcatgcagctgaaatgcataaccaatgtcccaagaggctactatctaatggatctgaaaggattgctaatggaactagtgcgcatgtaaatgaccactctcctgttccaaatttggatctggatgtgggggagccagagcacaaacatacaatttcacattgtgaggaggtaaaagctaacaatttagaagaatctcaggctggtgctgtctgggatgtattccgcaggcaggatcttccaaagcttaatgaatatttggctgctcatcaggaagaatttggagctagttgtcaggctgtgccctctgttaagtatcctatttacgatcaaactgtgtatctcaacaattatcataagaagacattgaaggatcaatatggaattgaaccctgcacattccaccaacatataggtgaggctgtattcattccagctggctgtcctttccaagtgaaaaacctccagtccacggttcaattggctctcaattttttgtctccggagagtttaccagagtcagtccggatggcccaagagatccgttgcctgccgaatggtcatgttgcaaaactgaagatgcttgaggtaaaaaagatctccttatatgcagcaagttcagctgtcagagaaatccagagaataaccctggatcccaagttcaatctagatgctagtctcgaggatcaaaatttgactagggcagtttcagaaaacttggcaagagtgaataaacaaaggaaggtatctttcagttgaagtactggaggccttgaagaaattgtgacatgcctcaggattgaagctgatgcagaagtagatatagtgattgtacatgtattatattgtaacacatgaaaggaggacattctaattcgtattggatagcatattgaccttacctgtatattgtggattaggactaactgctgagctcatatagacaagataaaaagcattagaaagctgattacagaaccgaattctatcttgtgaaatttgatgacaataatagtcggtaatttcatgagaactatcaga

SEQ ID NO: 37924 - DNA, 357 bp, Setaria italica
  Peptide Sequence Number=SeqID_103898
tcttctttctacttggtctagtttgtaattattagttgtctacttagttctaaagtcttgttgtctattgatgttgcatcgggtaacatgcattctccagaaggtaggcagagcattgcagatgcatgcaactcaaggaaaataggatctgaggattcaaatggactgctctacgacagcatccaaccatggtctttcatccttctttaataacaagaatgccaactccagtgtttcttttgctgcagcaacagcttgatcattttcctctgctgaaagcatttcaggagaaacagcatcattcaacatctcaaacaatactacaaacttttaaagaccaagttaccgaattaaaga

SEQ ID NO: 37925 - DNA, 2116 bp, Setaria italica
  Peptide Sequence Number=SeqID_103899
cagaaaactgagtgctgaataacgaggacagatcaaatggcacataacagcgtatttcaacaaagtttcgccgaaacaccgtgaaagttcagtttctcatgaaccatgttggatttgcaggtgcctcttgtactgtatttgccaccgaaatgcgtattcattcttacacatacgatgggactaaaatggcagttttacaatccatggtattaccaaacacctacctatacacggaaatccaaagttcttcctctaatggcattgaaacacattacaacaggtttccttcaatcttgacaccaagccattagaaacaaattacaacaggttcttcagtgtccttcaatcttgacgccaacctccaaatttatggatcattactttctgaatgtcagcagatggttcagaaagtgattcgccggacattgaaacccacccgtgatttgcaattgattctctgagaacatgaaggacttagccatcagaaggtaactgctgctcctcctcaagctccattttacatatcaagcattccctctcgaaaatcaggaattcctgcaactgctgctggctgaacaaatgcatcattccggattcggacgaaccaactaactcaataagtttatcacaatcatctagagaatcacctgctgccgaaagcgaaatacatgcctgcatggatcgtagaatcgtttcaggtaggcagcatcttcgacacaaccctcgaattatgtaagcagcagtgctttccacagagccattcccatcagagtaccaagcatcaagccgtgaaatggccattgaaactccaggttggaatcgactgagttcacctttaaagccagctgccatgattgcagcaagaagacctccatcattggcttcatgaagcccatatccatcaccttctgcagctaggcagcttagagcaacttcaatacagcaagggtctctagacgagacctgaatgtccaccttcaacttgcgatgcagcacatcctcttcactggcagttgaatatagtgcactagtcaaagctgtgcatgatgttgcatcgggtaacatgcattctccagaaggtaggcagagcattgcagatgcatgcaactcaaggaaaataggatctgaggattcaaatggactgctctcgacagcatccaaccatggtctttcatccttctttaataacaagaatgccaactccagtgtttcttttgctgcagcaacagcttgatcattttcctctgctgaaagcatttcaggagaaacagcatcattctgcatctcaactttaagccagttccgataagtcgcatcaagggagtaatattcatgccaatcttcaaactcctgtaagttatcagatacctcctgatcttccagcgaaaataaattttccttttgctttaatggttcagccaggatggcaagcaacttgtgcggccctgctggtagttcagggactctcctcattgatatcaaggaaaactctctgaatagtgtgttgctatgcatcaatgcccgaatcagaagcttcccagtgatcatttgaaagtctggaatcgagggtggtggtgtgaagcaaagccactgaataaccattgccttttgaagtgactgtaagtgatgttgatgtgcaacatcggagaaatcctcatcgtacttgctgggttttgtttgtcgagatcttgaaagcaccctctcaatgatctcttcaaaacaagccttggatgcatctccagatgagaatggcagatactccacagcagagaggaagagcttgtacatagtatgcaaactgctatttaaccttaattccatcatttccacaaacaaatcaatgcaaaggtcacgttgaagctgagaagcgtatactccaaccaactcctcttggtcctctgagaacaaatatctcacatacatgttgatgatgaggtcaccgacagcaaccagcttttcctccaactcatcttccatttcatcactgatgaaaatgtatctcagtacaagaacgacatgtgccgcgaaacgtatcatctctgggtcatcaaggggccttgcaatattttgttcctcttcagcggaggacaaccatgaccaccaattagtaacctaa

SEQ ID NO: 37926 - DNA, 445 bp, Setaria italica
  Peptide Sequence Number=SeqID_103900
tccaggggtggagcagcttttctaaaaggttggggtcatgcaatggtagatcaagcacaaagatggcttcagtggttcatattaaggaagaatcaaccgatggtatcataagaaaaacataagaatctgtagcactatagagattattcctttcttatggcctaacattttctgcagcatacaatgtttccgagagcaactctggtggtccttctgaggctccctacattgtatcatccaagagttgtctatctcaaatcacaaaagaagattgttgaagagatggtgggagccatccaatctgaagtcccaatttttgtggcaatcatgaagaagataaatgttgatgtcactcgtcgttaccgcttgatagaattaggaaaacaattcgcgacctcacaacttccacatagagggcaaactgtgctgctccagtgcatgaaga

SEQ ID NO: 37927 - DNA, 573 bp, Setaria italica
  misc_feature (19)..(19): n is a, c, g, or t
  Peptide Sequence Number=SeqID_103901
agaaggaagatatctgccncttttaccggcaaagggtgggagaagattcacatttacagtctatctacttcgcgcaacagcaacttattccaggggtggagcagcttttcaaaaggttgggtcatgcaatggtagatcaagcacaaagatggcttcagtggttcatattaaggaagaatcaaccgatgcatacaatgtttccgagagcaactctggtggtccttctgaggctccctacattgtatcatccaagagttgtctatctcaatcacaaaagaagattgttgaagagatggtgggagccatccaatctgaagtcccaatttttgtggcaatcatgaagaagataaatgttgatgtcactcgtcgttaccgcttgatagaattaggaaaacaattcgcgacctcacaacttccacatagagggcaaactaggctgctccagtgcatgaagaagatatggacgaccaaaaatggtgattcacggtggaaggagaaggtggtttcttgtaggaggttggtccacatttgctcgtgataatggtctgagagtcggtgatatctgtttgttcg

SEQ ID NO: 37928 - DNA, 2681 bp, Setaria italica
  Peptide Sequence Number=SeqID_103902
cgttacggtggttgcaaggcgcagtgggggcccaaacgttgaccctaccatgcatcgcgaggaatctggcaacagatgcaacgaaagggcgaggccgtcactacatttgctgctctccatatatgctaattattctttctattaatctatgattctaaatcattacaaactgtcgcatcgacttaatgtacatcgaatcaacacacatacacgcgtgagccggcctttcttaccaaggcatggcagcacggtcgccggagcctgcgcgccagcggcggcggcggcggtttcgccggtctcagtacgccagcgagtcctcttcgttgcgcgggttttcgtgggcagtgatgtgctccttgaaacgagccgcggcttcctccctctcgtcgagcttgccgagatggttgtatgccatcgccttcagatagtacgcctctgctgccatctcatggtactccagaacttgcaggtcttgggtggcttggttcaaaggatccagaacagcttcagggtcttcaggaactgagaatttcagatcagataaatggcactttgccagaacgatgtgagcccgggcgcgcagctcaagtccaccatgaccaagaatcatgggaaggctctggtggacaagactcaaggccctctttgcatggcttgatccaagggccagccacaactcggcaagagtaagtgtggcggaggcttcaagcagatccaagttgaatgacttgcagaatgattggctggctaacgcataagggagccccaaggaccgcattgtcagattttttgtgtatttcagcaagtaacaaaagaacacttgcattctcgacttgcatgttgtacttgtagcacgtagagaaaagggaattggccacagctgcagcctggccaaactgttttgcagcaagtagagtgcgagcgcgtcgtacactagcttctgtctttagctcaatgtctactccacaaacagaagatgacaacaccccaaactcatcacagatttgctgcgcaactttcagatgccctcgatgaagtgcacgctcatgtagtatctgcattctaagaagctggatgtgcaaacttgttgaggatgggaacttcttttcagcaagctttagagcacagaatgcagcggaatatcctttggacactgccaattgttgaattagcttgacataagctagagacagctctgatgaacttgcagcatcagcaaagcaggttgcatagaccagagcattcattcgtaccatcggagcactcccatagtgctcccatgcggtggctctcagcaaatatgatgagccagctaactgcaatactgatgcaggtattggacttggttgtgcatgataatggaaattgtcgaagtcattatacaattttgtagatttcctagaattgctacgccatgaatcagaagcagtggacagattcctaagccacgacgtgctaaaactaccattttcatttgaagtagataaaacatctgtaccaaagtcagtcaacacacgggaacttaatctcaaattcttacagacatctgcaggacatgttctaagctttgtagatgcattgggtccaaatgagactagtggcctttggacatgcttcaggtcaaattttgccaaggaaaggtgatcaaaggatagtaagcttggaagtttcagaacatcagctctcttgagcgatcgctttaaaagaacaagtaactgttgctgaatggataatggtgtgcccagtccaatattggtcccgagtgaatatggagaactgattactccaactgtgtttgacatgcctatctttgataatagattggaaatggctcctagtacataggcaaggcatgaatcatcattattcatctgagaaacacgcactgcttctgcaaatgcctctagagctttcttagggtgtccaaagtaacaatgcaagttgcctaagcatagcagggcactctcatagtttccaacaacaatatcttgcactggagacacagaacgaccaaaaagtccttgcatccctgcactgtaatcaaagtagcggtggagattatccagtgaagcaacatagtcatcatggcaaagcgcatttaagtactgcaagaattggacacgatgaagctctggagctaatgtctgaagctgtgtcatagtggcattaaatgaactcaaaggcactgagctgggatccttctcgagaatatcagcttgttggttaagatatgcctctaactgccacctcgatctcagacaggttgggttgtcatccactttaaaagtattagcttcatcaaaatcatggagcaaccctggtgcacgagttagagctgaagagctctcccccatatggctgtcagaggcataaccttgacgatatttctcaaatataccagcttgagaacctatgtctgcatccatcaagttgctcatttcactatcgaagtcctcatcttctgccaagtcatatgaagcatcagtggagttacagtacatgacaagatctgccaaaagatggcatacaccctcaaatgtcattgaattgaaggcaagtatgcagcagcgaaggaaaactccaagttgactattggatccagaaatacgtctctgcacttgcaccttctggtgcagtgagcacacctcttagcttatcaaaaagttgaacaaatcatcagg

SEQ ID NO: 37929 - DNA, 358 bp, Setaria italica
  Peptide Sequence Number=SeqID_103903
agtacggaagaaagtaacgtcgcgtgacggtcgaccgggtagtctgtggcgaggatggacaggacggagttcatggtgcagagcacgggctcgtccacggggtccacggtgttgatgaacacgtcgacggcggggagctggctggagctggagctgccgccgccgccaccgccgggaggatcgaagcgttggttgaggagcgcgaggtcggggacgcgccggatagggttgagcttggaggcctggttcaggagccagctgacgccgaaccagaagtcgccgaccaccgtgacccaccagaggaccatggtgtccgagtcggggtgcctcacgcgccagatgaaaaaactgggtgatg

SEQ ID NO: 37930 - DNA, 730 bp, Setaria italica
  Peptide Sequence Number=SeqID_103904
taaagggctgagtgaaatcaagggtttgagttctgctcattgtaattgcaatgtcccctattgctgcatcaaactcattgtccacaaccttctgtataagttgattataatgaggattttcattaccactgccaaaaggttcaaacctgtatgtaactggataaggaagtaaagacaatgcttgagtaaagacatcgatgcaatagcccgtcattttcccagtagcgttatctagggtgacaaatgctttgaagctatgtctgttggggacgccgattatcaactccttggcattagaaggaaagacccaacctcgaggtttgtgcgcagtcctccccaggccaaattacatcatagagatgttgattggcaagagaagtattaggaggcttcgaatataggtcttctggaaggacagtcgatagcaatcttgtataatttgaccaaaaaccaatggtacgcacgccatttccaattatgcttatgatgtcataggcaggatgaatgagttccccctgagcattaaattgcacttgaccagacgccccagtgaagttcacctgtctaatcttacccagtaatctttttcccatgtcaaaaacactcatggcttcaaggtgaagacttcccccagtttcatcatgcaaccttgagtcatttgtaaaggaaatccttccaccatcatcaaagaaggcatccaaggcccgagctactgcccacacactatcat

SEQ ID NO: 37931 - DNA, 1240 bp, Setaria italica
  Peptide Sequence Number=SeqID_103905
agttttgtttttttttttttttttttaaaatttgtaaaaagaaatatattccattcataataccattcacaagggttgcctctgtacaattttgcagttgccaaactcagacgatttgctattgctagggtgctaaaaaccgaccaatacaattcgctaccgcagcctttggctctaatttcgtatataagaaccgtgtaaattggcccaaagatgatgtatctcaggtccaaacgtatgcacaggcactagctctctatatgaacgacacctccatttctgattggcctcaccggcctttctatgtcaacattactggtaggcgttgttggcattgaacttcctgagagacacaaggatcgcttttgctttggtggctccctgtcatcgacaaatgagaagaatcttttgaggctgcgcttcgatttcgatgaccctccctctgcagagatagattccggcggttcatgtctcagataccggcgtagcatgatgccgaagtaaatgagcagtgcgaggacacatgctgcaccacaaatgaggaataggcccatgaaactctcaaggcggagctggtttgagtccacaaactcggtgttgtcagctgagcaatcgcttgtcctgagccacttgtcgtggatccgctgcagttccccgttctccgacagtgttaggattgcggtggataggtctacttgcagaggggaatcccttggaaatgcaaagccccatcctctactggtgaaatctgagccagctacagcaatcttgcagtaagttgacaaaaacagctcaacataggggcgctcatcaacaatggccataacacctcctctcttagggccttgcttgaggttttcagcatattcatcaggagaacctagagctttagccttgaccgtgagatgttgagttccttgaccatgtattcttctgcaaaagaaccaacttggaaaccaataggataatcactatttttcaggtcatcaagtcctcttatagaagtatcaagttgttgcacagttaggatggaagtaagacttgcggtatagctggattgaatgatcaaaacaacaaatagccatatgatcaaaacaccacgtcctaaggtgctcatagtgttttctctatgtgcgaaaaatagagttgaaaagctgaacctgcagagaataaaacagatcataagcactcatttcataggaaagaatgaagccatcaaaaagcatttagcaatacgtgg

SEQ ID NO: 37932 - DNA, 1182 bp, Setaria italica
  Peptide Sequence Number=SeqID_103906
ggcggtggataggtctacttgcagaggggaatcccttggaaatgcctgaaagagtgaggctttaagatgctatgcttgaatgaatgaaacaaagtgatctacactttagatattagacttctgctgcaaacaagtgcaagaaaggctccataatcttagtgtgtgggggctaacagctgtgtgaacggtagatggaactcttgtagttaatactgtaaggttattgtagataatcttgtaaggaattatcaaatttatttctctttatattcctagaatagaatatgtttcaagtgaacataaagttcaatgtacttacaaagccccatcctctactggtgaaatctgagccagctacagcaatcttgcagtaagttgacaaaaacagctcaacataggggcgctcatcaacaatggccataacacctcctctcttagggccttgcttgaggttttcagcatattcatcaggagaacctagagcttttagccttgaccgtgagatgttgagttccttgaccatgtattcttctgcaaaagaaccaacttggaaaccaataggataatcactatttttcaggtcatcaagtcctcttatagaagtatcaagttgttgcacagttaggatggaagtaagacttgcggtatagctggattgaatgatcaaaacaacaaatagccatatgatcaaaacaccacgtcctaaggtgctcatagtgttttctctatgtgcgaaaaatagagttgaaaagctgaaccaaacaatagttattagttgttgtcgtggtgagccacggaattcatcattgattcgatgctcaagaacccaaataaccacacccacaacaagaaaagacaaccctgtaacacaccacatccccaatgtaaatggctgcaagaaagcccaggaatttgttatatgctttttgaccggagccaagataactaggcctgactcaataaagggctgagtgaaatcaagggtttgagttctgctcattgtaattgcaatgtcccctattgctgcatcaaactcattgtccacaaccttctgtataagttgattataatgaggattttcattaccactgccaaagggttcaagcattgtctttacttccttatccagttacatacaggtttgaacctttttggcagtgattaatgaggattttcattacc

SEQ ID NO: 37933 - DNA, 839 bp, Setaria italica
  misc_feature (791)..(839): n is a, c, g, or t
  Peptide Sequence Number=SeqID_103907
cgcctccctcgaaaaccctagttcctcccctgcggcgccgcctcctccttcgctcgctctcgcctcgaaatctcgaacatgagccaggaggcggtgaacccgaaggcgtacccgctggcggacgcgcagctgacgattaatatcctcgagatcatccagcaggccgccaactacaagcagctcaagaagggcgccaacgaagcgacgaagaccctgaacagggggatatcggagttcgtggtgatggcggcggacactgagccgctcgagatccttctccacctccccttgctagctgaggataagaacgtgccatatgtgtttgttccatcaaagcaagctcttggtcgtgcttgtggtgtgacaaggccggttattgcttgctcggtgaccagcaatgagggtagccagttgaaacagccaattcagagtctcaaggactctattgagaagcttctcatctgatttaccaaagacctttcagtgtgatgggcctcagcgacacatttttcagaggcttggactggtgatggtgtcttgtttactagattttgtgctttccgaactatgtttgaagactgttaagtcgatcatacttgaattttgctgcgttatcttatattcgtgactgccatgtaattctcaagacgtctgtatcgtggtggccggtttctttctagatcccgaccattgttgtaacagtttatgactatggggttcgagaattgataatttggctggttgcaacttcatgtgaccacttgcagaaaaaaaggatcaaaaaaatgtgnnnnnnnnnnnnnnnnnnnnnnnnnnnnnnnnnnnnnnnnnnnnnnnnn

SEQ ID NO: 37934 - DNA, 953 bp, Setaria italica
  Peptide Sequence Number=SeqID_103908
tttatcatagtaggcatgccagtagtagacctccctcttcacactagtctgaatcccctttaggtagagttctacaagcttctggagtattagcttaggaggtacaaattccaccaggagcttctggagcttgcctcgtgccaagaataaccttttgggagcaggatcatccaaaatttctgcggaaagttcctccagaacctcctcccatccaagtggtatagcttgtccatcaatgaagggataattgttggctttacatgcctccaacgccagtatggcctccctcaagttctgtctggattgacttgcaatggtagtagcaaaacttgaaggaagatcaaaactctctctttttgatatataagtaaggacatccacaatctcacgtgtactgggcacaccaattgtaataagcttgcaacgactctttatagaatctatgagattagattcatcctggcaagtcattattatcttgcaagcatcagaggaggaatcaagtatccattttatcaaccgctgattattctcgctgactttatcaacatcatagagaacaattactttaaagttctttctcaaaactggttcagtgattttacgcttatctgacatttcatttgctagagtcatcaaagcgtatctagcgttcttggattgagacctcatgttgagttccacatggtgattgcttgatgacactggcacaagaatgggcacagatgaagatccctgcccattgcagctcttcaaatagtgagagacattcagagaggaatcaccaaatatctcagtgaggacagctctgcacaaagacctctttcctgatcctggaggtcctttgaaaatgatgtgtgggcaaaactccgtggagaccaattgtttaagctgctgaacttgctccctgtggcaagtaaatccatttaaattacgtggacgatgtttatcag

SEQ ID NO: 37935 - DNA, 520 bp, Setaria italica
  Peptide Sequence Number=SeqID_103909
cacctttccatgagcttgagtctctcagcacgatctatcctactagaaaagatactcttggaggatttagtgtgcatgttccttatgtttcaaggatgaggagggggcgccctaggaaggacttcatttcatttgtggataaggaaccttctgttcaatgtaatgttcagacaacagttgggatgttgtcaaaagagtgcgaagaggggaaccatgtgaggaaagcatctgaagttccaccaacagtatgccttttgtatttggctgttgctatttttacctgtttcatacacattcaaatatttgtttctgctcttgaacccgctgctaggtaaatccggagagaggacatttagaggcagttgataggaaggggttcaaaacctacaagcaaacgtttacaaagctgcttccaagcccaaaataaaacgggtttagacgcggaagcatcatcgagcatggacactgtgtgaagtcgtgaagctggttgatggtgtggcccggtatggagctggcaagt

SEQ ID NO: 37936 - DNA, 394 bp, Setaria italica
  Peptide Sequence Number=SeqID_103910
tagaatagaaagtgttgctgaaaccgcgggcagcacctttccatgagcttgagtctctcagcacgatctatcctactagaaaagatactcttggaggatttagtgtgcatgttccttatgtttcaaggatgaggagggggcgccctaggaaggacttcatttcatttgtggtaatagtttacatataatgttttaacagcttttgccaacttgaagatcctttattattaccatgaaacaagatggtagttttgtcatgtctttctatctctttcatggaagtacattctcttcatctaatacttcacctttagctagatttatttcttaaaatgagaatgacttgaataaagtttttagttcagtttgacttgtaattttcaacatggcccca

SEQ ID NO: 37937 - DNA, 1135 bp, Setaria italica
  Peptide Sequence Number=SeqID_103911
ccaacaaggaatcttccaagaggttcaaaagagtaccaatacataatgatgaaccgcaaggaaatctccttgccggacaatgcactaacaagagaactagaaagccaacaaaaagatacatagaggagctttcagacattgaaactcacgagtccactggaaaactttcttcaccagcaaaaaggactgcacatgatgaagtgttgctgaaaccgcgggcagcacctttccatgagcttgagtctctcagcacgatctatcctactagaaaagatactcttggaggatttagtgtgcatgttccttatgtttcaaggatgaggagggggcgccctaggaaggacttcatttcatttgtggataaggaaccttctgttcaatgtaatgttcagacaacagttgggatgttgtcaaaagagtgcgaagaggggaaccatgtgaggaaagcatctgaagttccaccaacagtaaatccggagagaggacatttagaggcagttgataggaagggggttcaaaacctacaagcaaacgtttacaaagctgcttccaagcccaaaataaaacggggtttgacgcggaagcatcatcgagcatggacactgtgtgaagtcgtgaagctggttgatggtgtggcccggtatggagctggcaagtggtctgagattaggaaattatccttttcctcatattcttaccgcacttcagtggatctcaaggacaaatggcggaacctgatcagagcgacccagacacagcttcctgcacaaaaagatggtgtgtgtccacggaagattaacccttctatcatacctataccaccatccattttgttgcgagtgaaggagctaaatgagctgcagtcgcaagggggcggcttcacagcgccagtcaagttctccgggcagaacagcaaggttgtacagggaaaagggctaggttttttgtgatacgtgtcatgtagatatagggggaaaaggagttagatagctgtacgcgtttggacgatgaaggatgagtacatatttacaacttagtaaagccacgttatcatcttcaaaatgttctctacacgcgcaccatgtataatcagatgcccagaaaatattgactaagtaaaaaaaaaaaaaaaaaa

SEQ ID NO: 37938 - DNA, 1410 bp, Setaria italica
  Peptide Sequence Number=SeqID_103912
aacgaacgaaacgggcgccggaaactagctcctacctaggccgaagcgaagcggagtgagcaatcgggacccggcgcgcgatctgatcggccccacggctccgacgaccggggcaatgctgcgtggatcgagctgcagctgctgctgatcacggttttgatattggcttcttttggttgctgcaagctttggatgaagtttgtacttatctatggaagtggatggctcaaacagtgccctagttaataaaagtgaagagaatgactttgaaaagaagggcagttctgatcctgtggtttatcagctagttcgggttgaaggcgatggaacacttgttcctgctacagaggatgatgttttggaatttgaacattttcttcaggatgagaaggttaattttccttctattgaagatgtagggcatgtggaagagtttttcagcaacgattgtatcttgctgaagaagtcagacttggaagatggctcttccaaagtgaagactttagaactgcacacacaaaaaatggggactgacttagaggaaaacaggttggatggttcccttggtcctccctcaaattctggagttcttcatggtcagcagccagataaatttcttgcagaacaaggggacagcaacatcgctcaacaggacaatgcttcaactgagactgcaaaaccaatagtgttgaatgactcttgcagtgctgaaaaggacaaggctgatgcctgctcaagacctgtagacgacacatctacagaaccatctgtttctggagttactagttatgtgcctgatttttcaatattaagaggagaggtctgtttggatgatcttactattagagaacttcaggaggcatttagagccacatttgggcgtcagactactgtcaaggacaagatatggctcaaaagaaggattacaatgggcttaaccaattcctgtgatgttccaagttccggctgtgtagttaaagactataaaattgttggaaaggatgtcagacaagaggtatcaaacacaggtggaatacctaagattggacttcaatctactctggttagggatcaagtcacatatccaggaaacgaaggggactcaccatctagctcttactatcagagtgaggaccaacaaggatcttccaagaggttcaaaagagtaccaatacataatgatgaaccgcaaggaaatctccttgccggacaatgcactaacaagagaactagaaagccaacaaaaagatacatagaggagctttcagacattgaaactcacgagtccactggaaaactttcttcaccagcaaaaaggacctaacatcatgaaaatagaaagtagttagactagaaaaccgacgggacaagacaacctttacctaatttagttaagttacttttagttaa

SEQ ID NO: 37939 - DNA, 528 bp, Setaria italica
  Peptide Sequence Number=SeqID_103913
cattagactaggttatcagtcatggtagcactttaggattactaacaactcccagaatctcaaaagtacagtagcccagcctttaacacacatataggtcatatagtaagtcgtaaaagaatgctggctgttcatttcagcagagatcttgcaaagtgctccctagctgtggctagtgcctgagttatcgtctgcacagaacaggtcacagggatcatgagatatatgcaaccttgtgaaaagcgataggacggacaagtaattacctgctcagagaaggggacagaaccgtcaacagcattggttgctaccttaccagcaatggtgtttgcatctgtttccagaatgatgctgcaaaagtacacaaaacccaaattggttcagtacatgctcaataaaaatttctgtggctgcatggctgggtaactactgactgcaacttctactccatggagcaatctgtaacacaaattgaaggtaatcatgctatcttaactctactgattagctgttgtattatgttttaca

SEQ ID NO: 37940 - DNA, 1256 bp, Setaria italica
  misc_feature (1)..(22): n is a, c, g, or t
  Peptide Sequence Number=SeqID_103914
nnnnnnnnnnnnnnnnnnnnnntttttttatttttttttattttttttatttttttaaacttttttttaaaatttttttttacacccaattacacgactctttatttatgtttcctttgaaatatggcagatacaaaatcaccggttcaaaaaaaattacaaagcatgcatgagaccaactctcggtaccaaacattagactaggttatcagtcatggtagcactttaggattactaacaactcccagaatctcaaaagtacagtagcccagcctttaacacacatataggtcatatagtaagtcgtaaaagaatgctggctgttcatttcagcagagatcttgcaaagtgctccctagctgtggctagtgcctgagttatcgtctgctcagagaaggggacagaaccgtcaacagcattggttgctaccttaccagcaatggtgtttgcatctgtttccagaatgatgccgccatctataatttcatcaatgcagagaagtatcaagtccaagttctcaagcgcagtccgcttctcaacatcacccctgagtagaagaccaacagaatcagaaaaaccatttagtacacttgctaagatgagttcattctcatcatctccagcggtgacgaaaaagtgaaggtcgtgaacaaacttgtaaacgacaatataaccatcaaacaatgttatctcagcttctgcccgtgcatttgtcttcagagttttagtaaagacagatttttcataggccaactttgatgcattagtcggccaatcatctgagaaatacttcacagcaacacgcttcccttcagaatccagaagcaaaatattcttcacagaagggcaagattccttggagaaatccgccatgatctatcgccctcccctattccaccctggtgctgctggtggccggagaagagcccgacgaacacctggcaaagagcggcgccgttcgccgagccgtcgccgccaggaaagaagacgggatccggtggtggaggacgggatgcgaaggaagatgcaaggatccggcggtgggaggcgggaactggcggcgggcggcgggatccggcgccggcgggcaatccaaatgcccttctctctccgtctgtttctccgtgcggcgatcgggaggacgacgcccggggaagggaacggttcggagtgggtgccggaggtgtgttactcgaagggctaaagcaagaatgttgtactatactatcatctactaataagcactacaggagtat

SEQ ID NO: 37941 - DNA, 535 bp, Setaria italica
  Peptide Sequence Number=SeqID_103915
cgtgtaatatccaaaaggctgctgttgctgcttgtacaatcgctggattctggtagataccaatagctgtcgcactccatgatgctacattgtaaataacttttgttccatcccatgccttctgaagcttgcctttcctcttttaggcagaaaatgtcttgctaagagcttgttgaagttgatcaggtgtcaagtcctgcataacatgaatcggtcatcattatcacgatgattccaaaattaacaagcaatatagtatcctcttcaatgatgataatctagtagccaatacatgcaaacataaaacagatacaggccttcttggattgatacaatcagcagaatggagaaactacatgaagcctagaataaggatcacagacattttggactgaactcatagccacataatccaacttctaacactacagaatatagactcgtaaaatgtaaactgagcgtgtataccttagtttgcttcagtgacagcaagtatgcagccatgaagcatgcaatgccatcaactatgtcctct

SEQ ID NO: 37942 - DNA, 832 bp, Setaria italica
  Peptide Sequence Number=SeqID_103916
cttcgagcagatatattttctacatacgatctcactgttataagcaatcaacgaacttgcaggtcaggaatatttacatcaatgtaagtgtaccacaaaggttggaacttggaacgatgtttccctttgatattttgaaacgcagggaagcctttagcattgccgctggacactgtttgcacgtttgcaccgtccagccatatggaccattcacagaaatttggatattacacggcaggatgtccaaaaggctgctgttgctgcttgtacaatcgctggattctggtagataccaatagctgtcgcactccatgatgctacattgtaaataacttttgttccatcccatgccttctgaagcttgcctttcctctttttagcagaaaatgtcttgctaagagcttgttgaagttgatcaggtgtcaagtccttagtttgcttcagtgacagcaagtatgcagccatgaagcatgcaatgccatcaactatgtcctcttgcttaacgagaacatatccatcctctgaatcatcactaacgttcatactcttatcatcccatatatctgccgcacttacaaaatcccatgatactgtttcatctactgcaccatgttgatatactgacttctgcatgctatctagcttctcgagaaattctggtgattggacccttgattggagaagatcgcacagctcgtccgtctcgtagtcggcgtccgagggcggcggcggctgggccccctcgtcaccgccgccgtcggccgtccgcctcgcccgcccccctcctgctgctgcaccctcccccttagattcccgccccctcctcaagctc

SEQ ID NO: 37943 - DNA, 827 bp, Setaria italica
  misc_feature (1)..(51): n is a, c, g, or t
  Peptide Sequence Number=SeqID_103917
nnnnnnnnnnnnnnnnnnnnnnnnnnnnnnnnnnnnnnnnnnnnnnnnnnnttttttttttttttttttgtaggtgaaacaggcacaaatgaatttattcaaacgaattgagatatttacagtcacactgatacaccaatgttgagtaggatggcggatatgcaacccacggacttatgtacattaatggttgaaggtttgatacaaatggtactggtaaacagaggtatttaacctatcacgtgagatgccacggactaaccccacgtgtcatcaccagtccctgatttttttcccttttttttggacattaacagtcccagtctcccaggatgtggtttggagcttcgagcagatatattttcacatacgatctcactgttataagcaatcaacgaacttgcaggtcaggaatatttacatcaatgtaagtgtaccacaaaggttggaacttggaacgatgtttccctttgatattttgaaacgcagggaagcctttagcattgccgctggacactgtttgcacgtttgcaccgtccagccatatggaccattcacagaaatttggatattacacggcaggatgtccaaaaggctgctgttgctgcttgtacaatcgctggattctggtagatactacacaaagacaacagagaatcagcatgaggtagctatacagctacagcctacaggaatatttaaaaccggcaagttcatttgaaactttcactacataatgccacatctatccctagacccaagacactaattttgtgcaagcgcttgcaaaatggtatgtggaaaatacttgtgacgtaaatacttgc

SEQ ID NO: 37944 - DNA, 368 bp, Setaria italica
  Peptide Sequence Number=SeqID_103918
aaaggaaaacgaaaccttaacgtaaacgaaagaacaaagttaacaaaaccgacggacgaccgacgctcaagcagaagggctccgcctcggggttcaagctccatggcctcaacatggagccagggacgaggttctccacctccgcccttccgaggacgagctcgctgggcatccagccgaagcccaaggacttgtcttcggacgccaagccgacgcagcacgagaaggcagtcggtgatcgcccgccgccggacgtcaagccgacgcagcacgaaaaggcagtcggtgatcgcccgccgcagcaagcaccggcgacgcaggacgatgccaaggctgcaaatggaagaaaggagcagcaacctgagcgt

SEQ ID NO: 37945 - DNA, 509 bp, Setaria italica
  misc_feature (347)..(347): n is a, c, g, or t
  Peptide Sequence Number=SeqID_103919
tgtgaaattacagtcttacctgcatgcatctaactaaagcaaaggcatccaagcacggaattaggggctcgtaggtgttttccatttgtgatgaaatttagcatacttcaattctgttctcatcagctttaatacatcttctaatatgcataagtatctgattctaaatagaattaccaatacttttaacctttaaaaaggagttgatggtatatgcataagtatcgattcataaatgtcattggcataagtatggatccatacctgattagataatgagaacacaagcacctgagattcctttattgcaaaactattaaaaggaacttttgctgtgaaaaaaaagntcaaatgctccttgagtttcacttgtcctacattttttaaatcatactgaaactccaacaaaactcatattgtgatacagtgcaagccctgaactgtaagaagtgcttgaaagttccccacatagtcagcatgtttggtttttcttttttagacttagcatg

SEQ ID NO: 37946 - DNA, 485 bp, Setaria italica
  misc_feature (44)..(44): n is a, c, g, or t
  Peptide Sequence Number=SeqID_103920
ttccgcagcgcgcagtcgcccgccgcctgctcgtcgatgcgganccgggtgtacgcgttctcgctcggggacgccgccgtcgacagcgaggacgagcggccgccggcgccggcgtgcttcagcgtgcggcacgagagcttcagggccttcaagggctgccgcgtcgccatgacggtgaagagcgcgctggcgtccgtcggcggccatgggcccacttcagcgcagaaggtgtaatccctctcgttaacccccatcgtggtcatgcatgtcgccgctgttgcttggagaggtgcttgagcttgattactctgcatgtttttaaccgtgtgccttgtatgtctctttcacggagtaatgttgaaaaaaaaaaactcaagaggagcttatcaaagtattatatatggtgaattaagtgtgtaacagtgtgtaaattaaacacaataatgtaatgagcatagcatggtgcatggctatgtgatttcaaa

SEQ ID NO: 37947 - DNA, 572 bp, Setaria italica
  Peptide Sequence Number=SeqID_103921
ctttccaaggcccacctgtgccatccagtcatactccctgactccttgttccatgcaggaaatctatccatggaaaagtctgcaccaacaggatgaccaaaactggcacttaatccactagagcacatgcatgaaatctattatgatattgtgatgttgacctgacaccactcgataactgaaaactttacataagaagttgcttgccacctccaaccgtggatgagtggcatgcatggagccatgatcacaccggcaaataaaaagattccttagcttctgactgtaccacttaattctggtacacagtattttgatgtttatctgtataaagaactgttaatgctgcgatcatgcttggggacaagacagttgatgacaagccaagctcttccacaaataaagtaccctgttccttgatgggctcatagagaacctggaatacttggtcagctgattcaacttgcatccgacgggcttcatcgtcagaaataacctcacttagttttgcagctagaattcttaagactagtaacaaagactacgaaaaaaggaatactacaaggtaacaa

SEQ ID NO: 37948 - DNA, 494 bp, Setaria italica
  Peptide Sequence Number=SeqID_103922
ggattgattttacttcagaggaatgataagatgttgacagaaatggtgtagatgaaatgttagcagtctatttgttagagatgggcaaccagcaagaaaatgtagtggtttactaaattgctatgattggaataaccagatagaagctttgctcaaatatgtgcatgactggaagacactgcctgtatttcaacactccagttgtaagggaacatcccatgtcacattcaggtcataaacaattagttgacctcagggcagttgcaactggagaagaaattttcagctaaatatgatgcactcaaaaacaaaattcaacctcaagattgaaagtcaatgattaaattggcctccaagagatataaatctgcgttcctgcacataatcatttttgtttcaacagcctagcattgcaactgggtgagccttagaatttcaaagtcaatctaagaacaatttagtcactgctggtatctttcattgggacaaaacta

SEQ ID NO: 37949 - DNA, 1365 bp, Setaria italica
  Peptide Sequence Number=SeqID_103923
aacaaaaattaacttaaggaaccaaaagtagaacctctttttcaaatttttaaacaatgcttactctgacccttcacttcctgcttcagtatatccagactgtctcctcttgaactcaagccatcatgctctttctgtttaagacggtaatcagcttcaaacctatccaaagcatgaaattcatgatataattcagctgtgcattggacgcaggtgaccaatttctgcattactgattctgcatcttctttcaggtgattttgtggtgttcgttctgatgccaacctaaaggaatttaaattttcaaagtagcggtccaagtggtgccactgaggatccttgcaacggtttccaaagcggacaacctcttttgtgaatacttctaactcttcccttttgtcagcagctgccatcttgagtaattcatcagtatctttggatataaggtgttgaacaccttctgaatgaaacactacttctgtgagatgctttatgctaggctctgacagagaacgcatcagattggagcctctaactatagtatttgccacctcaaaagccaacatagatattttgtttccctttgctgcattacttgacacaaaaccactactagaatttaaacttgtcatgctactgccaagtgtgtctagaacctccactgctttctcaagcccaacagtgctagctctacctaaaattgagctcacttctgaaaccttggcagcgccagcttttgccttgcccaaaccagccctctgcgacagcgacctggtcagctgcggcgaggccctggaccccgcgtcgccgccggcgttatgcccgccacgaaaagcaagcccaggcacgacgctctccatgaacgagaaagactgctgctgctcttccagccgttttgccgccgcagccgcctctccggacaccggcggcttctccacctccaacaccgcccctggctcatgatcggcaacctggttccggccaagcgtggtgtcgctcggcgacttgtctacggctgaaaccttcgagcagaggcctcccatcccctttccccaaacgaataccctgatcccccaccttgtcttaatccgatttcttgccgccggcggagccagggacggagtccatccaagaatgcttgggctttactggcaaggaaagaaggaatcgatccaagtccggatggatctgcacacccgctttagtacacgggaggagggggacgactgcgagagaagaattcgaggtagcgtgctccagtggaagcagactagagatgtgtccggcggcggcgaccccggtcaggggaagaggggattttcccctttttctctcttttttatgctgatggcgggaggtgggagg

SEQ ID NO: 37950 - DNA, 238 bp, Setaria italica
  Peptide Sequence Number=SeqID_103924
tcgaaactctcggctcagcattcttcgctacgactctgcaagagatcagctatgttgatgatgaatgctccagggatcggtgtaacgtcgacccaacggtccttatggaggatctgcaggccgcctatttcatcttgcagaagtatggtcaggaagccagagtcggaatgccggcttgtgccaatggcgagttcaggcgtgggggcacggagggtagtagtgggcaagtataatctgt

SEQ ID NO: 37951 - DNA, 254 bp, Setaria italica
  Peptide Sequence Number=SeqID_103925
cgcggccgacggcgtccaccacggccgcgcggtcgcgccgaggtcgatcatcgggacggtggccaggggcgttcttgaggagcctgctggtgctcctcctcctccgggtcggggaggcggaagatgcgcgggacatccgttgcgccagaggcgacgaggccgcggagctcggcggtgcggtcgtaggcggctggggcgatggacatggtgacgtcgtcgtgctgtgtctgcctgtgtgtggtggtctggtggag

SEQ ID NO: 37952 - DNA, 261 bp, Setaria italica
  Peptide Sequence Number=SeqID_103926
agatccgacgagtatagcccatttcacccgcaacacaacttaaaccccccacccaatgctatcatctatctatgatccgttcctgcctttcttcgacttgttcttgttttcctgtgtcttcttcttcttctcttcgggcgtcgtccagacgtaatctgaaggaatggcaaacgggtcctggatgtcctccacgcggctgctcgggcctggagcggtcgagaagttctggcggtacggagcctggattcagtggatcaaggc

SEQ ID NO: 37953 - DNA, 375 bp, Setaria italica
  Peptide Sequence Number=SeqID_103927
cccatcttcaagtacttcgagaactggggtacacctggtactctgggttcgccttgaggtgcctgaagatggtgatgtacctccagtacccaatcttctcggacaggtaggtggcgtagaagatgaacttgggcttgaagaaggtgtatttcctagccttggtcaggaaccccaggtccagagcttggccttccagtcattgaggaactgcggctgagcctttagcagggcagagaagaagtcaccgtgcctgttctcatcctggcaccagttctcgaagtacttgaagatggggtacacctggtactggtttttagatgagcgtggttacatcagagcagattcatgttcccaaatttcaggatagaatatagg

SEQ ID NO: 37954 - DNA, 519 bp, Setaria italica
  Peptide Sequence Number=SeqID_103928
tctactgctctattgcactctaacattttactcccttcatgttttagctgttcaactattggtgctataataatgacacccctcctgactaaactccttgctggtcaactagttcctgttgatgcagcagtaagggcactacaatcctgtccctatttgtttccttaatcttgtctgcttgagttaaaaggttattatgtttgtgcagggattggccatcagtactttccaggttgttttattgccgactgttcttggaggtgcttaaaaacttaatgggagatttaattttattggctttagtatcttagaaatattttctcttacagcttgtgtgactatatttttgtcactatgcagtattggcccacgaatatttcccaagtttactgagcggcattatcaccgtagcacccctgttcggagtcctcctcaccactttgctttgtgcgagccctgtaagtataacaaagaacttactagagtaaggttcaagcatttgcagaactgtttggtaat

SEQ ID NO: 37955 - DNA, 599 bp, Setaria italica
  Peptide Sequence Number=SeqID_103929
acagctcattttcacctcaatgatcacatgcatgtcaaattccttggtgtccaaaccaattccctcatagaatgcagtgcgttggcagtcatttaggtacatggtcacatacacctgcagaaggtcatataccactatcgtcagaaggggagaacaacaacttacagagttaacccacctttaatgaaggaatagactgaaattaccgagaggcagaagaaccgtgaccagagcttggccttccagtcattgaggaactgcggctgagcctttagcagggcagagaagaagtcaccgtgcctgttctcatcctggcaccagttctcgaagtacttgaagatggggtacacctggatggttaaaaggacctgcatcttcttgtgtttgtctgtaaaatattgagacttcggcaacataaggctcggcaagtcttttgttgtgaggcatctccatgtaagtgacagtgaactgcatcagaagtgagcgttccggttttccagccaaacacaagaagatgcaggtccttttaaccatccagcgtttcaccattcaaagccctcagggagaaagcaccaacttgtctttgggaatatcggatt

SEQ ID NO: 37956 - DNA, 264 bp, Setaria italica
  Peptide Sequence Number=SeqID_103930
aaaccatccccggtcacccccacgggcctcgcgactccgcgcccatccgcattccgtcctcccgcatggcgccgtccgccaccagctccatggcctccgtctcccgggccctccgcccgcggccccgcgccgccgcctgctcggctcctcgtctggggtgcggattgggaatcgcgtgctcgatgccaagtttgggattggccgttgtgactgcaccgtctgctaccgtcactccggctctgagacgccaaattttgtgccagg

SEQ ID NO: 37957 - DNA, 460 bp, Setaria italica
  Peptide Sequence Number=SeqID_103931
tcctcggacagcagctccttgattggaccatacattctcgtggaagcaggatgaaaatgagtgctgaagaacacgcgatcgaactctcggctcagcattcttcgctacgactctgtgctccacgctactgaacttgtcattggagatcaactgcaagagatcagctatgttgatgatgaatgctccaggggatcggtgtaacgtcgacccaacggtccttatggaggatctgcaggccgcctatttcatcttgcagaagtatggtcaggaagccagagtcggaatgccggcttgtgccaatggcgagttcaggctgggggcacggagggtagtagtgggcaagtataatctgtccctggttgcactctatatctgttcgaggtgctgtccgaggctcttgggctcaaaccgaggctacttaacagatatagagtataatctgtccctggttgcactctat

SEQ ID NO: 37958 - DNA, 661 bp, Setaria italica
  Peptide Sequence Number=SeqID_103932
agtggaatgagttttgttggactctgaaccttcctggttttactagtagtttagttcgtgaagcatcaaaacattccttagctagatgtctgtacagttatgaagtttcttctcttgcctagagcaatgtggattttcaatttagtgtttaacaatgccacttttttttgtcagagttctgcgcttggatttttacttgctcaaaagcacttcacaaatccgctcgttgctgttccttctgcatgccacattcaattgagatggtcctagaagttgattccccaaagctagagaatctcgataaccagtacccaagagcaaatgcagcaacatgtagcagagcgacagggataataagttgggcaccttgagttttcaacacttctgcgacttgcccaatagggctcgcacaaagcaaagtggtgaggaggactccgaacaggggtgctacggtgataatgcgctcagtaaacttggggaaatattcgtgggccaatactccaagaacagtcggcaataaagtcttgtggacccttgggtggtccaagtaactggtctgtttgttccaatagttgatatgacaattaagaattatgattatcctgtgctattgttgaatgcatcgattgaattttgagaactaaaaaaaaaaaaaaaaaaa

SEQ ID NO: 37959 - DNA, 1146 bp, Setaria italica
  Peptide Sequence Number=SeqID_103933
gttgccctggtggacaagcatcaaatgttgcaacttacatatcgaagggaaatgttgcgctttcagttcttatgaccacctgttcaactattggtgctataataatgacacccctcctgactaaactccttgctggtcaactagttcctgttgatgcagcaggattggccatcagtactttccaggttgttttattgccgactgttcttggagtattggcccacgaatatttccccaagtttactgagcgcattatcaccgtagcacccctgttcggagtcctcctcaccactttgctttgtgcgagccctgtaagtataacaaagaacttactagagtaaggttcaagcatttgcagaactgtttggtaataattcaaaatcatttttatatgtttcatgaaataacaaattcaaatattgttgggataccccattttaacctcaccaagcatgtgatgtttctactcacagtcaagtgtgcctaaatttatctcttagctagtaatttgtaatagttatattctattctcttatctttttagtaaaagttgctcctcacaattatattttggatagtatgaatgaaatgctaattgtttatactaattttgatttgaaaatcaacttttgcaagattgggcaagtcgcagaagtgttgaaaactcaaggtgcccaacttattatccctgtcgctctgctacatgttgctgcatttgctcttgggtactggttatcgagattctctagctttggggaatcaacttctaggaccatctcaattgaatgtggcatgcagagttctgcgcttggatttttacttgctcaaaagcacttcacaaatccgctcgttgctgttccttctgctgtcagcgttgtggccatggcccttggagggagtgctcttgcagttttctggagaagcatagggcttccagcgaatgacaaggacgacttcaaggagtgaacaaactcaacaagagaacctatcgctgtcacctggtattggtttttagatgagcgtggttacatcagagcagattcatgttcccaaatttcaggaatggatatcaaggcctatattctatcctgtgggaaagcagaggtgaaatattacacaacaaacataacaagagtgtaaccccta

SEQ ID NO: 37960 - DNA, 666 bp, Setaria italica
  Peptide Sequence Number=SeqID_103934
tcatttggtctgactacatctaccgaatgccttcctggtcttgtttgtacattttgatggcgattcaacaaggaggtcactcaccttctcatctacacagagcaaaccaattccctcatagaatgcagtgcgttggcagtcatttaggtacatggtcacatacaccgagaggcagaagaaccgtgaccagagcttggccttccagtcattgaggaactgcggctgagcctttagcagggcagagaagaagtcaccgtgccttgtttcttctattccttggtcaccagttctcgaagtacttgaagatggggtacacctggtactctgggttcgccttgaggtgcctgaagatggtgatgtacctccagtacccaatcttctcggacaggtaggtggcgtagaagatgaacttgggcttgaagaaggtgtatttcctagccttggtcaggaaccccaggtccagtgccaagttgaagtcagatagacccttgttcaagaacccagcatggcgcgcttcgtccctggacatgagcgagaagatctcggccaccaccgggttggttttcttgagcctgcggccgagctccttgtataggaggaaccccgagaactcggcggtgcaggagcgctcgaggaactcgacgaagatctggcggagcgggccgt

SEQ ID NO: 37961 - DNA, 473 bp, Setaria italica
  Peptide Sequence Number=SeqID_103935
ggcctcgcgactccgcgcccatccgcattccgtcctccctccgcccgcggccccgcgccgccgcctgctcggctcctcgtctggggtgcggattgggaatcgcgtgctcgatgccaagtttgggattggccgttgtgactgcaccgtctgctaccgtcactccggctctgaggagacgccaaattttgtgccaggctgaagctaacatatctaataatcttccggagaagttgcctgctaaagttagccagcctgctaaagttagccagcctgctgaagttagccagcctgctgaagttagccagtaacgaaaaaattgtcgagctgcttaccactcttttccctgtctgggttataataggtactgttattgggatctacaagccagctatggttacctggttggacaccgatcttttcactatcgggttaggacttctaatgctatcgagtggggctaacattgactattt

SEQ ID NO: 37962 - DNA, 1959 bp, Setaria italica
  Peptide Sequence Number=SeqID_103936
aaaaatctaccgatagattgcaataacaatcaggatcgaaacgattcaggttaaacgaaagaatgttgactacaaatctgttaacacaatgaaagaagacaagcggtcgcttctcgacattcgacatcagacactggccgaaatctccaaaccttccactcatccctcctgttagatccgacgagtatagcccatttcacccgcaacacaacttaaaccccccacccaatgctatcatctatctatgatccgttcctgcctttcttcgacttgttcttgttttcctgtgtcttcttcttcttctcttcgggcgtcgtccagacgtaatctgaaggaatggcaaacgggtcctggatgtcctccacgcggctgctcgggcctggagcggtcgagaagttctggcggtacggagccttgatccactgaatccaggaacttgaagaaggctgtactgctgggctcttgctgttgtcaggactagagggtggtgtggtaaactcctctagtggctgtagttcttcaaattttgtgaatgtcacaagcaccctgatcgtaggtacaacaggaatggcgaccttgactggaaatgttcctggaggcagttttgttgtaagtagatccctcaaacgacggattgccttcaccttgtttgcaagaatatcaagtaatggcaggagctcctcagtccgaagagggaagtttggagagagccagagcacaggccttaggcctttcttatactcgctttctttggaaccttctttgcgcctatgctcattctctgcaaaagcagcatgtctcctattatccctttccctgatccttctgttgtcatttggtctgactacatctaccgaatgccttcctggtcttgtttgtacatttgatggcgattcaacaaggaggtcactcaccttctcatctacacagagcgaactccttggaggtgccatcttcttcatcccctctggtttgctaacttgacttctctttccccaattactaaaccaacctttcttatcatgcttactctccccatttccagaaacgctgatgtcctcaattggtatctccctctccctcggctcaaagcaactatgccgagggccagcaaatgaatcagactggtcttcactaccagcatctggagactccatttttagcgcggcctccaactgcttcttctcctcctcagtcagaacatcatcgaacccttcactctctgtatcattgtcattgcaagctgagaagaattcctcatccgtcatcgcccccggtaccctccttgacttgacgctgaccaccacatggtgcatgtcatacaccttggccttccatgggccaaccgcctccgcccgctcctggcgccgccatgtgagctgtggaagcagcaccgcttgggtgacatcaatccctggacgaaagatgttggtctgtgacattgcggtgacctcctgctggacctctgcctctgaggccggtgcgcctgccccctccagcgcgttcataatttccttgtccttgtggttgatcatcaacagcgaccctggcggcaccttgccatcctcggagccctccccgaggaagagtatggtctggtcggagcgctggatcttgaagccatcgaagccggcgagcgtcatgtcggcgcggaggttggcgccgcgcttccagaccctgtaggtgtcggatggcgcgatgcgggagatgaaggggatgacggagctctcgaagtggaacgtgatctccatgtagaagtcccgcatccggcgcatggccgcgacgacgcggggcaggcggcggcaccacttggcccaggcgagcggctggtagtggcgcacgatgacgcgcgccagggactcctcgcgcgcgcagatggcctcctgcagcgcgctccacccctgctcgttctgcaggctccagtccgcgcccgccgccatgagcatctcggccgccgcg

SEQ ID NO: 37963 - DNA, 772 bp, Setaria italica
  Peptide Sequence Number=SeqID_103937
ggtcaggaagccagagtcggaatgccggcttgtgccaatggcgagttcaggctgggggcacggagggtagtagtgggcaagtataatctgtccctggttgcactctatatctgttaagtagctcggtttgagcccaagagcctcggacagcacctcgaacaatctgtctcccaaattcttcacttgtttggcgtattcaaatagcgcatctcggcagctctccggcagctcgtcggcggccggcgggtcgggcgccatgcgcaggtagagcgtgtcgcgccagttggccaccggtgactggtacaggtcgaagttgcagtggtacttgaccgccttcccgggctcccgcgagtagaaccgcgccttgtcgctgccctccccgccgtccgcgtcgtggaacgcccgcaccgccgctacggccgcagtcatcgcctccttgggcacgccgtggcccgtcacctggaagaagccccactcagccgcggcgcggccgacggcgtccaccacggccgcgcggtcgccgccgaggtcgatcatcgggacggtggccgaggggcgttcttgaggagcctgctggtgctcctcctcctccgggtcggggaggcggaagatgcgcgggacatccgttgcgccagaggcgacgaggccgcggacgccggcgagggtcgcgtccagcgcgcggagctcggcggtgcggtcgtaggcggctggggcgatggacatggtgacgtcgtcgtgctgtgtctgcctgtgtgtggtggtctggtggaga

SEQ ID NO: 37964 - DNA, 1905 bp, Setaria italica
  Peptide Sequence Number=SeqID_103938
atgatcaaatctactctaataatgacaatgttacatgaggttcttataaatgcatctaaacattgccacgtacattgtagaaggttgctaaaaagaaatatgtaaaaattcacatggtattagcctcatagccaaatgcgttacataattttctattgttacacaatcagccaatcctgcttggtccgtttatcacccttacagttccaaattcacatgtacgcgaatagaagctgcaactaatttcaccaagatcatatgtgatacaatacaatggactttagctaatgatctgtatgccattagcttcaatatcagtacagcttcagacgctcccttctgctggaaaaccggaacgctcacttctgatgcagttcactgtcacttacatggagatgcctcacaacaaaagcttgccgagccttatgttgccgaagtctcaatattttacagacaaacacaagaagatgcaggtccttttaaccatccagcgtttcaccattcaaagcccctcagggagaaagcaccaacttgtcttttggggaaagtaattcggattaaatctttctacagaatcagtaaacaagctggggctcaaattcagcaaaatcgactgagcctgactcaatggggggcatgaggtaggcagcaatgatctcagacaccagcgcagcaacaagaggaatcctcttcaggttcttcactaggggcatttcatcagattctccgatagcaatgatcttctggttgatctcaaccatcctgtcaagcttcctcttgaattcagggttctcgacgtccagaacagcagggaagatccttgctgttgtgcggttggtctcaatgatcacatgcatgtcaaattccttggtgtccaaaccaattccctcatagaatgcagtgcgttggcagtcatttaggtacatggtcacatacaccgagaggcagaagaaccgtgaccagagtctttggtcctttcctagtcattgaggaactgcggctgagcctttagcagggcagagaagaagtcaccgtgcctgttctcatcctggcaccagttctcgaagtacttgaagatggggtacacctggtactctgggttcgccttgaggtgcctgaagatggtgatgtacctcagtacccaatcttctcggacaggtaggtggcgtagaagatgaacttgggcttgaagaaggtgtattcctagccttggtcaggaaccccaggtccagtgccaagttgaagtcagatagacccttgttcaagaacccagcatggcgcgcttcgtccctggacatgagcgagaagatctcggccaccaccgggttggttttcttgagcctgcggccgagctccttgtagaggaggaaccccgagaactcggcggtgcaggagcgctcgaggaactcgacgaagatctggcggagcgggccgtccatcttgtctgcggcggccttgaactcggggttgcgcacgaagtgggtctggttgtagtccgtcttgaactcctgcagcagcgcgtcgaactccgcctggttgagctgcttgttgatctcggcgttgaagaggcgctccatctcgtcgaagtcggtggtgtagaaccgcggcgtgagcagcgtctcctggatctccgtcttgccccgcttcttggggcccgaggccttgggcggcgcggcgggggtcgcggcggaggcggacacgcggaaccggaccacggagcggcgggcgaggggcaggcccgcggaggtcttggcggacaccccgcggtggtggtgcattgcggcggggttgaggagggagagctccatggcagcggaggccattggtgccggcggcgacgtgtggctcggcgagcgctgggcaggcgggagcgagctgaggttgggggcgcgtgggggtataata

SEQ ID NO: 37965 - DNA, 1468 bp, Setaria italica
  Peptide Sequence Number=SeqID_103939
gtgaaattagtacagcttcagacgctcccttctgctggaaaaccggaacgctcacttctgatgcagttcactgtcacttacatggagatgcctcacaacaaaagcttgccgagccttatgttgccgaagtctcaatattttacagacaaacacaagaagatgcaggtccttttaaccatccagcgtttcaccattcaaagcccctcagggagaaagcaccaacttgtcttttggggaaagtaattcggattaaatctttctacagaatcagtaaacaagctggggctcaaattcagcaaaatcgactgagcctgactcaatggggggcatgaggtaggcagcaatgatctcagacaccagcgcagcaacaagaggaatcctcttcaggttcttcactaggggcatttcatcagattctccgatagcaatgatcttctggttgatctcaaccatcctgtcaagcttcctcttgaattcagggttctcgacgtccagaacagcaagggaagatccttgctgttgtgcggttggtctcaatgatcacatgcatgtcaaattccttggtgtccaaaccaattccctcatagaatagacaagtagcgttggcagtcatttaggtacatggtcacatacaccgagaggcagaagaaccgtgaccagagcttggccttccagtcattgaggaactgcggctgagcctttagcagggcagagaagaagtcaccgtgcctgttctcatcctggcaccagttctcgaagtacttgaagatggggtacacctggtactctgggttcgccttgaggtgcctgaagatggtgatgtacctccagtacccaatcttctcggacaggtaggtggcgtagaagatgaacttgggcttgaagaaggtgtatttcctagccttggtcaggaaccccaggtccagtgccaagttgaagtcagatagacccttgttcaagaacccagcatggcgcgcttcgtccctggacatgagcgagaagatctcggccaccaccgggttggttttcttgagcctgcggccgagctccttgtagaggaggaacccccgagaactcggcggtgcaggagcgctcgaggaactcgacgaagatctggcggagcgggccggtccatcttgtctgcggcggccttgaactcggggttgcgcacgaagtgggtctggttgtagtccgtcttgaactcctgcagcagcgcgtcgaactccgcctggttgagctgcttgttgatctcggcgttgaagaggcgctccatctcgtcgaagtcggtggtgtagaaccgcggcgtgagcagcgtctcctggatctccgtcttgccccgcttcttgggggccccgaggccttggggcggcgcggcgggggtcgcggcggaggcggacacgcggaaccggaccacggagcggcgggcgaggggcaggcccgcggaggtacttaggacggaacaaccccg

SEQ ID NO: 37966 - DNA, 443 bp, Setaria italica
  Peptide Sequence Number=SeqID_103940
ctgggaaggatagacgcatagccatcatcgttactgtcttccgatcaattgttgatctcttttatgccatccagataataataaagttcaggaccgcttatattaatccaactcaaaattaggggtttttggtcgaggagatctcatcacagatcataaggaaattgcaaagcagtatttaagatctgactttgcagttgatttagtggcttcattgcctttaccacagatcattatttggtctgtgataccagctatcaaatattcgtcgtctgagcatggcaatgacatgctgcttctggttgctcttttccagtatatcctacgattatacctcatgatttccttgaataataaaatagtcaaaattactggagtttttgcaaagactgcctggcaaggagctgcatacaatctgctgttatacattgatttgtcttagt

SEQ ID NO: 37967 - DNA, 295 bp, Setaria italica
  Peptide Sequence Number=SeqID_103941
taactttaaagaacgttaagggaactaaccggaacaaacgggaggtggtaacgaaaggtaggaggttactccgcagatactttgcggataggtacctggagctcggtccaatggaaatttcgggattgatcacgggtttggggcactatggccgggagtttggaagtaggccggatcttacctactatacactctctagtggcgtgtcaggtttaaagattttgtgtgggttacctgaacaatttggcttctgttggaggttaaggtcaggtcccagtaaacttttgttgttcaa

SEQ ID NO: 37968 - DNA, 461 bp, Setaria italica
  Peptide Sequence Number=SeqID_103942
tgattactgagtcggtatgtacttccacgacccatcctacttatacagtgcattctaatatgtttgtagcaatcgatgatatcttaatttaaacaagtcactgtaacttttttacggcatatgttactgcaattcaccttgtgttacgttgctcggcatcgacgacggcgacgttggagtcatggcgttttcatctgtacgcacggactgtaggacaccaatagcagcttgggaaccgaattgggaagacacggtggtgtagagcagcaggacgaggaagaagccgacgaggaaaccaaccacggcctggtggtgctgcgccaccgccctcaccgcgctcctcgccccaagggccaccggtgccgtcgacggcgacggtgagtcggtacccatcccctgatcaaccttcttgatcggccggcccgacctggccttttctttcttctcctcctacctcagct

SEQ ID NO: 37969 - DNA, 478 bp, Setaria italica
  Peptide Sequence Number=SeqID_103943
ggcttcagtttgattgctcttttcaattccgtggacatcatgttggacacgatcctcctccatctttttgtgttcgtcgattttttgccctttattttcttccttcatattatctccttgtgttacgttgctcggcatcgacgacggcgacgttggagtcatggcgttttcatctgtacgcacggactgtaggacacctgcaaatgaagaattggttatattagttgtctgatcgtcggccgacggacatggcttcagaatgaagaaatgttatattaagctacatctagggctatgacagcacaaaaaataatggacacgagaaaatggcaagtcaaccacacaacctgtcattccacatgcatattttgatacccacgctaggaacggtatataaactttgtttcttgtctaacggtcatgcatgtcgatccggagatcaaattggttccttgaagatacagatgacacttcaaat

SEQ ID NO: 37970 - DNA, 515 bp, Setaria italica
  Peptide Sequence Number=SeqID_103944
ttgtaccttgttttgtcttgtcttgttatgttttatagattggattcaataaagatgaaattggtaaattctgggataagttgaataataaggatgcttgcattattacttcgattatggacatgagaattcaggatatccatggtgatctactctgcgagcttattgagcagactgctccagaagacatattctatggcatagcaaataaattgaaggatacccttgctggtaaggaaaaaatatcatcgagtgagctttttgctcttcttgatgaaggcagtgagagaactgccttctcaactgatattcgccatttgcccaagaaggtgctatcttgtgagatgggtgttcttgctttaaaagaaaccagcaatgtcattgcttgctggtgtttctttcttgaaaaaagattgattgatgattggtctaattatatggatgctgaatccacaaaattcgctaaccttcttttggatggtgataaagactcaagatttcacatatgtgcccct

SEQ ID NO: 37971 - DNA, 2371 bp, Setaria italica
  Peptide Sequence Number=SeqID_103945
cctgaagacacttgattgttcagcacctgaggtactttggatggcatcatttgtagtttattatgcatatttccttggacgactattttctgaacttgaattcccgttttggcagtgttaacaaatgtttctaatgctgcaagtgcaacctgaagaaaatacacctgctggtgacagcaacaccagttcagaaagtgcccaggatctattgagttcttttcgagaacaagagtcaaatgatgctagtgataacatagaaaagaaagaaccaggcatttcaaaatgcaaatcagtggaagaaataccaagaacagtgactgtaaagaggtgcaagaacattgattcaaagaaagtcttctcaaataacaataataattcaagctttactggtagtcatactcagaaaaagcagccaagaaagggtgatcatcttgttcgaccatgtgaaaatggaatatctcaagacacaaagcctcctaccacaaggatatgcataaattcagcctgcaaagctgtcatgaactcagatgatgaattttgtaagaggtgttcgtgctgtatttgtcatgtttttgatgataacaaagatcctagcctttggctggtctgctcatcagagactggtgatagggattgctgtgggttatcctgccatattgagtgtgcactccagaaccggaaggcaggatgcatagaacttggacaatctatacagcttgatggtaactactgttgtgctgcatgcggcaaggttattggaatacttgggttctggaagaggcagctggtagttgctaaagatgctcgtcgagttgatattctctgttcacgcatatatctgagtcatagacttctggatggcacgactcgttttaaagatctgcatcagattgtagaggatgcaaaagcaatgctggaaactgaagttggcccccttgatggtacatcgtccaggatggcccgtggcattgttggccggctgcctgttgctgctgatgtgcagaaactttgctctttagcaattgaaaaggcagatgagtggctgaggtcaaacagtccatctgaaacaaaacagattgatacacttcctgctgcctgcaggttcaaaattgaagatattacagcttcatcggttgtgttggttcttaaggaagctgtttcctcgcagtaccatgccatcaatggctataaactctggtactggaatagcagagaaccgccatacacaggggagcctgctgttttccccaaagaccaaagaaggatactgatatctaatctgcagccctgcacacagtattccttccgtattatttcatttactgaggatggtgaactgggccattctgaacacaagatctttaccaagagtgtggagatcattcgtaagaacaaagagaatggagcagaaggttggtcatcttctgccaagagagctggtaagagtcaaaatggtatgtcgtcaggcttccaggtgcgccagctgggtaatgtcttgcggaaggctgatgagaatggttaccccagtgcattgtgtaaagatgagattgaagattcatgcgacctgagtgattctgtgatactagaaaaggaccaggttccatgctgtgcgtcccgcaagatcgatcttaatgagacctcagtcccagacctaaatgcagaggtagtcatgccaacagaatgctgccgggatgagaacggatgcagctcaggaaagaatacactgacaaagtcgaatggttgtggcgactctgagacttttgccgaggggcatgtaggggaggccccggtcatggaatcccaatcacagagtcgcaaacagacatctgacctggagcaggaaacttgtgccaatgacagcaacttggcagccgcctcagctaggctcttctcccgtaggttaggccagttagatgacaactatgagtactgtgtgaaggttatacgatggctggaatgttctggacacattgaaaaggatttcaggatgaaattcctaacctggttcagcttgagatcaacagagcaggagcgtagagttgtgatcaccttcatccgcaccctccttgatgatcccagcagtttggccggccagcttctggattcattccaggaaattgttgctagtaagaagccaagaactggtttctgtactaagctttggcactaaccagattgacaaaaaaaaaactcaaaactgctaccgagaatactcatactcttacaatagggagtaactggggtcatagtgtcatgctattttaccttctgatatatttgtatgtagttagtttgatggtgctgtgcttggatatttgccatgactacataatatattgatgaatgtagcaaataaaagctcttaataaaa

SEQ ID NO: 37972 - DNA, 675 bp, Setaria italica
  Peptide Sequence Number=SeqID_103946
ccttctgttctgttctttcagctgtgccctctccttctctcggtcaatcctcacggtggaaagctctgcagcaagggcagcagcaaaggccgtcccgcaacccttcctgcctgctttggctgcagcccttttcacctcagagatcgcctccatcactcggcggtgcttctcaagaagatcattgtacagctcctggagctcaacataatgttcgaccatcctggcatggccgtacatcgctcgttggagagcatcatccagctcagctgtgcacttcttctcattgcagagctccatctcggtcttctctgcatgcatccggttcgactctagatcaaccctcagctcttcagtgagggagatccatttgctctcagactccatccatttctgtctttctttgtccagttcatactcctggtctgtgctgccattccttatctgatctagaaggctaccatttgttgacacattagtctggtgctttagttgctccctcagactttcaatttcagcaagaagtgcctccttctcatttggattgagtgatgacaccttactatcaccacactgttcatcaatcttgcttgttagttcttctgcaggtttcacaccatttgaatctggaacatcttctgacccccttcctatattgatcaatcaaattgctcagcc

SEQ ID NO: 37973 - DNA, 528 bp, Setaria italica
  misc_feature (499)..(499): n is a, c, g, or t
  Peptide Sequence Number=SeqID_103947
gaatgcgatgccttgcttggcgccttttcgggcgtcgccgtgcggtgtgtggatcgccccggggacacggcggtggagattctggcgagtgcgggggcgtgacatgcccgctcgaggtcgagggctccatgacatctacccccgcacccagccaccatgcgtggtgatgcgcgcagcccggagccatgcctttctttcccggcccccccgcggcaccagctgcccggcaggccgcactcgcgactcgcgaggtgcatgcacgcgcggcctggatcgcacggccggtagctttccctcgcatctgcctttccacatggctgccggattggacgcgcgctggccacgttcgcgaatgatgtcctgggtgcggtgccaccaaaccctcttcgctcccccactttgccgcgcgcgctacagtgatcgatggggtcgccgtgggccgtggccatggcacgccgtcacacgcccccgtgccgtgtcttcgcgtcgcgtgcgtttnttgtggcggcgcggcacgggcacgtgagc

SEQ ID NO: 37974 - DNA, 455 bp, Setaria italica
  Peptide Sequence Number=SeqID_103948
ccgacctgcgtctccgccgcgcccgccgcggaggagcctcggggggcgccggcgccgactcccgcgcctcgcccttcaccccgtcatcgtgctccgccgctcccccgccggggacgccgacgcggcagacgcagcggccgcggctagcagcttcgagctcttctacgacgacggcgcgggttcgggcctccgcccgctccccgagagcatgtccgacttcctcatgggctccggcttcgagcgcctcctcgaccagctcgcgcagatcgaggccggcggcctcgcccgcgcccgcgacaacccgccggcctccaaggccgccgtcgagtccatgcccgtcgtcgccgtcgacgccgcccgggtcgccgccgaatcccactgcgccgtctgcaaggagcccttcgagctcggcgccgaggcccgggagatgccctgcgcccacatctaccacgccg

SEQ ID NO: 37975 - DNA, 615 bp, Setaria italica
  misc_feature (32)..(32): n is a, c, g, or t
  Peptide Sequence Number=SeqID_103949
tccagtgtcatcaatgtagaagtaatagtccngaaagtcattgtgaacctagcttcatatgttccaacattgttgcgacgctagcagtgctatcaacttgctgcatatctacattcatttgatcctttttgttatcacttccaccgttaattccatgctgaaaagaagtagctgcacccccgtaaccagctctgtatacaaagttaagccctggatacatttgaggataggttccataggccggaggacgccttggcatcatgccaggaacatttgccatcacaccttggcttgggtatccactcccatagtgatagcctcccacagcaaaataaggagcaggaaagtagggctgtgcgggaacaggttgtggcatgtaaccattgtaaaggccatatctagcattgtaaggttggtatgcagaaccttcgtagccagcagggcccctcccaccaaagggccgtggaccacggcctcgaccattacggtaatactgctcatccttggggatagcaatcttggcctctaccttggttccgttcaaggtatgaaagctttccctcatcacctttcccactgcttcctccgaatcaaaggtgacaaaaccaaacccct

SEQ ID NO: 37976 - DNA, 531 bp, Setaria italica
  misc_feature (1)..(23): n is a, c, g, or t
  Peptide Sequence Number=SeqID_103950
nnnnnnnnnnnnnnnnnnnnnnnttttttttagacaaaaacaaacaggattgcacaggcaattagggttgaatagtatgatccagatacattaaacgacgaaagaatttaaacattggtacaagagagggaggtgaggtcaacagccagcaacttgcgtgctttagtttacaggcaggcagcagtagaaagaaaagggatggagggtaagttgaagaattccaatgatatacttgtcaaccaaagaatctcagctcaaagtcttcacagttgcgggttcccaaacaattgttgtactccagtgtcatcaatgtagaagtaatagtccagaaagtcattgtgaacctagcttcatatgttccaacattgttgcgacgctagcagtgctatcaacttgctgcatatctacattcatttgatccttttcagcatggaattaacggtggaagtgataacaaaaggatcaaatgaatgtagatatgcagcaagttgatagcactgctagcgtcgcaacattcatttgatccttttg

SEQ ID NO: 37977 - DNA, 355 bp, Setaria italica
  Peptide Sequence Number=SeqID_103951
catgccagtgtccctttttttttgtccataacctagtttgccaatttatgctcatgctaaacatctgtgtaaatggttctgatttctcttacgcacacgagttttacaaggcttgatttgtaccaatgcggaccacagttttttttaacatacacagtacaaataagatggttgatcctaattgtgaatttagcttatttttagctaacatggtcattggtcgcaatccagcgttcgatttcttgatggaaatcgtggtgcaagcagggaatgaaaacctgatcacttttatataaacctaaagattggatttcaacattcgctgattagaatttagaacttcttcagtttcatg

SEQ ID NO: 37978 - DNA, 302 bp, Setaria italica
  Peptide Sequence Number=SeqID_103952
aaaaaagaaaaaaagaaacgtaagtaagaagacaacaatggtggaagaaagaaatcaatttattcaggagagctggttgatggagccaagatggcaaggagtcttgtaggtaagcttttcctttattagatcttgtagctgagctttttgttagatgataaatttattcgatatttcatagttactattaataatactattacgattgctaaaacctttttccctttattagttgtctttattggtggctcttgttgggttccatctctagcccccttaacttgcacagtattaaaaaggct

SEQ ID NO: 37979 - DNA, 465 bp, Setaria italica
  Peptide Sequence Number=SeqID_103953
gattcttggaggcatttcctcaagcagctgctgtgcgtcttccatgtcgacagccactccagctgcagggtgctgcccggcgtgctgtgctgtgtgggaagtgtataggtgtgcaggggagctgcgcagcagggtgctgctcttcttcttcacccacgccatgcgtggggcttgtgcggacactgtagcacctctgcgagcggccggcattgagcgttagggataagaggatggatgagcagagggagctttgaggcagcaggggcacccacgggccacggcggcggcgaggtcgacggcgactcccacctccaccacctgctcctcctcgtcgacctccaggcaccgccgtcgtcaggaccctagcggccgggacggtggcctgcgcttgcgcctacgctggagcctcgtcctctcgcacggtggtgcgcgccggtgccgcatccagcatagggtgctagggag

SEQ ID NO: 37980 - DNA, 750 bp, Setaria italica
  Peptide Sequence Number=SeqID_103954
aaataaaagggaagggattccatttataaataatagtaatacacattagaaatacatttgcattgctcgtacacgacttacaagcaaaatatcactctcccaggaacaaaatacaacctctcatacatccaacatcctaggtacaatgaaatagcataagttgacagaagtatatgctgtccaagtcacaatctctcatgcaagcagaatgtaagatcgaacaatctgcaagttcatccatgttttccaatgccctgaaatagagcaagcagctccagaccacagaagtagttatcctgggattttggtaaagctgccatcctacaacttttgattcttggaggcatttcctcaagcagctgctgtgcgtcttccatgtcgacagccactccagctgcaggggtgctgcccggcgtgctgtgctgtgtgggaagtagataggtgtgcaggggagctgcgcagcagggtgctgctcttcttcttcacccacgccatgcgtggggcttgtgcggacactgtagcacctgggccacggcggcggcgaggtcgacggcgactcccacctccaccacctgctcctcctcgtcgacctccaggcaccgccgtcgtcaggaccctagcggccgggacggtggcctgcgcttgcgcctacgctggagcctcgtcctctcgcacggtggtgcgcgccggtgccgcatccagcatagggtgctagggagagagagaagtggggtggtggatctggtgggt

SEQ ID NO: 37981 - DNA, 449 bp, Setaria italica
  Peptide Sequence Number=SeqID_103955
tagaccgtaaggaaggtagaaaggtactacgacgcaacgccgttgccgttcttgccgtagccggagaagccgttctccccgtggttggcctcctgggcgtaggacgcgaagccgcggccgcggccgttggcggcggcgtcgtagttggtgaaggtggagtccgggacgtttgtctcggcggcgtaggaggcgaaggtgcccgacccgcccgtagagccgccggcgtaggaggtaaagttagcggtgacgacgttgccgtcggcctcgtaggactcgaagcggtcggcgcggtccgacgagtcgcgcgcgtagcggcggaaggagtcggcggcgatgttgaggtccggggagtagctccggaacgagtcggccccgccgtcgccgccgctgccgtagttggagaagttggcgttgctgtagcccttgaaccgggcccccgccgtccgggt

SEQ ID NO: 37982 - DNA, 580 bp, Setaria italica
  Peptide Sequence Number=SeqID_103956
ctgtagagtcattctctctgactggaagatgcccattctgagaagtaagaggatcatggtcacctaattgtgtctctttatggtatgtgagaaccccaggaggaagagctactttgtttgccttggccattctctctagaacaagtgttgcatcagatattctattttgtacgcaaagatagcgtggtgactcaggtgcaaagacaaaaaggagaagcaaaaggaaacatggaagggcggtgaacgccagcaaccaccgccaactcaatcgtgtcaagacgacccatgcaagtgaagcctcgaagattgttccaatagtccagaaaacagaaaaaacaatcatccaggtgccacggctttttgcaggaacaaactccaaaaaccaagatgaaaatacatgattcccaccaactcctataccgacaagaaaccgaaaaacaagcaaggatatataattaggagataaagcacttagaaaccctgctccagtagtgagaataattgagaacaataaagcagtccttcttccatacttgtcagaaatatagtcccaagaacagtctcctggtcttcctccagt

SEQ ID NO: 37983 - DNA, 285 bp, Setaria italica
  Peptide Sequence Number=SeqID_103957
aaggaaacaaaggaagaaataaatgctatgctcacattggcgtgagaacggtttcacatgcatgcgctggcgtgtgcggccttccatacccgtgggccgtggcatatcctcaggtagcggaccagttggtgctgcacgcctacaccacgtctcgtctcagccagctgcagttcccgtcaaaggaagccatctctgctccacttcacaccaggcgagcctcttctcttcatcccctgctcctctccgtgctcctccaccatcaccatcgagctcgtcctccttgat

SEQ ID NO: 37984 - DNA, 520 bp, Setaria italica
  Peptide Sequence Number=SeqID_103958
cctttgacttcagagatcagaatgcaatgcctttgaaatcatttaaacctccatttcccagtagaaaaaagaacatatcattcaaatgggactaaatctttaggctgctataccgctccaacaaagtgcagtaaaatacagttactaactgtatctgtaagaagaagttcataggtggggataatgggaggagcaaataaggccaacactgaaatctagatccgtgaaatcaagaacccctatgcaaatctagatccaggcatgtgaatcaaaacactacccaagcacccaaagcaaatctaaagggtagcctaaaaagcaagtcactatgctagatcatggacgaacttaacaagaacaagcacatatagaaatactccgactcccttgtcgaaggaaaagctgcaagaaacactatctgaggcaccccaaagcaaagctaaaaagaggcctacaacaaaatattcctgctacaacaagatcttgggcgagctaggcaaaacaattgcctacaagaaga

SEQ ID NO: 37985 - DNA, 657 bp, Setaria italica
  Peptide Sequence Number=SeqID_103959
tagtaaattagtaagtctttgtactaattttcctatgaagtgtcataggcatcgcagggttttgctggttcatttccattacaagattgtttagaatcttcaatcctatgaaataatgatcctgagatgcaagacctaagaaatccgtcgcttccttcacagtctctctgaatctatcatcatcaaaccatccaaattttgtaattcgacaaaccagctgaattagggacacaatgacaaagttctgcaatttaggcccccttgcggcaagatagtttatgacataactccgtatatcgaggcggagctgcaaagaaagactgcggtccgaaacttgcttcaacaagcttgaactcgccaacatcagagcgtatggagttgaggcattgtccaatatgtattgacactgggaaatgtactcgctgttctctgagaagcacttgagggtgctttctgcatgtgctctctcagccgagtctctagaattataaagcttttcacacagcacctctaactgcgctaggctctccattgatgacatgaacacgaagctccaagtttgcagttgaccaagtatccaagattaatatgccaccagattcagccacaattcagcctggggtacagtgatccctgtcggatgttcgtcgccggacg

SEQ ID NO: 37986 - DNA, 286 bp, Setaria italica
  Peptide Sequence Number=SeqID_103960
tgctgcttgtgaaggccatgttcctcctgaaatccaaccgtgacaacacaaactgttcacgtctgtagccaatttcattccgacaaggcgaaaatgctgagctgcaagctagaattctatgaactggatcgattccccaccattgggtcttcaaacaaatgacctagatatttctgtagagcacctgattatggtgaaacaacttgtgccactgtatgaagagcagctgctacaatgggatacggaacactcactattcgcggtaccatttttgtccatgaggaga

SEQ ID NO: 37987 - DNA, 399 bp, Setaria italica
  Peptide Sequence Number=SeqID_103961
cgcggcggcgtccatggtgccggtcaccttcaccaggtccttggcggcgtcgatcaccacatccttcacacctggaaccaaaacaaaacatgtcaattcaaatattcgatctgggcgagaaagctcgcagccttttgacggttcgtgcggggaatccgcggcgagaacgaagggaaaccgcacctttgatcttgtagatgcggcgcttgatgcggtcgatgcagccctcgcagtgcagccggatcttgagcgtcaccgtctcctccttggttccttggcttcttctcctccttgggcttgtcgccgcccttctccttcttctcggccttcttgtcgccgcccttctccttgtctgccttcttctcaccgccacccttctctttgtccgccttcttctca

SEQ ID NO: 37988 - DNA, 1019 bp, Setaria italica
  Peptide Sequence Number=SeqID_103962
gccccggggccgggggtacggcgcgtagctgccgtagtgcggcggcatctggtacatgccggcgtcggccatgggcatgggcgccaccgacgcagaagcggcaccggcggacttgtccttcttctcctcgccgccgccaccgccgtccttcttcttgtcgccgccgtcggccttgtccttcttgtcatcacccttcttgtcgccgccgtccttcttgcccggcgcgacgacctccacggtccggctgagcttgtccctgaggtagcccggcagcgcggcggcgtccatggtgccggtcaccttcaccaggtccttggcggcgtcgatcaccacatccttcacacctttgatcttgtagatgcggcgcttgatgcggtcgatgcagccctcgcagtgcagccggatcttgagcgtcaccgtctcctccttgggttccttgggcttcttctcctccttgggcttgtcgccgcccttctccttcttctcggccttcttgtcgccgcccttctccttgtctgccttcttctcaccgccacccttctctttgtccgccttcttctcaccgccgccgtccgccttcttctccttctccttctccttttccttgtccttcttgggcgggccggcgccggcggagacgatctggacgggcttcttggccctggcctcgatgcgctccttgagctccgccgcgtccgccgggccggtgacggtcaccttgcccgccgccatgtccgcgaccacggactccacccctggggcgtgcttgatggccctgcggaccttgccggcgcatccggcgcaatgcaagtcgaccttgagcacgatgggctgctgccccgccggcgccgccgcggcggcgtccttcttcttgtcgccgccgccgccggcggcgccatccttggccgccttcttctcctctcccatggtggtgtctggcgtctagccttgtctgtggcggtggttaccgagggcgctgggcgcggggttcgaggttgcaggctgttggggggttttgg

SEQ ID NO: 37989 - DNA, 1147 bp, Setaria italica
  Peptide Sequence Number=SeqID_103963
tttttttttttagggacaaaaatttacaatacggtggcgggtagattacatgacgctgcaaattacaccggggcggagagagtcgctgctgccatttacagtctgctggtactggacctcgggggcactgattaaactactagctaactgataattaactaagctgctaaacccaagccatagctttctggtatgacacagcggagttcgacggagggaggggcggcgtcgacggccggcgggcggagggaacgagctgggctcgctcacatgacggagcaggcgttggggttctcgtcgctgaacatctggggcgcgtggaggtgggcgccaccgtatgggtaggcgggcgggggcgggtactggacgccggcgttggggtagaagctggcggggtggggtgccggggcggcgccgtagtagcccccgggggccggggggtacggcgcgtagctgccgtagtgcggcggcatctggtacatgccggcgtcggccatgggcatgggcgccaccgacgcagaagcggcaccggcggacttgtccttcttctcctcgccgccgccaccgccgtccttcttcttgtcgccgccgtcggccttgtccttcttgtcatcacccttcttgtcgccgccgtccttcttgcccggcgcgacgacctccacggtccggctgagcttgtccctgaggtagcccggcagcgcggcggcgtccatggtgccggtcaccttcaccaggtccttggcggcgtcgatcaccacatccttcacacctggaaccaaaacaaaacatgtcaattcaaatattcttctccttgtctgccttcttctcaccgccacccttctctttgtccgccttcttctcaccgccgccgtccgccttcttctccttctccttctccttttccttgtccttcttgggcgggccggcgccggcggagacgatctggacgggcttcttggccctggcctcgatgcgctccttgagctccgccgcgtccgccgggccggtgacggtcaccttgcccgccgccatgtccgcgaccacggactccacccctggggcgtgcttgatggccctgcggaccttgccgccacacccttctctttgtccgccttcttctcaccgccgccgtccgccttcttctcct

SEQ ID NO: 37990 - DNA, 1520 bp, Setaria italica
  Peptide Sequence Number=SeqID_103964
gatggcagctattctcatacgggttctacaagcctcgcccgaacagaattctgatctgttattggttcaatgctgtaaagatttctccttcatttatcaccttcttagatatccaatcaggagccagaccctctaaaatatgcagctgctcttctatctccccagtctcttctatctccaaattattggcaagaatattgtggaaaagttcttgttttgtgattagggaattcttggtagatcgtgaaatatcacagactatgtcaaatgtggtacggagcgaagctatcttttcctgggtttcaactgggtcttgattggttttgtctttatcagtaaaggagacaggttccttctcctctaatgacttattggaactagatgaatcttctgagaacatgttccttttagctgtagcctcatgttccataccatcatcataagacaggcttcctccttcaaatttcaacgatgttttcagtgatctgcgggctgaaccggctgaacgtggtccagaaatgtgtccacatgtggcctcaagtttcccaagtggagtcagcaacggcctttttggtgtctgcattgctggtgttccagccaaaaatggtgactctgaggtcccttgttttggcgtgctctctggacaacaagagatcaaatggcgattgggggtagcagaaatttcgtagttcactggaactggagcatttgtatcttgctttttagggcttctgtttatcccttctgtaacataagcactgacagagctcagttctgctggatcagagagcaactgagtcttttcagttccatcagcaacgattttctgtgacatgagtttttgaaaagattgtgggaagtgggaagcatataacaatccatcctcagtggtgccctgcaaagctggctcagtagcatgtccattaggcgcctcaagatataacttctcccttgaccttgaattaaagggtcctggtagaattgcctcgggaatctctgtacccttatgatgagcatccaaaaaactcaaaagctttgagtaaaaagcctcgcagattgccattgatggagactgatcaggacttgtgcattccacaacatccatgacaagtgtgatctccatatcagcatacatgcataggcttttctcatcatgtaagagtatcctctttatctggattgcttctggaaacaaatgcttcatctgggccaagtgactgtatgagaacgtcctctttgtgagtacttccacctgggtggcaatattattaaaagtagtcatcttcttccgtaagcgtagcaaccttatagagctctccattctattgaaaagattcagcaaatccttgtgtttctcaaggagttcaatgcttcctgaaatcagagatcggcaaacatcaggtgaaacactgtcattatagccttcatcatccgtgtcatcctcatcttcccccagcagatttgcaaattcttgttcttttgttaccttctttctttgttcttaagttctttaaattttt

SEQ ID NO: 37991 - DNA, 271 bp, Setaria italica
  Peptide Sequence Number=SeqID_103965
ggtggaataccacaaagagaaagtgtaccacataaaaaagtagttcttgtaattggaacgtattttcttaaaccacccataagaaccatattctgacttttatctggtgaatatccaacaagaggttccattgaatgaataacggatccagatcctaagaacaataaagctttcgaataagcatgagtgatcaaatggaataaagcagcttcataagaacctataccgagagctaacatcatataacccaattgagacattgtagaatagg

SEQ ID NO: 37992 - DNA, 771 bp, Setaria italica
  misc_feature (724)..(724): n is a, c, g, or t
  Peptide Sequence Number=SeqID_103966
acttcacttcagttattgtcaattataagcttgcgatcaacttgcttattctagtttcattgatgtgcagcctcccagccatagatgtcaaaaatggttttcatgtatgtgcatcagaatgtgtggcaagtgacatgccttagttacatacataatgtgcagattctagagcaattcttcatatactgttgctaggaagaacagttcaactttatcagtttatattttggagcagttgtaatgttccaaaagcataactactcaaaatcctaaataatctgaattgccaacatttgaagcatcactaaattagcccattgattgccattttatcgttccagaactactctcattgagcaggttcatattttgcagagatctgcacagaacatactaacatgtaggaaaatttataatacgctaatgttttctttactactacgaagctggaatttctagccagcataaaaatgttgaaggagagcactagcaactcgaacataggacattatgacagtagggagtcatttgaaaaatatgaactgcattttttggaaaaagaaataaagtgtgaataacatttgaggaaaaatcccaacatttagttccagtctacggattgacagacattagccccatgattcttcttcttttttatttctttctttggctgtgtatatcctggtaatgcagatgctgggaatatggttcaaggaatttttancacctcgatgtaaaaaccttggatttaataaaatttcccttataacg

SEQ ID NO: 37993 - DNA, 198 bp, Setaria italica
  Peptide Sequence Number=SeqID_103967
atttaaagatgtcttcaatgatctcctaaaaatgacatgattgaagatctgacaactgatagattgctctgaatataatcagattgtctgtaaggttacatcttcagagcaatctatcagttgtcagatcttcaatcatgtcatttaaagatgtcttcaatgatctcctaaaaatggtgcaacatcatgttagcaatg

SEQ ID NO: 37994 - DNA, 2640 bp, Setaria italica
  Peptide Sequence Number=SeqID_103968
attcggcgaaatgggaagctaatgttattcggaaggcaaaccagctagaagttggtgacattgcctacagaccattgcaggatggtgatcttattctcatcaacaggcctccttcagtccatcaacactcactaattgcattatctacaaaaattctaccaattcagtctgtcgtatcaatcaatccactatgctgcatgccttttttgggagactttgatggggattgtttgcatggatatatcccacaatctattcgatcaagaattgagcttggagagctggtaagcttacaccagcagctgttgaatatgcaagatggtcgaagtttggtgtcactaacacatgactctctagctgctgcacatttgttaacaagtacagatgtttttctgaaggaatctgaattacagcagcttcaaatgctctgcctttccgtatcaacaacaccagtaccagcaataattaagtctatgaactttgaaggttctctgtggactggtaaacaatttttcagcatgcttcttccatcaggcatgaatttcagttgtgatagcaagttgcacatcatagacagtgaagttcttacctgctcttcggggtcttcttggttacaaaatagcacaaccggtctcttttctatcatgttcaaacagtatggtcgcaaggcacttgacttcctttcttctgcccaagaagtactatgtgagttcttaaccatgaggggtttaagtgtctctctttcagatctctatatgttctccgatcattactcgaggagaaaactgactcagggagtcaaactggctttggatgaagctgaagaagctttccgaatcaagcagatattgctagatccaattaacataccagttctaaagtgtcatgatgaaactgaagatgtaacttacagacaatctgattatattcagagcaatctatcagttgtcagatcttcaatcatgtcatttaaagatgtcttcaatgatctcctaaaaatggtgcaacatcatgttagcaatgataactcaatgatggtgatgattaatgcaggaagcaagggtagcatgttgaaatatgtgcagcaaactgcatgtgttggtcttcaacttccagcaagcaaatttcccttcagaattccttcccaactctcatgtgttagctggaataggcagaaatcattaaattgtgaagctgagagtaccagtgagcatgtggaaggtcaaaacctttatgctgtaatcaggaattccttcattgagggtttaaatccattggagtgtcttctgcatgctatatctggcagggcaaacttcttcagtgagcatgctgatgtgcctgggacactaacgagaaaattaatgtatcacttgagagatctacacgttgcttatgatggaaccgttagaagttcttacgggcagcacataatgcaattctcttatgatactgctgatgatatgtgctgtaatcatgatctggtaggtgaacttggtgcccctgttggttcttgggccgcttgttccatttcagaagctgcatatggagctttggatcaccctgttaatggtttagaggactcccctctcatgaatctacaagaagtatttaaatgtcacaaggctacaaattctggggatcatgttggtttgcttttcctgtcaaagcatttgaagaagtatagatacagtctggaatatgcatccctagaagttaaaaaccatctcgagcgagtaaacttctctgatttggttgaaaccatcatgattatatatgatggatgtgacaaaacaagaaaaggaggaccttggaccacccattttcatataagcaaggaaatgatgaagaaaaaaaggttaggattgggatttgttgtagaagagcttacaaaagaatacgacgccaccagaaaccagctaaacaatgcaatcccatcagttcatatttcaaagagaaaatgttcagtaggtgaccagtgtgttcaaaattcagcttgctgtatcacattggtagcacaagctgaatccaattccatgtctcagttggacactatcaagaaaagagtgattccaagcatactggacacactgctgaaaggttttttggaatttaaggatgttgagatccagtgtcgacatgatggtgaacttcttgtgaaagttggtatgtctgagcattgcaaggctgggaggttctgggctactctgcaaaatgcttgcattccagtaatggagttaattgactgggagcagagtcaaccaaagaatgtatatgatattttctgttcatatggaatagactcagcatggaaatgctttgttgaatctttaaaatcagtaacttctgatattggaaggaatgttcgtcgggagcacttactaattgttgcagatagcctgtctgtaactgggcagttccaggcgttaagcagtcaaggtttaaaccagcagcgctctcggttatcaatctcatccccattttctgaagcatgtttttctaggcctgcacgaagttttataaatgctgcaaagcattgttcagtggacaatctgtgtggaagtctagatgcaattgcttggggcaaagagcctttcaatgggacgtcagggccttttgaaattatgcatgcgggaaagccac

SEQ ID NO: 37995 - DNA, 1986 bp, Setaria italica
  misc_feature (1770)..(1770): n is a, c, g, or t
  Peptide Sequence Number=SeqID_103969
gaactgaaccaacaaatgcattagtcatataccgcaaatcagcaagttgtgcaacagcgcatgcgcgcgtcaccaatccaggttaggtttgccagaaaccttaattgaagcaacattaagcattcgtgattattacagtagcatgcctgggggtgcaaatggtaaggatgatgatggcagcgcctattgcatgtcgtgccaccaacagttctcggaaacaaaataaatgactttcaccacattctagagacataatatgctcacaacacgtacaagtagtataatacagactacggaaatggaggcatggaagtcaagacttttcaggcctgccttccttagtcccattgtccattgagttgagttgagttgacattcatcccaatcctgaagaccttctgagcttccatcctttgaatacatgccaggaagaggcacaagatctaagctgattcattctttgttaccatccttcatctgattcattcttcatcagaagttcgtcatatagcctgatcaggacaagataaatgccaggagcactaccaagtgccaactagtgtgacaacttatgctctacgatgtagtttcttctcaaaataacttccgagttgaggtgagatagagtttgcagcaccctgaacacacttgttataagaaaagtcttcagttgtaccatctttccgcagtaaaatgaagcatcttgtacctgggtgactaggattcaatccgatcttgatttctcttactccaacaccgattttttgagctccattgggatgaaatttcagggcctcgactaattgtgatttatctgtctccttcacaaatccatttaatgggtactctcttagcatgttctgcaaggaagtgcgcatatcaataatgttatcccatataccaactttagcatgaagaaagccctggtcgatagtcatggcgccaccttggacggtcgcactgtctttagacttgcatgctaacctacatctcaaagcattttcagtactttgtctgcaggtatccatatgatccttttcaaaattccgaacttcagggctgcgtaagaaatcatagatgctctcattttgttctggttcatgtggctttcccgcatgcataatttcaaaaggccctgacgtcccattgaaaggctctttgccccaagcaattgcatctagacttccacacagattgtccactgaacaatgctttgcagcatttataaaacttcgtgcaggcctagaaaaacatgcttcagtaaaattgggatgagattgataaccgagagcgctgctcgttttaattttgactgcttaacgctagcctgttcttgttactaccaggctatatgcaataattactctcttagcatgttctgcaaggaagtgcgcatatcaataatgttatcccatataccaactttagcatgaagaaagccctggtcgatagtcatggcgccaccttggacggtcgcactgtctttagcttgcatgctaacctacatctcaaagcattttcagtactttgtctgcaggtatccatatgatccttttcaaaattccgaacttcagggctgcgtaagaaatcatagatgctctcattttgttctggttcatgtggctttcccgcatgcataatttcaaaaggccctgacgtcccattgaaaggctctttgccccaagcaattgcatctagacttccacacagattgtccactgaacaatgctttgcagcatttataaaacttcgtgcaggcctagaaaaacntgcttcagaaaatggggatgagattgataaccgagagcgctgctggttaaaccttgactgcttaacgcctggaactgcccagttacagacaggctatctgcaacaattagtaagtgctcccgacgaacattccttccaatatcagaagttactgattttaaagattcaacaaagcatttccatgctgagtctattccatatgaacagaaaatatca

SEQ ID NO: 37996 - DNA, 205 bp, Setaria italica
  Peptide Sequence Number=SeqID_103970
ggtccatgaagaagaagacctagtccctaactagttggtagcttgcaattacacaggttggtagtagttttgaaaaaggctcaaggtacgagtgcaacgcatcgatcactgatttttctgtggtactcagaacccaatcccttggtccggggatctcttcaaccttcttgatggtactatccattgcaatttaaggttgtaccta

SEQ ID NO: 37997 - DNA, 706 bp, Setaria italica
  misc_feature (665)..(706): n is a, c, g, or t
  Peptide Sequence Number=SeqID_103971
cccctgcgccgcagacccagacggcgagctgggagacgttcgacctgctgtcgtcggtgccgtcgacgtcggcggcccccgtgacgaccatggcccctgcgaccaccaccacgccgtccccgcggttcgagtgggagctcttctagaacgaagggcgcctggtccagtggtcccctccggccacatgtgtgcctatccattggctcggccggtacctttcttgttcactcaccttggccatggtggtgcgtgtcagtcgccattgtttctttctttcttttctcctctttattctttctttctttgtcctttcctttgagtgtatattgatctccacaaaaaaggcaagaactggagtgagctagtggcgaagaagaagcacatcgaatccatgggtgttggtgtctgtctgcaaaataagtggtggcctggccttgtgatcgacgaaggatttttcccatgaccatatgtgtatagtaagtagctgtgcagtgtatagtgtacatgaatcaaaacaatctcccaacacacacatttgtttgtgccgtgtgtactggtactgtatgatggatggatggttcatgttcatccatctcacattgtgcaacccaacaatggccgctgctggttctggtgtgttactttagacttcacttcaaaaaaannnnnnnnnnnnnnnnnnnnnnnnnnnnnnnnnnnnnnnnnn

SEQ ID NO: 37998 - DNA, 274 bp, Setaria italica
  Peptide Sequence Number=SeqID_103972
ggaggcggagggtacggcccggcgtcgacgacggtgagagggccggagttgccgccgcccggcttcgtgggcgcgtccggcggcgggtggacctccactattgcaccggcgcctgcgccggcgccgtctgcgttggcgatggcgttgccattggcattgccgttgccgtgaccgccgcctttcttgcctttcttcttgccgccgcctccgccgccgccattgccgttgccgttcgcggcgggctgcgggccctgcggcgtcatggcgagagggg

SEQ ID NO: 37999 - DNA, 441 bp, Setaria italica
  Peptide Sequence Number=SeqID_103973
aattgagcttaattcttgttactttgacatagcacaagcatgatatagcctaattgttggtttgttatggttattttcttgaattagctcatgttgcttgtcaccattttctgtagctctggccgtgtgaagtggaatgaggacaatttgtatgagattgagtcaaacaaaccagtgaggcagaagataacagagccaaagacgccttatcaccctatgatagatgatgacgggtccctatcgccaacacgtgcttttgacaaatgtctcgatgagactgtccaggctgaagctatattgatggccttaaatggtgtggcttcttcaagcaatagcagttcaaaggatgatggttgggcatcctcagatgatgagacagatgctgtggaacaagaggctgagacacgcaacagaggataggcaaggcacacaggggatagg

SEQ ID NO: 38000 - DNA, 897 bp, Setaria italica
  Peptide Sequence Number=SeqID_103974
taacgcgtctcgtggtttgctttcctggcgacgaggaccaggcgagcagcggcgcccttctccacctcttccccgggcccattcgccggcgacgagcaccaaccagatttctgcgtaaatttttcacgagcttcattcacttttcatcagttggaagttaagaaacttcaagcatgagctctggccgtgtgaagtggaatgaggacaatttgtatgagattgagtcaaacaaaccagtgaggcagaagataacagagccaaagacgccttatcaccctatgatagatgatgacgggtccctatcgccaacacgtgcttttgacaaatgtctcgatgagactgtccaggctgaagctatattgatggccttaaatggtgtggcttcttcaagcaatagcagttcaaaggatgatggttgggcatcctcagatgatgagacagatgctgtggaacaagaggatgacccagaagctgacacatcaagattgagtttcaaggagcatcgccgtgcacactacgatgagtaccgcaaagttaaggaactgatgcgcactgggtcccttgttgaggatgaggccgatgagaatagcagggttgataacagcagcgaaggcaagagtgtgggaaaaggtgcagcagtcgaggacaggaaaccttcggaggaaatatgagagttgagatggtcctgtttcgtctgttgttcactaagataggaaagcctatcatggcggctgaagcacacagtttgccaaagtatgttgcagcatgcttggcatgttttagatctgtggtttcaagtcgggtggttttctgtaagcaaagcagttactccattttgttttgagatgcaggtgtgcctaaaatggctttgatgactgaaaattctatttgagttgg

SEQ ID NO: 38001 - DNA, 739 bp, Setaria italica
  Peptide Sequence Number=SeqID_103975
aggacaccacatttgggatctctccggagaagaattagtggacaggttcagaaagcggaggtgagtaaggcttccaatcgacgcaggaattgtgcccctcaacaggttgctcgacaggtccaagattgtgaggtgcacgagctcgccaatctctgaagggataccaccttgcaggtagttagctctcaggtaaattgccctcagttctgtgcagttcttgatctctgcagggattgggccgtgcaagctgttctggtgcagagctatcctctgcagcttgtccagcctcccgatgcttggtgaaatgatgcccccaagctgcatgtatgggagatttatggattggaccctgaggtccgggacggagcaggagatgccctcccagccgcagggattggggtcggagggcctccagctggtgaggcgctgtgctgtggcgttgaaggccagcttgagctcgagcagggcctcgccgtccggggtgagaccccatggcggccgtggagcagaggaggaggagggcggccagaatggtgatggcggcggcgcgcaggcccgccgcaccatggcggcctctccccttgttcctcctcctgctgccaatcttgtccatggtggtggtggagagggggggaggagtgttcttggctttttctcgggaagggatggcctgtggcttctttgggaggttttgaagcgagtggagtggggagtggtgtgtccgtgtgtgggagaagag

SEQ ID NO: 38002 - DNA, 685 bp, Setaria italica
  Peptide Sequence Number=SeqID_103976
cctccccgtgtccgagctcgcgcggttcgccgcgcgcctcctctcctggcggctcctgcacccctcctccggcaagaagcagggtggcgccggcgagcccccaggatcaacttcaagaccggcgtggaccacttctgcctccaccccggcggcacggcggtgatcgacgcggtgaagcggagcatggggctggacgagcgcgacgtggagccgtcgaggatgacgctgcaccggtgggggaacacgtcggcgagcagcgtgtggtacgtgctgtcgtacatggaggcgaaggggtggctcaaggtcggggacagggtgctcatggtggcgttcgggtcggggttcaagtgcaacagctgcgtgtgggaggtgaccggcgacatggccgacaacggcgcatgggcccactgcatcgacagctacccgccggagacactggtgaacccctacatggacaagttcggatgggtcaacgacatccagggacagggaggcggcttcgtcttctaatcatgcatcatcagttgattaatcgattaattaacaccgtcgccagttgttattattaatccattccattcgtcgtcttttagatgtacatgctctgctgcaaagaaggaagaagtttgtagcagggtgtgcgtagaaaaaaaaaagatacaagcaaggtggtattgtacccgga

SEQ ID NO: 38003 - DNA, 1768 bp, Setaria italica
  misc_feature (1732)..(1768): n is a, c, g, or t
  Peptide Sequence Number=SeqID_103977
ccaccttactcgactccctactagtcaagtagtgagtgtcactgcgtcgtgctctgtcacttactctgcgtgaccaaccaaccggcccacctccatggagctgctcgcgctgctcacggtgcttctgcttgcgcacgcggcggcgtaccttgcgtggcaggccgtgtcgcgtcgccggcggtcgcgctgctacctcctcgactacgcgtgccacaagccctccgacgaccgtaaggtcaccacggagacggccggcgcggtgatcgagcgcaacaagcggctgggcctctccgagtaccggttcctcctcaaggtcatcgtcaactccggcatcggcgagcacacctactgcccgcgcaacgtcctcgagggccgcgaggagacccccacccacgccgactcgctcgaggagatggacgacttcttcgccgacgccgtcgccaccgtcctctccaggaccggcgtccccgcgcgcgacgtcgacctcgtcgtcctcaacgtgggctccttctccccggagccgtcgctagtgtcccgcctcgtgcggcggttcggcatgcgggaggacgtcatggcctacaacctctccgggatgggctgcagcgccgggctcatcgccgtcgacctcgcccggaacgtcatgctcacgcgcccccgcaccgtggcgctcgtcgtcacctccgagtcctgcgcccccaactggtacgtcggcaccgacaagtccatgatgctggggaactgcctcttccgctgcggcggcgccgccgcgctgctcaccaacgaccccgccctccggcaccgcgccaagatggagctccggtgcctcgtccgcgccaacatcgccgcgcacgacgacgcgcacgccgccgccgtgcaccgcgaggacgccgacggtcgtctcggcgtcagcctcagcaaggcgctccccaaggccgccgtccgcgccttcaccgacaacctccagcgcctcgccccccgcatcctcccagcccgcgagctcgcgcgcttcgcctcccgcctactcctccgcaagctcctcaagaagcccaaggcggcgggggcgggggagggccccaagatcgacttcaccaccggcgtcgaccacttctgcctccaccccggcgggacggcggtgatcgaggcggtgaggaagagcctggggctcaccgcccaccacgtggagccggcgaggatgacgctgcaccggtgggggaacacgtcggcgagcagcctctggtacgtgctgtcctacatggaggcgaagcggcggctgaagcgcggggacagggtgctcatggtcaccttcgggtcggggttcaagtgcaacagctgccactgggaggtgagcggcgacatcgccgacaagggccgtgggagagctgcatcgacagctacccgccggagaggctcgccaacccgtacatggacaagtttgggtggatcaacgacgtcgaaggcgacaccttgatgctctaattgggctattagtggccaacgcgttcgcttggtacagtacaatacagctgctgacacctgcctgcctccatggcgagtgcgtgcatgctactgaaaccggacggccacatgatcggtgacagcaacccaagcatgcagtaaatcaaaaatgcatgcacgtcgttcagtttgaacggcgttttggaacgtaagtactatactgatgtgtagccttcagtcacagtagcaccatatatatgtttttttaatttccacnnnnnnnnnnnnnnnnnnnnnnnnnnnnnnnnnnnnn

SEQ ID NO: 38004 - DNA, 418 bp, Setaria italica
  Peptide Sequence Number=SeqID_103978
ggtgaagccattgccacgaaggtccaaatacttcaatttcctcaagttccggaaacccaatggcaacgcaccatgaaaaccgttggaagagagattgagatgccccaaaccagccagcttagtcaattcagggggaattgaacctgagaacctgttgttcgacagatccagcagctgcaacgacgccatcgaacccagctcacgcggcaagaacccttccagcttgttgtttgacagggacaagttccggagcatcggcatcctcgcaagcgccgacagggtagcattcccaacgagcccaatgccgtcaagcgcgatagaaagaatctggccgccgctgcactgcacgccgtgccaatcgacgggacagccgtcagcgtccagcgcgctcgtggggttccagggggtggcggtggcc

SEQ ID NO: 38005 - DNA, 718 bp, Setaria italica
  Peptide Sequence Number=SeqID_103979
tttttttattgaattacaccccaggaaacatttttcttttatctattagtcgatcatgagtatatattattggggaataactcccacacaagtattacagtttatcaacctttaggtaaacacagcatcaattgccagtcacctagttggttttctatcaaattcagattcatggcagtgtggatccagccaatcacgaggagagctccttggcatgctggtaccacttgctctagcgcccatcaactccctgaggctctccaccttgttctcctgagcgttgccagtgaatttcctatctgcttcctttagcttgttcctgaaccgctgcttacggccaacgttgttcagctcctgctgctttacttgagatggcggagccccatgaggtcccaagtatatcttctcatcttttgcctgtagaggttcaggatcttttgcttcagggatactaggctcagtcacatcattatcttgagtgagcaaattaggaataacatatccgtccgcatcccactcgtcttccttgtcggcggcggcgggtgcctcaagaggtggggcggcctccgcagacgagggggaaggggccgccatggtggtccgaggtggggagccggagcctcctcgacggggagatggatccctcttgcctctgcgctctctcgtcggctctccgcttcacttcgaatcttcttcccttgggagttgggaatcgatt

SEQ ID NO: 38006 - DNA, 310 bp, Setaria italica
  Peptide Sequence Number=SeqID_103980
ctcgacctcaaccacaccaccaaaccaaaaatcaacggcaaggacatggctctggtcggccaggtcgccacggtggcgcagctggtgggtctcgacgcgtacagcctcatcaccatgatcgccgacgccgcgcggacggtgcgccggaaccgcgccacctgccggcagctggcgcggcgggtggagatgatcggcggcctgctccggcggctccaggacgcgcacccgatgcgcgcgccggagacgcgggcgcccgtggaggagctcgaggagacgctccggcgggcgtacctgctagtgcgctcctgcc

SEQ ID NO: 38007 - DNA, 778 bp, Setaria italica
  Peptide Sequence Number=SeqID_103981
tccttttccgcgtgccctaatttctcgctgcgccttgtcccccacctcacctccctctccctccccttctatacatacacacacacgccgtgaccgagcgagccggccggccgcggaaaggaatctttcagctcgcacctccctatcccttgcctcctctcgtctcctgctagaggccaggcccttggtcatcttcacctctgcaattatttgggggactcctcttccttcttccacctccagcctcaactcaaccaaggagaggagggagggcaggaactgctgagcaaggaaaggatggtgtagccgtgcctctgtggcattatgagagtgtgtggaggtgcgggatgggcgatggcctgcgcagatgaaggagcgacagaggtggcggcctgaggaagacgcggtgctgcgggcgtacgtgcggcagtacggcccgcgggagtggcacctggtgtcgcagcgcatgagcgtggccctcgaccgcgacgccaagtcctgcctcgagcgctggaagaactacctccgcccggggatcaagaagggctccctcaccgacgacgagcagcgcctcgtcattcgcctccaggccaagcacggcaacaagtggaagaagatcgccgcagaggtgccggggcgaaccgccaagcgactcggcaagtggtgggaggtcttcaaggagaagcagcagcgggagctcagggacagcaggaggccgccgccggagcccagccccgacgagcgcgggaggtacgagtggctgctcgagaacttcgcg

SEQ ID NO: 38008 - DNA, 745 bp, Setaria italica
  Peptide Sequence Number=SeqID_103982
gcgaagagtgtcagcaagcaccaagctaatgaccacaatcctcctcctcctgctcctcctcgcattgccgccgccgtcggccgtcgcgctcacggccgagggcctggcgctgctggccttcaaggcggcggccaccgacgacccctactcggcgctctcgcggtggtccgagtccgacacggacccgtgccgctggccggggatcacctgcgccaacaccacctcctcctcctcctcggcctcctcgcctgcacagccgcacgtcgtcggcgtggccgtggcgggcaagaacatctccggctacatcccgtcggagctcggctcgctgctgttcctccgccgcctcaacctccacggcaaccgcctgtcgggcgccatccccgccgcgctctccaacgcctcctcgctccactcgctctacctctacgggaatcgcctcacgggcggcctccccgtcgcgctctgcgacctcccgcgcctgcagaacctcgacgtctccggcaacgcgctctccggcgagctcccgctcgacctccgcaactgccgcagcctgcagcgcctcgtgctcgcacggaacgccttcgctggggagctccccgccggggtgtggcctgagatgcccagcctgcagcagctcgacctctcctccaacgccttcaacggctccatcccgcccgacctcggcgagctcccgcggcttgctggcacgctcaacctctcccacaaccgcttctccggcgttgtg

SEQ ID NO: 38009 - DNA, 389 bp, Setaria italica
  Peptide Sequence Number=SeqID_103983
gccgcccttgtcgtacccgccgccgccgccgtcgctgctcccgctccgcatcgccaccgccgccgccatagtcgccgggccactgaccaccaccggaagcaaaagctcctcctcgcgtccttgcgagctctcaattcctcctcgcagcgatcaaaacctgttttcagctctccgctcgcgagcgcgcacgctagcaggcgagagacgtacgggcaccgtcgccggctccggaccgccccctcacagcctgcccccgcgcgaaccgccccccgcggcggcgcacggagcctctgccatcacctgccaggaacgcgcccacccagcgtcgccgcccagaaccagctggaggcgctctcgctccctcgccgggctcccggatcctgtcgaag

SEQ ID NO: 38010 - DNA, 489 bp, Setaria italica
  Peptide Sequence Number=SeqID_103984
ttgttcatcgcggttaactttctgttcacggcctgaagcctggaagactccttacgctgcttatcacggcacctccggttctggaaccagaccttgatctgcttgggctcgatgttcgagaggatggggcactcgcgcagcagctgctgcctgcgcgaggagctgggtttggggcactcggcgtacacccgctcgagcgcctccacctgctcctgcgtgtagcgcacgtacttgcctgtgtccatgccgcccttgtcgtacccgccgccgccgccgtcgctgctcccgctccgcatcgccaccgccgccgccatagtcgccgggccactgaccaccaccggaagcaaaagctcctcctcgcgtccttgcgagctctcaattcctcctcgcagcgatcaaaacctgcgagatttcaaccaaaagatactgtgtcagaaaagaaatggactgcaaaaataaactgtcggcgattagcaacctccctcgtca

SEQ ID NO: 38011 - DNA, 923 bp, Setaria italica
  misc_feature (905)..(923): n is a, c, g, or t
  Peptide Sequence Number=SeqID_103985
tttctttggttccgtaggacggtacctattccccgtctaagggcctagtcgggtaccttcttgataagtagagaaaagtggagcaactgtctgaagaggttgattcactgaaggaaacccttgacaggcatactttgcgtcaaaaaaagcggattctggaagcaaaagaaagggcagagctatttgagagagctaatggtgagtcctcacatgtccttcgaatatttgatgacgaagcccaggcaatgcagtcagctcgtagctcctcgcgtatgcttgaagaagcttatgagacaggtgtcgctatccttcacaaatatgcagaccagagggatcgacttaagagtgctcaaaggaaagctttggatgtcctgaacactgttggcctatcaaactctgttttgaagcttatcgagaggcggcaccgtgtggacaagtggattgcatatgctggcatgatcatcaccgtagtcgtgatgattgcattttggcggttgacacattagatctgcactctgtttgttaactttcagtttgagatatgatatgtgcaaatcgggaaaataggccagataatcagctggtgagagtttcgtgctggtcgtggaccagtctaagcttgctctagttggtcctctgtgtgcactgttttgatcagttgatggcctcacaagtgtaaaagcatattcttcacggcatctttacaggttcaacgcaggcatccatgttggttaagtattcagattcctcctttgtatccacaccgctgtgtagtctattgctacaactttcatgtaagtacacatgcttgcgcttgatgcaaaagtgtatgccactgtctgtttctgtacaaaacattgttttcatagcatatgaaatggaactaggattcatccgtggaagannnnnnnnnnnnnnnnnnn

SEQ ID NO: 38012 - DNA, 451 bp, Setaria italica
  Peptide Sequence Number=SeqID_103986
gcgaacgcagggactgagggaggtacacaagcgcgcaagatgagcagcggcggcggcagcgacaagtccggctcgggcggcggcggggcggtgaagacgccgtcggacttcctcaagtccatcaggggccggcccgtcgtcgtcaagctcaactccggcgtcgactaccgaggtcacctccctccccccgctccgttccctcccctttcgtcgcatctacaggcaattttgcaaaccctacatcgagaggcacagtcatgcttgtttaactccatccgttcttaaatttcaggggaaatttaggccctttcttgtgtttagctgtccatatgtctgagctttgcaatattattaggtggtctagaacaatggggcgattttgtttactgttccttaagataacttgtgcttcacggagcgagacaaccggaataaaatatgatatttgtgt

SEQ ID NO: 38013 - DNA, 635 bp, Setaria italica
  misc_feature (579)..(635): n is a, c, g, or t
  Peptide Sequence Number=SeqID_103987
taccgcaccgaaccctcgtcgattcgtcgcacccacgcaagagagagatgagcaccggcggcgcggacaagcccggcagcggcggcgccggcggagcggtgaagacgccgtccgacttcctcaagtccatcaggggccgccccgtcgtcgtcaagctcaactccggcgtagactacagaggtattctggcttgcctggatggttatatgaacatcgcgatggagcagaccgaggagtacgtgaatggtcagctcaagaacaagtatggtgacgccttcataagaggaaacaacgttttgtacatcagcacaacgaagcggaccctctccaatggcgcatagacccgagtggagccccctcccttttctgtcgtgtaactccaaagccattaacttggttgcactctgactcgatgctacctttcaatctctgtacttgctgtctggaggaagtctgggaaaggggaaatgtatcagatgctgtttttgatgtaactggcatttagcttccccatatcagctttagggatatggataagatttgtgtttgctggtcgttgctctgtgcgccagtgtcgtnnnnnnnnnnnnnnnnnnnnnnnnnnnnnnnnnnnnnnnnnnnnnnnnnnnnnnnnn

SEQ ID NO: 38014 - DNA, 728 bp, Setaria italica
  Peptide Sequence Number=SeqID_103988
ccgcccgcgatccgcgaacgcagggactgagggagggacacaagcgcgcaagatgagcagcggcggcggcagcgacaagtccggctcgggcggcggcggggcggtgaagacgccgtcggacttcctcaagtccatcaggggccggcccgtcgtcgtcaagctcaactccggcgtcgactaccgaggtattctggcttgtcttgatggatacatgaacatcgcgatggagcaaactgaagagtatgtgaatggtcagctaaagaacaaatacggtgacgctttcataagaggaaacaatgtattgtacatcagtacttccaagcgtacccttaccgacggttcttgaggaggaactgttggcatcttcagtgccagccttgcaacttgatcgattatgagtgactcgtattattttcttttccattctcatcttctatctggtgagcgaaaattgcaaaaacgaaaggggaactgaaatgaattgattggagttgtactgacagcaatgcttgatgtagcagtgtgtaactctgtccacaagtgcgctcaagatatctggtggtaattcgacctctagtgatacagataagactctagtgtcataaactgaaatgtctgctatctcatttattttgtgaataaataccagattgtcgatctgtggccgacaaaataaatgagatagcagacatttcagtttatgacacttagtagttctttattactta

SEQ ID NO: 38015 - DNA, 490 bp, Setaria italica
  Peptide Sequence Number=SeqID_103989
aattcttgaatttactacaatccatgcacacatctttcttcaaaatttgacattggtactactaagtacatatcggttatttggtgaaacccaaagcatgttacattgcaacaattcttctgtagttattcccttttctatcatcaaatgttttgcaatttgacatagatttaactgaccacatgattttgttacattgccaagagcaaggtgctggtgaaacgtttacattaagtggaagatgatgcgggttatgtatatttggttatgatacaaagtgaatcttaatttatttggtgtttgtgttactgcaactataatgttcaagatctagtcctcaaaaagaaagtttgaacatttgtgtcttaaatgctaattcggcaagaagaggttagataatgcgttacccaccaaaacgtacgtctcttgcctctggtatatctgtcaccaacctgtagaaaacagacaattataaaataaacaagggccc

SEQ ID NO: 38016 - DNA, 670 bp, Setaria italica
  Peptide Sequence Number=SeqID_103990
gttacaggatagaagcctccgagtcacccacaatttggctattttcggaggtggtggcatggtttttatccataatcacgggactcttcgggatcaacgtcgatggcataccaggagcacagaatacaccatatgcatttggtttgtttacgggccttctcttctttcttggaatcgtcctagtcgtcgtgggaatgttgtatcttgggttacaaaacccagttagcagtgagaaggtgaaggtgaggaagctggagctccagcagctggtttcgatgttccagcatgaagcagagcagcacggcaaggtcagggaaggtcttagccggcatggtttgtcgccgaggtcgtctgcagactcagatgaagggtacattctcatctcctgagattggagatcttcgttaacgtgcaaagtcatatttgaaagtctggaactgaagagaagggggtacatggtggtggcagacttgtacacgttctaaaaactgtaatcgaggaatccgacataaaaaaattagatgatataattctaacacgaggttggctctctgctgttgctagagttgctactttctagtatctgttgagcgagaaaactgtcttgaattagatgatacagtatttcttatcgaatttccagtttggagtaatataagcgtcgatataa

SEQ ID NO: 38017 - DNA, 295 bp, Setaria italica
  Peptide Sequence Number=SeqID_103991
ccgggtcggcgatcatgcgggtgtacgccacgagcgtcgtgttgcggtaagacggcgacgcgccaccgccgccgccgagggagagggaccccgacgcgtcgccagaggtcgacgccggcaggcagtaggagaacacgccaccgtaccgggacgcggtctgcgagaccagtgaaagctcggtgcggccgaggcccatgagccccgccgtgccgccgaacaggccgcggttgctgagcccgcacccgaacacgaagccgtcgatcctggcggcgccgccgagcgccagcgtgtccgt

SEQ ID NO: 38018 - DNA, 537 bp, Setaria italica
  Peptide Sequence Number=SeqID_103992
tttttaggaaaaaacaactggatgatctctgataaatggaacagcggttgcaaccaaaataataatggagaagtgtattcattatgatctaaatatctagatagtgtccaacttgaaaagtttcagtgcagaacagcactaattaattcattttatgaatgaaaacttttcgagttggagccgattcagaatgctacttgttgccgatcttcagaagaggtaggatctaattggtctttggatgcagtttcatattcaccacggggaccattaaatccttgcgtaccataggatgccctgtatccagtgctgtaatgatggtccgtttgagctccaaaacgtggtgggcctttagaattgtcattcctcggctgcccatacgaaccaccaaacttggattcaccttcagctgtgcctacagcagtctgcccatgacgagctacaaaatttgattgttgctgcacatgaggaaacccattgtcattttggacctgtggcataccaaaacctgcctggtgatgtggtaaatgagaagca

SEQ ID NO: 38019 - DNA, 842 bp, Setaria italica
  Peptide Sequence Number=SeqID_103993
acaaatgcaagatttaaattggcagatccctcggtgatatcctttggggtcaggtatcttttacagtccaacttctccgcttgttcaagtaccagttttgccctctcatcgggatccttggtatccaatgtagtttcaggggaatgctctggagcaagagctttcagaaggtaagcataggcttcaccatccttcacatctgaagagaaattgttaacagttttcttgtagccagcttttttcagatgatggttcatccaccgaagtagcatcttttctggtgacaagctcaaaacctcatctatatccttgctatcatcaaacaattccaccagctgcggtgtcttcttgaggttcagatcagccaaaagttgaatctttatgatttgtgatatcaatccaagaactaaatgaggccttccctccaccaaatcctgtgtaccaatgttgacaacagtgcatccaatggccttggcagaattgaggcagagtgtatgattttcatttctctcccatggattaagaactcttttcttatttattgctctctcatcaatggtcccaggtacagctacattgatcaatttgcagagcagaacaccatccctgatcagatcaaaaagctggtttccagacgggtcgattggcaagtacttcctcagaaatgggtcttcgcggagataagtgttgatgtgcgccacgtaggacgatttctctgcctgattgagattgtgcagcagcgtagtggtgctggacttgaggaacgacgatgaggtcttgccacccccaccaccagcaccaccacctaccttggcactcaccctcgcctgcagattcagata

SEQ ID NO: 38020 - DNA, 546 bp, Setaria italica
  Peptide Sequence Number=SeqID_103994
atgcctaattaggcagcaggcaaacacataatatgacatcatcaaaactggtcaagtaggatgtgtataccacaaaggtggagatacaatacatgacccctaaaaaatgaaagggaaatacgtacacatcaggatccataaacagtttatatagggattcaccaaataaagggcagcaaggagtaacctatatattgaagaacacggcaacatcaaatctctttggccgagcattcaccttttttcgcaatagaaggcacatggagtagctcttttgcattgaacattacatccagaaactgttaaatagaggaatcaaaacaactacacagtaacccataaaataaaatacgggaaataggataagaatatttgggaaccagtgatcgcataattcataggcaactaagaatgaaaatgtctggtatatcatcagcaaagatagttatatgcgtattataacatctagctatggacatatagcagggataaaagaaaaacaccatggagcttacataaaaaatagatataaagcaaggtagatac

SEQ ID NO: 38021 - DNA, 851 bp, Setaria italica
  Peptide Sequence Number=SeqID_103995
tgcatttggctccaagagacataaagaacgatacggttgaaagcatctgacgaaataacctgcagagaagggcatataggatttcagtcattaggcatagcacggataaatcattttacttacacactgaaagtaaccagtttgcttaattaggcagcaggcaaacacataatatgacatcatcaaaactggttcaagtaggatgtgtataccacaaaggtggagatacaatacatgcccctatatattgaagaacacggcaacatcaaatctctttggccgagcattcaccttttttcgcaatagaaggcacatggagtagctcttttgcattgaacattacatccagaaacttgcaagcacggggggcggcctgctggcacaagcgcacaacgacgctttgccgaggtcgatggcagtgcggcagatgtgctcgggcttggcggccatcgctggagcaggcacctggcagctcctgggagggcctcctgccgctgcaacgtcaggggcgccagaggacagggtgcaggtgagcgacggctcgcgacgttttccccaccggcggcaaaggatcgacgggctccttctgctgccgctgctgccgttggctctccctctcctttaactggctggcgtctgatggcagggagtgggcggccggatttgagatgagggatgggagaaaaggaccctgcacaccggcgacgcctctgcctcgccaagcacgagcggccgcaccgcccgacacacggcgcaccaagatggggcgtagaacggaagcgggagacttgccgcaacagctataggaggagagggaatcgagggaggaggacgcgacaggatggatgacg

SEQ ID NO: 38022 - DNA, 642 bp, Setaria italica
  misc_feature (633)..(633): n is a, c, g, or t
  Peptide Sequence Number=SeqID_103996
tgatcatgctctgatagaagccgttcatattgtcctctgtattcagagagctgaccttgtagatgctcattggccttctgaagtttctccataacctcaccattgttgtttttttaagttgtttccatctcttgctgtaaccctgaaagatattcctccattgttctagccattcgttcagcttcaatacgcatcagacgctcgtcagaagcttccttcttgaatattgcagcttgttccattgctttttgaaatttatgcaaatcattttctgattggaaatttcccagcatctcttttaagtcctgaagctcaacgtcaccaccattagccctcttaatgcctgttgcacatcttcttaaaccatcaagaacttccagattatttgggtcacacttcaaaccctctagataagttgccagagcattttcgtaactttccatcaggaactgagctttagctttacgcaggtatccttttagaaaagttggatccagttcaacacatttctccgcatcctcaagaccatgggggaaatctccaagatagatgtggcattgagctctgttgctaaacgctctcgtctcctttgggttcattttcatagctcgagtgtagtgcattgctgcttcntggtatttc

SEQ ID NO: 38023 - DNA, 737 bp, Setaria italica
  Peptide Sequence Number=SeqID_103997
gccgtcggcgtcgtacacggagagcctggccctggcgcgggccaggtcgacgtcgtcggggacgatgatgatgttggcgcactcggcgtcctgcaacaacagcaacatcaggcccaccaccaccacgacgggcgtgttcgcggaggagatgctgacgccggcggagtccttctcggagctgtcgaggatggggagcgccgccggaggaatgatgaaggtgagcctggaggaaatggcgcgcatcgaggaggagcagcgcttcatcgagagggagatggagaagggtgtcgtctacatcctcggcgaggccgaggtggtggcgcgccccaactcgtcgctgctcaagaagatcatggtcaactacgcctacgccttcctccgcaagaactgcaggcagggagagaagatgctcgccatcccaaagtcgcagctgctcaaggtcgggatgtcatacgagatctgaacatctactttgcttgatccatggattgttcctggatgctttgctccgtcgttgatccaaatggtagcatagtaggtagttgcaggcgtctgggcagattgatttgttgatgctacattacgctacactatctagatagtactccctctgtccaagtccttttagcttttctagacgtatagatctagacgtacagatattattatgcatctagacgacgcatggtatatctaaattcataacaaagtctctaaatcttctacaaaaaaaaaaa

SEQ ID NO: 38024 - DNA, 2816 bp, Setaria italica
  misc_feature (1)..(25): n is a, c, g, or t
  Peptide Sequence Number=SeqID_103998
nnnnnnnnnnnnnnnnnnnnnnnnntttttttttttttggttcatgagcaaaattatcatggcacaagacatctaacattgcaagctgtttcgagactagtgcaactcaggatacatcatcaattgcacaagaagggagcagcagaatccatgtagcgacctgaaactagctacattattcacccccattcgatatacattattggaactaggagcagtccatgaacgtagctaattattcgacctactagactcacagaagctgattcatgagacaggtctccctcccattcgagcaagtagctagacagcaagacagtccttggggtggccaaggcagagcgacaaagagccattccgtctagtccatggggcgttactgcttgccagcgccgaggactaggcaccggtactctcccagagcccaaatcgggaagatgttcctgtactgggagtaactgatcatgcagttcttgttgaagactcctatgatctcttgttgaggaaattctccgtcctctgattgcaagttgatcaaaaccttcgccgctctgtgcagaggtgttggatctctcgcagcctgtcctgcgccaatcagtgccagcatggcccaaccagtgttcactgcatgagctcgcttgcctttgagattggtgtaaacctggtcttgagacgacaaatagctttctccccaaccaccggaaggaagctcttttgataacagaaattcacatgcctttctgattgcaggactgctctcaaatgtcctaccagcagcaactaatcccttcacaccaaaccaagtgccgtaggtgaaacaaacagcccaagagccataccatgagccgtcgcttttctgaatactctcaatgaaactagcagctttgctgatacagctgtctacctctttcctgcggtgcccagggtagagctttctgaatgatgtcagggcctgaatcgctgctgatgtacattcaacatacgggtaatcaatcacaatgtccccaaaggtctcagcaggattaataagctccaaccagggataagaccttgtgagctcatatgttgcaaaaccaccattatcattcatataagacatcagacaactgacagcatcataaaattgattagcttccagcgattcaccaacaatttcaggagaaatctttgataacaataatgaggccttcagtccttctgcagtacaatccgatataggccaaccatgatcggcagtagagaatggccatgcacctttagatttgtggcggtaccagtcatccagatttccagggcagtcgtcacgaacctgtgaattcttaaggaagttgtgtgctagtttaagggtggtaccaaactcttcaatgaggttggtagccacaatggcttgaactgtgaaagctgtatcccaaagctggctgccattataaccctgcatcttcatgccatcttcagcgagccacaagtaatcatagattcgtggaatgtggagtttgaaggcctctgagtttggatcttcaatccagcaagcaagcatatttaataccttgtttacaggaccaatgcaaatgtatcgagtgttctcatcttcatagtgaacatgctgcatgacagtttccagagctttctccctcaatttgctcccaggccaatgcaacattactggttcaacaaatttatggagcgtggcccataagacatcttgaacgaatgggtgtggatagtacagatcttccttagcacattgattgcgggccatgtcccaatcaatcttgctgtaagggtctttgaagagttcctttcttaattccaacacaagcggcgtgattcggccgacaaacctcttcccataaatgtaacacatcggcaaatacaccatccgacaatgacaccacatcctccctggatgaaatggcaggagatatggtagcagccatacttctggtggcaccgggttgttaccagaccattcaaacacaccaagtaccgagagccaaaactttccccatgatgttatatatgttgctccaccatggtctaaaatccagtttcgacctttctccatggctccatctccactatctggtccctctccaagcaacctcaaactaacataggtcagtgctgagccaaacatagtacttgggccctctatgtgcaagccccaaccgccatcttcattctgatgattataaagatatcggcggatctccttctggtgttctgatgataagacagtgttcagtgctccactcacatacaatgttatgatcaagcctggcataaggaacataggaccaccataatccccaggccagtgtccatcatgtgcttggagagtagaaaaacggctgattgctcttttcaatgtagtcgatacggcttcctccgtaacatcttcgttctcatccagcttgattgctggaaggtccagcttaagaggattttctttagcaaactggatgcgcatggggaggtcggcgctgtgcttgaggtcgtgcctccgctcggcgaaggccctgcgcgcggcgtcgacggcggggtcgggctcggcggcggcgtcgaactcccagacctggcggccgacgtggccgttcttcgtgcgcagccaggggtccccgcccccctccgcgatcttcagccgccacatctcctcctccttcccccccgcaatgcagcagtgccggcggcggaaggggagtggcgcgagatcccgatccgcggcccggcccgccctcgtgcgcgcgctgcgtggctccccgcgctcccctcctcactcaggtgggtggacgcagctgcctggctcgtgaggcgac

SEQ ID NO: 38025 - DNA, 262 bp, Setaria italica
  Peptide Sequence Number=SeqID_103999
gtaacacaagcacctgagcgctcagacaggtcggaatggcgctcgccgccgccgtcctcctcttgctccctggcattctcttcacagcgatggcggccacgccgtaccctcacggccgcggcggcgacccgctcctcggcgcgtccaagaagtacgagggcagctccgacctggtggacctccggtaccacatgggccccgtcctctccgccgcgccgctccgcctctacgtgctctggtacgggcgctgggaccccgcgca

SEQ ID NO: 38026 - DNA, 2699 bp, Setaria italica
  Peptide Sequence Number=SeqID_104000
aacctccgaaaaaaagggaagaagccgaaccgataccatctcaacagatcactcaccgcccacaacacttacatgagatgagcttaacaatctcaaatctataaacagttttgagcaccgggcaccgcatatttccagccaatgaacaacaggaacccacttacaatgtggggcatagaaggcgacgcttaatgtacactacaacaaaaaattctgaaggctatctcctcgctgaattcccatgtctttggctgcggaagtagctgagaagagcttgtgccttctctctcgctcgcggtgtccctgactgtgaaagagcgaccagagggggcaccgctccctcttgaagaactatactgcaaaatctgttgctgtttgtacaaagctgaagcaacgcggcagcagcattctccttgcctcttgcagaacccaactcaacaacttcaacgagggctggaatgccacgtgcctgcccaatcgcagtcctcccttctggtatcgtagcaaggtttgccaacacagccacagctttgtcgaccattccagcagcaggatccatcagatcaaccaggtgcctcacggcgtcagcttgcacgatgcgagctttgttctcatgaagtatggacaagttaaacaatgccgtagctgcatctttctttcctcgaggggtgccatttcctagcaagtctactagaggcttgatcgcaccagatcgcccaatcctcatcttaatttcttcaataactgagagactgaataaagtagctgctgaattctctttagcttcagcgttcccagtctcaaggacgtgaatgagaggattgacagcgtcagcatttgcaatagcaattttattgttgtcattgatcgacagattcaaaagagctgtcacagcatgttcttgggttttggcatctggcgagtgaagaagaccaaccagcagatttacagcaccacagtttgcaatgacaatcctgttctccatgttgtgcttagctagaaggcgaagctctgatgctgctgatctctgaacatctaaagaatcacttctcaagtcctcaatcagcttccgaacctgattctcaatggcagagagatcactccgtgcatccatcgatgaggaagatataattctggggaaacccctatcagatgcttgccgtctaataaattggcttctaggggtcagtcttggagggattaaaggttccctttgaggaacagaagatggcacaggtgcaccgccaccatctgtaacttctccagatgcatcgctactgtaatttgtcctatcacttggaacccttgtcaccccattatcacattccccatcaagttgaccactatttggaagactgccattcattgaagaactggccatgttgtcctgcatatccctatctaaattagaagattgaaatgcttcctctgtagactgttctgaagtttgtccaatcgaaccaccacgtcttccttccaaactagactctcttgcttcagggcttgcaagtgataaccttgaaatatctggtgcagaaccatttgcattttctgaagtttgacttgtcgagacctcatgaccagaacggctgggatgcacatgagagttctgattggcgacactctggggaggagacgctccattcaagtttctcaaatacacatcagcttctggtgatccaggaatattagcccttgagatgacactaggatgtagaggactgccacctgcggcattcaaatcctggagggaggaggcagctgcaggaaagttcagcttcagggatttcataggatcaggtagcctaatgtcatgcgattcacaccagttagctatcaaagccttcacagtataattaggaattaaattggagtgaccaagtctttggcgtgttttcgggcagatagtaaaaccctcatcaagccacaacttgatataaacccgctcataggtctgaccagacgctacaataactggatcagacatcagttccaaggacagtggacagcaaaaatcagcaggaataggcaccccgttgattagcagctgttgtttttccttcagaaggcgatcatgcatatggttgaccagtggaatcatctgctcagctagatccagttcttcacgattctcacttcgtagtgcccttgttctgagattctcaagggaaacagcttccatgtacaattccatgtttgttgacaggctcaataaacctgttagtttcaacagattctcagaactcactgtgcttttctcagcaagctccatggcagcatccttaactagatcaaacatatgctcataatttatgtcctggagtttctcaatacacgtgcaggcacagccagtcagagaaggcaacagagaattagccagctggcacagctgaagggaacatccctgaatatctgatattactgactcaatttgccaaccgaaatatatcttgctggtagtctggtgccagtttccaataaggcctgaagcttcatggatagcagtgtcaagatctcttaggacctcattgagttgctcttccggagacttgcaaagatcttcaagaagggagttcacgatgcttgagatatcatacacattctggcaatacttctgaataggcttgggtctcacgttagagccatcagatgttaagacaccaagacgggagatactattgagcagagtgcgtcgggag

SEQ ID NO: 38027 - DNA, 1668 bp, Setaria italica
  Peptide Sequence Number=SeqID_104001
ttttttttgcacataacgaactctcaagttctgagaggcactacaaactaaagaatcacgaactgttgcgttcaaaaatgtacaattgctaactactcgtacaagattctccttttgtctggctcgttattggagttgattgatatttttacaaagctagccagtattcctgtaacatacaacgacacttctcatgttaacagtcagcagcaataggcaataaacttcttgccgcttgtaaagcttttctcgacggcgtgcagctctgaagagataaaacagtctccagctcttccggctttcatagagtgaagtaaaccggcggcggatggacaatctccatcttcgacctcgtgacgttgccagtgagcacactttccgacatggcctcgtcggcctggaaaggctgcacctgcgcgatcctctcggggatcgcctggctgccctccactcgagcaaggacctcatagtgcgctctcagattcttgggcttcgtcttccactccgggaagttggaccagtccgtctctcccttaacaagcttcttctccaccgcgaatgccatcttgacataggtttgcgcggaggctcgcgccttcaccagcttgaatgtcccattctcgcctgctttctttccaaggaccgaggccaaaagctcctcaaatccctgcaggctaccatctgatccgttcagtgacaagagaggccacaatgcggtattgtgtggttcatcctcgtcttcagtgacagcagggattgtccctgcccgtgaggagagctccacttggcctggggccaaccttttgagcttgagcttgtcgttcggagacttggaaggagtagaggataaggaggttgggccctcgatgcgaagagagagcaggggcttctgattagaccgggctgcaccacgtagggcttgtgcaatggacagtaagctagaggggcggcccttgtaagtggtccggttgagaggaagcggtagttcaagtggcaaccggaggctcacagccctggcacccttcactgttaccactgcaccatcagacagaacaactttcttcaaggttcccgcatccacatcatgcggtaatgcgagcctgacatcgtcgccgtcctggatccagagctccatgggcccggcgagctggaatggcggcagggtgggctcgacgacgctccctttccctgcccgccagatctcggcaagcgccgtgtcgtcggcgtctgcctgggagcggaagatggggaggtcgacgaagtcccagcgtttgacgtcctcgagcaggcgcaccggcaggaccttcctgccgacctcgatgtcaaactcgtacgataccgcgtgccccaccagcgcatcccgcacgtcgaacccggacaccttgagcccctccgcctggaaccccagccccttcacgatcgcgtccctcaggtccgagatggccttcgggacggggggcttgggcgcggccgcggcctccggcttcacgaggccgcgcgccgagccggccacgaggaacagcgccagcggcaacgcgaggagtcgccatcgagctcgagcggccatggctgctgaaaacttgcccttcactccgatcgattcagcccgaattccccccttccctgctgatgtttcttccggcgtgaggccgagaggagttggatttg

SEQ ID NO: 38028 - DNA, 686 bp, Setaria italica
  Peptide Sequence Number=SeqID_104002
ttttttgttgtaaatcatgcaaaattctttagataactgtgtacagacgaaacaaatggtaaaaaccactaggctgttcctacttagttcccaatctctgcttggagattgagtactttgtttttttaactagctttgtgtactcgctaccatcatttccaacccaaaatttctacacccaattagcctcccaatcagctattactacatattgttgaacataatcaatcaaactgaggagtggcctcgccgtcgccgtcaccgtcgccggcggctacacctcggcgcaccgccgcggcgcgaaccccagccggttccccttcaggtcgtacaccaggtggaagttctgctgctggaagttgccgatgatggacatgccggagcgcggggtgcccagcaccgccaggcacatgacgtcgtcgtccagccggatgaagtagttctccgccgggaagtcccacacggcgccgtcggcgaacgccagcgtcagctccggcacctccggccgctccacgccggacacgttgtagcacgggttcagcaccgggaagtcccggatcagcgggtacgacctgcccatgcgctccatgaacgcccgccggatcacctggtacgtcggctcggcaaagtagctcaacgtcgtgccggagtcgataatcgtgccgccggacccgtcttggacaccg

SEQ ID NO: 38029 - DNA, 1365 bp, Setaria italica
  Peptide Sequence Number=SeqID_104003
caaaaaccaaacagacgtgatatctgctgaaacaatacaaaagcatgatctgtgtgatacttctgttgtcaaacaatgagggcataaactaaacacatcaaaactcaatgcaggaaggtgcagcacggtctaagcaacatttgcccggaaaaatgggcagccggacactgagtatttacaatgccatgtcaacaaaaactcacagcatggatgaaataggcaagataggatgacccagtacatgagggaaacttgctatctgtacctcgacctgctataactgatggacgcaggagcgcactcgcacatcatcaatcgtcgaagaaagggagagaacaccatacaattgctgtacaaggcgaagcagtacaagtggtccttccctatcggctgttctcaggcggtacggttgtcttgcttactatgcccttgctaaaatagtctgcgatcacggaaaacccatccttcgaacccctcaactgcctgaaaaacaggtcatggtccctggcgttttgttctagcttctgctttgcctccataacagatctatattcaggtgcacattccgggcattctttttcattgtccccaaggcagcggaggtggaatgaatgcatgcacatgaaatggacagctggaagatcaagggtgaaagtacaagcagtacacttgctgagttggaaaactttcgcgtttgtcttgagatcttcaatctcccttttcatcaattccgtctcctcctgatacttgtcaatggattttctgtcatcttcaattaactttgattcttgctcaagtttgcgagcaatgtaatccttgacaactgagagcgtcaagcacgggttttttgatagtgtctgtagcacaacaatgggaggcacaacatcctccttttcaatgtaggtcaagacctctttaacttctttagaacaatcttccccaagctccccaaaatacttcaacaggtcaccccacagagatggatcccctccttgagatgagtcccccagcttcttgcagcatgcaattaaaccttgatgatcatgagcttgcttgtaacaactaataacttctttgtaaagttttagtttctcatatagaaagagcaatccatctttgaatgcatgtgtattacaaagaataagagcaaggtcaacatcatacaaaggatcttccatctcagatgtccaagcagacttgagtaatgcaagccctttccttctcctatcaacaatattctttgctattttagtatcttcttttccaagatttgctttctcccttgttcctgacttataaccatttgcagtttctttaccttttgtctctttgttattgtgatgattagagcctattttctgtgag

SEQ ID NO: 38030 - DNA, 586 bp, Setaria italica
  Peptide Sequence Number=SeqID_104004
ggatggcggacttggtttgtcatggaagaacggcacggattgctgcacatgggaaggggttgcctgtggcacagatgggaccgtcactgatgtctccgtgacatcgaaggcccttgaagggcaaatctcagcatccctgggcatgctcaggggcctgctgcgcctcaacctgtcccacaacttgctgtccggtggaatgccgtcagaactgatgtcgtccaacagcatcattgtcctcgacgtcagcttcaaccgtctcaatggagaagtgcatgaactgccatcgtcgacccctagccgacctctgcaggtattgaacatctcgaccaacttatttacagggcagtttccatcaactacatgggaggtgatgaacaggctggttgcactcaatgccagcaacaacagctttactgggcagatacccagccatctctgcagaagctcgccagccttagctgtgattgcactctgttataaccaactcagtggccacatttctcctgggcttggtaattgctccatgctcaaagtgctcaaggctggtcacaatgccctcagtgggccacttccagatgaactcttc

SEQ ID NO: 38031 - DNA, 307 bp, Setaria italica
  Peptide Sequence Number=SeqID_104005
ctgtcttgaaacttctccagttttgagatatcaaaaagtacccaagatttttacaatggtgttggtaatgcagattctgactcaggcagcgactctgaaagcgaatctgaaaaagtgggcagcccagcaaagcttgcaaaggggcctaagaaacctgatcagctggtggagcaaagaaaagagtgacgttattagtccagctgatgtcaactgtcctgctgatattgtgggactccgtgaagaggatagttgacatcagctggactaataacgtcactctttcttgctccaccagctgatcaggttt

SEQ ID NO: 38032 - DNA, 449 bp, Setaria italica
  Peptide Sequence Number=SeqID_104006
ctccatctcaaggacttggaggttatcattaatttctacagttctctccatctcctgtagggcctggcgagcactgtagaaattaatgataacctccatctcaaggacttggaaatgcttggaacagccacagcagaacatattgtgagctctgttgatgagactagtccagagcactcccaagattgcatgcctggttttcttccgggatctgtcaatccgttggaacaacttggattgttcatgaaggcagatgaggaggaggatgacgaagagccgagcagtgttcccagtgttaaagaagcagaggaaggagagatcaattgatggtgctgtgttggcttccgtgccctttcaagggcaagaggctgttgccaacctattcatcctccaggctcgactcacatcagcagcaccaaaactgatggctctcacacaccagtttagaa

SEQ ID NO: 38033 - DNA, 463 bp, Setaria italica
  Peptide Sequence Number=SeqID_104007
cgagagcagaatcagcaggtgaaatctgagccttctgagaacgaagctgtgaatgtttctggccttagccactcgtctacaaatccttgcaaaggtggcgagcctatcgaggaggatgtggatatctgtggcaatgcctcccaatcatgttagacaaagatgcacaactcaggagtaacaagtgcgttagtccaagtagttccagcagcgaatctgaatcatcttctagcggtctgtgtctcacagtgtttatctgcatttattactattattatagacattcttgtataatgaaaatgccggtttccttcccaactctattgtaaatcctttgaaaacatggttattatcacttcacgtttttcttttttaatatgttagtatcatatttctatgttagttaaaaaactctgagaagtgagtggcaaatttggcatggaacttaaaagttagtaggtagtct

SEQ ID NO: 38034 - DNA, 446 bp, Setaria italica
  Peptide Sequence Number=SeqID_104008
tttgtgccgtccaagatgtcctcgtctgagcgtcggtatcttcggaagagattccgggcagagcttgattccgtgcgagatctcctcaagaagccagcgtttgcagcccctgctcctgtgagtcgggcacctgcgttgtcttcctcggctgcccctcgagccaagaagctgcaccgcgggaccaatgtcatccgtggtgcaaagggacggttcttgcctacgaaaccccggcctaacatcagcagcaaaatctgatggacttgtgtatgagccagattcgagcttcttttggacagtaccaagatccattggggtcttgataatgtcaaagtaatcaggaatttgcagcttcacgacatcaactgggatattgaatatatgactatatttctgagtcatgagcttcttcaaaatagcttcacactgcttaaacactgcagcttcaa

SEQ ID NO: 38035 - DNA, 583 bp, Setaria italica
  misc_feature (10)..(10): n is a, c, g, or t
  Peptide Sequence Number=SeqID_104009
atatgagacngttgagcagtctcagcgcactaagaatgattgaagaggatagtgaatcaaagcctgcaccagagggggaaaactcaaaacccgatacgcaagtttcaccggacaggctcttgcgagcagccgttttgaggagccgttacgctgatgtgattgtcaaagctcgtggcattctgagccagggtggggacaagcaggaggaactggaaaagctccagaaggaaggtaaaaggcatatccacctgaattgttgctgctagttgttccctccctccctccctccctcaagcgttgtttttttcattatttgtggatgcagagaaagcacggctgttggctgaaggcaatgcagccatggaggctcgtagagctgaagccgaagccgaagcgaagcggaaacgggacttcgagagggaaaaggctcgccaggccctacaggaggtaagtggaaacctcatctacaagtaatcgtgatttcctgtttttgccattttgctgaaaaattaaatccaatatgcagatggagagaactgtagaaattaatgataacctccatctcaaggacttggaaatgctt

SEQ ID NO: 38036 - DNA, 3104 bp, Setaria italica
  misc_feature (3042)..(3104): n is a, c, g, or t
  Peptide Sequence Number=SeqID_104010
aaaggaagaaaaaaaggaataagcaagcagcacggagacgactcgactcgagcggcgaggaggcggaaaataaaaaagaaggataaggcgaggcgcgaccgggcggccaccgcgctcccagatccgttcttctccagcgcagatccagctcgccggcgcgccctcgcctggacgctgtcccctcgcgcccggatcccgtccttggggtcccagctccttcagatccagcgttaccagatccgtgtcccgctggcgcctgggcatatgacaccgacggtcctaatggagtttgggcagcagaggcccataaaacggggctatgaggaaatggccttccggggcgtggcggcagccgcgcctcggggctactcagagactgttggggagtcggaaggtgcagctggcagccctgttcgtgttgattccgaggtctcggcagcgcccaagcgcaagtgcatcagcctgaacagcgatggctttgacgtgaagcgggagatctttgtgccgtccaagatgtcctcgtctgagcgtcggtatcttcggaagagattccgggcagagcttgattccgtgcgagatctcctcaagaagccagcgtttgcagcccctgctcctgtgagtcgggcacctgcgttgtcttcctcggctgcccctcgagccaagaagctgcaccgcgggaccaatgtcatccgtggtgcaaagggacggttcttgcctacgaaaccccggcctgaaccttctgtggagttatctgaagctgcagtgtttaagcagtgtgaagctattttgaagaagctcatgactcagaaatatagtcatatattcaatatcccagttgatgtcgtgaagctgcaaattcctgattactttgacattatcaagaccccaatggatcttggtactgtccaaaagaagctcgaatctggctcatacacaagtccatcagattttgctgctgatgttaggctgaccttcaacaacgcaatgacttacaatcctcgtggccatgctgtgcatgacatggccatccagctgaacaagatgtttgaaaatagatggagaacagttgagaagaagttggcttctgcagccattgagaagcatgttgatgttgacaaggctgactcaaagaggaggaaaactcctcccgtggaccgcagtgatgtgtcagtggagggtctacggcaaacagagcctgtaaagccgaagatgacagctgctgagagagaagcctttgggaattcattggcagaaatagccgatgatttacctgctcacatcgttgaactgctgcagcaatgcatggacagcaatacagatactgctggtgatggagagatagagattgatatccaggcagtcagtgatgacctgctattcgagctgaagaaacaggttgacaagtatttgcaggagcgagagcagaatcagcaggtgaaatctgagccttctgagaacgaagctgtgaatgtttctggccttagccactcgtctacaaatccttgcaaaggtggcgagcctatcgaggaggatgtggatatctgtggcaatgcctccccaatcatgttagacaaagatgcacaactcaggagtaacaagtgcgttagtccaagtagttccagcagcgaatctgaatcatcttctagcgattctgactcaggcagcgactctgaaagcgaatctgaaaaagtgggcagcccagcaaagcttgcaaaggggcctaagaaacctgatcagctggtggagcaagaaaagagtgacgttattagtccagctgatgtcaactgtcctgctgatattgtgggactccgtgaagaggatagtgaatcaaagcctgcaccagagggggaaaactcaaaacccgatacgcaagtttcaccggacaggctcttgcgagcagccgttttgaggagccgttacgctgatgtgattgtcaaagctcgtggcattctgagccagggtggggacaagcaggaggaactggaaaagctccagaaggaagagaaagcacggctgttggctgaaggcaatgcagccatggaggctcgtagagctgaagccgaagccgaagcgaagcggaaacgggacttcgagagggaaaaggctcgccaggccctacaggagatggagagaactgtagaaattaatgataacctccatctcaaggacttggaaatgcttggaacagccacagcagaacatattgtgagctctgttgatgagactagtccagagcactcccaagattgcatgcctggttttcttccgggatctgtcaatccgttggaacaacttggattgttcatgaaggcagatgaggaggaggatgacgaagagccgagcagtgttcccagtgttaaagaagcagaggaaggagagatcaattgatggtgctgtgttggcttccgtgccctttcaagggcaagaggctgttgccaacctattgatccaacaaagcgatcgcctctcgcggctaaatgtttgcctggtgatggctggacagttgcacacggtggatgctcaattgcttctaaactggtgtgtgagagccatcagttttggtgctgctgatgtgagtcgagcctggaggatgaaaatcaccttgaacatttgtaaaaacagagagatcttgtgcttgaaggaggagcactggaggtcgaggtcaccgtggacagctccaaagtgaacatatttatgtgcctagaggaaggtaattttttgacgccaccgcagaagagtgatggcaacatgataatacaaaaatgatgccgaactggtgaggttcaaatggcacattgtttgctgcaacacctctatttcaagtgggtttgctcagcggcttatagcagttctcatcttctgttgtttatttttttcttattttagattgtgtagttgcttcctgctgtaaatccgaattttgatgtagtgaaggaagttctagtttgttgggcatgagcgaaatgaactgctcttgcttagcatttacaggaaatgttgttttgcagatgcacgtccagtttttttgcttctatcttaacnnnnnnnnnnnnnnnnnnnnnnnnnnnnnnnnnnnnnnnnnnnnnnnnnnnnnnnnnnnnnnn

SEQ ID NO: 38037 - DNA, 496 bp, Setaria italica
  Peptide Sequence Number=SeqID_104011
gttgttccgtcttgtctttcctacgtactaatctaccggtctaggcggcagcttcaggtcgtggaggttggcggagacggagccccgggtggagaactcgaagacgaggtggaggccgcggtcgacgcagcatcccaggagcgcggacacgttggggtggcggacgtggcccaccgtgcccagctccgtcaggaagtccttctccttcttctcgtccgccgcggccgtcggcgccaggcgcttcacggcgacggcgcgcccgccgtcgaggacgccgcggtacacctcgccgtacccgcccttccccaccatgttgtcttggtggaagccatcggtagcctggtggagctcgtcgtaggagaagcatcgccaggtgggcttgtacggcggcggcgggtcggcgatttcggcgcactcctcggcggactcctcggcgttgctccggcggccgagggacaggagccgcttcaggctccggctcctgaggtagttcatc

SEQ ID NO: 38038 - DNA, 301 bp, Setaria italica
  Peptide Sequence Number=SeqID_104012
gcttgtttccctttatctttcttgatgtgtaagagctcagacaccaaagtattggcccaagattcctcacaacttcttgtatcatcaacaccatcttcagacatggaagtcaagctcggtgggttgcttcctttctgacttgatgcagaggtatcaatgtatgaatttgttgggctcttatataggttagcactagacatgtgcagttccaagctacggagcttacctgaagtcttagcacatatgtgtttgatgcctgtagctcgtggttgcattttgacaatgcctcttttaacatctt

SEQ ID NO: 38039 - DNA, 1223 bp, Setaria italica
  Peptide Sequence Number=SeqID_104013
ttaagtagtcgcggtcgccgccgtcgcctcccttcctcgcaccctcctctgctctgcatcgacccctctttcttcttcttcttcctctgcccggacggcctctacctggtggggctccacacccccaaccaatccccgggcctctgctctggccgccatgaattcctgctcccggggccttgccgtggacgacgggctgtgcgcgggcggggctctggcgcggccgtcctcatgcctgctcgtcgcttcctctccctgtagcctgaccaagcagctatagcgagcgagagcagagtgcatcggccgagttgaaattaagcaagccaaacctccctccctcgcgcagctcggcgcctccttcttgggcgcccaaggaagcgacttcggagtacagcagcaacagcaatggcgggagctggttcccagtgacgcgcgccatggatccccagccgttcgtgcgactctccgtcggccagctcggtctcaagctccccggcgggaacgccagcaaggcgtcctcccggctctgcgactgtgagatccggctcggcggtttcccggtgcagacggcgcaggtgcccctgatccactcgccggagttcaacctcgaccccttcaccaacgcggcggtcttctccctcgacgagtccgacctcaggtccctggcggcgccggggtgcttccgccccccacggccgtgcctcgaggtcgccgtctacctggcccgcttcggcggcgcgcgctgcggcgtcacgtggaggaagcggctcgtcggcgtgttcagggtggagcttgcgtcgtcgtcggagtggcgcgacgggaagcccgtgctgctccaccatggctgggctggcatcggcaagggtgcggcggaggccaggccggagctccacctcagggtgaagatggaggccgacccccggtacatcttccagttcgacgacgaggtcgcgctcaacccgcaggtcgtccagctccatggcagctcccggcagcccatcttcagctgcaagttcatccgcgaccgccgcaggccgtctcagggtgacgggcagtactggtcgagctccggcggtagcgaggagacggacatggagatggcgatgagaagggagaggaaggggtggaaggtggtgatccacgacctgtcggggtcggccgtggcggcggcgttcatggccactccgttcgtgccggcgccgggcggcgacacggtggcgcgg

SEQ ID NO: 38040 - DNA, 585 bp, Setaria italica
  Peptide Sequence Number=SeqID_104014
gccggactccgccgccgcctcgaactggccggccttcttctccggggccacgccgaggacgacggtggcctgggcggcgccgctcttctcctccaggtcagggtacatcttgctgcacacaagtagtcaaacgccaaatcttagcagctgtaaacaaggaactactacgaacagatcgattgttcatcagtcgactacacgcttgagtatcttgttaatcacaacgacgatcgagaagaacagaatgatggatcatggtttaatttccgtcaaattaagaaattaaaggagatcatggaatcttagaactatttgcaataagcatcagcaaagaatagaatgatggaatgatttcatttccgtcaaagaaattaaaggagatcatggaattttagaactatttgcaagaagcatcagcaaagaacagaatgatggagatgcatatgctactacttacccgcacttgcagctggagccgcagttgcagcttgatccgcagctgcaagacatcttcaagtcaagaagccgaaaaactcggtgtggatggagaagacaagttctttgagattgcttctgagacacgca

SEQ ID NO: 38041 - DNA, 379 bp, Setaria italica
  Peptide Sequence Number=SeqID_104015
ggccattcttgccctcgctgattgcccgtctacacctccaccgcttcgccggcgcccgcccgcgccgtccgaccatgggggtgctcacggctgcggagctcaactacctcgtcttccgctacctgcaggagtccggtttcattcatgctgcctttactctagggtatgaagcagggatccataagggtggcattgatggaaatgcagtcccacctggtgctctcatcactgttgtgcagaaaggcctccattacatagaactggaatcaaataccgaagagaatgatgaagaaattgagaaggattttgcccttctggaaccacttgaaatcatcacaaggatgttgaagagttgcaacagcttgtgaagaagagaaaa

SEQ ID NO: 38042 - DNA, 581 bp, Setaria italica
  Peptide Sequence Number=SeqID_104016
acaaaaggaatagttagaaagaagttagcaaacaagcttgtgaagaagagaaaaaagggagagatctcaaaccgaccgtgagaaggataagggaaaagagaaagaacgtaatgaggagcatgaacggcgtcctggaggtgaacgcgagagggatcgccatgacaaggaaaaagaacaggtgagggagaaagataaatctgaaaaagacagggagcatgagaaggaaaaggagaaagaaaagcagcatacagaacgtattgataaggttaagcatgaggaagattctcttgctggtggaggtgattaattacttcctgtttgttatattacccttctgataccattttccatggcacaacttttagcaaataatgagtatgcttgcatctttccttaaagaatgtttggtgctcgttaaaataagtactgtttatgttacaacatgaacaagtttccagttgatgtggaacatgtaatgcatgttcggacatttccctatgtaagcgtctattcatgtcctgcatgcttttaaagcaaagtttggtctttttatcagtcaaaaaatgtgatgctaataaaac

SEQ ID NO: 38043 - DNA, 2289 bp, Setaria italica
  misc_feature (2285)..(2285): n is a, c, g, or t
  Peptide Sequence Number=SeqID_104017
aaagtaaagaaacaaagaaaaaaggaacctaaccaaattaaacaataagaaactaggaaatacatgaggaagattctcttgctgcttttctttctccttttccttctcatgctccctgtctttttcagatttatctttctcttttcccttatcctgctcacggctgcggagctcaactacctcgtcttccgctacctgcaggagtccggtttcattcatgctgcctttactctagggtatgaagcagggatccataagggtggcattgatggaaatgcagtcccacctggtgctctcatcactgttgtgcagaaaggcctccattacatagaactggaatcaaataccgaagagaatgatgaagaaattgagaaggattttgcccttctggaaccacttgaaatcatcacaaaggatgttgaagagttgcaacagcttgtgaagaagagaaaaagggagagatctcaaaccgaccgtgagaaggataagggaaaagagaaagaacgtaatgaggagcatgaacggcgtcctggaggtgaacgcgagagggatcgccatgacaaggaaaaagaacaggtgagggagaaagataaatctgaaaaagacagggagcatgagaaggaaaaggagaaagaaaagcagcatacagaacgtattgataaggttaagcatgaggaagattctcttgctggtggaggtcccactccaatggatgtaagtgtaactgctcaggagatttgtagcaccgatgtgactgttttggaagggcacagttcagaggtgtttgcttgtgcctggagtccaactggttctcttctagcttctgggtcaggagactcaacagctagaatctggacaattccagatggtccatgtggttccagcatgcaatcatcccttccgggtgttcatgttttgaaacattttaaaggtcggaccaatgagaagagcaaggatgtcactacacttgactggaatggtgaaggtacactattggctacaggctcctacgatgggcaagcaagaatatggagtagagatggagagctgaagcagacattgttcaaacacaaggggcctatattttcgttgaaatggaataagaaaggagattttctcctaagtggaagcgttgataaaactgctattgtttgggacacaaagacatgggagtgcaagcagcagtttgaatttcattcagctccaacactagatgttgactggagaaataataactcctttgcaacatgctcaactgacaacatgatctatgtttgcaagattggggaacagcgtccagttaaagcattcagtggtcatcagagtgaagttaatgctatcaagtgggatccaactggttcctttttggcttcatgttctgatgactggacagcaaagatttggagtatgaagcaagataagtgtgtatttgattttaaggagcataccaaggaaatatatactattcggtggagcccaacaggcccaggaacaaacaatcctaatcagcagttgcttttggctagcgcatcttttgattctactatcaagctttgggaagtagagcaaggacgccttttgtacagccttgctggccataggcaaccagtgtattctgttgcatttagccctgatggcgaatacttagcgagtgggtccctggatcagtgcctgcacatctggtctgtgaaagaaggcaggatcctcaagacctacagagggactggaggcatctttgaagtgtgctggaacaaggaaggcagcaagattgcggcctgtttctcgaacaacaccgtctgcgtgatggatttcaggatgtagttcatccagtacggtagtgcatctcaggccaaaaacagggctagatatgtccctcccacggatgtgggaagggcggcattattagcttataatgtatacatcttaggtggctttagtttctccgtccatgtacagttttcttccggttgctctgaccagtgtagctatgttgtagtgcagaagtcttaacaggggtttagtcgtatggatggaaatgttttgctcatcatccttctgaacgcattgcagtcactggccggacttgttactccctccgtccttgatttgtcttttctagattcatgtttagatctaaaattaccaaaacgatctataattttgggccggagagagtacttgattagcatgttactgcacatgctgtagcgttgtacttcgattttgttgcctttttcatgatataaagtagcacagtttagactaggaaaaaaaaaaaaaaaaanaaac

SEQ ID NO: 38044 - DNA, 303 bp, Setaria italica
  Peptide Sequence Number=SeqID_104018
taaccatgaacatgaaaggatcacatgttggcttaggtacgaaaggtgattgcattattcaattcagccttctccgatccatcatcactagctaataaacaagatcatcactaccttacttgtcatttgtcacctccgatcctttggtctcaccgttgctcatcttggcttcagtggacaatgacgttttgtccttccctttgtcttcttatcctttggtttccttcgccgccttctccttggcttcctttgcctccgcctccgccttctccttggcctccgcttcctctttcgcctttgcgg

SEQ ID NO: 38045 - DNA, 2625 bp, Setaria italica
  Peptide Sequence Number=SeqID_104019
tttttttttttttttctttagaggaaagcaacaccagctcataaagctttacaggatgaatctttacataatgcattgaatacaagaaacattacaaatacacttaattgaacgattacaaaccatgcttgaacaaaatatgcaaatccaatgtgcgcaggaatcgttttaaccaggatcattgctgcatatatagctacaagagaacaaacattgcctcttcagtagagcgtgttgtaagtgtagagtgttgcagcgatcgaggctatgcagatcacaagaggtggcagaagcgtgacgttgaggaggaggtccgtgcctagataacctgctgcggtaattgtggcatctgcgattacacgggccaacgtcccagcctctgtcgagaggagtccgccattgtaggtccctcgggaaagcctcgacgacattactcgcgagagcaaggacagattcactccttcaagcacctcagcaaatacaaatgtaatgagagctgaaatgacatattgtggaatggagtagtgaggtgtgaaacgaaagctcgtgattataccaatgagaaccatgacttcagatgccaacaaaatttgcctgtcctcaaacaaatttgtaatatagcttccaacaatggcatttactggaagaactgttaatccaagaattgctagaaagatagcaacagcacttgtagaccagctaaaatagtacgtagtgacaacgcttgactcagagagtaaaatttccatagcatacttgagcatgaagtatatcaacagctgggccttcacggatggagtcagcaatctgtatgctgaagcaattgatgttgctggttcatgagagttttccgaggctacttcactatcgtcattgtcctctgagttctcatcctggtttcgttctctacctataagcaaaggttgagctaaaccttcctccaagttagtgtttccttggtgaccagattctgacgactgtttattgaccacacttttgctaaaatgttccggctccttgaatgtaagccacaaccacagcaagtaaataagccaagcaatgcacatgacccatccaggtaatgtgctctgattaaaattgagcgagtatatcttgaatttaatctggagaaaaccagcaagagcagggccacatgccatgccaagagcactagcactaacgaatccggcagaggcttgtagcctcatcttgagaggcacacagtcactgatatagcgacgattcactgctcttgcagaacctaacccgcaaagtagtcgtccaatcaggagaactatcagtgaattcagatcatatgccaatgcatatagcaggttcccgaaaaacagcataatactactgaatacaagaggtctgaaataggacctatttgaccaggcgctgaagtagactgaggagaacacttgagcgactgccattgatccaataattataccacagacagttgcagctgccccaaggcttactgcatagtcatcagcagttggcacaatgatatatgtgttcaccatataaaggaatgtgttcactaaattaagcatcagagacatgaaatggtagttttggtcatcaacaagatcctccgagccactttgtccatcttcctggacaataagtgcatgttgtcccaagaattgcataaaattcgtggcatgtgtaagtttctgtactgcatggtttacttggtctataatagggtccttcaaggtaactgccggatgatcatagattgatacaaaacttccttcatgatgttgcagatattcaaggttgcgtgataatgcacctacaacagctacgattcccacttgcttaaagacttgctgaagctgagaataaggatggtttgcgcgagtggtgacataataatctgtaaacttgtagccaaagcgcttatcaaatttctttagtatcttccgtacaccagtagcatttatatcgacaaagcggagaagctttataagatcaaacccaacttctctgtatgcatcacgtagctgagaaacttgtgatatatcatactgttccagaatagcagttcgttgttctcccaattcctcaatcctactggcaagacggccctgttgttgtagcagaaaaagcacgatcctttcaatctggtcatcaagaatccttgaaaactctttaagaacttgctcacgatctttcccaccattttgggtctgttcaacatattgctttaacattttcttcatcaatttgtaattgatgtagtatcctttccattcttctacttgatctaccatcaacctctttccaaaattaaccatcttgccgcttcaatagctgattctgaaacgtgattaatggcctttaatctctccctttatttgccttggacagtgactctcttcctctccggggatacaattagatgaacatcagcaaacacaaacacaacgcctgtacggaggcgccaaacctgcaaccaaggaccttctccttacacaggcactcaggcagtgcggcgaggagggcagatgtacggcggcggcggcgcagcagcagcaggccagcagcgagcggccggaggcgtgcaatggcgcacgcagctgctgtcgcgcagcttgctggggcgagtac

SEQ ID NO: 38046 - DNA, 1004 bp, Setaria italica
  Peptide Sequence Number=SeqID_104020
ttttttttttgttcgaagaggccaatatgcatttatgtatgtaatgatttgatagtgtacaaataattctttttttttaattctagttccacgtctgaactgttttttttttgttaaacgaatgtctgaactgttttcagttctccacacttcatctacgaccagtcgaccaccccgcgcacaatcttcacaccttattatgcgatcatggcagggtgaaattcatacacaacaacacgcatatgtacaagcagtccttcaaaagaggagagaagaaaaaacaacattacacacgctatgtacattgaggagcactcctaacagcccactgatcacttctgtgcgttaactccattgtcggatgttgtgccctggtcgagttccttttcaagctccttgatgacaggctccacagcagcgtcaatctcatcactgaccttgtcgatcttctcagtgactgcttcaaccttctctgcatcagtatccactacctcagcaatgtgctcaacctcttccactgctttctgcagagacccgtctttaggaagttgcttagccacatttgcagctagcttctctgttacctcagctacatgctccacaacctccacagtattctccacaaacccaactgtctcttcttcaagctgcctaactctgttgtagaatggcaccaccgtgtacaccacacctccaagaacccatcgtgcccagctaggaatcgctgaagagcctaaacgctgaccgccactgatggcggcggcggccaagtccgccgagacgatatccgagttcttgaggacaacccagcccgagtcgatgtcactcaaatcggcagcatccgcagcagggttctcccccttcctctggtcttcctgggcagccggggcggggctggggccgatcggctgcatggtgagggtcgccatggagggatggagcggagcgatggggatcgatttgagggaagccgatgaggagacgcttgattggattgagactgg

SEQ ID NO: 38047 - DNA, 1323 bp, Setaria italica
  Peptide Sequence Number=SeqID_104021
ggttcactgcataatgggtccatgctatgtttgtcacccttgtaggatataatggttaggtatttccgaatgaaagggagacctacactctggatacctggcactgaccatgctgggattgcgactcagttggtcgtggaaaagatgctggctgctgaaggtgtcaaaaggacagatctgacacgagaggagttcaccaaaaaagtctgggagtggaaggagaaatacgggggtactatcactaatcagattagacgattgggcgcatcttgtgattggagtcgtgaacgtttcactcttgatgaacaattgagtcgggcagttgttgaagcattcgttaggcttcatgataaagggcttgtataccaaggatcttatttggtcaactggtctcctaacctgcaaactgcagtatctgatttagaagtagaatactctgaagaacctggaagtttgtacttcatcaagtaccgtgttgctggtgggaccagggatgattttatgactattgcgaccacaagacctgaaactctatttggtgatgttgcaattgctgttaacccagaggataagcgttacgccaaatatgttggcaagttggccattgtacccttgacatttgggagacatgtccctattattgctgaccggtatgttgatccagaatttggaacaggggtgctaaagattagccctggacatgatcataatgattatcatattgctcgaaagcttgggctgccgattctcaatgttatgaacaaagatggtacgctaaatgatgtggctggattatacagtggtatggatcgattcgaggcacgagagaagttgtggtctgaccttgttgagactaacttggcagtaaagaaagaaccttatacgcttcgagttcctagatctcaacggggtggtgaagtgattgagcctttgattagtaagcaatggtttgtcacgatggagccattggctgaaaaggccctccgtgctgttgaagaggggcagttaaccattcttccggagagatttgagaagatatataatcattggctaacaaacataaaggattggtgtataagtagacaattatggtggggtcatcgtataccagtttggtatattgttggaaagaaatgtgaagaagactatattgttgccagaactgaagaggaggcactcgcgaaagctcaagaaaaatatggaaaatcagttgaaatatatcaagaccctgatgttcttgatacttggttctcaagtggtctgtggcctttcagcacgcttggttggcctgatctttccaaggaggattataagcatttttta

SEQ ID NO: 38048 - DNA, 787 bp, Setaria italica
  Peptide Sequence Number=SeqID_104022
cccctttttgggcatcgaactatcgaggcgaaggcgacgaggcggagtggagtacctcggcggcggggcggccgggatgaaggtgcagtgcgacgtgtgcgcggccgaggcggcttccgtcttctgctgcgccgacgaggccgcgctgtgcgacgcgtgcgaccgccgtgtccaccgcgccaacaagctcgccgggaagcaccgccgcttctccctcctccacccttcgtcatcgtcgtcagcagcgcagacgaagccgccgctctgcgacatctgccaggagcggagggggttcttgttctgcaaggaggacagggcgatcctgtgccgggagtgcgacgtgccggtgcacaccgcgaacgagttgacgcggcggcacagccggttcctgctcaccggcgtgcgcctctcgtcggcgccggtggactccccggccccatcggagggggaggatcaggaagaagaggagttggagaacagcggcagcccctgcaacgccgactcctgcagcggcggcgccggcgccaccaccgcggcgagcgcgagcgacgggagcagcatctccgaatacctgaccaagacgctgcccgggtggcacgtcgaggacttcctcgtcgacgacgcgtccgccggcgcctgctccgacgacgccctctatcagggagagcaagggcagatcggcggcctgctgcaagaagcttacacgccgtggacggggcgtgagcagatgctcgccgacgtcgtcgtcaccaccgacgagcgggccagccgggagcggtgggtcgcg

SEQ ID NO: 38049 - DNA, 385 bp, Setaria italica
  Peptide Sequence Number=SeqID_104023
aaacaaacctctcctcccttgttaattggggttgcaggaattcagaactccatgggccaaggagctgcgaaggcgaagcaagggggtgaggaggcggcggcgcagaagacggagaagaaggatgagaagaaagcgcacaaatccaatgacgcagacgagctcattgcgttcatgaagaagcactacgacgagaaagtgaaggacgtaaaaaccttcgatgcattctaccacgccatttacgagctcatcgagaggttttgcgaggagcgtgggcagttgcagtacaggataccaacaaaagcggagctcgagaaacagtactataagggggacccgacggacacggcgaacctgacagcttgatatatttcactacaactaacta

SEQ ID NO: 38050 - DNA, 362 bp, Setaria italica
  Peptide Sequence Number=SeqID_104024
gtagtgcaaggttgcaatcactcatgctagctcgctaagaatatcaatcatgtactgccgttgggagaggaagagacctgaggggtgtgctggacatgcatgccaaggaaatgatgtaactgaccgagatccttcattgagaattcttgctgtagagcgtcgatagtgcgcttcaggagagatgttgaagaggtagtcaggactatatcatcgacatatagcaacaaataaatcagatcatcatcgaggcggtatatgaaagaagaggtgtccgacttggcttcaacaaacccaagcttaagaagataggaagcaaatctgctataccaagcccgaggcgcctgcttgaggccataaaagtg

SEQ ID NO: 38051 - DNA, 833 bp, Setaria italica
  misc_feature (787)..(787): n is a, c, g, or t
  Peptide Sequence Number=SeqID_104025
ctccgacgccgcggccgtctccgccctacatcccgccgtacgtccctcctacgccgccctacgtcccaccgtacgtgccgccgacgccaccctacgtcccgccgtcgccgccgtacgtgcccccgaacccgccggcgggtcggacgtgcccgatcgacgcgctgaagctgaacgcgtgcgtggacgtgctgagcgggctgatccacctggtgatcgggcaggaggcgaggtccaagtgctgcccgctggtgcaggggatcgcggacctggacgcggcgctctgcctctgcaccaccatccgcgcccgcctgctcaacatcaacatctacctccccgtcgcgctcgagctgctcatcacctgcggcaagcacgcgccgccggggttcaagtgcccgccgctctacgactgatcgatgacgagaggggtcgtcgaggagatcgatctcgctccccagctagctacatacatatggcgccgcctgagctcgccggcatgcgtggtggctgggatcatgcgccgcaggcggcggctgccagcgtgtcgaggatttgtgtcgtcataattactttggtgttcttgagtgtgatgtgcttatattatcatcagatggagaactttctcggtctcctcctgagtgtgtgggttaatcagtcgtcgatgcgtgtatcatgtcgctcgatcttgtctagcttctcgcgacacgcagcggcaagtattgggttcgttttcagaaactgcttggttcatttccatagctttatgatgaattctacattaaaaaaaaanaaaaaaaccttaaaaagagaactgccaaaggcacacaggggatagg

SEQ ID NO: 38052 - DNA, 226 bp, Setaria italica
  Peptide Sequence Number=SeqID_104026
tttctttattacttgacaatttcataattgcatgaaatgacttggaaagcatccgaataacacttatgacctctgaaactgtaaaagtaatttcttctgatagtactttgtggtgtttgaaatttgaaatagttaattgctattgttgcatggatttttgaagaataaatatgatctatttcctgataatcacttgagttaattgctattgttgcatggatttttt

SEQ ID NO: 38053 - DNA, 663 bp, Setaria italica
  Peptide Sequence Number=SeqID_104027
tggtaagggtacgtaagtaagtacgttacggtcgtcgtacaactgcaagaagtgtcgggaagacggtagacgaagacgaccgaccccgactacggtctggtcctgggaccggacggaagacgaagtagtagaagacgacgaagtagaccgccaagcggcaccgcggccaggacggcgagatgcaggaggaggcggcagcggacgtcgacgtgctccgctccgggaggggcgagtgccggtggaggtgcgtgcgccgctaccaggaccagccgttgctgttgcaggagtgcatgacccagtgccgcagccgcgagcagcagggcgacggcgtcgaggaggaggagggcgagagcgtcggcgcgtacaactgcaagaagtgtcgggagcggtgcgaacgccgccccgccggggactggcaggagaagcagcgctgcctcatggagtgccgccgccgtgacggccccatcgccgacgaggaggaggacaacgaccgctgcaggcagcggtgccagcaccaccacgactacgacaggaagcagcagtgcgtgcgcgagtgccgtcgccaccaccagggcgtcgccatcggctacaccatcgcgtcgtcaatcagcatgagggccatcaggagagccgattgcttccacaccaacgggcacgccgaca

SEQ ID NO: 38054 - DNA, 479 bp, Setaria italica
  Peptide Sequence Number=SeqID_104028
tactaacgtaccgtcttgtctaggtctagtcggttgtcctagtctacctaccgcaacttaccggcgtcgccgcggccgccatggtggtggcgacgccgacgaggacaacaactactgctccgaccgctgccagcagagctgccagcgccacggcgaccgcaaggcgcagcgccggtgcgtgagctggtgcgagcgccaggagggctgccgccgccgcgacggccccatcgccgacgacgaggaggacaacgaccgctgcaggcagcggtgccagcaccaccgcgactactccaggaggcagcagtgcgtgagcgagtgccgccgccaacacggcggcggctgggaggcggcggtggccggcgccgtcctccaggtggtgtgacgcgcatggcgtggcgcacagcgagtaaaataaaaacggccgtacgacgtgtcaccggccgccgccggcgtgcctacgtggctagctggcctgcgga

SEQ ID NO: 38055 - DNA, 1110 bp, Setaria italica
  Peptide Sequence Number=SeqID_104029
aggacgaagtagaccggtaggaaggtagacgtagacgaccgcttactaagaccgacccgcggcggcgacggccggcgccgcggaggaggtagcgtccgcggcgggagaggtggcggcggccgaggccgaccgggaccccaagggggacctgcagtggtgcaggatggggtgccagtggcagtacggcaaggaccagggccggcggagcgagtgtgagcgcgagtgccgccagcggcaccgcggccaggacggcgagatgcaggaggaggcggcagcggacgtcgacgtgctccgctccgggaggggcgagtgccggtggaggtgcgtgcgccgctaccaggaccagccgttgctgttgcaggagtgcatgacccagtgccgcagccgcgagcagcagggcgacggcgtcgaggaggaggagggcgagagcgtcggcgcgtacaactgcaagaagtgtcgggagcggtgcgagcgccgccccgccggggactggcaggagaagcagcgctgcctcatggagtgccgccgccgtgacggccccatcgccgacgaggaggaggacaacgaccgctgcaggcagcggtgccagcaccaccacgactacgacaggaagcagcagtgcgtgcgcgagtgccgtcgccaccaccagggcggccgcggcgacgccgacgaggacaacaactactgctccgaccgctgccagcagagctgccagcgccacggcgaccgtgagacgcagcgccagtgcgtgagctggtgcgagcgccaggagggctgccgccgccgcgacggccccatcgccgacgacgaggaggacaacgaccgctgcaggcagcggtgccagcaccaccgcgactacgacaggaagcagcagtgcgtgcgcgagtgccgtcgccaccaccatggcggccgcggcgacgccgacgaggacaacaactactgctccgaccgctgccagcagagctgccagcgccacggcgaccgcaaggcgcagcgccggtgcgtgagctggtgcgagcgccaggagggctgccgccgccgcgacggccccatcgccgacgacgaggaggacaacgaccgctgcaggcagcggtgccagtcacctaccgt

SEQ ID NO: 38056 - DNA, 822 bp, Setaria italica
  misc_feature (739)..(822): n is a, c, g, or t
  Peptide Sequence Number=SeqID_104030
tttgttttacgttttcgtttcttttattttggtttcgtttggttcgttcttactagtcgtaaccgcgccggtgcgtgagctggtgcgagcgccaggagggctgccgccgccgcgacggccccatcgccgacgacgaggaggacaacgaccgctgcaggcagcggtgccagcaccaccgcgactactccaggaggcagcagtgcgtgagcgagtgccgccgccaacacggcggcggctgggaggcggcggtggccggcgccgtcctccaggtggtgtgacgcgcatggcgtggcgcacagcgagtaaaataaaaacggccgtacgacgtgtcaccggccgccgccggcgtgcctacgtggctagctggcctgcggagacaaccccacatcgaccgagcactgcttcccgtccgtatatacacctgtatatacgcgcgcgtatacgcctcgctgtacgtagaggaggcgtaggaataaagagcggtggatgcgtgcgtggcgatggctctccgcacgagagagctgtcttgtaccgcatgcgatgatgtaaatatggggatgtgagggacctgctatgtggtggcactgttctgcctaaatcatgctcgaaacgtgtgtagcatgttgagaggctatgtgtggtgttaaataaagtgaacgttttctgaaaaaaaaaaaaacaatttttaaaaaaaaaccacacaggggataggtctgaacaaaaaaaaaaaaaaattacnnnnnnnnnnnnnnnnnnnnnnnnnnnnnnnnnnnnnnnnnnnnnnnnnnnnnnnnnnnnnnnnnnnnnnnnnnnnnnnnnnnn

SEQ ID NO: 38057 - DNA, 297 bp, Setaria italica
  Peptide Sequence Number=SeqID_104031
taaaactaaaactaaaactaaaccttaaagaaacgttaagaaaggacaacgacgttacttagtaagacccttaggggacaagacaacaagacaggtggactgggatcccgtggccgtgttggccagggtgaagtcgtagcggctgttgctgccccaagggctacaagaacgcgtgcctcaacgtcaaggagtagtgggtgggtttgccgtcgcgtgcgcaggctttgacgagccacagtgctcgtgtaatgtaaggggagtttaggcataatcaaagagaataaaagttaagcggac

SEQ ID NO: 38058 - DNA, 434 bp, Setaria italica
  Peptide Sequence Number=SeqID_104032
ttcgttatttgagatggcagcatccgctctgaaccccttcgtcgccgcctgcctcgtggccctcgtcgtcgccgcaggtgcggcgcggatcgtgccggacactgccacgatggatccggacatgctgacgacgaggccgtgccaacaagacaaacaacgggtggagcggccacctctgcaaggacgtgtgcggggctagcgggttcagccgctacgacttcaccctggccaacacggccacgggatcccagtccacctgctgttgctgccccaagggctacaagaacgcgtgcctcaacgtcaaggagtagtgggtgggtttgccgtcgcgtgcgcaggctgtgacgagccacagtgctcgtgtaatgtaaggggatttaggccataatcaaagagaataaagttaagacggcatcgtactgtgtctcgaaact

SEQ ID NO: 38059 - DNA, 413 bp, Setaria italica
  Peptide Sequence Number=SeqID_104033
tttctttactttaaagtttctttccagcacacgttccatcgcagagcagagaacccaaccaaccgattgagatggcagcatccgctctgaaccccttcgtcgccgcctgcctcgtggccctcgtcgtcgccgcaggtgcggcgcggatcgtgccggacactgccacgatggatccggacatgctgacgacgaggccgtgccacagcaacaacgggtggagcggccacctctgcaaggacgtgtgcggggctagcgggttcagccgctacgacttcaccctggccaacacggccacgggatcccagtccacctgctgttgctgccccaagggctacaagaacgcgtgcctcaaacgtacaaaggaagtaagtagggtagggtttagaccgtacgacgttaagaacgtaactaaa

SEQ ID NO: 38060 - DNA, 461 bp, Setaria italica
  Peptide Sequence Number=SeqID_104034
tgaacaatctaagtctactgacaatcaagctcatcgcagagcagagaacccaaccaaccgattgagatggcagcatccgctctgaaccccttcgtcgccgcctgcctcgtggccctcgtcgtcgccgcaggtgcggcgcggatcgtgccggacactgccacgatggatccggacatgctgacgacgaggccgtgccacagcaacaacgggtggagcggccacctctgcaaggacgtgtgcggggctagcgggttcagccgctacgacttcaccctggccaacacggccacgggatcccagtccacctgctgttgctgccccaagggctacaagaacgcgtgcctcaacgtcaaggagtagtgggtgggtttgccgtcacgtgcgcaggctgtgacgagccacagtgctcgtgtaatgtaaggggagtttaggcataatcaaagagaataaaagttaagcgg

SEQ ID NO: 38061 - DNA, 598 bp, Setaria italica
  misc_feature (581)..(581): n is a, c, g, or t
  misc_feature (586)..(586): n is a, c, g, or t
  Peptide Sequence Number=SeqID_104035
tctactaaagtcttctattcgtctagtagtctagtagtaaccctaacctaaccgtatttgtagtattggtctagtctattccgcttcttgaaccccttcgtcgccgcctgcctcgtggccctcgtcgtcgccgcaggtgcggcgcggatcgtgccggacactgccacgatggatccggacatgctgacgacgaggccgtgccacagcaacaacgggtggagcggccacctctgcaaggacgtgtgcggggctagcgggttcagccgctacgacttcaccctggccaacacggccacggggatcccagtccacctgctgttgctgccccaagggctacaagaacgcgtgcctcaacgtcaaggagtagtgggtgggtttgccgtcgcgtgcgcaggctgtgacgagccacagtgctcgtgtaatgtaaggggagtttaggcataatcaaagagaataaaagttaagcggcatcgtactgtgtctcgactacatataatgttcggtgttgaatctacctagtatcagaatcagactatgacgattgacaacctagaaaaaaaaaaaaaaaaactaagagactncaganacacagggagta

SEQ ID NO: 38062 - DNA, 584 bp, Setaria italica
  misc_feature (547)..(584): n is a, c, g, or t
  Peptide Sequence Number=SeqID_104036
agtagtactaccattctcattttaaaaaccacaagcacaaagctcatcgcagagcagagaacccaaccaaccgattgagatggcagcatccgctctgaaccccttcgtcgccgcctgcctcgtggccctcgtcgtcgccgcaggtgcggcgcggatcgtgccggacactgccacgatggatccggacatgctgacgacgaggccgtgccacagcaacaacgggtggagcggccacctctgcaaggacgtgtgcggggctagcgggttcagccgctacgacttcaccctggccaacacggccacgggatcccagtccacctgctgttgctgccccaagggctacaagaacgcgtgcctcaacgtcaaggagtagtgggtgggtttgccgtcgcgtgcgcaggctgtgacgagccacagtgctcgtgtaatgtaaggggagtttaggcataatcaaagagaataaaagttaagcggcaacgtactgtgtctcgactacttaaaaaaaaaaaaaatagaaatactaacctaagtaataacaaaaaaaaannnnnnnnnnnnnnnnnnnnnnnnnnnnnnnnnnnnnn

SEQ ID NO: 38063 - DNA, 1383 bp, Setaria italica
  misc_feature (1306)..(1383): n is a, c, g, or t
  Peptide Sequence Number=SeqID_104037
tacggtaactaatactaaccaccctaagaacggaacaagaacaacggaacggaacaacaaggacatcgcgctagcaagctttgtcttgggttctcactcactccgaccacgcacattccactagtttcgatcccgtccggtcgtgcgcgcggagatgcagggggcgacgaccaagcagtcgcgcaaggccgaccgcgccgcggcgagggcggcggaggggagcaaggacgacggcgacggcgccaaggctgtggacgtagtgaggagcgacgacgccggcgacaataagaccgccggggacgtgaagggcgagctgggcgacgccaagggcggggccgtgtaccacggcatgtcggccacggaggggaaggactcccagaccatcgtggcgctgcagtcgccggtgaccgtgatgcgccccgtccgcggcgacctcgaggagcacgtccccaagccatatttggcgcgagctcttgcggtcccggacatctaccaccctgacggcagcacggacggacacaggcaccaccacatgagcgtgatgcagcagcacgtcgccttcttcgaccgcgacgacaacggcatcatctacccctgggagacctaccaaggatgccgcgcgctcggattcaacatgatcatgtcgttcctgatcgcgctcatcgtgaacgggaccatgagctacgcaactctgcctggctggctgccgtcccccctgttcccgatctacgtgcacaacatccacaagagcaagcacggcagcgactccgggacctatgacaacgagggcaggttcatgccggtgaacttcgagaacatgttcagcaagtacgcgcggacctcccccgaccggctcacctacagggagctgtggtcgatgaccgaggggttcagggaggtgttcgatttctacggctggttcgcggcgaagctggagtggacgatcctgtacgtgctggcgcgggacgaggaggggtacctgtcgcgggaggccatgcggcgcgtgtacgacggcagcctcttcgagtacgtcgagaggcagcgcgcgcagcacgccaagatgtcctaggcttgtccggggctgcatgcggctgcctctctgcccgccttccagttcgagctgcacgcgtgcgtgaaatgggcgtgtagctgagactcggacatgtcactctgctcgccggcgtctctggatgtaaataatcaccaaacgtgtcgcaacatgtcagcatgtagccgtcgtcgatcggtcaataacaacgcaggagttcgcctggggctttttccaggttcccaaaaaaaaaaaaannnnnnnnnnnnnnnnnnnnnnnnnnnnnnnnnnnnnnnnnnnnnnnnnnnnnnnnnnnnnnnnnnnnnnnnnnnnnn

SEQ ID NO: 38064 - DNA, 582 bp, Setaria italica
  Peptide Sequence Number=SeqID_104038
tttgtactaagtactaattacaatactagactagtaactagtaaacatgatgattcagcactttattacttgttctatggttcttcagcagcaggcaccgccaccagcgatggcgcacggagtggtgcagtaactgggcagtgaaatgccacacatggccggcaggttcttggcacccagagcagcatgctgaagttcataatactcggagccttgcagcatcatctgctgtactgtagtttcaaccaagctgcagacctcctggcatcgatggagcggctccacttgcctgagctgctggcagcactgctggtgcatcgccatgcagctgcttggctgccatgtgcgcgaccaggcgtagggccaccctgtgaccgcgggacacctctgcctgaggaattcaccacatgggtgcaggcttccatagtagcctggctgctgcgcagaggcgctgctagctgcgagagtgaggagagcgagcacgatgaagatcttcatgccggctgctcctgtaggatgctactttgatttggtttctatgttatgtgaaggaattgatactagtcggtctgagtcgatcat

SEQ ID NO: 38065 - DNA, 363 bp, Setaria italica
  Peptide Sequence Number=SeqID_104039
agcgatgcagctgccatttatgtggaacacagcagccatgatgatgcagccaacctattggaggcagccctttcctagctgtgcctgctagatatatatatgtcttatgttgtacccaaggaataaagttcacataccatcgtgtgtgaatcaccagaaataaattattgagtatgatacatatattgtggtgaaaattcaaataccatcatatgtgtttttataaaaactactagcagccatgatgatgcagccaacctattggaggcagccctttcctagctgtgcctgctagatagatatatatgtcttatgttgtacccaaggaataaagttcacataccatcgtgtgtgactcaccag

SEQ ID NO: 38066 - DNA, 525 bp, Setaria italica
  misc_feature (497)..(525): n is a, c, g, or t
  Peptide Sequence Number=SeqID_104040
atgataagctcattctcaccaatgatgggaatgggttccatggtcccgtgcatgcaatcttgcatgatgcaacgggcattcaccataggaggctcacccttgctagcaatgttgatgcagcaatcaccattggccatgctgcagcaacagtgttgcatgcagtctatgatgcaaggaatgatgtcaccacagtgccactgtggtgcaatgtgccagatgatgcacctgcaacagattaggatagcgatgcagctgccatttatgtggaacacagcagccatgatgatgcagccaacctattggaggcagccctttcctagctgtgcctgctagatatatatatgtcttatgttgtacccaaggaataaagttcacataccatcgtgtgtgaatcaccagaaataaattattgagtatgatacatatattgtggtgaaaattcaaataaaaaaaaaaaaaactaaaagaactacaaccaaaaaaacacagggagtagnnnnnnnnnnnnnnnnnnnnnnnnnnnnn

SEQ ID NO: 38067 - DNA, 395 bp, Setaria italica
  Peptide Sequence Number=SeqID_104041
tacctttggtactttggtatggcctgtgcgcgcagaacgcgagggagaagatgccggcggacaggggagcaacgggggaggacgccgagagggtcgtgtctgctgagatacggaacaagctggacatggcgaccacgctgggcggtgtggcggaagcggtgaccaccgcggcgaggctcaaccaggagcgcccgtagcgtactgtgtccgttttaacatggaaggctggaagtgtacgaaagcacgtacgtatgcaggagtctactcttgctctctcttgtaaaaagatgtgaatatcgctgaatgtagcggcaataagccttttgtgaattcaatgtctgtctccatgtcaaacttcgtactataccagaactgaaatacagaacgagacacag

SEQ ID NO: 38068 - DNA, 309 bp, Setaria italica
  Peptide Sequence Number=SeqID_104042
aggaacaccttctcgtcgtgcctggcgttgacgctgaagtagaggacggcgagaaggtgttcctggtgggcagcaacggcctgctgcggcagatggaggaggaggaagaggccgagcaagaaggcgggcagaagtcgaggggctacaagcaggtgaagtcccgcatcagggagggctccgtgatcgtgatcccggcggggcacccgatgacgctcgtcgccggcgaggtactaactaaccttcgtccgttccttcttactttcttagttcgtttctttaacgtttcctttaggttttcttttactttta

SEQ ID NO: 38069 - DNA, 461 bp, Setaria italica
  Peptide Sequence Number=SeqID_104043
tcgtagtagtcccggtagttcgttttctttctagtcgttctttcagtcgacgacgtttcttccaggccgcgttcaacactcgccgtgaggagtggtagcaagtgttcgagaagcagagcaagggcgagatcacgacggcgtccgaggagcagatacgggagctcagcaggtcctgctcgcgcgccggccgcagccacggcggcggcgagtccatgtgggacatcaagctgtgcagcctcacgagcaagaggccgctccactccaacaaccacggcaggcactacgagatcaccggcgacgactgcccgcagctccgggcgctcgacatcgaagtcggcctgacaaacctctcccgcggctctatgacagcgccgagctacagcacccatgccgacaagttattcgtcgtcctggatggcaagacggactaacttacgaagaataggacgtagacccgacaa

SEQ ID NO: 38070 - DNA, 481 bp, Setaria italica
  Peptide Sequence Number=SeqID_104044
cgaacacaccagtgacaccaccaccaccgatgggcgccatgaagagatcgccgctggtgctcctgctcctgctctccctgctgtgctcctcgctcgcgctcgcgtcgtactcgtacgggggacgccggcggcgaagggcgctccggctccgggcggccgtaccacttcggcgaggagaggttccggcagtgggcgcagtcccggcaggggcggttccgggtgctggagcggttcacgcacgagctgctcgaggacgccgtcggcaactaccgcgtcgccgagctggaggccgcgccgcgcgcgttcctgcagcccagccactacgacgccgacgaggtcatgttcgtcaaggagggcgagggcgtcgtcgcgctgctcgccagggggaagaagggaagtaccttactagacgtacaaaggaagggggaacgttacctacgtacaataccccgaccggacgaccgtacgtactaactacgga

SEQ ID NO: 38071 - DNA, 2050 bp, Setaria italica
  misc_feature (1924)..(1944): n is a, c, g, or t
  Peptide Sequence Number=SeqID_104045
cagggagtgggggcagagaggaggaggaagaggccgagcaagaaggcgggcagaagtcagggggctacaagcaggtgaagtcccgcatcagggaggggctccgtgatcgtgatcccggcgggggcacccgatgacgctcgtcgccggcgaggacaacaacctcgccgtcctctacttcagcgtcaacgaccaaggacaacgaacgaagaaaggtaagttaacctaaggtaagggaacaaagaaacaaaaaggaaactaaagaaaccaaaactaaacgaagagatcgccgctggtgctcctgctcctgctctccctgctgtgctcctcgctcgcgctcgcgtcgtactcgtacggggacgccggcggcgaagggcgctccggctccgggcggccgtaccacttcggcgaggagaggttccggcagtgggcgcagtcccggcaggggcggttccgggtgctggagcggttcacgcacgagctgctcgaggacgccgtcggcaactaccgcgtcgccgagctggaggccgcgccgcgcgcgttcctgcagcccagccactacgacgccgacgaggtcatgttcgtcaaggagggcgagggcgtcgtcgcgctgctcgccagggggaagagggagtccttctgcgtcaaggagggcgacgtcctcgtcatccccgccggcgccgtcgtctactcggccaacacgcacggctccaagtggttccgcgtcgtcatgctcctcaaccccgtctccaccaagggacgcttcgaggaattcttccccatcggaggcgagagcccggagtcgttcttcagcgtcttcagcgacgacgttctccaggccgcgttcaacactcgccgtgaggagtgggagcaagtgttcgagaagcagagcaagggcgagatcacgacggcgtccgaggagcagatacgggagctcagcaggtcctgctcgcgcgccggccgcagccacggcggcggcgagtccatgtgggacatcaagctgtgcagcctcacgagcaagaggccgctccactccaacaaccacggcaggcactacgagatcaccggcgacgactgcccgcagctccgggcgctcgacatcgaagtcggcctgacaaacctctcccgcggctctatgacagcgccgagctacagcacccatgccgacaagttattcgtcgtcctggatggcagcggctacttcgagatggcgtgcccgcacctgtccagcggccggtcatcgtcgccgcgccgggagcgtgggcacggcagcagggagtggggcagagaggaggaggaagaggccgagcaagaaggcgggcagaagtcgaggggctacaagcaggtgaagtcccgcatcagggagggctccgtgatcgtgatcccggcggggcacccgatgacgctcgtcgccggcgaggacaacaacctcgccgtcctctacttcagcgtcaacgccaggcacgacgagaaggtgttcctggtgggcagcaacggcctgctgcggcagatggacgaggcggccaaggcactggcgttcggggcggagaaggagaaggtggaccgcgtcatcggggcgcagagcgacgccgtgttcctgcgcgggcccaacagccgcagggtctcgtccgcgtgaacaggagcggacgatcgccggcgttgacgctagctcgtggccaccggctcgaggtcatgccatggtgagggagggtaagagtggaataagttagctgccgcgcgtgtacccgcgggtggcgtcgtgtacgtacgtgtagaggagggtgctactgttgcgcgcgtgcatgcatgtgttgtacgggaatgtgtatgtaatcgaacctacctacgtcttgtacgtgaaataatgcaatgccactttcttctctctttttcgagacctaaaaaaaaaaaaaaaggcacacagggnnnnnnnnnnnnnnnnnnnnntcctacctaagggtacgtctttcgtaggtaatttgttcgtagtaagtctagtagtcttaagggttcgttaagttaaaaatttaaaaaacttaaaaaaaacgttaaa

SEQ ID NO: 38072 - DNA, 927 bp, Setaria italica
  Peptide Sequence Number=SeqID_104046
cttccttgttcagagtcttccagaatgtatacgttgaacccatgttcaggaccttagttgcataaatcttccatgtgtagcattcgtagatgcgctgaagcccagcagtggacaccttgttccagtagcttgggtcttccttgcacttttggaagaaatctgcaatcttgttgcttgcctccctgccgttcatggggtttatgtggaaaccggagacaccatccactatgatctctgccggtcctccctgatttgtggcaaaggttgtcaagccgcagttcatcgcctcaatcactgtcagcccaaatgcttcataaagtgcaggctgaacaaatgcaccctttgtatcagcaatgcaacggtacagctcaccgttgcggacacggtcagtctgtgccttgatccagcggatctgacctttaagctggtacttgtcgatcaggttgtgcattttgttgatctcttcaatctcttcccggtccttggactgtgatgcctccagcaggccagcgacaacaacaaggtttaccaggtccctcagcctcctgttctggccataccactccactagtccagtgatgttcttcaccttgtccagccttgccattgagaagatgattggcttgtttctgtctgccagataccctatgtgttcatcggtgtcctgcttgctgtagagcaactcctcaatctgtgggtgtaaatctgtcagccgcttctgcttctgagtgaaggggaagtagatggactggtcagcaccgggtgcagcaatgttgaactttggatcaaagacattaatgcccgtggcgtagcggcaaagccctggcattgtgaacgcgtagtggtgctcatattggccaggcttctctttgcttccagcaatttcttggtatgtgctggtgatgatgaagtcactggtgttcatgg

SEQ ID NO: 38073 - DNA, 229 bp, Setaria italica
  Peptide Sequence Number=SeqID_104047
cttggtgaagtctgatattctgaacatggttagctatgtaattcctaccaacttggcagtttcagtgcttctttgagagcaccggcgtctcggagaaatatggagcataaggagtaataatcccatagtcacatccaacagtgcggagagcacacacttccttacgatccatatcatatgatatcaatttatagtcccatgttcagaatatcagacttcaccaagtagc

SEQ ID NO: 38074 - DNA, 390 bp, Setaria italica
  Peptide Sequence Number=SeqID_104048
aaattgatatcatatgatatggatcgtaaggaagtgtgtgctctccgcactgttggatgtgactatgggattattactccttatgctccatatttctccgagacgccggtgctctcaaagaagcactgaaactgctacttggtgaagtctgatattctgaacatggttagctatgtaattcctaccaacttggcagcttggataaatctgcttgaattatatcataggctttgttggtgcttggatatatttattttcatttttttagtccaattaacactgctagccagttgtttttatgtgtgtaagctagcttcatatgctagttgtctcaatgattgtacttcaaaatcataatcattggatctttttttttccaaaaaaaaaaac

SEQ ID NO: 38075 - DNA, 436 bp, Setaria italica
  Peptide Sequence Number=SeqID_104049
ctcgcgtagcgccactacggaacgtatgcgcaggggacgaagccggagggtggcgatggcaccgcccccaaggcggccggggaggaggtggtgataagggcgccggtgcactgcgacggctgcggccggaagctagacgccgctccctggagcgcctcgactgtaacatactcctctgcttgagctgatgtggttggcgatttcatttccgagcgctttggtggatttgaataattgcaggggttggagaggtgagcgtggattccaacaccaacacggtggtcgtgagaggaccaaaggtggtggagaacccggcggagactgtgaagatcgtggagaagaggacccggaggaaggcggtgctgctgagcccggcgccggagaagctgccgccgccggctgtgaaggagaccaagaaagattgattgggtaacta

SEQ ID NO: 38076 - DNA, 1442 bp, Setaria italica
  Peptide Sequence Number=SeqID_104050
gttgtctagcgtccaaagtaattgcgcatacgaacagcaccagccgatggctaagcgccactacggaacgtatgcgcaggggacgaagccggagggtggcgatggcaccgcccccaaggcggccggggaggaggtggtgataagggcgccggtgcactgcgacggctgcggccggaagctgcgccgctccctggagcgcctcgactgggttggagaggtgagcgtggattccaacaccaacacggtggtcgtgagaggaccaaaggtggtggagaacccggcggagactgtgaagatcgtggagaagaggacccggaggaaggcggtgctgctgagcccggcgccggagaagctgccgccgccggctgtgaaggagaccaagaaagatgatgggaacaaggacatgtacgagctaccggaaattaacatgaaaatggtggtgatattgaggataaacttgcactgcgacgcctgctgcgaggagatcaagcggaggatacttcgaatcaaaggtgttgaggacgccgtgccgcacctgaaatcctcgcaggtgatggtgaagggggtggtggagccggcgacgctggtcggcttcatccgcagctgcacggggaggaaagccgccatcttcagggcggagccactggacccgctgccagcgccaaagtcaccaccaccggaagccgagaccaagaaagatggcccaactgacaacacgggagagaagaaggacgcgcaagagaacggtaagaacgaagagccacgggaggaggaggagaagggaggaggagagccagaggaggacaagaagaggacgggcgacgacgaccgcgccgccgccgaggaacttcatcaggaagcccatgcaggtgagggtgaaaagcacgccgccaccggcgacggggttgtgctggaggaccagaagaaggacgaccgcctgttcgccgctcctctcccggccggagtcttcacggtggcgcctgagacgatggccatcagcaacgtcaccccctaccaccactactcctacccgtcatcgtactatgcttacgcgcacccgtcttattattaccagtgccagtatccgcagccgtattacccggcgtactcgtacgcttgcggccatggcatgtatgggtatccgccggaggcgttcaccgaggagaacccaaacgcgtgcgccatcgtttgatgtggtaaagggacaaggagcttgtaatatatactccgttcttacatatataacgtttaggacaagaaacttgtcctaaacgtcatgtagttaggatggaggtagtacttgcgtatattcggtcaatacttaatgtcaatacttaatgaatatatgtaatacttcttgaggctacaacaaaaaaaaaactaaaagtcaagtgccaactcacaccttttaagttacgttagttactaaaaaaaaaaaaaaa

SEQ ID NO: 38077 - DNA, 957 bp, Setaria italica
  misc_feature (1)..(107): n is a, c, g, or t
  Peptide Sequence Number=SeqID_104051
nnnnnnnnnnnnnnnnnnnnnnnnnnnnnnnnnnnnnnnnnnnnnnnnnnnnnnnnnnnnnnnnnnnnnnnnnnnnnnnnnnnnnnnnnnnnnnnnnnnnnnnnnnntttttttgactcttagcagatcctgaacactgcgttttattcctcattataaacatgacatccaaactagacatccaccgtgcagtacatccgatccgccactccgaccaagaagaaacgcacttcttactacacagcaggcccccggacacatgcacgtacaaagcacaacatatcataacgactagctacggcgacccgagacgctacggcagcgaccgtaggcagccatgccgcgccggcggtggtcgcgcgccgccgccgtcccgcgctgccgtccacgtacgcaggacgcgcgcgatccaccgctcgcgtatatgctccttcctcaagacccctgcgcctggtcgatgcggtgctgcgccgcatccttgatgtcgcgggccttggacgcgagccgcgccttggcgtggtccagctggtcggcgcccggcgggtgcttgcccgtcaggtacttgtacatccacgagaacacggagagcgcggccacgccgaggccgccggatgtgacgaacccggccgccatgagagccagcgtgatggccgccggcaccagcaccgggctgaagatcaccaacacgggcgtcgccacggtgagcgcaatcacggtgccggccaggatcagccccgacagcaccagcatagacccgccggcggtcgcggcagtcgccgccttcagggccgtcatcatggcgctctgcctctgctgcgtctcgccgcgctcgccgccccggtggaggtcgccgtagcccccgcctcctcctcccatcgcgccccggtgctggtcggccatgataagataatctaccgcgtgcccacgctgcccaagagcgctacagccgctccgtct

SEQ ID NO: 38078 - DNA, 558 bp, Setaria italica
  Peptide Sequence Number=SeqID_104052
ctcgccggctgtccctcatgaacctcacccgtgtctccaacaccaccggcgacgaccgctacgccaccttcgacgcctggttcaggtcccccgtcctcaacagggtcaaggaggtccatttccagtacctgtacaggtacagagccgatgagctcgacccattgccgctgccagcgctgagattcaccgacctcacaatcgctagctacggcagatgccacttcccagataatcttgctggtgttatgtttcctaacctcacgcagctcaccctccatgatctcacaaatgcggagcgcacagtccatgacatgatttcagcctgcccacaaattaggagcctactgctcagaaacaacaaggggttccgccgcgttcgcatcagctccccaaccctcatatcccttggcctgtctgttggggagcatgatgatgagccagcgatggaacaactcacaatagtggatgctcccagcatggagaggctgctcatctttgacacagaggggggaccaattaacattcgtgtaattggtgctccaaatcttcgggtcctga

SEQ ID NO: 38079 - DNA, 193 bp, Setaria italica
  Peptide Sequence Number=SeqID_104053
gggaagtaacagcttcagtgtcaccaagaaagctagaatttaccaaggcaaatgagaagaaaacatttactgtgagtttaacttgggatgccaatggaactaagcatgctgaaggaagcctcaggtgggtctctgacaaacatgttgtgaggagccccattgtattattccatataacaagttgcagactcgc

SEQ ID NO: 38080 - DNA, 502 bp, Setaria italica
  Peptide Sequence Number=SeqID_104054
atcaatccaggtctagtatatgacactgatgtggagcaatacattttgtatctctgtggcctaggttacacagattctgaagtcgagataatcacacatcagaaaggtgtctgcagcaaaggaacaaaaatagcggaagctgagctgaactacccttcgattgcatcaagggcaagtgctggcaaacttgttgtgaaccgtactgtcacaaacgttggcgatgcgatgtcgtcttataccgttgagattgacatgcccaaggaagttaaggcgacagtgtctccaacaaagctagaattcactgaggcgcaggagagtaaaacatttactgtaagcttaatctgggatgctagcaaaactaagaatgctgagggaagcttcaagtgggtctctaacaagcatgttgtgaggagccccattgtaatattctaatgtaagatcatcatgatataacttcatgagagactgctacttattgtaataaatgttgagtttatcatag

SEQ ID NO: 38081 - DNA, 615 bp, Setaria italica
  Peptide Sequence Number=SeqID_104055
cttgatggttacacagatacgaaatgtactgctcttcatcaatgtcatagattagaccagtacatttcgtatctttgtgggcttgatggttacacagattttcgagttgagataatcacacatcgcaagggtgtgtgcggagaaggaagaaaaatctcggaagcagagctgaactatccttcaattgcagtgaaagcaagcaccggcgaacttgtcgtgagtaggaccgtcaccaatgtgggagatgcaaaatcatcatacactgtggacattgagatgccgaaagaagtaacggcatcactatcaccaagtgtgctggaatttaccaaggtaaatgagaagaaaacatttactgtaagtttaacttgggatgccaatgcaattaagcatgctgagggaagcttcaagtggatttctgacaaacatgttgtgaggagccccattgtaatattctaatgtaacctagtgaatcttggacttgtatgcgagtctgcaacttgttatatggaataataagcccttttaatgtaacctagtgaatcttggacttgtatgcgagtctggcaacttgttatatggaataataagcccttttgaaaccaacattaaaaaggg

SEQ ID NO: 38082 - DNA, 566 bp, Setaria italica
  Peptide Sequence Number=SeqID_104056
ccaagctttcaccaatggatctgacacgcctattagcattgcttgttcttgcaagccttctaggttgtgccacaccaactgtcactcgtcatgaaagacctagccgatccacatatatcgtacgtgtgcatcctccaccaaaattttcatctgatatgagctcgaccaaccttgagacctggtatagatcactcctcccaccgttagtgagtacatccaggtctgatacaccattcatccatacctatagggaagccattcttggctttgctgtgaacctcacaaaagatgaggcagagtatgttacgaagagacatggtgtccttacggtgtatgaagattaccttataccactcttgacaacccacaccccagaattcttggggctgcggtccaacgaaggggcttggagtagcatagggatgggtgaggggatcataataggtgttctggatacagggatagatgtttcacacagctcgtttgatgatgaagggatgaagccaccacccgccaagtggcgtgggtcctgcaactttggggatgtcaactgcaacaagaaattt

SEQ ID NO: 38083 - DNA, 1322 bp, Setaria italica
  Peptide Sequence Number=SeqID_104057
tggtcggtctagtatctattttttattttttaggtttacgtttccttttaattttttgttttaatttttccttttgtttaggtttattttagttcgttcttggccatggtacacacactgcaagcacggctgctggaagataccaataagaaaggacgacaaagtgtgcttggtagtgggaatggtactgcagctggtatggctccacatgcacaccttgctgtgtacaaggtatgcaacgatttcggctgttatggctctgatatccttgctggaatggaagccgctattgctgatggtgttgatatcttgtctttatcactcggcggtcgtccacaagccttccatgaagatattattgccattggatccttttctgccatgaagaaagggatatttgtgagttgttctgcaggaaattctggtccacttcccaagacattgagcaatgaagaaccatgggtgctgactgtgggtgcaagcacaatggaccggcaaatgaaagccgttgtgaagctaggcgacggccgctcatttgttggtgagtcagcctaccaaccatctaaccttgcttctttaccagtgatgtttgaacttgatggttctggaaacatgaccgggaaagtggttgcttgcgagcttgaaggctctcaagttgagattggtcaatttatcaaggataatggtggttctgggatgatagtactgggagctgagggtagtggccacacaacttttgctgcagccaatgtcctccccgcctcatttctgaattccccagatgctactgcggtcaggcagtacattaagacatccagcaagccaacagcctcaatcattttcaatggcacggcattgggaaccgctccagctcctgtagttgcttacttctcatctcgagggcctagtacagcaagccctggtattcttaagcctgacatcatcggacctggagtgaatgtcatcgcagcatggccattcaaagtaggaccaaatacagctgatggacatggtaaggtcttcaactccatgtctggaacatcaatgtctgcacctcaccttagtggcattgcagctattatcaagagtgcacatcctgattggtcacctgcggcgatcaagtcagccatcatgacaacagcctatgttgtttatgataacacaaagccgatccttgatgagaagctcaatccagctgggcatttcattataggtgcaggacatgttaactccttctccgcaggcacccttgtgatttgtgattatctcaacttctgactctgtgtaaccaagcccacagagatacggaatgttactgtctt

SEQ ID NO: 38084 - DNA, 2138 bp, Setaria italica
  Peptide Sequence Number=SeqID_104058
ttttgtttttattttttaccttttttgtttttacctttttactttttccttttgtttacttaacccttactactgaggtagagcgcaagaagaacaataggtagtaccttacggtgtatgaagattaccttgtaccactcttgacaaccacaccccagaattcttggggctgcggccagacgaaggggcttggagtagcatagggatgggtgagggaatcatcataggtgttctggatacagggatagatgtttcacacagctcgtttgatgatgaagggatgaagccaccacccgccaagtggcgtgggtcctgcaactttggggatgtcaactgcaacaagaaattgatcggtggtaggtcattattaggaggtcaatttcctccagaggatagagttggccatggaacacacactgcaagcacagctgctggaagatctgtagaaggtgcaagtgtgcttggcaatggaaatggtactgcagctggcatggctccacatgcacaccttgctatgtatcaggtatgcaatagatttggatgctatgcctcagacataatcgcaggaatggatgcagcaatcgccgatggtgttgacatcttgtccatatcactcggtggtaagtcagtgccattccatgaagatgctatagccattggtacattttctgccatgaggaaagggatattcgtcagctgttctgcagggaattcaggtccattatctagcactgtagaaaatgaagcaccctgggtcctgacggttggtgcaagtacaatagacaggaggatggaagctattgtcaagctgggtgacggccgctcatttgtcggtgagtcagcctaccaaccatctaatcttgattcattgccactggtgcatgaattagattctggagatgctaaagggaaggttattgcttgcgaccttggtggttctctctcccaactcaaacttgggaagactgttcaggatgctggtggtgctgggatgatagcacttggaaaagaggagagtggacataatacttttgctgcagcacacatgctaccagcatcatatgtcaatgccatagatgctgccgtaattagacagtatatcaagaactcagacaagccgacggcctcgattgtcttcaatggcacatcattgggaaatactccatctcctgtggttgcttacttctcttctcgcggtccaagtactcaaacccctggtattcttaagcctgacataatcggcccaggagtgaatgttattgcagcttggccagtcaaggttggaccaagagcagaaggtgaaaagaatatggcatttaataccttatctggaacatcaatgtctgcacctcaccttagtggaattgcagctattatcaagagtgcgcatccagactggtcacctgcggcgatcaagtccgcaatcatgacaactgcctatgtgctggatgataacaagaagccgatcctagatgagaagctcaatccagctgggcatttcattataggtgcaggacatgttaactcctctcaagctatcaatcctggtctaatctatgacactgaagaggagcagtacattccgtatctctgtgggcttggttacacagagtcagaagttgagataatcacacatcacaagggtgtctgcggagaaggaagaaaaatctcggaagccgagctgaactatccttcaattgcagtagctgccagcaccggcaaacttgtggtgaacaggacagtcaccaatgtcggagatgaaatttcatcctactctgtggacattgagatgccaaaggaagtaacagcttcagtgtcaccaagtgtgctagaatttaccaaggcaaatgagaagaaaacatttactgtgagtttaacttgggatgccaatgcaattaagcatgctgagggaagcctcaagtggatttctgacaagcatgttgtgaggagccccattgtaatattctaatgtaacttagtgaatttcggacttacaagcaagtctgcaacttgttatatggaataatatgattttaaatgttgatgtcttattgttatgggcaataggaaataggtaactagacaagactaggacaataggactaccaacaataagaacaaacaaaccttaagaacta

SEQ ID NO: 38085 - DNA, 955 bp, Setaria italica
  Peptide Sequence Number=SeqID_104059
ttttttgatgaaatttcagataaaaattgcaaaccaagtctgtacatcaggaaaatgtaaatagctttacaagaaaaacagcgctactgttacatgagctgctagcttcactgcactctcagtacattacccagagtactttacaaaataaaatcccataaaaattgattcgatgatttctaacaaagaatacaatcatgctgttactgataaagatgttcttgacctgctcacaggtatcctttccttggcaaatgaacagtgtaattcttgctgccaggtgcaatcatctgcatatacttgataaggtattcaggccatctccagttacatgaattatccttcaacaaacatcctttgcaatcctgcacattataccatgaaaatcctcatatcaccgagcccatcttgactggcgcccccgatcagactgcctctccttcctccccgcagcaaccagcacggcacgctcgcgctccttctccttggcctccctcttcttcctctcctccctcagctcctcaatggtcttcttccctccactcctcttacccccgctcccttcccctgcatctctggccctcccctccttcgccgccgccgccgcagggttcgacatgtaccagggaatcgccacacccttgccggcgaggccgtagcccagcctgtacttctcctcgtcgggccccaccgccctgacctcctcttccttcttccgcttcttagggttcttctggttagggttggcgtcggggtcccgctcacgcgcggcgcccctcccgccgctggccgaggcgagcgcggcgaagtcggctgctgcgccggatctccccgagaagaggttaatgtggtctccgtcggaggccggggacggaagggcgtccgccggatcctccgccgcggcaccccggcggcgccgtcggcaggagggggagcggcggagggcggctcctcc

SEQ ID NO: 38086 - DNA, 1828 bp, Setaria italica
  misc_feature (1740)..(1828): n is a, c, g, or t
  Peptide Sequence Number=SeqID_104060
cgcactatacccacgctaagaccagtggggccaatagatgtttggaacataagactgcacagggctatttttgtgaacttcaaggacctgtattattacaatggccaaaagcttccctttgcagcagctcaaatcgggcaggcttttaggaatgagatctcgccgcgacaaggtcttctccgagtccgtgaattcacattggcagagattgagcactttgtggacccagaggataaatcgcatccaaagttttttgatgttgctgatttggagttcttgatgtttccaagagagctgcaactctctggggagtcagccaaattaatgaagcttggggaagcagtctcaaagggaactgttaataatgagacacttggttactttattggaagggtctatcttttcctgacacgcttgggaattgataagggtcggctgcgcttcaggcaacatctacctaatgagatggcccattatgcagctgactgttgggatgctgagatagagtgttcttatgggtggatagagtgcgtgggtattgctgatagatctgcatatgatttgcgagctcactctgagaaaagcggtgtcccacttgttgctcatgaaaagttttccaagcctagagaggttgagaaacttgtcatagttccctcaaagaaagacctgggacttgcttttaagggcaaccaaaagatggtccttgaagcattggaggcaatgagtgagaaggaagcactagagatgaaagctgcactagagtccaagggggagacaaattttaaagtctgcacacttggaaaagatgtggtcattaccaagaagatggtatcaatcagcatggagaagaagctggaacatcagcgagtcttcaccccttcggtcgtcgagccgtcatttggcataggcagaatcatctactgtttgttcgagcattcattttacacgaggcctagcaaatcggaagaggaacagctgaatgtcttccggttccctcctcttgttgctcctatcaagtgcaccgtgttccccctggtgaagaaccaggagtttgacgatgctgctaaagtgattgctaaagcactaacaactgctggtatctcacacattattgacactactgctatttctattgggaggcggtatgcaaggacagacgagattggtgtaccttttgctgtaactgttgattctgcaacaaacgttacaattagagagagggacagtaaggagcaggttcgggtggacatcggcgaggtggcatctgttgtgaagcagctgacagaaggccaaagcacctgggccgatgtctctgcaaagtaccctgcccatgttgggccccaaggtgaccaggagtgaaaaccctggctagcatcatctccagccacatattctcaagaaggcgccaggatggatggtcttctttcttctccatttgtcgagaagattctctagcctaaacatagccgcttttggtattgacgtaatccagcaacgcagttttcccccccatacatacatgatacgtgctgtagcggttcgacaaactcaagtttgcattttccccagttcttttgctccttcaaatgtcgttttctccatatatggtctcacccatactacaaaacttaacccatttgagttacttctgaacaagtggtccttgtgtaaggtcacactggtaccgaaaattgttcagctacccgtgtaattggaatttggaatttcagttacttagtnnnnnnnnnnnnnnnnnnnnnnnnnnnnnnnnnnnnnnnnnnnnnnnnnnnnnnnnnnnnnnnnnnnnnnnnnnnnnnnnnnnnnnnnn

SEQ ID NO: 38087 - DNA, 1225 bp, Setaria italica
  misc_feature (1157)..(1225): n is a, c, g, or t
  Peptide Sequence Number=SeqID_104061
aggacgaacacggccaagggaaaggtgtgcgtcaccggagcatctggctttattgcttcctggctcgtcaagcggcttctcgagtctggataccatgttctgggaacagtcagagacccagggaatcacaagaaagtaggacacctctgggatttggaaggtgcaagggaaaggctggagcttgtgagagctgacctcttggaagaggggagctttgatgatgccgtgatggcttgtgagggtgtcttccacaccgcatcgccaatcctcactaaatctgattccaaggagcaaatgcttaattcagcaataaatggcactctgaacgtgttacggtcatgcaaaaagaatcccttgctcaaaagggtcgtcctcacatcttcatcgtctactgtgaggatcaaggacgaagctgacctaccccctaacgtgttactggatgaaacatcatggagctccatcgagtactgcgagagtctccagatatggtacgctgtcgcgaagatcctagccgagaaggcggcctgggggttcgccaaggagcataagatcgacctcgtgactgttcttcccacctttgttatcggacctagtctgtcccctgagcttggccccactgcttcagatgtcctcggcttattccaaggggagacggggaagttcacggtgtacgggcggatgggctacgtccacatcgacgacgtggcgagctgccacatcctggcctacgaggccgccgacgcgcagggaaggtacatctgcaacgcggcggtgctggactgcggcgacctcgccgccctgctcgcgcggcggttcccgtcgtacccgatccccaagagcctgcccaacatctacggcgagcagtcatacgactacgacacctccaaggcccgcgcgctggggatgcgggggtacaagggcgtcgaggagatgttcgacgacgccgtggagtcgctcgtcggacacggccatctcccgacggagaacgcgagcacgagctctctcctttgaattctggcgtggaagacatgcgttgttacatagtcgcatatatttgtagtttctatacaataacaggtatttggactgtcagtgacagcagaagagatcacatagccgtatgaagagaataatcagttgagatgtgttccatcttnnnnnnnnnnnnnnnnnnnnnnnnnnnnnnnnnnnnnnnnnnnnnnnnnnnnnnnnnnnnnnnnnnnnn

SEQ ID NO: 38088 - DNA, 424 bp, Setaria italica
  Peptide Sequence Number=SeqID_104062
ggaaaagaaaaagtaaagtaagaacaaagggttaaaggactgggttggaagaggagctagccatagatgagattgtagaggagtgtcattgttgcccaacctaacgtatgtggatctcaactccaataacatagagggaagtattgtagaagatttattccattcgtcaagcctccaatatttgaataactctggtaatccatttggtgggatgcattcagacaacgcctggcaggcactagagcataatatgtttgattcaatgcaaccacctcaagcataaaaaaaagagaaacacattcacatagaaaagggtaagaggaaaagtaatgagatgaagaaaacaagtttttaactaaagcataatatgtgatatgaaaatctacaatttaaccagcagtagagggacaaccaaattaaaatg

SEQ ID NO: 38089 - DNA, 337 bp, Setaria italica
  Peptide Sequence Number=SeqID_104063
gagcttgtcggcgtcgcccagtgcgcagccggggggctcgtagaagaagtcggcctgctcgccggtggcgcggtcccagacgccgatgccgtactcgttgagccggcccttgcagctggcgaagatgctcgagtcctggtcgaacgccagcgcaccggcggtgaaggacttggcctgccggccgtgcgcgacgcggaagcggtggcggagctcgccggaggcggcggagaacgcggccatgccgccgtcgcacttgcccagccgctcgcgcgccgcgatcaggagcgtgccggcgtcgaggtaggccgcgtcgttgacctgcgagtggtcgagcgag

SEQ ID NO: 38090 - DNA, 490 bp, Setaria italica
  Peptide Sequence Number=SeqID_104064
cccaagcaatttcactcagggcaggcctaaccaacagtctaatacagtaatacgcaattcagtatataagtataagatttgtcaagcaattcggtagatgagtgtaaattagctagaagcacgataaaaaattatattaaaatatctcataatattttaaattcaacaaatatgttcaaacttgcataaatgatgaatcaagcactttacaccaatacactaatttacatgtttgtaaatgcatcatagctgacgtttatgttcctcaaaacttcagatgcacaccagaataattttgttttatcttcggttatttgcagtgtcaatacattgtacaacaaattaaaggatcatttatgaacttaaaaggaaactaaaaactatgatgcaaatactacagtactacctatcaggtccggttccaggccttcatattctcaattggaattcaaaagtagcttttagtcttaacagagaactgcggactggg

SEQ ID NO: 38091 - DNA, 1020 bp, Setaria italica
  Peptide Sequence Number=SeqID_104065
acgccgtcgaacgtcctcgacattgggccagctctcgcccagcttctacgcgcagtcctgcccgggcgtggagctggcggtgagggatgtggtcaggtcggcctccttactggacccttctatccccggcaagcttctcaggctggtcttccatgactgcttcgtcgagggatgcgatgcgtcagtgctgatacaaggtagcggcacggagaggactgatcctgcaaatctctcgcttggtgggttcaacgtcatcgatgctgccaagagattgcttgaagtcgtatgccctgcaactgtttcttgcagtgacattattgtccttgctgcaagagatgctgttgtgtttaccggaggaccggcggtgcctgtcatgctgggaaggcgagacggcctggtctccttggcatccaacgtccggagaaacatcatcgacaccggcttctccgttgacgctatggcagccagcttcaccgccaaggggctcaccctggacgacctcgtcaccctctcaggggggcacaccatcgggtcggcgcactgcaacacgttccgggagcggttccaggtggcgaacgggagcatggcgccggtggacgggtcgatgaacacggactacgcgaacgagctgatccgggcgtgctcggcgaacggcaccgtgtcggcgggcacggcggtggactgcgactccgggtcggcgtcggtcttcgacaaccgctacttcgccaacctgctggaggggcgggcctgctgcgcacggacgccgtgctggtgcagaacgccacgacgagggccaaggtggcggagttcgcgcagagccaggacgggttcttcgcgagctgggccgactcgtacgccaggctcaccggcctcggcgtcaagaccggtgccgacggcgagatcaggcggacctgctccagcgtgaacggctgatggtgggggtcgatcggtcagggcgggaagcaaagtacatgtagggcgatctgttgcattttaatctagtgatatattgtgcacttg

SEQ ID NO: 38092 - DNA, 498 bp, Setaria italica
  Peptide Sequence Number=SeqID_104066
ttcagttggtttcacagctatggacattcctcctcctcgtggtcctctctggatcttgggtgatatattcatgggggcctaccacagatgcactgagcagcagttccttcaccaaccttcaggatatattgttctggtttgagtgcgaactttctacccccgatggtaaaggcaatgtcaggcatggatgcaactctgctgcagtccacagatgactctcccataggactaggaagcttttcacacagctgattaatgtactgcaacactagatcctgagtttgattctgtgcaagctggctccgtatccatacaacagcagtttcacaggcattgcacatagcttcattgaagagaccatttgattccccagcttcatcatccaccacgctccgaataccagcactaactccatgagctccatcaaatgtacatagaccaactgaagagaccatttgattccccagcttcatcatccaccacgctccgaataccagc

SEQ ID NO: 38093 - DNA, 820 bp, Setaria italica
  Peptide Sequence Number=SeqID_104067
atgaagctggggaatcaaatggtctcttcaatgaagctatgtgcaatgtacatagaccaactgaagagcatatctttgacggttgtgtctctgctagtagctgatctatgatctgttgcccatactgagaaacaactgccttacattcttggctgactacaccagcagcaccaatctttcatttatcactagtagttaaggctttggtcttgttgggtttccagtaagcaacgatgttccagaatctgctattgctgcacagcccgaagcacagaaacctgtggactttcctccaatcaggacatcgcccataccaaactgccagtatcccttcctagtgacagggacatatgtatgatttcctttatagtgattaggatcaattcctccaaacacaatttcacctccctgcccttcaccagcgtgccggttgaaccagaatgaaaaaacaggatcatcaacaagaccctgtttaaccatgttgtaccagacaggtacagcagctccaactgagatttccttaaatccaagcccaagaatgccatcgaattttgcaaccatgaaagtaatacctggctcccttgtagcttcaatgaaatcctgatttctcacaactacgtcaccaattttcacactgtccaggctaaagtagccagaaattgcaccagtaccatagcgtatagaagcaggttttccattcttcttataactgttcgattggccggccttgtacctcgcgtggaagtagcaagccatcgataaggtaagacaacttaggaaggaagggacaacccaagaaggttaggaagactagaccgga

SEQ ID NO: 38094 - DNA, 646 bp, Setaria italica
  Peptide Sequence Number=SeqID_104068
tccttattgggtagtagttctattcttgttggtacttgcagcagagttgcatccatgcctgacattgcctttaccatcggactaggaagcttttcacacagctgattaatgtactgcaacactagatcctgagtttgattctgtgcaagctggctccgtatccatacaacagcagtttcacaggcattgcacatagcttcattgaagagaccatttgattccccagcttcatcatccaccacgctccgaataccagcactaactccatgagctccatcaaatgtacatagaccaactgaagagcatatctttgacggttgtgtctctgctagtagctgatctatgatctgttgcccatactgagaaacaactgccttacattcttggctgactacaccagcagcaccaatcttttcatttatcagagtaattatggcctgcatatccgtatagattcattaggacacataaatattagattgaaaatgcaatacacttgccagggtagaaataccagtcttaataagatataacacatcgactcaccaatatgacaatgtatctattggatgcacgttaagttttcctttatctgttacagttgcaaactctatttgctgaaaaagtaaaacttaagcataaagcg

SEQ ID NO: 38095 - DNA, 322 bp, Setaria italica
  Peptide Sequence Number=SeqID_104069
tcctacgtagtagtaggtattgttcctattagtcttgttgaaaccactgatgcactgagcagcagttccttcaccaaccttcaggatatattgttctggtttgagtgcgaactttctacccccgatggtaaaggcaatgtcaggcatggatgcaactctgctgcagtccacagatgactctcccataggactaggaagcttttcacacagctgattaatgtactgcaacactagatcctgagtttgattctgtgcaagctggctccgtatccatacaacagccgtgtcaacaacaaggccaattagacaacaataagactta

SEQ ID NO: 38096 - DNA, 1923 bp, Setaria italica
  misc_feature (103)..(117): n is a, c, g, or t
  Peptide Sequence Number=SeqID_104070
taattttctaccttcccttgtccctttctacctagtcgttgtccggttagtttcctttatttgggtagtagttctattcttgttggtacttgggtaagtcttnnnnnnnnnnnnnnntttttttttttagtatcaactaatcagcttgaaaccctgccttgataaatatattagcaagttgaaacagacaggtttatcatctcagatcactcatgcttgcaggacatcaccccgagctgaaatgcaagtgttgtaagggttcgtccgatcaccttggagggtcgcatcatgccgcctcagcgaagccaaccttcaggttgccgtagtcaaagacggtgtggtaggcccccatgaatatatcacccaagatccagagaggaccacgaggaggaggaatgtccatagctgtgaaaccactgatgcactgagcagcagttccttcaccaaccttcaggatatattgttctggtttgagtgcgaactttctacccccgatggtaaaggcaatgtcaggcatggatgcaactctgctgcagtccacagatgactctcccataggactaggaagcttttcacacagctgattaatgtactgcaacactagatcctgagtttgattctgtgcaagctggctccgtatccatacaacagcagtttcacaggcattgcacatagcttcattgaagagaccatttgattccccagcttcatcatccaccacgctccgaataccagcactaactccatgagctccatcaaatgtacatagaccaactgaagagcatatctttgacggttgtgtctctgctagtagctgatctatgatctgttgcccatactgagaaacaactgccttacattcttggctgactacaccagcagcaccaatcttttcatttatcagagtaattatggctgtgggtccagtaagcaacgatgttccagaatctgctattgctgcacagcccgaagcacagaaacctgtggactttcctccaatcaggacatcgcccataccaaactgccagtatcccttcctagtgacagggacatatgtatgatttcctttatagtgattaggatcaattcctccaaacacaatttcacctccctgcccttcaccagcgtgccggttgaaccagaatgaaaaaacaggatcatcaacaagaccctgtttaaccatgttgtaccagacaggtacagcagctccaactgagatttccttaaatccaagcccaagaatgccatcgaattttgcaaccatgaaagtaatacctggctcccttgtagcttcaatgaaatcctgatttctcacaactacgtcaccaattttcacactgtccaggctaaagtagccagaaattgcaccagtaccatagcgtatagaagcaggttttccattcttcttataactgttcgattggccggccttgtacctcgcgtggaagtagcaagccatcgataggtagcacttggaggagggcacccagaggttggagctgccggtgtcgaagatgacggtgaacttctgctgcggcgtgccgatgccgatctcaccgtagtactgcgcgttgaggtagttcttcagcgccacgatgtcgccctcctcctcggcctcagccttcttcgacgcggcggcggcatcgtcgttgccgaggaagccgcggcgccgctcgtcatggaggcggccgttttcgtcggccggccgcttcttcagcgggacgcggaccaggccctctgccggcggggcgaggagggcttgcagcagcacggtggcgaggaggagcagcgcgacgctgccggttcccatggctgctgcactgcgtgctgatggttcgagcgggaggggagcaggagcgcaaccgcccgcggcccacgcccgtgctgcactgggtactttgggtggcgagtgggggaactggg

SEQ ID NO: 38097 - DNA, 1970 bp, Setaria italica
  Peptide Sequence Number=SeqID_104071
tatataatggactttgttttctcggagtcagaagaaggtggaattttgacaacaggaatgggttggactatcatattcctgttttggttccattgcaaaggaacctcctatgcatattgtccacattgctgttgagatggctcccattgcaaaggttggaggtcttggtgatgttgttacgagtctttcccgtgctgttcaagatttaggacacaatgttgaggttattcttccaaagcatgattgcttgaatctaagcaatgtgaagaatttacatatacatcaaaatttttcttgggatggttctgaaataaaagtatggcgtggacttgttgaagacctctgtgtttacttcttggaacctcaaaatgggatgtttggagtcggatgtgtatatggaaggaatgatgaccgtcgatttggcttcttctgtcattctgctcttgaatttctccaccagaggggatcttctccaaatataatacattgccatgattggtcaagtgctcctactgcctggctatacaaggaaaactatgtgcaatccagtttggcaaatgcacgggttgtatttacgatccacaatcttgaatttggagcacatcatataggcaaagcaatgaaatattgtgataaagccaccactgtctctaatacatattcaagggaagtgtcaggtcatggcgccatcgctcctcatcttggaaaattctatggcatcctcaatggaattgatcaagatatctgggatccatacagtgacagctttattccggtccaatacacttccgagaatgttgttgaaggcaagcgcgctgcaaagagggccttgcagcagaagtttgggttacagcaaaacgatgtgcccattgttggaatcatcagtcgcctgacagcccagaagggaatccacctcatcaagcatgcgattcaacgaacacttgaacggaatggacaggtggttttgcttggttcggccccagaccctcgaatccaaggtgattttaccaacttggcacatgatctccagaaccaaaaccatggtcgagcgaggctgtgtttaacctacgatgagcctctttcacatctgatatacgctggctctgacttcattctggttccatccatatttgagccttgtggcttaactcagctggtcgccatgcggtatggagccatccctattgtccggaaaactggagggctctacgacactgtctttgacgtggacaatgacaaggaccgagcccgggctcgaggccttgagccaaatgggttcagcttcgacggagctgacagcaatggtgtcgactatgccctgaacagggcgatcacttcttggttcgacgcccgggactggttccactccctctgcaagagggtcatggagcaggactggtcatggaaccggcccgccctggactacattgagctctaccgttcggcatccaaactgtgagaactgagaacccaaccttatggccaatctgtgatcacaacaaagaaggagatggtagctgagaggaaacacgggaaggaatcaaggtgggtggaggtcaaggcaatagacgaccgcaaggtggaaaataaggaacgcaaggtggcgattgaagaggagaagttgatagtctttggagaggaagcacaagcgaagaagacggagcaagaatgcttgatcatggtcataagaacacatagagtgtatgtggagccactgcgtgcgcaaattatagcgtcaaggatgggcgggagtggcagtgtgggatgctccatgttttatgcatttcgatcataatttatgtctgaatttgaattttcaaattgtgggtttgaaatgatgttcaattgtgtgcggtgaaaaactaaatgttgcgactgcaggagtattccttagcagcttactaccttgtcaatgttaactaccttacttgtgtaattttcagtattgaaaccctaaaaaaaaaaaaaaa

SEQ ID NO: 38098 - DNA, 1029 bp, Setaria italica
  misc_feature (952)..(1029): n is a, c, g, or t
  Peptide Sequence Number=SeqID_104072
ttacttacctagttgctgctgttcgtcggctagctcggcttttgctcatcagctcatgtcggagaagaagatcatgagcttctttgcccgcagcagcaagaaccagaggaccttcaggccaaagaagagcgggccgtccgggagcaaggggatgcagttgaggaggcacattgacaacactctcggccagggtgacctgcgcgaggcggtgcgtctgcccatcggggaggacctcaacgagtggctggctgtcaacactgtcgacttcttcaacaatgtgaacatgctgtacggcacactgatggagttctgcacaccagcgacctgcccgatcatgtcagctggaccaaagtatgagtacaggtgggccgatggagtcaaggtcaagaagcccatagaggtgtctgcgcccaagtacgtggagtacctgatggactggatcgaagcccagctggatgatgaaaccatattccctcaacattttggggctccttttcctgccaacttccgtgatgtcgtcaagactatcctgaagcgcctcttcagggtgtacgcgcacatctaccactcgcatttccagatgattgtgaagctcaagtaagaagcacatctcaacacctgcttcaagcacttgacgctcttcacgctggaattcgggctgatcgagagtgcagagctggctcctcttagggagctgatcgagaccataagaggcgggcagtaatccaaatggcagaggctgcgaagcatatcaaccgcgctctggctcaaggaaacaaattgaggcggcaaagtgtgccgagagttgtttttcatgttttgtttttcggtttgatgaatttggatgaaccatgtggatatacaattttggaacatcccagtcactgggatgtttgtttgctgttactgttagatgaatctacctgccttatgctggtgaactttttttttnnnnnnnnnnnnnnnnnnnnnnnnnnnnnnnnnnnnnnnnnnnnnnnnnnnnnnnnnnnnnnnnnnnnnnnnnnnnnn

SEQ ID NO: 38099 - DNA, 281 bp, Setaria italica
  Peptide Sequence Number=SeqID_104073
ttttttaaagtcttgcaagcatagatttttttagaaaaaacaaattggtccaaaataataaaaggtaggaataaacaattgtgctcatttggcaatagaatgtaccacaaataagcctttattttgtgacagctccatcctcgtcatctacgcatcaaacctccaacatttcactttgttgttatccataaagcacaagccatcaggactgatccattaatttccattagctggcagccggtcatagaatttccacatactaatctcagcagctacatcct

SEQ ID NO: 38100 - DNA, 346 bp, Setaria italica
  Peptide Sequence Number=SeqID_104074
ggacgggaggctgaacgagccgatgccggtgatcggccgccagaggagagggttgatgccgccggtgtagaccaccgggaacggccacacggcgcccacaatgtcgccgtcgatcagaacgttgacctcgcggaacgggccattgtccctgggtgtgttcgtgtaccaaaactcgtcgtcggagtggtacgagaggtacacctcgagaaccgcacggaaggtgttggtcggcacgacgacgctcgcggatccgacgtcgaagccgttgttgatctggaaccacagcccgtcgttcagcggcaggctttgcgagatcggcacgatgacgtcggcgggccccacccgg

SEQ ID NO: 38101 - DNA, 1468 bp, Setaria italica
  Peptide Sequence Number=SeqID_104075
ctgcatcaactttctgaagaagagagttcatgggctgaagatgaagtggagacaactgaggatgaagaacagtatgaagttgaggagtcgtcttttgtgtctgccgaacaagatacccaagaatcaccacaggattacctggatccacaagcactacagaggatgcttcaagaacttgctgaaaaaattattcgctgggaaacaaactttttgtttttccagaggtactgaaagctgattcaactattgatctctatttcaatcgtgatctatcatctttagccaatgagcctgacgtactcatcaaaggagcattcaatgggtggaggtggaagtttttcactgaaaaattgcacaagagcgaactgggaggggactggtggtcctgcaaactgtacattcccaaggaggcatacagattagattttgtgttctttaatggtcgtacaatgtatgaaaataatggcagaaaagattttgtgataccaatagaaagcaccatggatgaacattcgtttgccgatttcttggttgaagaaaagcaaagagaacttgagagagaagctcgaaggaagagccagactgaagagcagcagcaattagaggaagaaagggctgcaaatgaagctgacagggcacaagcgaaggctgaggtacagacacagaagattaaattgcagaatgtattggattcagccaaagcttctgttgataatttgtggtacatagaacctatcacaactatgcaaggggctactgtcagattgtattacaacagacactcgagaccacttgttcacagtactgaaatttggatgcatgggggctacaacaattggattgatggactctctttttctgaaagacttgttcatattgatgacaaagatggtgattggtggtatgcagatgttgccttacctcaaagagcatacgtgttggactgtgtttttgctgatgggccgccagggaatgcaaggaattatgataacaatggcagacaagattttcatgctatccttcccaatagcatcatgactgaggaaggatattgggtggaagaagaacagaggatttatacaaggattcaacgcgagaggagagaaagggaggaggctattaaaatgaaggctgagagaagggcaaaaccacttgaaatacgtgctggaacagactatgagaatgtttctggtttctcaaaacacattgtttataccgaaccacttgaatacgtgctggaacaactgttgatgtgctttacaatccttctaatacagtgttaaagggaaaccagaggtgtggtttcgatgttcttttaaccgttggatgcatccaggtggtgtgttgccaccccaaagatggtaaaagcggaacatggttcacacttaaaagcaacagttaacgttccgcacgacgcctatataatggactttgttttctcggagtcagaagaaggtggaatttttgg

SEQ ID NO: 38102 - DNA, 705 bp, Setaria italica
  Peptide Sequence Number=SeqID_104076
ttttggatcataataaaaaggaaaacatataatcaaataacattggtagttcaaagttgacaaaagaagggataaacatgcttaagggatcaaattttcggagccataaagacaatcttgcatatgacagttttatgcactaatgaactgaaagcacttgtggtctaacatgaaaaagaaaagaaaagaagtcactttgaacaaatgagagctgattctgttcatcaggaactataattggtagatcaccaaacttatttacagttcattggcaaatgccaatatgccatacacatggggcatggcatgacatttgaatggtcggacaagatgtagaaacaacaaaactcattagagaagctaatagataaatagagaagctaatagataaatagataaatagaaacaaccaaaattattttcaattttagcatacagaccacaatctcgaatccaatagataaatacatactccccaaataggaaggcaatttgtaattaaagagtatctcaccaattatatctaatataaattgttgtaagcaccaacatgccatgctatgcatattcgtttatcaaatcaaattgctgcaggactttgtatatttaggggaaatagcacctattctcaataagcactctaggacctcaaaggagacccggttaattaagcaaatagaaattttggataggaataaatagttt

SEQ ID NO: 38103 - DNA, 597 bp, Setaria italica
  Peptide Sequence Number=SeqID_104077
aaaacggaaaaaggaaaaagaaaacaaaaaggtaaaccgaacgaaagaactagacggacgaccaatgcctctgagggcggccacggcccgcactggcccctgccgccgttcggcgagtcgcacggaccctacagcctcctggaccagcggcccacgatcgccaaccgccacggccagctctaccaggccgacgcccgcagctaccgcgacctcgccgagcacgacgtccgcgtctcgttcgtcaacatctctgcaggctccatgagcgcgccgttctacgacagccgctcgatcaagctcgcctgcgtgctggacggcgagggctacatcgagatcatatgcccgcacctggcgcaacgtcatgagggccggagcgagcgcggcaagggcaggcgtggcgaagaggaatccgagtccgaggagcaggagcaggaggaagccgggcagggataccacaccatccgtgcgcgggtgtcgcgcggcacggcgttcgtggtgccggtgggccacccggtcgtcgaggtggcatctcgaagtacactatctgcaggttgctgccccgggattgccaccttcgtacgtaccgggttggtctaa

SEQ ID NO: 38104 - DNA, 529 bp, Setaria italica
  Peptide Sequence Number=SeqID_104078
taacaaaacggaaactaaaaggaaagaactaaggaacgttaacgaggtctaagggtcgtagggtaggttggtacgtaggttgcttcgacgcccagcgcgaccagggcttcctcgccggcccggaggagagcagtcgtgaggagcgggaggaggaggaggaacacgaaggacgccgcggccccaaggagtgggagaaggaggaggaacgcgaagcacgccgtggccgcgagcagcgtgagaaggagaaagagcgtcgtggccacggacggcgcgaggaggtggcggagacgttcctgaggcttgctaccggccggctgtgaggccgtcttacgctgatcgatgatcgagcaagcaacaagttgagagctagtgagcccgagcagtgatacgctggacatgcaaatgcggcatgtagtagaataagtgtggctctctatgtatgctactgaggtcatgttcataaataaacaaatagcaagtgctctataaactgttgagtgcttctattaaaccttaaaaaaaaaaaaaa

SEQ ID NO: 38105 - DNA, 1570 bp, Setaria italica
  Peptide Sequence Number=SeqID_104079
gccgccgtggcgaccggcgcggcgaggggtccggcgacgagcgcgagcgggagcaggagcaggagcaggagcagagccggcggccgtacgtgttcgaccggcgcagcttccgccgcgtggtccggagcgagcagggatccgtgagggcgctccggccgttccacgaggcgtccaagctcctccgcggcatccgcaactaccgcgtcgcgatcctggaggccaacccgcgctccttcatcgtgcccagccacaccgacgcgcacagcatcggctacgtggcgcaaggcgagggagtggtgacgacgatcgagaacggcgagaggcgctcgtacaccgtcaaggaaggcgacgtcttcgtggcgccggccggggcggtcacctacctcgccaaccccgacggccggaggaagctcgtcatcgtcaagatcctccacaccatctccgtgcctggcaagttccagttcttcttcggccccggcgggaggaacccggaatccatcctgtcgagcttcagcaagagcgtccagagagctgcttacaagacctcgagcgaccggctggagaggctgttcggcaagcaggataagggcatcatcgtgcgcgcgtcggaggagcaggtccgcgagctgcggcgccatgcctctgagggcggccacggcccgcactggcccctgccgccgttcggcgagtcgcacggaccctacagcctcctggaccagcggcccacgatcgccaaccgccacggccagctctaccaggccgacgcccgcagctaccgcgacctcgccgagcacgacgtccgcgtctcgttcgtcaacatctctgcaggctccatgagcgcgccgttctacgacagccgctcgatcaagctcgcctgcgtgctggacggcgagggctacatcgagatcatatgcccgcacctggcgcaacgtcatgagggccggagcgagcgcggcaagggcaggcgtggcgaagaggaatccgagtccgaggagcaggagcaggaggaagccgggcagggataccacaccatccgtgcgcgggtgtcgcgcggcacggcgttcgtggtgccggtgggccacccggtcgtcgaggtggcatcccggggcagcaacctgcagatagtgtacttcgagatccatgccgacaagaacgagagggtgttcctggccggggcaaacaacgtcctcaagaagctggacgacacggctaaggagctggcgttcgcggcaagggcgagggaggtggacgaggtgctcgacgcccagcgcgaccagggcttcctcgccggcccggaggagagcagtcgtgaggagcgggaggaggaggaggaacacgaaggacgccgcggccccaaggagtgggagaaggaggaggaacgcgaagcacgccgtggccgcgagcagcgtgagaaggagaaagagcgtcgtggccacggacggcgcgaggaggtggcggagacgttcctgaggcttgctaccggccggctgtgaggccgtcttacgctgatcgatgatcgagcaagcaacaagttgagagctagtgagcccgagcagtgatacgctggaca

SEQ ID NO: 38106 - DNA, 805 bp, Setaria italica
  Peptide Sequence Number=SeqID_104080
ttagttacgttacggttacttaacggttacgttttcgtttggtttgttccggtttgggtcctacccggttcgttcgtaggttggtctattcccggggtctagtctaaccttgtctagtattagttgttactttcgtagtattcctattgccgacaagaacgaactcccgagaaatccatgccgacaagaacgagagggtgttcctggccggggcaaacaacgtcctcaagaagctggacgacacggctaaggagctggcgttcgcggcaagggcgagggaggtggacgaggtgctcgacgcccagcgcgaccagggcttcctcgccggcccggaggagagcagtcgtgaggagcgggaggaggaggaggaacacgaaggacgccgcggccccaaggagtgggagaaggaggaggaacgcgaagcacgccgtggccgcgagcagcgtgagaaggagaaagagcgtcgtggccacggacggcgcgaggaggtggcggagacgttcctgaggcttgctaccggccggctgtgaggccgtcttacgctgatcgatgatcgagcaagcaacaagttgagagctagtgagcccgagcagtgatacgctggacatgcaaatgcggcatgtagtagaataagtgtggctctctatgtatgctactgaggtcatgttcataaataaacaaatagcaagtgctctataaactgttgagtgcttctaatccttagcttgtagcgcgtagcggcgcacgacatgcagcttgagattccatatgtattcgagatgatgacaaaatatttcttaaaaaa

SEQ ID NO: 38107 - DNA, 1080 bp, Setaria italica
  Peptide Sequence Number=SeqID_104081
ctccggcatcgggcgcgccgtgtgcctgtgcttcgcgctggagggcgcgacggtggccttcacctacgtcaagggccacgaggagaaggacgccgaggagaccctccacgcgctgcgcggcatcaagtcccgcaccggcgccgcccgcgacccgatggcggtgcccgccgacctgggctacgaggagaactgccgccgcgtggtggaggaggtcgccggcgcctacggcggccgcatcgacgtgctggtgaacaacgccgcggagcagtacgagcggccgtcgctgtccgacatcaccgaggcgaacctggaccgcgtgttccgcaccaacatctactcctacttcctggtgaccaagcacgcgctgccgcacatgcgggaagggagcagcgtcatcaacacgtcgtcggtgaacgcgtacaaggggaacaagacgctgaccgactacacggccaccaagggcgccatcgtggccttcacccgcgcgctggcgctgcagctggccgacaagggcatccgcgtcaacggcgtcgcgccggggcccatctggacgccgctcatcccggcgtcgttcgggaaggagaaggtcgagcagttcgggtcggaggtccccatgaagcgagccggccagccagccgaggtcgcgccaagcttcgtcttcctcgccagcgagcaggactcgtcgtacatgtcgggccagttcctccacgtcaacggaggcgtcatcgtcaatggctagagaggatgaagcagccggaactcgagggtcgccgccgacgggatgtcgtcgcttgggctggtgtcagcgtgtcgccatgggagtgcttttatggctgtgtatgtatgtcgtgtccaggtcgaaaatggaagaagtgacgcgtttgtgtgcgcgtgtaccaagtagggtcagtacgtgcagaagcagctgtagctgtgtcgttcggtgcgcagtgcttgagcacagcacgtgtaaaaagggaaggaatgtgtccgaataaaatatatgcgtgcatgggacctccgtggcatctccataaaatcgtattcgttgtctagttttcctttacccgtttatttaaa

SEQ ID NO: 38108 - DNA, 417 bp, Setaria italica
  Peptide Sequence Number=SeqID_104082
taacctaactaacccagactaccacaccaccagcaaaatgctatggaagaactcatccagcatctaatggaagctcatatgatcagacctagtgtcagcccctattcatcccctgttatcttggtgaaaaagaaggatagcacttggggactatgtgtggattttaggcaactcaactccaatacagtcaaaaataaatatccaatacctatcattgaagaccttttggatgagttatttggggcacaagttttctctaaaattgacttgaggtctggctatcatcatattaggatgaaggaatctgatatacataagactgcattcacaacacatgttggtcactttgaatatttggtaatgccttttggactcacaaatgctccaacaacttttcaaacattgatgaataatgtg

SEQ ID NO: 38109 - DNA, 190 bp, Setaria italica
  Peptide Sequence Number=SeqID_104083
tgagagttgataccaactcagaaaccagtgggttctgatttggaatctatgagagttgataccaacttcctcagctatgctataggtgatacacagaaatatccctatattgcatcaatgggcgtttatgtcttcaaaagtgcatctcttttgaagacataaacgcacattatgctctagtacagctctt

SEQ ID NO: 38110 - DNA, 611 bp, Setaria italica
  Peptide Sequence Number=SeqID_104084
caatatagggatatttctgtgtatcacctatagcatagctgggcgtttatgtcttcaaaagagatgcacttttagaccttctcaagtcaaaatataatcaactgcatgactttggatccgaaatcctcccaagagctgtactagagcataatgtgcaggcatatattttcacgggctattgggaggatgttggaacaatcaaatcattctttgatgcaaacttggccctcactgagcagccttccaagtttgaattctatgatccacaaacacctttcttcactgcgccccgatacttgcctccaacacaactggacaagtgcaagatcaaagatgcatttatctcagatggttgcttgcttagtgaatgcactatcaagcattctgtgattggagtttgctcacgtcttagatctggatgtgaactcatggtacatacttctccaagatgtatgctgatgttttatacatgctttgcatcaaaacattgatttgagccactagagttattgcaactgccatgtacattttagtataccatatcaacaccagggttcacaaaatcacaaataggttttgtgaccctggacaagttcatcaaagtattttta

SEQ ID NO: 38111 - DNA, 893 bp, Setaria italica
  misc_feature (847)..(847): n is a, c, g, or t
  Peptide Sequence Number=SeqID_104085
ctgggtacttgaggattattacaatcacaaagatattgagcacattgtaatcttgagtggcgatcagctttatcggatgaattacatggaacttgtgcagaaacatgttgatgacaatgctgaaatcactatatcatgtgctcctgttaatgagagccgagcttctaactatggactagtgaagtttgattacactggacgtgtgcttcagtttttttgtagtaaaccagtgggtgctgatttggaatctatgagagttgataccaacttcctcagctatgctataggtgatacacagaaatatccctatattgcatcaatgggcgtttatgtcttcaaaagagatgcacttttagaccttctcaagtcaaaatataatcaactgcatgactttggatccgaaatcctcccaagagctgtactagagcataatgtgcaggcatatattttcacgggctattgggaggatgttggaacaatcaaatcattctttgatgcaaacttggccctcactgagcagccttccaagtttgaattctatgatccacaaacacctttcttcactgcgccccgatacttgcctccaacacaactggacaagtgcaaggtatagattttgtggaacacaattgttacatcagagcatgatgtacacatatttgatgtctgtattttctcctctgcagatcaaagatgcatttatctcagatggttgcttgcttagtgaatgcactatcaagcattctgtgattggagtttgctcacgtcttagatctggatgtgaactcatggtacatacttctccaagatgtatgctgatgttttatacatgctttgcatcaaaacnttgatttgagccactagagttattgcaactgccatgtacattttag

SEQ ID NO: 38112 - DNA, 965 bp, Setaria italica
  Peptide Sequence Number=SeqID_104086
agtacaaaaataataaatacaaactgcatgactttggatccgaaatcctcccaagagctgtactagagcataatgtgcaggcatatattttcacgggctattgggaggatgttggaacaatcaaatcattctttgatgcaaacttggccctcactgagcagccttccaagtttgaattctatgatccacaaacacctttcttcactgcgccccgatacttgcctccaacacaactggacaagtgcaagatcaaagatgcatttatctcagatggttgcttgcttagtgaatgcactatcaagcattctgtgattggagtttgctcacgtcttagatctggatgtgaactcatggataccatgatgatgggtgcagacatatatgaaactgaagaagaaacttcgaagctacatttagctgggaaggtcccaattgggatcatagaattcaaacttggaaggctgctcagtgaggggccaagtttgcatcaaagaatgatttgattgttccaacatcctcccaatagcccgtgaaaatatatgcctgcacattatgctctagtacagctcttgggaggatttcggatccaaagtcatgcagttgattatattttgacttgagaaggtctaaaagtgcatctcttttgaagacataaacgcccattgatgcaatatagggatatttctgtgtatcacctatagcatagctgaggaagttggtatcaactctctgcaacaacagtacctttagacttagattctacagcaaaatagataatcatttctggacaagccaagtagagatggaccaaggaaagaagggttcattgaagaaagaaaggaaacaaaagaagtactcaaagaattgctaaccatagattccaaatcagcacccactggtttctcaaaaaaactgaagcacacgtccagtgtaatcaaaacttcactagtccatagttagaagct

SEQ ID NO: 38113 - DNA, 745 bp, Setaria italica
  Peptide Sequence Number=SeqID_104087
acaatacaacaaattaagaacaacaagagcatcaattggagccacaagaacacttggggaggcaagtgtgacttcaatcttgcagccattttcgtgtcctattgtgtgtctagttgtttgattagatatgcagtttacactagcattggatgggaacacaagtcctcacctgatgagaagatctggtgagggtggtgggagtgagatgttgatggaaagattaaatatcggggtcatcaatcaggagaaagctttgaggaataggtgcttcagtggtggaggcgctagaacgacacaatgtgttcttaactctggtgcttgttctgaaactcttcattttcaaacacattcctccagaaaaagttatgctgacgcaaaccgtgtgtctgctgtcattttgggtggaggcattggagctcagctctttcctttgacaagcacgagggctacgcctgctgtccctgttggaggatgtcacaggcttattgatatccctatgagcaactgcttcaacagcggtataaataagatatttgtgatgactcagttcaattctgcttctcttaaccgccatattcatcgtacataccttggaggcgggatcacctttactgatggatctgtacaggtattagcggctacacaaatgcctgaagagcctgctggatggtttcagggtacagcagatgctatcagaaatttgtctgggtacttggaggtattattacaatcacaagatattgag

SEQ ID NO: 38114 - DNA, 2367 bp, Setaria italica
  Peptide Sequence Number=SeqID_104088
gcatcaattggagccacaagaacacttggggaggcaagtgtgacttcaatcttgcagccattttcgtgtcctattgtaagtatatagttccttgatgccattttcgcagccatttgggaagtgttagtggaaagatggtgagatgctatcatccatgtactctgcaaatgcatctgatatttgaatggttgctttatcataatttggattgctcattcttgccaatagtagagtgtgcggtatttagattttagaatcatgctagcgccatgcaattttgtcagctgagatggggtgttctatttttattactttgcttgaggagcattcattatgaatccagtttttaggaagtagtaaatctcggcttggtcataagatgtcatattgtagttcaagcatatgtatgtatatatggcagaaagttgtttacttcaattcattgtaaatgttctcttgctgtaaaagaagtacctactcatttgtttgagttgcaggtgtgtctagttgtttgattagatatgcagtttacactagcattggatgggaacacaagtcctcacctgatgagaagatctggtgagggtggtgggagtgagatgttgatggaaagattaaatatcggggtcatcaatcaggagaaagctttgaggaataggtgcttcagtggtggaggcgctagaacgacacaatgtgttcttaactctggtgcttgttctgaaactcttcattttcaaacacattcctccagaaaaagttatgctgacgcaaaccgtgtgtctgctgtcattttgggtggaggcattggagctcagctctttcctttgacaagcacgagggctacgcctgctgtccctgttggaggatgtcacaggcttattgatatccctatgagcaactgcttcaacagcggtataaataagatatttgtgatgactcagttcaattctgcttctcttaaccgccatattcatcgtacataccttggaggcgggatcacctttactgatggatctgtacaggtattagcggctacacaaatgcctgaagagcctgctggatggtttcagggtacagcagatgctatcagaaaatttgtctgggtacttgaggattattacaatcacaaagatattgagcacattgtaatcttgagtggcgatcagctttatcggatgaattacatggaacttgtgcagaaacatgttgatgacaatgctgaaatcactatatcatgtgctcctgttaatgagagccgagcttctaactatggactagtgaagtttgattacactggacgtgtgcttctagttttttgagaaaccagtgggtgctgatttggaatctatgagagttgataccaacttcctcagctatgctataggtgatacacagaaatatccctatattgcatcaatgggcgtttatgtcttcaaaagagatgcacttttagaccttctcaagtcaaaatataatcaactgcatgactttggatccgaaatcctcccaagagctgtactagagcataatgtgcaggcatatattttcacgggctattgggaggatgttggaacaatcaaatcattctttgatgcaaacttggccctcactgagcagccttccaagtttgaattctatgatccacaaacacctttcttcactgcgccccgatacttgcctccaacacaactggacaagtgcaagatcaaagatgcatttatctcagatggttgcttgcttagtgaatgcactatcaagcattctgtgattggaccgtttgctcacgtcttagatctggatgtgaactcatggataccatgatgatgggtgcagacatatatgaaactgaagaagaaacttcgaagctacatttagctgggaaggtcccaattgggataggagagaacacaaagataaggaactgtattatcgacatgaacgcgaggattgggaagaatgtggtgatcgcaaacagtaagggtatccaagaggccgatcacccggaagagggatactacataaggtccggaatcgtggtgatcttgaagaacgcaatcatcaaggacgggtcagtcatatagataatgtgcgcctacaaagcaagagcctgcagtgctattatattgatggattgtgtaactatggtgtgagaactgttgcttgccataaagtctgcaaaagcttccgggtgcaagatgcgtggcctctggccatccagtttgtgttccttatacccttgatattgctagtacatgtactgtaataagctgcccgggaagttgcagcaagccttttatgtacctttgtattcccgttgggaattctattcgaaaataaatacaaatcatattggtgttggtgttaaaa

SEQ ID NO: 38115 - DNA, 461 bp, Setaria italica
  Peptide Sequence Number=SeqID_104089
acctaagtcagttaataacaagcatgaagttacttataagcatgaggttcatgaaactgctcaacagatacagctggatatagaacaccaggctcaattcctctagcatgtacggcacgaaaggtccttgcaaaggttgctgcagtgaacttgctgttgaccaaaatcaaatctgccataccttatatatgtaaaggaataaccactacaattagaaagctgctggatgtcaagatgtatagttaagcaaaggaaaacgaaaacaaacatagtgatacgattctagatgtggaggactataccagtagtgtactcctcaatcatgtcaattggcttgcggtataacctcctaagcatggtagtatgttgtgcaagcaaaagatcagggaaatgacaatagaacactatcttggatgatgcctttagtttgagcagtggaatcaacaacagaaacttgatct

SEQ ID NO: 38116 - DNA, 542 bp, Setaria italica
  Peptide Sequence Number=SeqID_104090
gccaatcttttgagctcctcaaggtaatcaacattttccttgagacgcttatcatagccacctgctactgttaaagttgcatcttgcaaagcaccaccagaacggagcaaagcaaatgctgaaatggctagatcaagattcttcttcctctcaaatctgttaatcgataggaaattcaacctgtacaaaagatggtagtttattttagctgcacctgaacatgataagctgatgacatctgcttatgtatgcaaaaatttgaattaagtgaaacctaagtcagttatatacaagcatgaagttacttataagcatgaggttcatgaaactgctcaacagatacagctggatatagaacaccaggctcaattcctctagcatgtacggcacgaaaggtccttgcaaaggttgctgcagtgaacttgctgttgaccttaatcaaatctgccataccagtagtgtactcctcaatcatgtcaattggcttgcggtataacctcctaagcatggtagtatgttgtgcaagcaaaagatcagggaaa

SEQ ID NO: 38117 - DNA, 515 bp, Setaria italica
  Peptide Sequence Number=SeqID_104091
cctgctactgttaaagttgcatcttgcaaagcaccaccgtagaacggagcaaagcaaatgctgaattggctagatcaagattcttcttcctctcaaatctgttaatcgataggaaattcaacctaagtcagttatatacaagcatgaagttacttataagcatgaggttcatgaaactgctcaacagatacagctggatatagaacaccaggctcaattcctctagcatgtacggcacgaaaggtccttgcaaaggttgctgcagtgaacttgctgaccaatcaaatctgccataccagtagtgtactcctcaatcatgtcaattggcttgcggtatagtggttggcaggctggaatggccaatctagtagtcgttcagcttaaaccaagcataacaggtacctgtgccgcctggatccgccgccgggagatgaatgggccggaaaggggagcaccagagtggggaggacggccgccggcgaccaatcaccgggcggaggtagcaccgccgccaa

SEQ ID NO: 38118 - DNA, 1867 bp, Setaria italica
  misc_feature (1)..(14): n is a, c, g, or t
  Peptide Sequence Number=SeqID_104092
nnnnnnnnnnnnnnatttaattaactaagtaaacacaataaacagataagcaagtcactcgagtctgcctaagggcattagcatcatgtgtgcacatcaaagtcagatgagttgcaaaaatgctgctgtattgttcaaactgtttccacatggcattgttgacatggaattaggtattatagatcactccatcctctcatggtagacattcaggacatagctgttgaggaggtcaccaaatgtcttcgtggagaatttttgcaccacatggtcccgtgcttgtttacccatcctgagcgcgaggtcagggtcattcacaagtttcagcatggcttttgagaattctgcgggggatggatcacacagaaaccctgtaacttcattcacaactgtttccactgggccaccgctgttgcatgcaatgacaggcttatgggccgccatggcttcaagagggacaatgccgaaatgttcatcctttggagtgtacaaaacacaaaggcagttggagagaagctcatttctttcagacgttgagcacgacgttacaaatttaacctgtccagacaccccttcagtcaccgccaatcttttgagctcctcaaggtaatcaacattttccttgagacgcttatcatagccacctgctactgttaaagttgcatcttgcaaagcaccaccagaacggagcaaagcaaatgctgaaatggctagatcaagattcttcttcctctcaaatctgttaatcgataggaaattcaacttataagcatgaggttcatgaaactgctcaacagatacagctggatatagaacaccaggctcaattcctctagcatgtacggcacgaaaggtccttgcaaaggttgctgcagtgaacttgctgttgaccaaaatcaaatctgccataccagtagtgtactcctcaatcatgtcaattggcttgcggtataacctcctaagcatggtagtatgttgtgcaagcaaaagatcagggaaatgacaatagaacactatcttggatgatgcctttagtttgagcagtggaatcacaacagaaacttgatctaccaatataacatcaaaggagggccaccagagtagcacacagagcgcaacaaaaatgcatcgaagataagcacagacagcatgaaagcggtaaaacacatggcggggcaagaaatctccataaacagtaactggaaaaggaccagaaacagtctcctcaaagcaacggtttttatcatgatgtgatgtgaaaacatgaacatcatgtccatgggaagcaagctcacaagccgcatcaacaatcaatctctcagcaccgccgattcctagatccggatggatgacggcgactttaagcttttttgtcttcgtccccgacggcgacgagccgccggcaccccctcccgccgcagccatctcctccgtatctcctctgtccgactcgcgctgtccttgctgcacccacgaccagtgattgctgacagtagtggttggcaggctggaatggccaatctagtagtcgttcagctgtgccgcctggatccgccgccgggagatgaatgggccggaaaggggagcaccagagtggggaggacggccgccggcgaccaatcaccgggcggaggtagcaccgccgccaaccccctttttgcgccgccgccgggagaggagggagtcggagaggaccgccaccgcctggaatcaacgccgggaggagatgaagcggccggagaggggcaccgccggtggggcggcgaaccctagcggtccatcccgtgcgcgcgcgtgttctgtcgcggggaggggaggaggccacgggaattttgacgaaccggtaagctctcgcaacagtggtaat

SEQ ID NO: 38119 - DNA, 775 bp, Setaria italica
  Peptide Sequence Number=SeqID_104093
gatacatcactgtcatttttgtgacagatgacagatcaaggctgagcttgttgtactagtatacagatcaaggctttcaaggaaaaacacaacaaaatgagcctagctttagctgacaacagcagggccagatagctgtaatgactaatcgacataatatgatgatgattcggtacatcagagtctaagactgacatcattcaatctgtgatgagaaacatccatggtataatgtggtggctcagtctgaggcaaatttctaaacaacaatgtaattatgtcagacaaggtaatcagacttcactccctgttggctaacccaagatcagaaattgcatcttcagaaatgttgttcatatcctcagtgtcatcgtcattaacattatattcactaccagaagtatcttcttcatctgattcagaaatatcactgatgtgaagatcagaaaaatgattggtacccagatagggcaattggtcctttgcttgatccaatccccccattttaagcaaagaagcctctctattatcaccacaaacaagatcagctttctgggattgtggaattccataaagtgcaacatgccgataataaagttcaagctccttttcagatactgcaatgaaacgccgaactgtctccagcgactgttcatattttgatttttcaagtgcctgatgattgaaacgtgtgtccagatggaagggcattttaaagctatatgcagatatagaatcagcctgatggctagtcatcaagacaagaggattgtgc

SEQ ID NO: 38120 - DNA, 1449 bp, Setaria italica
  Peptide Sequence Number=SeqID_104094
tttttttttttttttaaggaaagtgacatactttatagatgataacttgggacaattaagataaatggatagtttctttatttttgagactattacagactgttgactcaaacgaccgggacagtgtcctggatgcatgactctggtgcaaaggaaagcttgttatcctttaggtcataaacgaacctcgtatccacttgctgcaatgcgccgatgatggtccggggtcccggtaccatggcgaggcacgcaatctgccctgcttgtttgttatccatcatcaagaacagctgctttggtgagatcaccagcgttgcttcctcctccgcgaaatgaagcgatagggattggaggcgccccttgattgcctccgtcgcctggatgcagagcccatagccggcctgctccactcgctccgctccatagcgctcaaggtctgaccacacggcctcctcgacgacgtggtacacctcctcgactatttccatcagcggcgttccgaggtcgatgatggacccaccttgcccatccttacggcgggcaaacatctctgggcgaaccccgctgagcctgcgctcgccgacactgactccggcgaggctcacgtagtacgctgactcgtgcacgtcattcgccggcaggatcctagtggtctggtagtgcggcttgtgtgggatgtcggcttcggttccaaaccggaggaagccctgacggtttgtttcccgaaagaggcagtaggatgagcgggttagcctgtttgccatggcctgcaccgcaaacttcctgtatgcgaaaatgccggcgaatgtattgatgttatggaagttatgggtctcatggacgcagccgaagaagaaccgtgggaacacaaggccatcttctcttgtgtattggtcgactgagaggaggccttggaccaagaggcccatcggattagagatgctgaattgacaacgatgtatggtggggtcggggtggaagggcggcgtgcaaacgctggagtggacatgttggaaggttggcgagagctccccgtcgaacagaggccccgtctgggtggccaccggatgacacggtatgcactgaatccatgtcaaaggggccgtggcgtcaagctcgagaaggagcttccgtctcccatcaccggtgccaaagtggacttccgtgaggtgtaggcggtcgtccaccgggcctacggtggtgatgttggccgccgaggcgctgaggctgtgctgcaaatacaggaagccgtctgtgccgcgacggatggtgcggtcagggctctgcttggcgaagattgggaggctaaaaccggccgagctattggagaacgctcttgtgtggtcggcaatggtgaaagagaggtggtgtaagaataggggagtgatgatagcaagagcggtcatgaccttcatctccatggggatgatggtatatcgtcgaatcgaa

SEQ ID NO: 38121 - DNA, 1093 bp, Setaria italica
  Peptide Sequence Number=SeqID_104095
ctaaggactggaagcggcttctttgatgctcccctggaggcaaaacagctgattacagtgctcttgccttttcagtggacaggagttctcatcagtacaccgtggctattgcaaggagcaaccaggatccgtcagagtattatcagtgggagtttacaatccatttgtatgagtcggtcactggtaattgggtgactccctttactggagtattgctcggatggagaggaggtgacgagtgtgtcatctgcgatggaatactctactacttggtgtactccacaggagttctggtgaataataatgagcatcgccattgtcttgtcatgtatgatcttgctgcaagaccgaaccactcttctttaatgagcatggctattccagtgccatgcgctcttacatgtggccggctgatgaacctaagtgagaggcttgtgctggttggtggcattggcaagcaagataggcctgggatcatcaagggaattggcatttgggagctccataacaaagagtggcgtgaggttgctcggatgcctcacaagttttttcaaggatttggtgagttcgatgatgtttttgcaagctgcggggcagatgatcttatctacatccagagctatgggtccccagctcttctcacctttgaaatgaatcagaagctatggaagtggtcagtgaagagccctgtgtcaaagaggtttccgctgcagctgttcactggtttctctttcgagccaaggctggacattgcttcctagtgttcctaatttgttctacctccacataatccttacattgtattttgcctggttttggagtggccaaagtcgggatgagatgctgccattggaagaagcttgaacacaacatgttcaattttatagatcttattctattcattgctgggtgtattgggtatatcttctaattgaagtgatcaattaactttgctgatctttttgttaacttggttggatagtggagggagagatgatgtcaacgaattacacaagaactattgtttcgggattacttttcttgtctcagaaaattggaccactcctgttttactgtctttaagtctctgcgg

SEQ ID NO: 38122 - DNA, 278 bp, Setaria italica
  Peptide Sequence Number=SeqID_104096
cggcggcgtcaccggcaccgcaccgcggcgtggcgaggcgttccgtgatggccgccgcgggggcggctccggcggccaagctcgaggacgccgacgcgctcatcgactccgtcgagaccttcatcttcgactgcgacggcgtgatctggaagggagacaagctgatcgacggcgtgccggagacgctcgaccttctccgatcgaagggcaagaggctggtgttcgtgaccaacaactccaccaagtcgaggaagcagtacggcaagaagtttgagacg

SEQ ID NO: 38123 - DNA, 415 bp, Setaria italica
  Peptide Sequence Number=SeqID_104097
aagggttatgttaaccaaacagggaaaccccggggcgaccggtggaggtggcggccgcgtgcccgggcgtctacggccggggcgcgtacccggggtaccccggcgcggtgaggcaggacaaggtcaccggcgcggggtacaacgtggtgggcaggaacggcaggaagtacctcgtgccggcgctggtcgaccccgacaactactcctgcatcatcttgtcgtaggctcctaaatcagctggggcggcgaatggttgttgctgacagcgcttgaacgctggtatccatagtgatcttctaatgctgcatgtaatttgagtctaggcgatgggcgccagctgattatactaggagtcgcttatatttggccatatatgccacaaacaacgagaggactaaaatgacaatgaaaaaat

SEQ ID NO: 38124 - DNA, 355 bp, Setaria italica
  Peptide Sequence Number=SeqID_104098
aaccaaaccaagtgacctgctacctctccgtcaagccacagctgccaggacgccgacgaccctgcttgccatgacattgccttcctcgtctacaacccgtttgccagccggcgtcatctcctatttctacaccaagctgcacttgcctgaggtcgccttcattcacttcgtgcttggcaccgctactgacgacgtggagtacgagcttgtggctgtggagcaggcgtagccgcgaagtccggaaggagtatccaaaaggtccggcccaagatccggaaggggcttaatgcccagttgacactaactctaccgtttgggaggcaaacttcggagcataatccttacttttaaaatt

SEQ ID NO: 38125 - DNA, 1144 bp, Setaria italica
  Peptide Sequence Number=SeqID_104099
atgacaccagttcaacaattcaccattcaccagtcataactcacgtagatattacataacagcagttctagacttctacagttcaagtaatccactaaccaacaataattcaacctagaatcaagttcatggcagcagcaaaagcaagacagtagtagtgtatcacaaactagtcactacaaccaaagcatacataaatagttagtgttaatgctgaagcgttggtcaaactgtgtgagcacattggacttgacattgcacgccatcttgacggttgttttcaaggatctggtcatttggtcagggaagaatctgctgttctgctactagagttcaattgcaagttcctccaccgctgttctagtactgcaggatcaagcacctccaccactgattcccagcagctcaacaataagcattcaacagtcaacaggaggtggtattttacttctactacatctgcaaaggaaaaaaaaagggtgctgatccaggataagaaaaacttctcttcacaaacaattgttgcttgtagaagatcagtctcgttcactgatattgttttattatgtgacttagattcttgctggaggagcttggaacacacccttgtgcatgcatacccaagaagaactgacaaaatactcttgggtagtggtggccaaaaatgtgcatgacctgaaagtacttaaaaaggacagtatacccagacgctggaggatcaagttccttcaaagtgttctcctctaccaaatgttggccattgtttcttatattctctaccaaatcccctccaccatctccatattttacttgcagatccttaaggcaaacctgaaagaagactgcacgatctgttcctctatctggcaacagctcatcaggtatgacccatccaacaacaagttccctacgcttcgcatgcacaaatttccagagagtgttatcagctttcaaagccctagcacattgaaccaactcaacagtaccgcaaaccggtaaatctacattcatgttctttaggtaagacaagacttcatcaaggtattcgttgtcctgggcttcacatttccaatggaactcattgatttcacgataaggtattgctgcaactatactctgattattttctacaggtattttgttc

SEQ ID NO: 38126 - DNA, 517 bp, Setaria italica
  Peptide Sequence Number=SeqID_104100
ttgattgagctgtgtacaccttgtttcagccttttgtgttctactttctgcattggaaatggcaagtttaagatcactgataatattcccaaatgtgcttatctcagactgcgccgtactctgctcttcttcagttgcccctcttgatagcagtgaccactgcggatgagagccagagtccctcaaccattcctccagctgctgaaccttattccgcaaagtcaagaattcaggaggtgataacacctgtatctccacagcctcctgactggtattgttgtcattgtctccaggcaatatctccctagtgctttggttggcgtttaatttcatcaagctttcctccaactttgatttaagatcatcttccctgtgaattgaagcgcttaaagagacctggatggtagtaattttaccaatgagttcctttgaagttccaagaaacaattgggaagcattttctgctgtgaacattctttcataaagagattcgatggattcctccaagaaataagat

SEQ ID NO: 38127 - DNA, 576 bp, Setaria italica
  Peptide Sequence Number=SeqID_104101
gaacaatggcacagaagcacaaagtttaaatcttttgcatgtatacatgttctcaacgcatccactgtgcgcaattcgtaattgtacaatactgaacttaagagatgtatattctaacagctactcatttcttccgccacgatccatcacacaactcagtaaaaaaggagctactttttttagtatttgagttacatatgcttgttctttccttaatattatttttgtatttctttgatttcacaggaactttggagatgatgttgaagtcataagcgtccaggagccagttgcacctaagccaccactttatgcacacatcacgttctacaatcaagaaactctgttccacatccttgctggtcgcccgagggtcaagtttgtgataagggggaaacacctatgggctcggaagttcgttccaaagaggaagaaagctcagaacttctgagctaatctcacatgcctggatgttggggccaggcttggtgccttacggcacatgcatgccgaaaaaacgttggaataaacctgtagcttcttagactgccatgggacgttcttcttctctctcgc

SEQ ID NO: 38128 - DNA, 1395 bp, Setaria italica
  misc_feature (1357)..(1395): n is a, c, g, or t
  Peptide Sequence Number=SeqID_104102
cgaagttcctcccatggctcccggcatcttcagtgcaactcgttccgtgcacatgattgtgcgccagttgttcatccgtttggtcttttctctccagttcgagtcctccctttccatggagataatctccttctggatgtggcttgaagggatcggccatgctgacttccttgcaagcatcgacgccctcgataaccatgatctccgatccattgctttggctgcaaaaatgcttattgaaactctgcgtcgtaactccggtcaccaaccaaatcatagatctgtgcaaggaggctatttctgcatagaagctttgaaaggtattgttttgtacctcaacaatgtttgctgcaaggtcttagaagatattctgcaagtagcgacggcaaaggaacgcatctgccaccgtgcccatcaagctcagccgcaacaaaacgtgatggcaagagctcccatgagcacgagggatctcttgtccaggatcaaggcttcctatattagcgctcggagccatgaagcagaaggctcaagttcaagaagcattatgccgtctccgccaaaaactcacaccctcaaagacatagaaaacccaatcgaacagtgcctgtcatcataccctttggctacccttttcgaatccctgaccataacggaggaggaggaggaggagccagctgctgatgcaatccagatacagcaaccccccagcgtaccacgtgatgagagaacactcttcgtgactttctccaatggctacccatttactgcagatgaactgtatgagttcttcacaaggaactttggagatgatgttgaagtcataagcgtccaggagccagttgcacctaagccaccactttatgcacacatcacgttctacaatcaagaaactctgttccacatccttgctggtcgcccgagggtcaagtttgtgataagggggaaacacctatgggctcggaagttcgttccaaagaggaagaaagctcagaacttctgagctaatctcacatgcctggatgttggggccaggcttggtgccttacggcacatgcatgccgaaaaaacgttggaataaaccctgtagcttcttagactgccatgggacgtcttcttctctctcgctccctataataatccgtctgtcgaaccttgatcggcatggtttaagtttatgtcatgaacccaacactaatgtcgtctctgtgttaattacttaattaagacttttatctgctgtttgtgtgatgatatgatatcacacagtactgtctgctgtaatgttatcttggagtatggttaataatgttgtgttatgtgagaacacagtgttattgatctgttggagttttccttnnnnnnnnnnnnnnnnnnnnnnnnnnnnnnnnnnnnnnn

SEQ ID NO: 38129 - DNA, 2166 bp, Setaria italica
  misc_feature (1)..(48): n is a, c, g, or t
  misc_feature (2122)..(2122): n is a, c, g, or t
  Peptide Sequence Number=SeqID_104103
nnnnnnnnnnnnnnnnnnnnnnnnnnnnnnnnnnnnnnnnnnnnnnnnaaattccataaacaaaccatattatccattgatgaaccacaattcaagaaacaaacagtttgcattcagttgctagtggatggcaccacacacaaaccgaacaactcacgacagcaagaaacttaaacatagtttttgattcataattcacatagaatttgattcgaagaaacctagcgaaccaagataaatgatactgttcttcactgaagctctctcgagaggtaccaaagtactggaaactagaaagcatcagctctgcaggatgatggatttgctgaaatgttgaatagggaacaaaacgctggaaggcatcggcaccgcacggtgatgaatttgcattccatttgcctagttagtcctcattcgccgcaggtggtggtggcggtggcgggcctggtggcggtggcggcacaaatgcaaaatcaggaatgcagaaagcagtgaagagaaagccagagtaggacatgtccttgttgcagatcttccttgtcttgtatgacttgagctcaatggtgtatacttcatcttctgttgtcacgacaatgcaattgatggcatgcacaaaaccagtcagatatggtgacgcacggcgaatcggggggagcagcaactccagaggaatgaccctgcgcttctcccattgggggtttccatcagggcctgcctgcatcgaccacatatggagcctgtgagcctccacgtaggcgaaccccagcctgccgtccgcctccggcatgacgacgacgccatcacagcaagtctccacgcccggcggcgggtcgatcgccgtcaggctcggctcctccggatcgaactcatacttcaggatctcattgccgaagtcgccgatgaagtagagtgcgttctccatgagcgcggcaggcacgacgtcgacggtgatgcaggtggtggtgaagtgatccggcgcgatgtagtcgaggtcgatggaggtcagcccgctccactcgccgctctccgatgagtagaggcaggcgtgaatctgcccttcagcgctggcgcccactaaggccacgaggaagggcccggtgtggcaggcgaggtggtcgcagtcgtcgtcggcggcggcgcagagcaccgcgccgttgcagacgagggagatgtcttcgggagcctccgggagggtgtactggtcgccggtgatggggttccagacgtcgatgtccccacagtcgaggttctcgaggaggacgcggccatggcggcagtcgagcacctggcagtcgcggtagccggcggcggccgggcagaacgacgtggtggggatcaggatcgcgtcggtgcggaagatgccgaggacggggggcttcttgtggaacgcacggtagctggcggggaaggagggctcggcgacggcgcggcgccaggtcttgttgacggcggaggcgcggacgaggagtgcggggtcgtcgggcgggaggcggaggacgatctcgccgacggtgtcttccacaagctgctgtggggagcggggttcctcgcgcctgggttcgcgacttcgccggcggcggcgagcctcgggctgcgacatcgcggcgcccgcgaggtgcgcgacggggaagagctagcggaggggtggaccctatgggcccaccgtgggccttacttgggttggaccagctttgacggtgcagactactggaggacccggacgagacgccgaggtgagactcacaaaaggagcagcaggaagttagataaaagctgacaggacagagggggaaggggtggatctgcaatccttttttccctttaaacagccaaacaactcatatccggttcgagagccatcgaagagttcgccttttttttttaccacaaaaggagcagcaggatgctagaaaacggaggatgggacagaggggaaagtggtggatctgcaatcttgcataaccttcaaacaaccgaaaacctcgggatctcaggaaaataaaaggaaagaagtataaatcgaattcagacaaaagaagattgccttttttttaactttaaacaaccaaacaacttagatccggtcggagagccattgagataaaaaaaactgacaagaaanaagtctaaattgaagtccagtgcaaagagcttgccttttttacc

SEQ ID NO: 38130 - DNA, 472 bp, Setaria italica
  Peptide Sequence Number=SeqID_104104
agaaagaagacaaaaattttatgtattttttaactatgattagcgacaagtttagcttatataaggaaggtttttggagcttaggccacttgaatttacaggcctactcataaatgttgtgttatctggctattaccattataggacatttttgtgttatttggtataataagttgctcgttccttgatcttcatgtttactttgcctgatgttgggatgatgcaaggatatgagtttaagtccttaggataatgtacacgaatgtgccatagcgacagcagtatatcaccacttttgggattgtgaagtaattttcctaatgttttgcagttttcaaagctatacctgggaggtggatatgtgattgtgacacaggagtgtgcattgttctacgataattggttcttactattttctaagctgctggtggtagtcttttgattaccgacttgatcatgatgcaagcagaaa

SEQ ID NO: 38131 - DNA, 543 bp, Setaria italica
  Peptide Sequence Number=SeqID_104105
aagactagaataggtgttaggtgtgacaaaacaagtacctagaatagcttaatcgaattggcaaagactgcaatgatcctcgtgatttctctgggaaacaagatcttgctactccgaacaagtggttgtgattcatttcttgagctgctgatgttgtactgataatgttctccctcaactgggaatgtacgagctgctcttgctgcttttgatggcttggaccgccaccagatggagcctggtcaccactaagattgatgatttgtggctgcccatgaaaaatctgaggcttatctcttgcatccatcattcgatttttacttctcctgtagtaacctaccaaatcctttatggacttcagaaacatggaaaactgccccctgtagttgtcagggatgttgcatttttctagcagtaagaaattcagcaccagtgtcgttctcttcttcaaatttactctaaatatgtattgtccagctttgtctttgggtaatgactcaaactgcttctctgtaagttttggaacatgaagcacttgattca

SEQ ID NO: 38132 - DNA, 347 bp, Setaria italica
  Peptide Sequence Number=SeqID_104106
agtgtgagcatcttttagtgctcacggaactgaatcaagtgcttcatgttccaaaatttactctaaatatgtattgtccagctttgtctttgggtaatgactcaaactgcttctctgtaagttttggaacatgaagcacttgattcagttccgtgagctctgaaaggtgagcatcttttagtggctttatctgaaatccatgtaaacagtttagtgcaacatgattatatcaggattattcgcattcaacacagtatagtaatgcttatatataaaagacatggcaattgtaagtacagatttagagtaaatttgaagaagaaattcagcaccagtgtcgttctctt

SEQ ID NO: 38133 - DNA, 395 bp, Setaria italica
  Peptide Sequence Number=SeqID_104107
cgaaaatcaactcgctcaccatccttcctaactatgaataaacaccttgagttttcgaattccggatgcaatcctaccgtgatgtagtcaataccgcatccaattttcttctcatattgtggatggtacggaagcaacctttccagaatcgctttttcatgttcaggactcaatcgatcaccgctttcatacttgccggagtggaggatcatccggacgaatccaacgagcggcacggtgtcctcgaggataaggtcctcccagtcgacccactccctctccggcgccttcctcctgccctgaattccttcctcctcgggcgcctcctcgtcctccaccaggccatccaacgaagagcccgcgtcgctctccctcttcccttcttccttccttct

SEQ ID NO: 38134 - DNA, 683 bp, Setaria italica
  Peptide Sequence Number=SeqID_104108
taaaactaaattactaattagtacggcggccatctacttcagtaatcttgtctcctgcggaaatgcctgagaatgaaactgtcggcatacatggggtacttttgtcggatgagacctttgacgcacttccagaacgaaaaatcaactcgctcaccatccttcctaactatgaataaacaccttgagttttcgaattccggatgcaatcctaccgtgatgtagtcaataccgcatccaattttcttctcatattgtggatggtacggaagcaacctttccagaatcgctttttcatgttcaggactcaatcgatcaccgctttcataccgacaatgaaacaagatattgtgtattagtacttttttttttgactctctacacttatcttgaaatttttagtaagtaatggatccttggcatttcgtggaataatcctgacgggtacctccattggcttgaaccggcctgacgcagcgctgccatctttgggcgtctgcagagttgctcttcctagcgcatctcaccttctacgccactgctcaaacgtggagctcctgcacgtaatcaccgcgctaggggtggccgcattgggtgccaaaccatgggggagccaaggagtaagcgtagtggctcgcggaggtgtggtagcatgcgctggatgacagtatcaaggggaatccact

SEQ ID NO: 38135 - DNA, 496 bp, Setaria italica
  misc_feature (16)..(16): n is a, c, g, or t
  Peptide Sequence Number=SeqID_104109
ttttgttttttgtttnttttttaagttccttaccggttgtattcctaggttggttgtcttgtaaggttgcactatttcactgcgaggtttgcgctcaatggatcagaaagaggatcctcaagatgaaaggggtgcaatctgcagagctagacctaaaagcatcagaggtgacagtgaagggtgtgttagaagaggccaaactagccaagtacatgtacaagcgcatcggcaagaacgtgtccatcatcaagtctgagccggttgccccgctggagagccctggcggcgatgacatggtcaaggaggagaagaaggtggaaggtgttgaggagaaggagaaggagggtgatggcaacaccggtggcgaggaggacaagatggataaagagatggacgcggcagccatcgccacagccaacctgtacaatgtaactaacccgacaagtttagacaattaccctaggacggttaactaactacaacccccgaacaacta

SEQ ID NO: 38136 - DNA, 1476 bp, Setaria italica
  Peptide Sequence Number=SeqID_104110
tttgttcttacttattttcttacttgttcgtaggttttgtcgtcttctaattggtattctagtaaagtactcagctggtagccaggcattgcctgctcatagaggagcggtagaggcgtgtgtcggagcatagcactccacgacacgacaggggaaggaagccatgggcgaggaggtgaggaaggaggaggtggagaagcccaaggcgggggtggaggagaagccaaaggatgcggtggcggaggcgaagcccaagaacggggaggaaaagaaggaggaggcgccaccgcctccgccggaggaggtcgagatgcgagtctacatgcactgcaagggatgtgccttgaaggtcaagaagatccttaagcgcttcaacggagtggagggcgtgattgctgactccaagacgcacaaggtggtggtgaaggggaagaaggtggccgcagacccaacaaaggtgatcgagcatgtccagaaaaagaccggccacaaggtggagctcctctcaccgataccgcctccggtggaggagaagaaagaagaggaaaggaaagaggagctcgagccacccaagccggaggagaaggaggagccaccggtgatccaggtggtgctgaaggtgcacattcactgcgaggtttgcgctcaatggatcagaaagaggatcctcaagatgaaaggggtgcaatctgcagagctagacctaaaagcatcagaggtgacagtgaagggtgtgttagaagaggccaaactagccaagtacatgtacaagcgcatcggcaagaacgtgtccatcatcaagtctgagccggttgccccgctggagagccctggcggcgatgacatggtcaaggaggagaagaaggtggaaggtgttgaggagaaggagaaggagggtgatggcaacaccggtggcgaggaggacaagatggataaagagatggacgcggcagccatcgccacagccaacctgtacatgtactacccgcagtttgcattccctggcggttactactcacccccgacactgctacctcctgggtacatctaccaagcggcctacccgccaccgtcatacacagcatatgcgccgcaccaccagatgatggcaccacagactttcagcgacgagaacccaaatgcgtgttccatcatataaaaaggtagaaccatggggatctagagacaataagaagtaggggagcagaaatgggaagctgcataatttgaagattgtctttgcaaaaaaagaaggcccggcccatgagcaaagcaaatggcaacttgaagaaacataccagtctttttgaggggttaaatttccatttctctttgttctttttttttgtaagtttaacccctttttttcacctttctggtacaaatgaagtctggacttgtcattttattatggatgctatccttatgtggagttttgccttaaaaaaaaaaactaactacaacaactagaagtaa

SEQ ID NO: 38137 - DNA, 1349 bp, Setaria italica
  Peptide Sequence Number=SeqID_104111
tacgttactttactttactaactaaggtaacgggtacttaccttaaggggtcctacaagacctaccctcaatctctgttttgacagatcgagactgaatggcggatcaaggagtgtttgcacatgagcaaggaaccacgggagaccagcaccaacaaccacatgggataggagttggcgacgaccttgagttgcctccggggttccgcttctacccaagcgatgaagagatcgtcaccttctaccttaagcccaaggtggagcaaaggagcttcacctgcatcgccatcggagaggttgaccttaaaaggaccgagccatgtgaactccctggcaaggcgaagacaggagaaaaggaatggtacttcttttacgagaaggaccgtaagtatcggacggggttgaggatgaaccgtgccacagagggcggttattggaaggccacgggcaaggataaggagatttacagggccatgacaggggtactcattggtatgaagaagacgctcgtcttctacacaggacgggctcctaggggccaaaagaccacttgggtcatgcacgagtataggctcgaaggcaacaacaagtccccccacccttcatccagctcaacctccaccaccattaaatcatcttcagcttccgaggcgacggatgagtgggtggtttgtcgtgtgttccgcaaggccacagggataaagaaggcacctacaccacctccatacaatcatgctattgttgacagtgggattgatcaacacagcatccccatgcccccaccgctgcaacttcctatgctaccgaacttcaccatggacccggtggggtcctactactccattgctggtgtgagctcctcatcgttgtcacccgtgattccacctattactgcaggcacgggcaacgacatgcttcagatgaacagtgctttgtttgggaacatgatggccgttccgccaccgatgcccttctcccaccagttgggcataggaacagcaagtgccagcaccttcatggctgcaccgcagagcgaggcttcatcgatcctgtctcagaaagatgttgggatgagccttcaccagaccaatgccatggatatatcgtctatggtgtctgcaaccctcaagtctatgggcaccatggacatggatggcttttggaagtactaaagaggtgaagagatatgtgaagacaatgggtcacataaatatgtttgtcatattgcaaagctttcttttgaccttagaatatggctatgaatgtaaccaggtgataagagaccttaaatgaatgagtggaaactaagagttggaaaaagatccgccaaaaatttttaaaaaaaaaaac

SEQ ID NO: 38138 - DNA, 741 bp, Setaria italica
  Peptide Sequence Number=SeqID_104112
tctacgaatcgagcatgtgctcaagcttaacacgtgattgctcaatttgtccccaagctactgtttctacatgtacatatgaacatgtgaaaaaaaattagatcaataggaactagacgatttttcattaagaagaagagattcgaacttggatgattaggatgtacgaccacacctccacttaaccagttaagatagactcactttgtacatgtacatgtgaaaatatattaggacacatttaatgtcttgttactcatgaaacatatggatcgtactgttaaatccatgtcaataatccacctgttcggctggacttataaaccggctgaaaagttgaaacggctgatttgttgtgagagaaaaatattgttcggtggttgataagctgaagcgaacagagcgaatagcttctctgccaaccacctctaaggctctaacacgtcttgggtggaatttaatacgattacaaccatttgatgtgtacatggtgcacataccccgtatatggctgaatcacgtcatgtgattgccgctcgcgaagccgtcccaacctgtaaaataaaaagtattcttgcaagcttttgtttgatcatgtgatccagaactcttgggaataatttaagttagcactggtgactgctgcgcatcagtgcatgttccaagacagtctaaaacatatagtccaagttcacacttcacagtaacacacgaatacaagcctttattaagaaaaacaat

SEQ ID NO: 38139 - DNA, 313 bp, Setaria italica
  Peptide Sequence Number=SeqID_104113
gcttcgtttgatcaggggcggagccatggccgagaaccgcaggttcgtgctgcccggccagccaccaggtacgaaccacctcgagaccgggcgcctctgcgtccgggtttagggttttgggctcttcccacggcagagcacggagaattcggtggattttcgaggtgatttcattcggatgcatgatttttttggacaaaaaaacgacacgttgttgtgtccatcgaggacaactcgtcttaaatgttttgcatctgaaaacgccgtgcgtttgggttcctatagttcgtgcgaaattcactctcctcccccc

SEQ ID NO: 38140 - DNA, 470 bp, Setaria italica
  Peptide Sequence Number=SeqID_104114
ctgtgaaagaagctcacgagaaactgaaagctggcagcattgatgtactccactgctactatgcccatggagaggagaatgaaaactttcaaagacgaacatattggctgttggaagaggatttcactcatatcgttcttgtacactaccttgaagtcaagggatgcaaacaaagtttcagtcgtgtgaaagaagaatttatgcagttatccaatgttgatagtccttcatgttcaaattctatcactagtcagaaccatatgggcccacaaaccatggaggctgctgaaagcccaataagtggacaaatttcagattatgaagacactgaatcagataatttccgagcaagctccagatcagataatttccgagcaagctccagataccaccctctcgctgagatgcagcagcctgtggatggattcatgacagaaaacatgttatacgctttctttcttctaacttgt

SEQ ID NO: 38141 - DNA, 1581 bp, Setaria italica
  Peptide Sequence Number=SeqID_104115
tgtcgttcacaataactacaacaatcactcccccacctcccccgtagttgtctcgcggccaataaattttcccagcgcgacggcgccccgccctcccgctccgttcctcctcccttccccgaaccttccccggctcccccgatccctcctgcccccgttttaacccccgccttccgacgagccgccacaccagcggcagcgagcggttcggaagagggagggggggagaggaggcttcgtttgatcaggggcggagccatggccgagaaccgcaggttcgtgctgcccggccagccaccagacttctcgcagatactgcaggaggctcggaagcgctggctgcggcccaccgaaatctgcgagatcctctccaactacaagctcttctccatcgccgccgagccgcccagcaggccccccagtggctctctctttttatttgatcgcaaagtactgaggtacttcagaaaggatggccacaactggagaaagaaaaaggatgggaagactgtgaaagaagctcacgagaaactgaaagctggcagcattgatgtactccactgctactatgcccatggagaggagaatgaaaactttcaaagacgaacatattggctgttggaagaggatttcactcatatcgttcttgtacactaccttgaagtcaagggatgcaaacaaagtttcagtcgtgtgaaagaagaatttatgcagttatccaatgttgatagtccttcatgttcaaattctatcactagtcagaaccatatgggcccacaaaccatggaggctgctgaaaagcccaatacgtggatggaggctgctgaaagcccaataagtggacaaatttctgaagcggaattcggtgcagcagataatttccgagcaagctccagataccaccctctcgctgagatgcagcagcctgtggatggattcatgacagaaaacatgttatacgcttcttcttcaactgttggtagtagacaaggttatcatggtgaaatgttgccaacaacagctaacgtagataatcattcattttctcaccatgacatagctagaatgtttgacaatgccaacactgggctaagcagcgtttccagaattctgtttgactcagtgccattcaacgagcccttcacagactattcaactgggttcacagaaccaacacttcattcttcatttgcctgcttagaggctaataatctggaggatagctctcatttgcagacgtttacatctgaggctctgtacactaaccacctcagcaaggaggaagctgatgcgctgagttttgctggcataccatcatcagaggtaaatggaagtagatgtactgaaagtagcatcaaacatccactcttgaagcagtcatcattagatctattgactattgagcctactggtttgaagaaacacgacagcttttcaagatggatgagtaaagaactcaaagaagtggttgatttgggtatcaaatctacgtctgatgctttctggagtaacattgagacggtgaaggttcctgatcgttgcaatgtgctgactaatgaacagctagatgcttatgtagtg

SEQ ID NO: 38142 - DNA, 458 bp, Setaria italica
  misc_feature (435)..(458): n is a, c, g, or t
  Peptide Sequence Number=SeqID_104116
catcagatttggagacctcatggatgacccgctggcttgcatgcttggttctccaataagggacatggaaagccacaatccctcggaaaacacgagagctgtcctgaagagaacggagccacgaaaccgcaagagaagtcaccgcccatcatcgccatcagaatgctgacaatttagttgctgcatcgtgatggttggaccatagcccataggtgtggactgtggtatgatgttgtaaatgttagcattctggtcgtcaactggagcaattagttgtcggcatatattttctgggggttgagtaagctcatgtgcacgagctaattgaagtgtttatctgctgtcacgtacacaatgatatgaacggtaattgcccaatcaccctgttaaatgaacccgcattcttgcaaatgtatacaaaccgggtttttaagnnnnnnnnnnnnnnnnnnnnnnnn

SEQ ID NO: 38143 - DNA, 1610 bp, Setaria italica
  misc_feature (1588)..(1610): n is a, c, g, or t
  Peptide Sequence Number=SeqID_104117
tttcctacctaggggcgggaggcggaggacggggagtcaggagaggggggaggcggcggcgatcgacgcggggaagtcggcgcggaggccgctcagcctgtggcccgggatgtaccactccccggtgaccaacgcgctgtgggaggcgcgctccagcatcttcgagcggatgatggacgcggggaacagcggcgccgccgcggacgcggccgacgccggggagcagcgcgcgccgacggagctgctcgttaagacgcccgcgcagagccggaccagcatcgtgtacaagttcgccaccgacgacatcctccgggagcagtaccgggacccgtggaacgaggtgcgcatcgggaagctgctcgaggacctcgacgccctcgccggcaccatcgccgtcaagcactgttctgatgaagatagcacaacaagaccccttttggttgtgacagcttctgtcgataaaatggagctaaaaaagcctattcgtgtggacactgatttaaagatagctggagctgttacttatgttggccgctcatcaattgatatacagattgaagtgactcaggttgatcaagatggtgataatgactccgatccaattgcattgactgctaacttcacatttgttgcacgtgattctaagactggaaaatctgctccagtgaaccgcctttcacctgaaactgaaagagagaagcaattatttagtgagagagaagcacgtgataagatgagaaaaaggaagcgagaagaacagaagggagggcttgaaaatgggatacataagcttcgtgctgaggctgagaggctgaatgcgttactcgcagagggtcgtgttttctctgatctgcctgctttagctgatagagatagcatcttgctgaaggatacccgcctggagaactctcttgtctgccagcctcagcaacgaaatttgcatggaaggatattcggaggtttcttgatgcacagagcatttgagcttgccttctcaactgcgtatgcctttgttggacagagaccttgttttcttgaagttgatcatgttgacttcttaaaaccagtggatgtaggagactttcttcgattcaaatcatgtgtcttgtatactcagcttgacaatccagagcagcccctggtcaacgttgaagttgttgctcatgtaacaaggcctgagctccggaaaagtgaggtctccaacacatttcacttcaccttcacagtttgtagcaacattttgaaaaacggattgaagattcgtaacgttgttccctcaaccgaagaagaggcgcgacgcatactagagcgcatggaagcggagggtttatgtaactagtccttcagagccacttgtttcagacatttgttatttgataagttgatatcttacttgtacctgctaacgggggaattggccacgatttcagcagcagctatcaacagataagtaacacgccggtaatagaacggcatagctgtagcctgtagctccatctccgtggcaccatttgtgaattttgttttctaaagagaccatacgtagtgtataataacatactcctcgagactcaaaatgttcttttgnnnnnnnnnnnnnnnnnnnnnnn

SEQ ID NO: 38144 - DNA, 1477 bp, Setaria italica
  Peptide Sequence Number=SeqID_104118
aagaacccgcatatactacctcaagctctgacagagagatcgaggataatcggtggaccaagaagtgtttgcacatagaagcatgggaggacaaaaggtgcaaccaaaagggatgagcatcaaggatggccttcagctgcctccagggtttcggttctaccctagcgatgaggagataatcaccttctacctcaagcccaaggttcatcaaagcaacttctcttgcactgccattggagaggttgacttgaataggatcgagccatgggaactgtctggcaaggcgaagatgggggacaaagagtggtacttcttttatctgaaggaccgtaagtacccaacgggaaagaggacgaaccgggccacgaagggcggctactggaaggccacggggaaggatagagagatctatagggccgcaacaaaggatgagctaccgctgcttgttggcatgaagaagacactcgtcttctacaagggtagggctcccactggcaaaaagaccgactgggtcatgcacgagttcaggcttgaaggcaccaataaggtcccctgccctgcatctagctcaacttccactactaccattaaatcatcttcttccgaggatgaatgggtggtctgtcgcgtgtttgacaagaccactagggtaaagagggaacctgcactaccattgttcaacgtggccatgaatggcggtggaattgaccagagtagcatctctatgcctatgccgctacaattttccatgctatcagacttcacaatggacccagcggcatcctactactccaccattgacgcaagatccttagcggtgccacctgtaatgccacctttgtcaggcatgggcaacatcggtcttcaagtggctagcaccttgtttgggaactcgatggttgtggcgccgccgatgtccatctaccaccagatgggcatgggagcagaaggcgctagcagcttcctaggtgcatcgaagagtggaccttctttgatggtgtcacaaaaggacacaggggtagaccatgaccaggccaatgctaatgagatatcacagatgatttctgcaaacccagagttcgtggccaccaaggacatggatggcatctggaaatactaaagtgaagggggaagttgagacaatgggtcacataaatatattatgcctatagctacatcgcattttatgaaataatgcatggtttctatattttggtaactagctaagctaattatgtatatgcttgtactattcgaagcactgtattgttgcatgcatgtctatatgtgtttgttcttaataattggtggggatgtgtgcatgtatgtgtatgtatatttcaaggactatctaagatatatgttgatggatgtactgtatgagcatattgaagtttgtgacatatattaccatatgtgatataaatatgttgtttaattatgaatttgattgtggttttacaaagagaaaaaaaaa

SEQ ID NO: 38145 - DNA, 616 bp, Setaria italica
  Peptide Sequence Number=SeqID_104119
ctagaagtgagcgataggcaaaaacacaaagcagaaatagcatttgcttagtgagttaaccccttgcaaattgcaatgtcatcgatgccgtttgacgatgaatacgagaagaggcgagccaaggcttaccgggactatgacattattcgcaagcagttcccagtgctggtggagaagacggccgcactggatccgccgaagaagaagaccaggcgatccgcgaagaagagaaaaactgaagcggagaagaagaccggcgacccgccggcgccggcccttacgccggaaaccagggcgcgctacaaggagctggccgggatcatcaagggcttcctcaaggagctcggcgacgacgtcgacgaggcggcggcggcggccggaggcagcacaagccaggcagcgccaccgccacctgcagcagcgggagacaaacagtaaatcaagagctgccgcgtgccctgcgctcgctgaataaaggaggccgcctctgcctctcggctggcagattatcccatccagtaataacaatcagtttccatatgcttgtttctcagttactaagttaatcatctggatgctgaataattagacgttccgttgtgttacaaaaaaaaaa

SEQ ID NO: 38146 - DNA, 581 bp, Setaria italica
  misc_feature (1)..(69): n is a, c, g, or t
  Peptide Sequence Number=SeqID_104120
nnnnnnnnnnnnnnnnnnnnnnnnnnnnnnnnnnnnnnnnnnnnnnnnnnnnnnnnnnnnnnnnnnnnngtttattacaaaattttacgggctattgatttctgtttgtcctagatttgccagttgctgttgtacaaattaagaaactttgaagtggactgcgagcgcccttttggcgaggcatacatagtacacggcatgtgtgtgtatattaaggaaaggacggacatggaccaagctgctactccttagtcttgagtttgcctctaacgcaggacttgaccaagctcttgatgcccttgctcttcttcctgctgctgctgcttcccgcgctcatcgtcgtgatgttgatgtccatgtcctcctccatcttgagcacgcggtcctccaggacgccgatgcggtcgacgagggtccccttggcctgcgcctcctccagcgcctccttggccggccggcgccgccaggtcttgctcccccgcggcgtgctggcggccgacgacgacgaagcagtggacggcgaccaagcgcctgatgctgctgtacttgtacggtgcccgtgctgctgcatcgtcatctcc

SEQ ID NO: 38147 - DNA, 668 bp, Setaria italica
  Peptide Sequence Number=SeqID_104121
gatgttggtgtcgagaagccgttagaggttaaaaatattgttgttgcgatagaagacataggtgtcgagaaggctacagagagtgaaaatattgttgttgtaaaaggtgtcgatgtcaagtttgtatcaatgagtgaggttgtgcatgatggaagcataaaggaggtttatccagctagtgtagagtgagtgatcgaggatagtccctggaaggagcaggatgttgaaggactggcaagtgcaagtgaagcggtggaagatttgggtgtcaataagcctttagaggttgaaactatttctgctgccgtaggatacattggtgttgtgaagcctacggagattgaaaatgttattcctatagaaggcgttaatgtcaagcctgaatcagtgagtgaggcaactatagtgattgtgcatgatggaagcgtaaaggagattgatccagctaatgttgttagagtgctcgaggacagtccttggaaggagcatagtgctgaaggtttggtaattgcaagtgaagtggtggaagatgttggtgttgagaagcctttagaggtcaaaaatattgctactgtcgaagaagatattggtgtggagaagtctatagagatcgaaaatgttgaggttgtagaaggcgtcgatatcaagcctgagccagccagcgagcc

SEQ ID NO: 38148 - DNA, 569 bp, Setaria italica
  Peptide Sequence Number=SeqID_104122
gatgacgctgccaagcctgagccagcatgcaaggcaacaatagttgtaaattctaaatctaattttgttgctaataatgtcagtcctactaggattgttaataattcaattgatgcatcaatccaggttgcacgtgctggaagcgtaaatgaggttgattcagcaagtgtagacagtatgctcgagggtagttctgggaaagagcagaatatcgaagacttggcaatagcaactgaagcagtggaagatgttggtgtcgagaagccgttagaggttaaaaatattgttgttgcgatagaagacataggtgtcgagaaggctacagagagtgaaaatattgttgttgtaaaaggtgtcgatgtcaagccttacgcagcaagcaaaacgagtatagcggttgtgcatgatggaagcgtaaaggaggttgatctagcaaatgatagtgtgctcgaggatagccctaagaaggagcagaatgtcaaagaccttgcaacttcaagtgaagcactagtaattgttctaaagtacctttgtcttaacttttcttaagtttagttaagtttctttaa

SEQ ID NO: 38149 - DNA, 445 bp, Setaria italica
  Peptide Sequence Number=SeqID_104123
tgaaatatgttgatctcgagaaccctttagaggttgaaaattttgatgctgcgatagaagatattaatgtcgagaagcctacagagattgcaaatgttgatgttacggtggaagcaaaggttgtgaataaattggtagatgataggaagaagaagtcggaaccagaaggtgatcaggaagaagaggtaggttacaaaggttgggttggtggtgaattgggtgaagagaaagaggttgatcactctgctgttagtgttgaggcagttgaagataagggagccccttttgcaaaagctaatggtgaattgggttatgagaaggaaataaataatgatatagtagttgtggaaggtgaagaaactgtaaaagaatcaacagagaaggatggtgttgaagatgaggttgcaaaacctgagccaacgagcaaggttttggatgatggaag

SEQ ID NO: 38150 - DNA, 1562 bp, Setaria italica
  Peptide Sequence Number=SeqID_104124
ggttaatgagagatggagaagccccaaaagaattaatagagatagatgttaaaggaataagggaccaactaaagactgagctaatgagagaggcaagtacaacggttgtgcatgatggaagcataaaggaggttgatccagcaagtgtagacaatgttctcaaggatagtcctgggaaggagcagaatcacgaaggccatgcaactagaagtgaagcaatgaaatatgttgatctcgagaaccctttagaggttgaaaattttgatgctgcgatagaagatattaatgtcgagaagcctacagagattgcaaatgttgatgttatagtagaaggcgtcaatgttgagaagccaacaaaggttgacaatattgtttcttcaaatgttgatggtatcttgtctcgagaattggtaccaaaatcaagcaaggagaatattgaccctgaggaggttgaaaatgatattgatgttgttgatcatgaagttcaggttgatgatgacggcacatttgaggctgtgacaaatgtgatagaagtcgagaatgatgagatggagggtgatagaggaggggatggtggtggggagctggaagaggcaatagaggatgctgaaggtagggccttgggtacggcagaggccatgaaggatgatggaagaagggaactggtggtgtgggaaaaagaagttgacctctctatgacaaaatcgacaccaacgctaatagcagagcccaaattggataacggtgaatttggggaggaggaggacactatggcttcccccgatacactgaaaggtgaggataatggtgaaccgagggaggaggaactaggtatggtggtggaagcaaaggttactgaggtcgtggagaagccagatttagaaggtgagaagagtgagaaggtaggttatggaggtggaaatggtggtaaattaggcaagaaaaatgaggttggggtccctgttgttactattgtggtagcagaactagaggatttgttagccccttttgctgaagctaaatgcccattagcttttgagaaggaagaaaacaatgatatagtggctttaggaggtgatgaagccacgaaagaatcaacaaagaaggatgttggtgttgaagatgacgctgccaagcctgagccagcatgcaaggcaacaatagttgttgcacgtgctggaagcgtaaatgaggttgattcagcaagtgtagacagtatgctcgagggtagttctgggaaagagcagaatatcgaagacttggcaatagcaactgaagcagtggaagatgttggtgtcgagaagccgttagaggttaaaaatattgttgttgcgatagaagacataggtgtcgagaaggctacagagagtgaaaatattgttgttgtaaaaggtgtcgatgtcaagccttacgcagcaagcaaaacgagtatagcggttgtgcatgatggaagcgtaaaggaaggttgaatctaagacaaaatagaataagtagtagactacgaaggaataagaccctaaagaaaggaagacaagaaatagtacaaaagaaccttagacaaa

SEQ ID NO: 38151 - DNA, 1667 bp, Setaria italica
  Peptide Sequence Number=SeqID_104125
tgaagatgatgcaaaggttgcagtggctgagtatgagaagctggaacaacaaggtgagaagggtaaggaggtaggttatggaggtgaggatggtggcgaattggacaaggagaacaaggctaaggtctccgttgttagtgttgagatagctgcaccagaggataacgtagccattttagttgaacctaatggtgaattgggttatgagaaggaaataaataatgatatagtagttgtggaaggtgaagaaactgtaaaagaatcaacagagaaggatggtgttgaagatgaggttgcaaaacctgagccaacgagtgagccaacgagcaaggttgtggatgatggaagcataaaggaggttcatccagcaagtgaagactatgtgctcaagtacagtcttgcgaaggagcaggatgtcgaaggccaagcaattgcaagtgaagtggtagaagttgttagtgcggagaaacctttaaaggttgaaaatattgatgctggggtagaagacattagtgttgatgagcctacaaagattgaaaatgttgctattatagcaaaagatggtgatgtcgagaagccaatggaggttgaaaatgttgctgcttgtagtggtgacagtatcttgtctcgagagttggcactagaaccaagcaaggagaacaatgatcctaaggagtatcaatgtgctactgaagttgttgatcatgaagagcaagttgatgatgattgcataactgaggctatgttagttgtggcaaatgctaagaatgatgaggtgaagggttacagaggaagggatgatggtgggaagatggaaaaggcggaagaggatgctaaaggcgagagcttaagtgtggtggaggccgtgaaggatgatgacagcagtgaactagtggcacaacacacagaacctggcgtctctgtgttgcaaccggcaccagtactaacagcccagtccaagtcggagaacagtgaactggggaaggatgatgcttctgtggcttcccatgatacgtcgaaaggtgaggataaaggtgaattgtgtgataagcaggaggagaaagtaggtgttacaatagaagcaaatgttgcaaataaatatgaagatgatgcaaaggttgcagtggctgagtatgagaagctggaacaacaaggtgagaagggtaaggaggtaggttatggaggtgaggatggtggcgaattggacaaggagaacaaggctaaggtctccgttgttagtgttgagatagctgcaccagaggataacgtagccattttagttgaacctaatagtgaattgggttatgagaaggaagaaaacaatgatatagtggttatgagagatggagaagccccaaaagaattaatagagatggatgttaattttgaagatagggccactaagactgagctaatgagagaggcaagtacaacggttgtgcatgatggaagcataaaggaggttgatccagcaagtgtagacagtatgctcgaggatagtcctgggaaagagcagaatatcgaagacttggcaatagcaactgaagcagtggaagatgttggtgtcgagaagcctttagaggttaaaaatattgctgctgtcgaagaagatattggtgtggagaagtctatagagatcgaaaatgttgaggttgtagaaggcgtcg

SEQ ID NO: 38152 - DNA, 1036 bp, Setaria italica
  Peptide Sequence Number=SeqID_104126
ggacaaagaggaggatgtgggattgaagggaaaggtgggggttttgggagtttggaggcagagaatgatgaggcacagggtgaaggagaggatgatggtggcgaggaggaggaggaggatgctaaaggcgagagctcgggtgtaggggaggccataaaggatgatggcggtagggaaccggcaatgcatgacacagaagttgtcgtcgatgtgttggaagtggcaccagcactggagtccaagttggagaacaatgaatttggggtggatgacactactttggcttcccccgatgtgctggaaggtgtagataaaggtaaattgcaagaggcgtgggaggaggaggaagtaggtgttacggtggaagcaaaggttgtgaataaattggtagatgataggaagaagaagtcggaaccagaaggtgatcaggaagaagaggtaggttacaaaggttgggttggtggtgaattgggtgaagagaaagaggttgatcactctgctgttagtgttgaggcagttgaagataagggagccccttttgcaaaagctaatggtgaattgggttatgagaaggaaataaataatgatatagtagttgtggaaggtgaagaaactgtaaaagaatcaacagagaaggatggtgttgaagatgaggttgcaaaacctgagccaacgagcaaggttgtggatgatggaagcataaaggaggttcatccagcaagtgaagactatgtgctcaagtacagtcttgcgaaggagcaggatgtcgaaggccaagcaattgcaagtgaagtggtagaagttgttagtgcggagaaacctttaaaggttgaaaatattgatgctggggtagaagacattagtgttgatgagcctacaaagattgaaaatgttgctattatagcaaaagatggtgatgtcgagaagccaatggaggttgaaaatgttgctgcttgtagtggtgacagtatcttgtctcgagagttggcactagaaaagaagttaggacaactaagaaaccaaagacaaaggaaga

SEQ ID NO: 38153 - DNA, 203 bp, Setaria italica
  Peptide Sequence Number=SeqID_104127
ccgcaaacatcttatcatcaccggcactcttcctacaacaaccttgggccctatcgcagcagcaatggcagcaaagatatttgctctttttacgctccttgccctttcggtgagcgctgccactgcagtctttcttccgcagggatccctagctgctactgccgctattccacaatacctcccaaggctgtcacatgtgggag

SEQ ID NO: 38154 - DNA, 420 bp, Setaria italica
  Peptide Sequence Number=SeqID_104128
tttcttatcactgctgcctacttgcagcaacaacaattgctaccaaacgtgttcaaccaactagcactagcgagtcctgtcgcccaattgcagcaacaacaacaactgcttagtgtcaacccactgggtgtgatgaatcccgccgctttctggcagcaacccatcattggctcggctatcttctagattaactatgagttgtacttctttaataaagtttgcatgctgaggagttttactcttaaacaaaacatttcttatttccgagagtcaaactcctcagcatgcaaactttattaaagaagtacaactcatagttaatctagaagatagccgagccaatgatgaatcccgccgctttctggcagcaacccatcattggctcggctatcttctagtacaactcatagttaatctaga

SEQ ID NO: 38155 - DNA, 360 bp, Setaria italica
  Peptide Sequence Number=SeqID_104129
tagacaaacttaataaatttgaaaacccaactaagcagcctcttattagcaacaatggcagcaaagatatttgctctttttacgctccttgccctttcggtgagcgctgccactgcagtctttcttccgcagggatccctagctgctactgccgctattccacaatacctcccacatgtgacagccttgggatatgaaaatccaattgtgcagtcctacaggctacaacaggcgctcgccgcaaacatcttatcatcaccggcactcttcctaccacaacagtcggccttattgcagcagcaatccctgtctcatctgacagtacagagcatcacggcacagcaacaacgcattctatca

SEQ ID NO: 38156 - DNA, 380 bp, Setaria italica
  Peptide Sequence Number=SeqID_104130
tttgaaacccactagcagcctcttattagcaacaatggcagcaaagatatttgctctttttacgctccttgccctttcggtgagcgctgccactgcagtctttcttccgcagggatccctagctgctactgccgctattccacaatacctcccacatgtgacagccttgggatatgaaaatccaattgtgcagtcctacaggctacagcaggcacttgcagcaagcatcctaccatcatcggccatgttcctaccacaacagtcggccttatgcagcagcaatccctgtctcatctgacagtacagagcatcacggcacagcaacaacgcattctatcaccgttgaaccaactagccttgccgaacccgccgcatacttg

SEQ ID NO: 38157 - DNA, 550 bp, Setaria italica
  Peptide Sequence Number=SeqID_104131
ataatttgaaacccactagcagcctcttattagcaacaatggcagcaagatatttgctctttttacgctccttgccctttcggtgagcgctgccactgcagtctttcttccgcagggatccctagctgctactgccgctattccacaatacctcccacatgtgacagccttgggatatgaaaatccaattgtgcagtcctacaggctacaacaggcgctcgccgcaaacatcttatcatcaccggcactcttcctacaacaaccatgggccctatcgcagcagcaatccttcgcacatgtgacagtacagagcaccaccgcacaacagcaacaatttctaccagcgttcagccaactagccctaggtcgccccgccgcctactggcaacagcaacagctgcttccattcaaccagctagctgtggcaaatgcctactggcagcaacagcagctccttccattcaaccaaactaggactaattagacaaaaccctagactagacctaactaggacaagacaaacaagacaaactagactagaccaatacaa

SEQ ID NO: 38158 - DNA, 559 bp, Setaria italica
  Peptide Sequence Number=SeqID_104132
taacaaaattaaagactaacttaataaatttagaaaacccaactaagcagcctcttattagcaacaatggcagcaaagatatttgctcgtttttacgctccttgccctttcggtgagcgctgccactgcagtctttcttccgcagggatccctagctgctactgccgctattccacaatacctcccacatgtgacagccttgggatatgaaaatccaattgtgcagtcctacaggctacaacaggcgctcgccgcaaacatcttatcatcaccggcactcttcctacaacaaccatgggccctatcgcagcagcaatccttcgcacatgtgacagtacagagcaccaccgcacaacagcaacaatttctaccagcgttcagccaactagccctagctagccccgccgcctactggcaacagcaacagctgcttccattcaaccaactagctatcaccaaccccgccgccttctggcaacaacagcagctactgcgtgtcaacccacttgctgcgatgaacgccgctaccttcttgcagctaacctaattctatttggtt

SEQ ID NO: 38159 - DNA, 569 bp, Setaria italica
  Peptide Sequence Number=SeqID_104133
ttacttttaatttaaatttttagtaaaaacgtttaccctacttagtctagtccttctttatttagtctaactaattggtctagtctaaagtattattttgtcttctttttacgctccttgccctttcggtgagcgctgccactgcagtctttcttccgcagggatccctagctgctactgccgctattccacaatacctcccacatgtgacagccttgggatatgaaaatccaattgtgcagtcctacaggctacaacaggcgctcgccgcaaacatcttatcatcaccggcactcttcctacaacaaccatgggccctatcgcagcagcaatccttcgcacatgtgacagtacagagcaccaccgcacaacagcaacaatttctaccagcgttcagccaactagccctagctagccccgccgcctactggcaacagcaacagctgcttccattcaaccaactagctatcaccaaccccgccgccttctggcaacaacagcagctactgcgtgtcaacccacttgctgcgatgaacgccgctaccttcttgcagcaaccaatcattggt

SEQ ID NO: 38160 - DNA, 719 bp, Setaria italica
  Peptide Sequence Number=SeqID_104134
agcaacttataatttgaaacccactagcagcctcttattagcaacaatggcagcaaagatattttgctcttttttacgctccttgccctttcggtgagcgctgccactgcagtctttcttccgcagggatccctagctgctactgccgctattccacaatacctcccacatgtgacagccttgggatatgaaaatccaattgtgcagtcctacaggctacaacaggcgctcgccgcaaacatcttatcatcaccggcactcttcctacaacaaccatgggccctatcgcagcagcaatccttcgcacatgtgacagtacagagcaccaccgcacaacagcaacaatttctaccagcgttcagccaactagccctagctagccccgccgcctactggcaacagcaacagctgcttccattcaaccagctagctgtggcaaatgcctactggcagcaacagcagctccttccattcaaccaactggctattgcaaaccctgctgcctactggcagcaacagcaactgctgccatcacacccagtgggttgacactaagcagttgttgttgttgccattacatttggctaactctgctacgtactggcaacaacaacaactgcttagtgtcaacccactgggtgtgatgaatcccgccgctttctggcagcaacccatcattggctcggctatcttctagtacaactcatagttaatctaga

SEQ ID NO: 38161 - DNA, 849 bp, Setaria italica
  Peptide Sequence Number=SeqID_104135
tttaatttataacaattagcaacttataatttgaaacccactagcagcctcttattagcaacaatggcagcaaagatatttgctctttttacgctccttgccctttcggtgagcgctgccactgcagtctttcttccgcagggatccctagctgctactgccgctattccacaatacctcccacatgtgacagccttgggatatgaaaatccaattgtgcagtcctacaggctacaacaggcgctcgccgcaaacatcttatcatcaccggcactcttcctacaacaaccatgggccctatcgcagcagcaatccttcgcacatgtgacagtacagagcaccaccgcacaacagcaacaatttctaccagcgttcagccaactagccctagctagccccgccgcctactggcaacagcaacagctgcttccattcaaccagctagctgtggcaaatgcctactggcagcaacagcagctccttccattcaaccaactggctattgcaaaccctgctgcctactggcagcaacagcaactgctgccattcaacccattacatttggctaactctgctacgtactggcaacaacaacaactgcttagtgtcaacccactgggtgtgatgaatcccgccgctttctggcagcaacccatcattggctcggctatcttctagattaactatgagttgtacttctttaataaagtttgcatgctgaggagtttgactctcggaaataagaaatgttttgtttaagagtaaaaaaaaaaaactagttcaaaagtaaaaaaaaaaactaaaaaaaaaaacgtaaaaggaaagtaacgtaacgaaccgaaacggaac

SEQ ID NO: 38162 - DNA, 594 bp, Setaria italica
  Peptide Sequence Number=SeqID_104136
cggctcgtctccatgtccgccgccaccctcttcctcctccctccgccgttcttcttcctccctttgcctttcttcctcctcccgctgcctctgctcctcctccctccgtgcacgctcttcctcctccctcctctgcttttcctcttgctctcgcctctccctctcttcttcctttctcctctgccgctcctcttccgttcttcctcctctcgctccctctctccttttcctcctctttcctccgttcttcctcttcccgctgccttttctccttttcctcctcgcgctccccgggtccctctttcctccgttcctcctcctctcgccgcctccgctcctcctccgcggccttctcctccagctcctcggcgcacgagatgcacgacagtatcgtggagtcccgctgcgccgacagcagcttcccacggcggtcgagttctcctggcccagcgacagggccacgccctcgtcgccatcgtcatcgcaccaccactccctccccgccctctcactcccgatctctcctccaccaccagcgcctcctccgccccacccctctcctcgcctcgcgcggcgaccggcggcggatcgtcg

SEQ ID NO: 38163 - DNA, 337 bp, Setaria italica
  Peptide Sequence Number=SeqID_104137
ccgccgccaccctcttcctcctccctccgccgttcttcttcctccctttgcctttcttcctcctcccgctgcctctgctcctggacttcttgtccttctccttcttcttgtgcttgtccttcttcttattgtttataaactcctccgggtctcgcactcccaacagagcgtcgacaatgtcctcagtccagttgggcttctcctcgtcacccttctcgtgtgggttgtagggtataatcaatggtgggatcttcgccgatttgatcgcttctgccacctctcgttggaccccaaatcctagacgaagaacttctgtttcgaaccctttgagcagatt

SEQ ID NO: 38164 - DNA, 1478 bp, Setaria italica
  Peptide Sequence Number=SeqID_104138
tctcccccctctctcctttctccctcctctgccgctcctcttcctccttcctctccctttcctcttgctctctcttccgttcttcctcctctcgctccctcctctccttttcctcctctttcctccgttcttcctcttcccgctccctcctctccttttcctcctcgcgctccccgggtcccttccctcccccttcctcctcctctcgccgcctccgctcctcctccgcggccttctcctccagctcctcggcgcacgagatgcacgacagtatcgtggagtcccgctgcgccgacagcagcttccccacggcggtcgagttctcctggcccagcgacagggccagcacctctttgccgatggcctgcagcaccgagcccttcccggctaggaactgcgggtggttctggcccatgtgggtgctgaacccgacgaacacgaacgagtcgttgttgaaggacatctgcgccatcgggtggaaccgcggcaccacgaacacgtccccttcctttacccggaacaccgtgttcctgcaccgaacccagcctttgccttcgccttcctcgtcgccgcggccacccggcctgccccgctcgtcgccgcggtggcctctccggctctcgcctgaagggttgctgctgctcgggcacaccgtctgaacgatccctgtgccctccgtcacgatggcgatctccgtcgccttcgggttccagtgaggccccaccatcgaacccgtggtcaggttcaccatgaacatgccaatgttggagccgtgcagggcgtcgaggtccttgttggtcatcgtcctgctccacccgtagcagttgtggacgtcgggcttgccggagtagaagttgaatgccttgctcctggacttcttgtccttctccttcttcttgtgcttgtccttcttcttattgtttataaactcctccgggtctcgcactcccaacagagcgtcgacaatgtcctcagtccagttgggcttctcctcgtcacccttctcgtgtgggttgtagggtataatcaatggtgggatcttcgccgatttgatcgcttctgccacctctcgttggaccccaaatcctagacgaagaacttctgtttcgaaccctttgagcagattactgacgctggaataagcttccaccttgggcttcgaggggtcatcggcgttgatgccctcgctggtaaagatggcgtagatccgaagacgctgtctcgtggcgttggggtagctctggatgaatatgatactcccctgatccaagttgtagacgtctcctcgctcaacctccagggaacttcgttcactgctctcttcttctatgtaagtcaccttacctcgtccgctgtgaacgtagaagaccatgtcggcgtgcagctgcacgggcaggaacagcgcgccggcatccatggtgatgaagtgcagccggtacgccgtgcccgccgcgtcggccacgtccacggccgtgaca

SEQ ID NO: 38165 - DNA, 247 bp, Setaria italica
  Peptide Sequence Number=SeqID_104139
caagccaagcctagtgccttacagtttagctagatgatgagaatgttaatgactaaggttgagagatagatggaggagaggggagaccttgcatggtgataagggctgatcatcctggtagccaaggatgacttgcctgtggcctccctcgctcgcttgcattttggtggagcaggcaggcaactgatctcataggcagtctccttggctagcctggacggttcttatccttcatgctaggccttca

SEQ ID NO: 38166 - DNA, 642 bp, Setaria italica
  Peptide Sequence Number=SeqID_104140
tatttttgttgcatttttggttctgttgcatatactcacatggaattggtacactagctgagtactatatggaactggtacattagaatagataatttaaaaacagtgaactatactctgggtcaaaatatggtactaattcagggcaaatggagacctttccatgtgacatcactagttagtttcttagtcttgaagcatatttactttagtttgaagtgttcactgagtgttgtaacaaatagcaatgaaattacttgacagtgagactcacaatctgaaggaggaaaccataaaggaacagtacgaagcggtgagtctcaatttgccttctaggcatttcatttgcatttatgaacccataattagtcaaaaagcgttttgtgcaggtgaaggagcgtacttcggattcaaacagctatggtgcaggctctcatgtcatggagtatggggataagaccttcaagggcgagaagctctacctttaccaaggtttcaatcctgaaaatgccgacatcacatataagctactttggcaaggccaaaagtctgtggtcaaccagagagatgcggatattttattcctatggaagagggtaagttcttgtgctataccaatcactcattagcctgttctgttcc

SEQ ID NO: 38167 - DNA, 538 bp, Setaria italica
  Peptide Sequence Number=SeqID_104141
actatatggaactggtacattagaatagataatttaaaacagtgaactatactctgggtcaaaatatggtactaattcagggcaaatggagacctttccatgtgacatcactagttagtttcttagtcttgaagcatatttactttagtttgaagtgttcactgagtgttgtaacaaatagcaatgaaattacttgacagtgagactcacaatctgaaggaggaaaccataaaggaacagtacgaagcggtgaaggagcgtacttcggattcaaacagctatggtgcaggctctcatgtcatggagtatggggataagaccttcaagggcgagaagctctacctttaccaaggtttcaatcctgaaaatgccgacatcacatataagctactttggcaaggccaaaagtctgtggtcaaccagagagatgcggatattttattcctatggaagagggtaagttcttgtgctataccaatcactcattaaacaattaatgtttccttttattgtaaattattgttaaaaatttttgtta

SEQ ID NO: 38168 - DNA, 1656 bp, Setaria italica
  misc_feature (1626)..(1656): n is a, c, g, or t
  Peptide Sequence Number=SeqID_104142
gtgcttttgcttcctcgggcttcggcaacgtcgggctccaggctgatatatgccatgcataccagatattgctgaagggagggctaaaagaggagaacattgtggtgtttatgtatgatgacgttgccaatagtgtactcaacccaaggcagggcgttatcatcaaccatccggagggtgaagatgtttatgctggtgtgccgaaggactacactggggagcaagtcactgctaaaaacttctatgcagttctattgggcaacaaagatgcagtcaccggaggaagcaggaaggttatcaatagcaaaccgaatgaccatatttttatctattactcagatcacggaggccctggtgtccttggtatgccaaatctaccgtatatttacgctggtgacttcatgaaggtgttaagagagaaacatgcttccaacagctatgcaaaaatggttatatatgttgaagcatgcgaaagtggcagtatatttgagggcttaatgccggaggacctgaatatttatgtcacgactgcatccaatgcagaagaaagtagctggggtacatactgtccaggaatgattccatcgcctccttctgagtacattacctgcctaggtgatctttacagcgtctcttggatggaagacagtgagactcacaatctgaaggaggaaaccataaaggaacagtacgaagcggtgaaggagcgtacttcggattcaaacagctatggtgcaggctctcatgtcatggagtatggggataagaccttcaagggcgagaagctctacctttaccaaggtttcaatcctgaaaatgccgacatcacatataagctactttggcaaggccaaaagtctgtggtcaaccagagagatgcggatattttattcctatggaagaggtatgagctgttaaatgaaaaatctaaagagaagctggaagttctgagggagatcactgggacagtaacgcataggaagcatctcgacagcagcgttgattttatcggaaagcttctctttggggttgagaatggaccttcaacgcttggagccgttagatctcctggccagccactcgttgatgattgggattgtttgaagcgaatggtacgaatctttgaatcccattgtgggtcgctcactcagtacggtatgaagcacatgcgcgcattcgcaaacatatgtaaccgtggcactcctgccaccgcgatgaaggaagctagcatcagtgcttgcggcagctacaactcggcgagatggagcccgttggtccagggctatagcgcttgatcttccccaggtaatggggagcaatgcgtaacggattattactgcttaacttgcttagtgatctgctcgagcccagcttatctggatgtgtaatatatggctgtgtatcagtgtatgtaggactagtcgatctgtaaagcactgcaaaacctaccttattgtgcatctgtaccatacagttatcgtgtgtgtaatgttcgtcgtgcgtctgtatatttcgtcagtgaagaagtcggaataaaagtagacggacgaatgccgttgcaacttgcaaggccgcaatccgaagtaggtactttgcaagcaggccaggtttaagatcaaacaaaannnnnnnnnnnnnnnnnnnnnnnnnnnnnnn

SEQ ID NO: 38169 - DNA, 1400 bp, Setaria italica
  Peptide Sequence Number=SeqID_104143
tttttttttttttttaaaactaatagaaggtttaaatttaattaaaacaattgttgaagtacaatatgtcgttatattggaccaatggtacagacatctggtatgcacgagagttcattatttggtctcctagcaaggtatatttacatcggtattggctccacaaagagtcgctttattgcgtctttgatagtgtgtgaggaagtgaatttgtcgacattgttatgatacatatagtttccagttcgtgccaagttaagcaccatatgtgacacgatcattgtttgctctgtccttgcaaggtgatgctgtaacatgtccttccataaatcttcggtgagttcttttatccttttgcacgattcatgcatcgttgttccatgctccttcatgtaacactggacagtggagacattgtgatcccctttttgctcacgctcagttgatgccatatcatctgaaagtcgtacaaatgtatcaaatgacctgacaagatgaggatagcttagaaaccagtcaagtgtctctcttgttactatttcacccattccaaccaatgaagcacatagtattggagagcctccgctgcttctcattgaaagcccaagatgttcactcaatgtttctggtatataattttcatcgcgccatttaagttcatcaatgtatgcttgcactagttgctttaacgcctcttttaaataaaacacacggtagctcttgccagttcctagttcctcctcaaatgaacaaaatgtattcaataagtacaagtagaaatcccttgtgtattctggaagcaaagttgtggcattcttgtcccacctgaaaattgcttccccaagttgcatgctctcttcagtggtagcatatgtgtcaatgaaatcatctaatatagtaataaaacccataatctttgcaagtataattcgggagtgagaatattgaggttcatgacatgccccattcatccagaaatacatttccactatcctatttctcacaaaatggaagttggcttcgacattgagcttcttccaccacatcgtgacctcttttagctcctcacaataaataagttgcaaaaggttaaagttcaatttcgcaaactctaatatagcttcgtttcgtgtagcctccttttcataaatgggaatgtagttccttgtttccaaaatcccgacccttcgaaaaagaggggtgtcaagggcacaagacacttcctcagcaagtggtgattccagattttctagtctactttgaaggcatcgtccggtgaaagaaattgcctcatcaagcaatgcctctccatgagtcggcaggtatgctgcattgtataagcttaacaagcttctagtatcggcattcacaaaattcccatgtttatctttaaattttag

SEQ ID NO: 38170 - DNA, 629 bp, Setaria italica
  Peptide Sequence Number=SeqID_104144
gctgcgtctacttagccttgtgccgccgcctgctcccattgctgtgcaagcttaggctcgctctagctcttgacttctagtgcaaaggagaggctagcttccgagtttccaacaatggccggggttgggaggaacatggtggcgccgctgatggtgctcaacctgatcatgtacctcgtcgtcatcggcttcgcgagctggaacctcaaccacttcatcaacggccagaccaactacccgggtacgttcgcgtggttcttggtttttccattggcagggtggtcgctgatctcattgtacgtagtgatcatgcctggcgcttgcttccttaattaaattgcaggcgtggccggcaacggcgcgacgttctacttcctggtgttcgcgatcctggccggcgtggtgggcgccgcgtccaagctcgccggcgtgcaccacgtccgcgcctggagccacgacagcctcgccaccaacgccgcctcctcgctcatcgcgtgggccatcaccgcgcttgcattcgggctggcgtgcaaggagatccacatcgggggccaccgcgggtggcgcctccgcgtgctggaggccttcgtcatcatcctcgccttcacgcagctgctctacgtgctcat

SEQ ID NO: 38171 - DNA, 865 bp, Setaria italica
  Peptide Sequence Number=SeqID_104145
aggagaggctagcttccgagttccacaatggccggggttgggagggaacatggtggcgccgctgatggtgctcaacctgatcatgtacctcgtcgtcatcggcttcgcgagctggaacctcaaccacttcatcaacggccagaccaactacccgggcgtggccggcaacggcgcgacgttctacttcctggtgttcgcgatcctggccggcgtggtgggcgccgcgtccaagctcgccggcgtgcaccacgtccgcgcctggagccacgacagcctcgccaccaacgccgcctcctcgctcatcgcgtgggccatcaccgcgcttgcattcgggctggcgtgcaaggagatccacatcgggggccaccgcgggtggcgcctccgcgtgctggaggccttcgtcatcatcctcgccttcacgcagctgctctacgtgctcatgctccacaccggactcttcggcggcagcggcggctaccgggaccacgactacggcgccggcgctgccacggccggcgagcccaagaacgcccccagggtctgatgtgatctcgcagctgttccggccggacgctgcatagtacctgatgaagcgttcggtcacgctgcacgagtagcgtaacgctgcaatagtactttataatgggttgtgtgtgttgacgtgtgtacctagtcggtcgtctgatcatctctactgtttagcagtaaggtcatcagctcatctctggattgtgcatgtatgtcagtgtcaaatgtatcttgtgggccgccagtttcagccggtcatcagtgacattggtgagatgagatttgtgttgtttggctcaatcaatctagtaaacctttttaaaaactagaaaaaaaa

SEQ ID NO: 38172 - DNA, 706 bp, Setaria italica
  Peptide Sequence Number=SeqID_104146
ccccttgagcgcgtgcgccgccgcggacttggaccggtcgagcgtcctcccgcccccgcccgtggcggttgatggaggcgaggcggcggagctcctgcgacacctgcttgatccgcgacgaggcgttgcggatgacgttgtggccgtaggacgaggaccgccggttctcgagcgtgcgcgccaggagggtcacgtcggggtcctcgccgccggcgccgccgtgggccgccggcttgacgctgtgcacggccaccgagtcgtcgcgcacgtcgagggtgatctcgacgtagtcgtcgtcgtcggtggcggaaggggaggcgcggggtgggggtgcggagagcggcgcggagacggactcggcgaagcgcgcgctcttgcgcgcccctgtcttcttgctcagcgggccgctgtgcgggatcacccgctcccggtcccggccctcgtgcggggccgccgcggcggacgacatctccacgatgtccccgccggcgccggcgtcggcgcccggcctgtggctatgcatggtggccgccggccggccggctctctagctccttgtccgaggaacacgcgcgcggcaggtcggtaaccggagaagcgaaacgctttttcgcacggagcggaggaggagggggtgcgggtgacgcgcggcggcttctttagtcgtgtcggggaggaggaagagggagggaggtggcaggtgata

SEQ ID NO: 38173 - DNA, 296 bp, Setaria italica
  misc_feature (257)..(296): n is a, c, g, or t
  Peptide Sequence Number=SeqID_104147
tcatttaaaaggaggtggacaaaacagcatctgccatcgccgtcggcatgcttgtggaatcttgcttgctgtttattttcttggtttgatcatcagatcacatggtagatgagggtaggtcatctttatctccattctgttgattgttctgctgcgatttccctgaactaggtgtggcatgttttggtttgccacgattttgttcagcgggcatggttgaattcatagataaattcaagcttcgcacactgagtcgnnnnnnnnnnnnnnnnnnnnnnnnnnnnnnnnnnnnnnnn

SEQ ID NO: 38174 - DNA, 290 bp, Setaria italica
  Peptide Sequence Number=SeqID_104148
agtctttgggtccttaggtggcatcacgtattgctggcattctttaattaggtctttgaggccatcaatacgtgatgccatctgaaggagggatctttgggtccttaggtggcatcacgtattgctggcattctttaattaggtctttgaggccatcgccgcaggcagcttgggtgccctcaatggacatggctactacaaaaacaaggaccaagaacaggttcaagagtttcgccatggctattagatctacaagtagtttggcctctcttggatgctaacacaagaac

SEQ ID NO: 38175 - DNA, 446 bp, Setaria italica
  Peptide Sequence Number=SeqID_104149
tactttagtacttagttacttaatttactaatttttaagtacttaggtaaacttcgtttagctggaactaccgagcacttggtcttgtagccatgctcaagtggcctcccgcatttttcggcaacaaatgcaaccttctccattgacacaatcgcctcaatagccttggtgaccttggagcacaggcatggaacatccaccttttttaccagaccgcagcaaccatctgaaggagggatctttgggtccttaggtggcatcacgtattgctggcattctttaattaggtctttgaggccatcgccgcaggcagcttgggtgccctcaatggacatggctactacaaaaaccaggaccaagaacaggttctaaggagtcgtcgtcgctatggtcttatttagtattcttactaagttagtttttggttcctttctttcttttggtta

SEQ ID NO: 38176 - DNA, 389 bp, Setaria italica
  misc_feature (1)..(34): n is a, c, g, or t
  Peptide Sequence Number=SeqID_104150
nnnnnnnnnnnnnnnnnnnnnnnnnnnnnnnnnntccctgtgtgccttggcagtctcttttttgtttttaaatttgaagagaagcctttattagctcatcacaatattttccatacatcattatctctctcgaaccttacagtagtctcaacacaacctcatattgcacattttttcagaaaggtaaatcaggtaggcagttgagaactaagcactacatccagcacctcccctcttgctgtctattcatttagctggaactgtgtagcttccgcacttgtagccatgctcaagtggcctccgcattttcggcaacgaatgcaaccttctccattgacacaatcgcctcaatagccttggtgaccttggagcacaggcatggaacatcc

SEQ ID NO: 38177 - DNA, 435 bp, Setaria italica
  Peptide Sequence Number=SeqID_104151
aacccctaacttaagaactacctcttgctgtctattctattagctggaactgtgtagcttccgcacttgtagccatgctcaagtggcctcccgcatttttcggcaacaaatgcaaccttctccattgacacaatcgcctcaatagccttggtgaccttggagcacaggcatggaacatccaccttttttaccagaccgcagcaaccatctgaaggagggatctttgggtccttaggtggcatcacgtattgctggcattctttaattaggtctttgaggccatcgccgcaggcagcttgggtgccctcaatggacatggctactacaaaaacaaggaccaagaacaggttcaagagtttcgccatggctattagatctacaagtaagtttaggacctactacttaggaatagacttaaacaactaaagaaactta

SEQ ID NO: 38178 - DNA, 466 bp, Setaria italica
  Peptide Sequence Number=SeqID_104152
ttttttactaagtaaaggttaaataaaggtaaatcagttaggcagagtaacttaaagcactacatccagcacctcccctcttgctgtctattcatttagctggaactgtgtagcttccgcacttgtagccatgctcaagtggcctcccgcatttttcggcaacaaatgcaaccttctccattgacacaatcgcctcaatagccttggtgaccttggagcacaggcatggaacatccaccttttttaccagaccgcagcaaccatctgaaggagggatctttgggtccttaggtggcatcacgtattgctggcattctttaattaggtctttgaggccatcgccgcaggcagcttgggtgccctcaatggacatggctactacaaaaacaaggaccaagaacaggttcaagagtttcgccatggctaattaagaatactaacaaagtaagtttaggacctactacta

SEQ ID NO: 38179 - DNA, 613 bp, Setaria italica
  Peptide Sequence Number=SeqID_104153
tcacaaatcaattcacgataaacaaatttgtaaagtttgaagggaagcctttgttagctcatcaatttattttcgatacatcattatctctctctcgaaccttacaatgtctcaacgcaacctcataagccacacttttccagaaggtaaatcagctaggcagttgagatctaaggactacatccagcacctcccctctttttgtgtctattcattttgctggaactgtgtagctcccgcacttgaagccatgcggaacttgcctcccgcatttttcggcaacatacacagccttctccatgcacacaatcccctcgatgatcttggtgaccttggagcacaggcatggaaaatccgccttttggaccacacggcagcagctatctgaaggagggatctttgggtccttaggtggcatcacgtattgctggcattctttaattaggtctgagaggttgtcgtcgcaggcagcttgggtaccctcgatggacatggctactacgaaagcaaggaccaagaacatgctccggagtttcgccattgctattagttctaccagtggttttggcctctcttggatgctaacacaagaactacaaagaaactaatagta

SEQ ID NO: 38180 - DNA, 595 bp, Setaria italica
  Peptide Sequence Number=SeqID_104154
aaacatgctcctctcgtgggtcgaacctgttactgatcgaatgggaagtctttaccacgatcgggtctcacatgtaaggtaagtttcaggtgagcatggtatttggtggcaaaaaagcccgtgctacagccaaaaaatagtttacccgctgccgcgctcccgagataggaaaaaaagaagaatagagagaaggcggctaggacgaagcactccatggagatctgtgccttctcgcggcttctcaatcctacggcagcacaagtctggtgcttcctgttgcagcgtgtcaatctggataatggggttgaggaaactgcaattctgtcgaatgagggggttgtggataatgcagttctacaggatgatggtgatcaggaaatggttcaagaaaatgaacacatatcgggtatgaaggaggatgaaggcaccgaagatagacttcatgaaatgatagccgacatgcgccatgctaaagagcttggaggaaaaatattagaatgtataaaggaacatataaactataaggtatcactgagatctaaatatactactaattttactatttttgttttgtttagttaaagttttaaaaaaa

SEQ ID NO: 38181 - DNA, 1130 bp, Setaria italica
  misc_feature (1116)..(1116): n is a, c, g, or t
  Peptide Sequence Number=SeqID_104155
tatttagtgataaattacggaacgtcataaaagttgccactgtagcaaaaaaagaaatcaccacttgttgttacatggtggttttatgacgatataagctccgcgaaaatatcataaactaaccagggtcccacatgtaagtttaagctgataaatagggtagtaaaataaaatggaaaacatgctcctctcgtgggtcgaacctgttactgatcgaatgggaagtctttaccacgatcgggtctcacatgtaaggtaagtttcaggtgagcatggtatttggtggcaaaaaagcccgtgctacagccaaaaaatagtttacccgctgccgcgctcccgagataggaaaaaaagaagaatagagagaaggcggctaggacgaagcactccatggagatctgtgccttctcgcggcttctcaatcctacggcagcacaagtctggtgcttcctgttgcagcgtgtcaatctggtcagtaattttaagttgaattcgttaaaatttcattttgcattaaggtctttcaatctggtcaataattttgagttgaattcaccaaaatttcctagatggatagatgttggatacacggttgtcatctatttacccccgagcatggaatttgttaagattagatactctgacgatgaacaatactatgcccatatcgtcaatgcctgaatcagtctaaatgtattgtagatgtggtgagcttgcacttacttttgaatgggatggcaagcacctacactaggtggatccatcatggagaaacattcgagcatagggtttaggaaatgcaaatctgtaggctaatggagtttaggaaaatgcaattctgcaggataatggggttgaggaaactgcaattctgtcgaatgagggggttgtggataatgcagttctacaggatgatggtgatcaggaaatggttcaagaaaatgaacacatatcgggtatgaaggaggatgaaggcaccgaagatagacttcatgaaatgatagccgacatgcgccatgctaaagagcttggaggaaaaatattagaatgtataaaggaacatataaactataaggtatcactgagatctaaatatacacaatttacatttgttgngaagttaaaaaaaa

SEQ ID NO: 38182 - DNA, 1164 bp, Setaria italica
  Peptide Sequence Number=SeqID_104156
ggccaaagtgtataagggctttcataatggcaccaatgaggaggtggctataaagaggcttgatctccagggacagcaaggtgacagggaattcattactgaagctgtgatgctgagcagcctgcaccacccaaatcttgtaaagcttgttggctattgtgctgatcttggacagaggattttagtttacgagtatatgcctttgggttccctatacagtcatatccatgatcttccccccggtcggcagcctcttgactggagtacaagaattcagatacttcttggtgctgctaaaggtcttgagtatttgcataacaaggttaaacctcctatcattaatcgtgatgtgaaatgcgcaaacattttgcttggagaggggtatcacccaaaactgtctgacttcggcttagcaaagctaggtccaaccggtgataatacccatgtttcaactagagttatgggtacacctggatattgtgcaccagagtatttgatgactggtaaattgactgtaagcacagatatttatagctttggtgttgttatgttggaggttctcactggaagaattgctagagatgaaagtctccctgaatctgagcgaaaccttgcttcatgggctgtcaatcctaccctcagaccggacatcaccaatctggtagacccggcgctgcagggtcagtgctccgcgagtcgtttgtaccatgcatttcttcttgctgcacgatgtgtcagtgaattacccgctatgaggccagccattacagaagtggtcaggactctcgacaagatctcgaagccagctactaagaagaggcagttggagcgtgggggacccagcacaacagctagaactagctctggtgggaaccaagcccaggtcaaggatcaggggcaaggaagctgaggagtccagtgcaaagcaaaacaatggtgctcttctgttaggagcagcattactgctggctgtttgggagcaagaacaggtcgtggtgcctgttcagatgatatggttgaatcgcatgggtgtgcatgttgaagaattttggtttagtagttaatagctacccggtgttacccttgttgtgtttgttgtatctgaggcttatcaggcgtcgttttcgcccagatgcttttgcatgatgatggggaacaagccat

SEQ ID NO: 38183 - DNA, 458 bp, Setaria italica
  Peptide Sequence Number=SeqID_104157
ttccaagcttcagactggagatttgttgatggtccatttgttgtcagtttggataaacaacgtgccatgggctgccgaggatatcatggcagctcctgaggcaaagttcgcagatggctatatggatgcagtcatactcagagattgtccaaaggccgatcttttagctctactgatgaagatgagcgatgggagctatgtcaaatcaccttatgttacatatctcaaggtaagatcttttaaattatctccaggcccgcttgttgggaacccaaaaaaagggtggcattatagacgtggacggtgaggtaattgctagaggagaaggaacgtacggcagaagccaacatcaagatgtgatggcttatggtcctcctattcagctgacagtgcaccaagcattggctactaactagtaataattagacccaaaacaaaaattacggtagaaagaatta

SEQ ID NO: 38184 - DNA, 699 bp, Setaria italica
  Peptide Sequence Number=SeqID_104158
tggttcaacttatgtcttgttgcgagtgcagcatgattagttatcatgatccaatagtccatcagtaacaaggaaacgaacccccttactgtgactttttgcaggtaagatcttttaaattatctccaggcccgcttgttgggaacccaaaaaagggtggcattatagacgtggacggtgaggtaattgctagaggagaaggaacgtacggcagaagccaacatcaagatgtgatggcttatggtcctcctattcagctgacagtgcaccaagcattggctactgtatattgcccaaacaaaattcggtgaagattggcgttgacaaaacaaaaaattgcctacaactttgccaagttctagaagaaaaatgctcaagtagagagacaacaagaaagggatcttacagttcttttgtcaacaagccaatgaaagccgaaaccaagaaaaggttgtcttttgctaagacaactgtggcattcatgaatgtcagaccaaataccctcaaatgaccttccctttctgccctttatcatatctcctaaggttaatcgcgtcaattgtttttattgttgtttaataattttatgacttattcttcatgagctgtaacttgtaactaacaacccagtgtagatagtactgttcatataccatcataaatttttactttttaggggtactaattagtaattaaaaa

SEQ ID NO: 38185 - DNA, 768 bp, Setaria italica
  Peptide Sequence Number=SeqID_104159
aggacctacaagacaatacaactggcacgtcatcaacaactacaagtccggctggtcggtgcgcatgaccatcttcaactggcaggactacacgttcaaggactggttcgccgccgtcaccatgggcgaccactacagcggatacgagaacgtctactccttcaacggcaccaggatggacgcgcccttcaacaacaccatcttcatgcagggcgtgccggggctcgcgtacctcgagcccatcaccgacggcaagacgccggcggaccccagggtgccagggaagcagcagtccgtcatctccttcaagaggaaggacgcgccaaacatcaacatcgccaagggggaagggttccccaagagggtctacttcgacggcgaggagtgcgcgctccccgacaggatacccaaggtgtccagcgcgcgccggcgggctgggacagcgagcctcggccaggtcgccatggcggcggcgctggtgatgcttgtggcgcttgtggattcctggcgcctatgatgatgagcggacagtataatacattcatgggagctgtgtagatcaattgattgccttacttacagtgctgcatctgcctgaacgcattccgaattccgattggagggtctgtttccacttgagttcagagattacaacgatccactaattaatgaaggaggtgcagtttgcacatgtacacaaaagcatcccaagtgaaaacagaggctcaattcatccatcatgtgaagggtgggaggctaggagaagat

SEQ ID NO: 38186 - DNA, 327 bp, Setaria italica
  Peptide Sequence Number=SeqID_104160
tagtgttcaaccaagtgggcgacaggactcaccagagctagttggttgaacacgtttggtagcaattgttgttgctgcaagtaggcagcagtgatggggttcatcgcagcaagtgggttgatgcgcagcagctattgcgtgtcaacccagttgctgcgatgaaccccaccgccttatggcaacaacaacagctactgcgtatcaacccacttgctacgatgaaccctgccgctttcttgcagcaaccaatcattggttctggtcttttctagatcaattatgaattgtacttctataataaataaggaagaaggaaattgttgattg

SEQ ID NO: 38187 - DNA, 435 bp, Setaria italica
  misc_feature (409)..(435): n is a, c, g, or t
  Peptide Sequence Number=SeqID_104161
ttgtctttcctattttctaacctagtcttagtccgttggagaattgccttactagcagcaacaacagctactacgtgtcaacccattttctgcgatgaaccccgccgcattctggcaacaacagcagctattgcgtgtcaacccagttgctgcgatgaaccccgccgctttctggcaacaacaacagctactgcgcatcaacccacttgctgcgatgaaccccaccgccttatggcaacaacaacagctactgcgtatcaacccacttgctacgatgaaccctgccgctttcttgcagcaaccaatcattggttctggtacttttctagatcaattatgaattgtacttctataataaataaggaagaaggaaagtgttgattgatccttcaaaaaaaaacaaaaaaannnnnnnnnnnnnnnnnnnnnnnnnnn

SEQ ID NO: 38188 - DNA, 978 bp, Setaria italica
  Peptide Sequence Number=SeqID_104162
tttttttttttttgtgcacttcaaaacgatccattattattatgttatacaccgaaattcacagttcacggatcgcagagtccgagactgtctggaaggaacggaggcactccgaacacaaagctgttaacccaccgactaacccgcaccatctagtagctactaccctactatcactacgcagactccaaccatccacggatccactcgccacgccacccacggcgatcaagtgaagaccctggcggcgccggcggtcgtggtcgccgggatgtccacctcacggatctcggtcttgagtcccttaccggcggcgttcgccagcgggtggattccgtgctccagcccgctcatgtacgcccggttctccctctccttctggaacgacacgccgaacttcttctccacacagtcagccaggtcctgccggagctgcccctctcgcgtgagcgccatcatgatctgcgggagcccgagcgggagcgcgtcgccgcggtccacctgccagaagtggacggtcttgccgtaggtcctgcacaccttctccaggtcccggcgctccaccaccccgggcacgcccggcatgaagagcaccccgcccttcacctcgaactcgtgggtgtgccacagcggcttctcggtgtcgggcagcgtcaggaacaccggctccgagacgatgtactccacgccgatgagccgcgcgccggcgccgggcccgtcgaagacgaggcactggcggacgtcctcgttgaggtgcgcgcagaagtggtgcgcctccacctgccgggacatgtcgtcggcgtagaagtggaacgcacacaggtgttggtggatctgattcaccggcgcgaacccctggatcgtgcccgtcgccgtctccagcagcgccgtcccaacctccgtcggcttgccgggaacctccacgtcgtggcacgattccgccatcggagctctctcttcctcctcccctgctttcca

SEQ ID NO: 38189 - DNA, 440 bp, Setaria italica
  Peptide Sequence Number=SeqID_104163
taaaaccaaataaaaaataaaaataaagaaagaacaaaacagcaacacaattctagaaacaatcaaacaaatgtagtgaatagcatgtgttacccctcgggaggatttagcatgagtcattacattcctttttttccaataaaattaaataagtatgtgccacgactcatttagcctaatatacaatccagtatactatttttgctccctagaatactattgattgattttatcttttgcgttgaaccccctctgttgattttttttaactgtcactttgttagaaaaaatcaatatgcaggtgcatgataatatggtattgaagttgtcagcaaaaaggtattacttttattacccaatacagtcttaagattacactattgtaacaataacacagtacatactactatttacacattgtgctatgcactatagtagca

SEQ ID NO: 38190 - DNA, 527 bp, Setaria italica
  Peptide Sequence Number=SeqID_104164
tttttttttttttttaaaagaacaaaacaacaaggtaacaaatccggtattatttggtaggctattccacacaaccactgcaagtgcagaaccggcgcaaccgttcaaccagtgactcggaagtactacacggatccaccatgtaataggaaagcacagccatatctaggcatcaactgctcctcctcctccctgctggtcatccagcttaagagcgtaaccccttggcaggaaggtgttgaacccacggatgagatcagggtacccttggagcacaatctgcatgcgcccgaccacgctggacatgtcgatgctagtgtagtaatagtcgagcaggacggcccggaactcgttgaccttgtcgggcttgtcggcgaactcacgcagaaggacctccaagaatcgggccgcctcggctctcgccggcgccaacggcctcacacgaactggtggctccggcgtccttagtggaaaccaaacacaagcacatcggaaggaaaaaaaattaaagaacattagatagcaag

SEQ ID NO: 38191 - DNA, 822 bp, Setaria italica
  Peptide Sequence Number=SeqID_104165
aacaaaagcaaatgttgaaacttgaaacaaagagccactgtttgtacaataaaattactaagttggagggagtatatgggtggcaatgaaaattgatggttataaattctaaccaataaagataaagtgaaatttatgtgtcataaccttggctcaagctgtaatacctttttctgtaaaacaaataactttcacaagattattattctggcaataaaacaaacgaaatcatttaaatgagggagtagaagcattcatctagtcctattgaagttgaaaaagtttgttatctatgtcaagaaaggggcagcataaaagcttctagctatataggttcagccttcaattccaaattccaatggaggagaactttgcacttcaatgcacaacttatatggcatcaagatgcacactgcagtgttatcttcaataaaaagatggggcacaaagaaacctttcgagcaacttaaaacgtaccctacttggtacaaatgatctccattccactcaatccacaatactccccccctttttcgaacaaacactaagtacaatatcacacattttgacaaacatgttgtagcataaaccagaaaaatcaggatatacaggcaccatacactgtgattgccaaatcaaagaaatacacccatccaccctaaagcaaagttgtacattaacaagtcaaataaatccgtgaaccacacaacctaattgccattgtgtaaattatcaagtgactaatgagaataactaaacatcactagctaattaaagccctactcctccatgctaccttttttggttcatcttcatggatgc

SEQ ID NO: 38192 - DNA, 1007 bp, Setaria italica
  Peptide Sequence Number=SeqID_104166
caaacttcaacaatcacgcagatggaccatcgaacgactggctcttcctccaggttccagtggaggccctcatggatgcttcgcaggaagtcggttgtcgagtccaccaggcacgccgtgggcacaggccaaggggaaatgctgcagatgagcgcatcacctggtcctagctgaatcctgcccttgccatcaaaggatgcccaagcctgccctctgctattgaacggcacttgcacgcgcagagttacatattctggtagtatcaagggcctgaatgacaacgaatgcgggcagattggagtgaaaaggatccctgggacctgtgggtgaaccattgatcctccagctgccaatgaataagcagtgcttccggatgttgttgatattattagtccatctccttgtacgcatgttacaaaagaactatcacagtagcattctaggtaggtaaggtaagatgacattccacggtcaattgtcacttcatttagtactagaattggttcctcagtctcaacttcatccttagctgcatcacggactacatgacacttgagacggctcctcagtgtgatgctaaatggtcttttcagaacattgcccaaacattcacggtattgctcccttgggaatggagtcatgaaacccaatgatccaagagagaacgcaacaacagggggaactggccctttgaataatgatgcagcccataaaacagttccatcaccaccaagagttacaattagatcaactttcgtatgtaatgtctttgcttcctgatcattattccatgtctggataaagttgaagtaagaatcttcagtcactagttccttgctaactcgtggctctacgaacacattcatattattgtgctctttaagccatctaaccatttcagcgcagagagcaagcacagagttagaattaggtttagtaacaaaaagaactgtttgcggaggtgattcccattttagcaaaatctgcttattgctgcgctctgctgt

SEQ ID NO: 38193 - DNA, 470 bp, Setaria italica
  Peptide Sequence Number=SeqID_104167
gttccatcaccaccaagagttacaattagatcaactttcgtatgtaatgtctttgcttcctgatctgtcaaaatattctgattaattggacacccaaaaggaaaggtttacagggggataaattagtacttgaaaaatattttaaactatgaaaaagaacgttatgataaaccatcacgaaatatgtgcaaaagaactttaacatgtataattcaccaatagaaaaggaattgcttgataatagatgacttaaacaagcattaatagcaaagtcagtaacattcctagcacatgctaacagtttttgagttgatatattcttgataaaggaaacatctgcaaacttggtaactgatggggacaaatagattcctcaaggtaatttgatcatgtactcattgcaccgtgctacaatcaagaaccaccagcaagccaagtgactatgagaatatgagatgaccccataatgt

SEQ ID NO: 38194 - DNA, 428 bp, Setaria italica
  Peptide Sequence Number=SeqID_104168
cttggttcccctggaaggagaggcatcaggtaattgaattttatgttgagcttgtggtggagatgatgagtctaacacagagtggaaaccattctgtggtggcaatcgacaactcggtgaacaacaactccgggattccagtggaggatccaagtatagacaacatggatttgttgtttgcccatatgacagataagataccagaggccatgcagatggtggatgaggtgtctaagagcaaagcaatcattcctcctaaggggcggaataaggggagtttttggaccaatgaggagcacaggcagttcctttatggcctgcgcaaatacggccgcggcaaatggaaggacatctcaaggggaattcgtcaccaccaggacgccggtgcaggtctccagccatgcgcagaagtacttccataggcagaa

SEQ ID NO: 38195 - DNA, 889 bp, Setaria italica
  Peptide Sequence Number=SeqID_104169
ctattcatagtccttactaccaagtattgtgtaggacgtacgcaaccaccacaaaacatggatcgtaagttcaatggtgagtggagtgcctgtgatatcaagatagtgaaatcactcattgctagtcgcaatgccaacaacaactatgcagatgacttgaacaagaaacacaatgacattgtgaatgacatccaagcacggttcccctggaaggagagagatcaggtaattgaattgtatgttgagctcgtggtggagatgattagtccgacacagagtggaaatcagtttgtggtggcaaccaacaactcggtgaatgataactttgggattcctgtggaggatccaaacatggatacgttgtatgcctatatgtcaaataagacgcccgagtccatgaggatggtggttgaagctcctcagagccaagcaatcattcctcagcaagagaggcagcagaaggggaggttttggaccatagaggagcacaggcagttcctttgtggcctacgcgagtacggccgcggcaaatggaaggacatctcaagggactttgtcaccaccaagacaccagtgcaggtctccagccatgcgcagaagtatttccgtaggcagaacacctccgagaagcaacgctacagtattaatgatgtcagcctctatgatgctgaaccttgggcgcagaacaactcttccaactgggaggcgctcgcctttgctggtggtgcatataacccaaactactatgggtccggtagccaggttgccaccatgaacaaccttgcacaggtttggccacccttcatgtacagtgctgatcaggcaagcagcagccaggctactacatgggctggccagcaaatgggggctacagctctagcactggagg

SEQ ID NO: 38196 - DNA, 1501 bp, Setaria italica
  Peptide Sequence Number=SeqID_104170
tagttaacataagggaaaagttaaagaaggaacggaaaagggaactgtagacctattggtaaaactattgctagtcctaacttcttgtaagaataagcatctaactgaagtgttggagccatggaaaacattgcacctttccctggcaggacaactcttgttgccaatgttgctccagatgacgaggaccaggtctgcttgcaggcccaggaactcatgttcgcatacaacaactccctagtcctcagggcggccatccagctcggcctcctcgacgcgctctacgcggctcccacggcgctgaccgccgacgagctcgcggagcaaatcaaggccgcggacaagaccgaggcgaccgcctcggtggacaggatccttcgctacctcgcgtgcttcaacgtggtgaggtgctcgaccgagacgaccggcgtcggcggcgcggtcctgcggcggtacacgccggccccggtgtgccgttggctcaccaagaacgacggcaaggggtcgctggcccctttcgccgtgttcctcggcgacccggaccacatgttgccctggcaccacatagccgacacggtggtctccggtgggctgctgtcgtcgtcgttcgagaggaccaaagggatgccgttcttcgactacttggggaagaacaagcggctaggtacgctgttcgacaacgccatggctgagcactcggtgatcctggtcaccaagatgctcgagcgtttcagaggattcgacgatgttcgtctgcttgttgatgttggcggtggcacgggcaacacccttgagatgatcacatcccagtacaagcacatcaagggcatcaacttcgacctgcctcacgttatatctcaggccccatctcttcctggtgtggaacatgtggctggaaatatgtatgagagcgtaccctatggagatgcagttcttctgcagtggatcctccttatgcagaccgatgaacaatgtctcaagatcctgaagaactgccacaaagcactgccggaaggcgggaaggtgatcgtcatagacggcctccttcctgaaaacccagatgcaaattctccagctgcgaaggatgcgttcaccttggatatgtgtatgtttgtcctgttcaagggaaaggagaggacggaaagggaatttgccaagcttgcccgggagactggcttcactggggcaatccggacaacctacataatcttgaacttttatgcgatcgagttcaccaagtagaaattccagcatatatatgccagcatggtattgaataagagctgatatatagctcgcgtgtgtgcctcagaatatatgggttatctacgcccatgtatgtgtgtctttacggtgatatgttctatgaacaatgaaaacaaaaaatcaaaaattaaaaacaaaactaaacaaaggacacacagggagtaggtaagggtctattctaactttcgtaccttgtccttcttacgttttatttatttctttcttaggtccccta

SEQ ID NO: 38197 - DNA, 425 bp, Setaria italica
  Peptide Sequence Number=SeqID_104171
aaataatgaggttaggcgatactaaattactgaggcaaactcaagatattcagctccctaaatcttatagttgcaagtattgtcagagcatcacatgattgtgtcaaattgtccgtattatgaaaatctggcatgtgatcttgaccatccgatgagcaaattgtgcagcctgaagatttttagttggcttcatcaagttgcatttcttgtgcggttgtcaatttggctctagtcttacatcaacgcttcattttcttgaattctatagtccacctggtccatgtcgatttcggagatattaatgcgcagcacaatgtttcatatagggttttgaatatcttgagtttgcctaatctgggaataattgtattagcagccttacgaatagagatatgtttgattttttcctttaaaaggaacatcta

SEQ ID NO: 38198 - DNA, 2193 bp, Setaria italica
  misc_feature (2162)..(2193): n is a, c, g, or t
  Peptide Sequence Number=SeqID_104172
ccggggttcgtcggcctcgacccgaagaacggcgcctggaacgagacgaacttcggcgacggcgtcatcatcggcttcatcgacaccggcatatggcccgagagcgtaagcttcaacgacagcgggctcggccccgtccgtgcgagctggaagggcaagtgcgtcgacaccgaggacttcaacgccagcctgtgcaacaacaaactggttggggccaaggccttcagcgctggcgcggacgccagggcgattaggaagagcggcggcggcgtctcttcaccgagggacaaggtaggacatggcacccacacttcgtcgacggccgccggcgcggaggtctcggacgccggcctcaacatgttctcgctagggaccgcgcggggcatggcgcccaaggcgaggatcgccatgtacaaggcgtgtgaccccgacggctgctcaggggcggacatcgtcgcggcgatcgacgccgcggtgaaggacggcgtggacatcatttccatttccctcggaggcccgccgcgctcctttcacagcgacgccgtcgcgatcgccacctttggtgctgagcgccaaggcatcttcgtcgtcctctccggcggcaacgcgggaccggaatcatctacggtgatcaacttcgcgccatggatggccaccgtcggcgccgccaccgtggaccggctgttcccggcgaatctcacgcttgggaacggtgtcgtgctcgagggccagtccctttacatcatgaaggccaagggaacagccatgatcccgctagtgtccagtggatcccctgatgactggacgcccgacacggtcatggggaaaatcgtggtgtgcatggacggcgcaaccgacgcgtatggcattctcttgcagaatgctggtggagcaggcatagttgatgtggatcctcgcgagtggtctcgagatggcagcacggcctatccattcacccttccgggtctcacgctcagctacacctccggcgagaagctcagggcatacatggcctcggagcccaacccggtggcgtccttcagctttggctgtgagacggtcatcagcaagaacagggcgccggtggtggcgggcttctcgtcgcgggggccgaacccgatcgtccccgagctcctcaagcccgatgtcgtcgcgccgggagtgaacatcctcgcggcctggtcgggcgacgcgtctgtgtcgggagacgaccgagttcgagacgggaggacagccgactacaacatcatctcggggacgtccatggcgtgcccgcacgtcgccggcatcgcggcgctgatcaagaaggagtaccccagctggacgccggccatggtacggtcggcgctgatgacgactgcctggacgctcgacaaccgcggccggcgcatacgcgacgacggggccaccgctggccgccacgacgaagtcagggccgcgacaccgctggtggccggggccgggtacgtccacccggatctcgcgctggacccgggcctcgtctacgacgccggcgagcgcgactacgtcgacttcctgtgcgccctgaactacaccccggagcagctgcgcgtgttcgtgccgaacttcgtcggatgcacgaggacgctcgccggcggccccgccggcctcaactatccgtccttcgtcgtggtcttcgacagccgcaccgccgtccgcacgctgacgcggacgctgaccaaggtgtccgacgaggccgagacgtataatgtcaccgtcaaggcgccgaagcacgtgaaggtgatcgtcacgccgaggaccctggagttcaaggagccgaaggagacgaagagctacacggtggaattcagaaatgaagcccgtggaaaccagaagacagagtggggtttcggatacatcagctgggagaacgagaaccatcgtgtcaggagcccagtggccttccattggaactgatgacttccagtagaaacttgcagacttgcagtagaataagaagtgatgtgacttgtgagagagctattccattggaatcattggaataagaagtgaagctatgttgatgagttgatcggacatgtatcctctgttgtgactctgtgattgtgagagctactggtgttaataatagttatataatctttcttgtgttctaaagttttaaaaaaaaaaaaaaaaannnnnnnnnnnnnnnnnnnnnnnnnnnnnnnn

SEQ ID NO: 38199 - DNA, 455 bp, Setaria italica
  Peptide Sequence Number=SeqID_104173
gtctcgccgcgctcgccgctcacgtcgccatgctcgcgctcttcgtcggcgccctcggctggggcctccgcggggccgccgcggcctacgacgtcacgtcgtggggcgtcgccgtggcgcaggcggtgtacgtgacgcggtggtgccgggggcagggatgggagggcctgtcgtggagggcgttccgggggctctgggccttcgccaagctctcgctcgcctccgccgtcatgctctgcctcgagatctggtacatgatggtgctcgtcgtgatcgccggccgcctcgacgacgcggagatcgccgtcggatcagtctccatctgcatgaacgtgaatggttggggggcgatgctcttcatcggcctgaacgccgccatcagcgtccgcgtgtccaacgagctggggtccggccgcccgcgcgccgccaagcacgcggtggcggcggtggtggcg

SEQ ID NO: 38200 - DNA, 276 bp, Setaria italica
  Peptide Sequence Number=SeqID_104174
tttgtgtgtgccgtagatcgcggagtacccgaggaggagcacgaggaggagttgaccgcgagcccgagcccgaggaccagcagcacgagccggagctcccggaaggctttgaagacggcaagtccaatctcatcctttaatgcatattcaattcctagtttttcaaacataacctattggcctgttttataaaatgcatattgttttattgcaagacatggttggatagccaccccttgattgttacgatcattccttgttgtcctatgtttatct

SEQ ID NO: 38201 - DNA, 441 bp, Setaria italica
  Peptide Sequence Number=SeqID_104175
tagtactgggcaggctggacatcagcaaacttcccttgcacatcaatcgcaatcaatagccgttaacacaccaggcatttctgcgtcacccttgctagcagaattcacaagtgctgatggaagtcaggctaacgtacctactcaagttccaaccaaatcaaatgcagcagagaggcctctcgaccgcttgcttaaagcagtcagtatctcaccaacttcatatttagttccttttgacaattaattgtttgatcaatattgttctgaatttttgctgttgaacgtgtatgcctataaatatctgaaacatactagcacaagaaaaatgaggcttaaaagtttggctataggggttagatatatgccctttcccagcaaccccctctgtaccatgctagttcttcacatgatgacaatactgcctactactcacactgagtc

SEQ ID NO: 38202 - DNA, 218 bp, Setaria italica
  Peptide Sequence Number=SeqID_104176
atgtactggatgaaacttcttgaaggcccctctgagcctgaatatattgcttttgatcaatgttattttgctgtaagagcatgccagctgaagtttgaagcctctgttgcattccctgcaagttaacaagagcagcattcagcctggttttagagaaaaatccctatatacgagaggcaaactgttgctgtcctggtgctggcacaggcttccttctt

SEQ ID NO: 38203 - DNA, 580 bp, Setaria italica
  Peptide Sequence Number=SeqID_104177
cgaatggttgacggttcctgcaggtagcagcagcaaagggaagaagggaaagaagctgagatgccatttcctgcaggtagcagcagcaaagggaagaagggaaagaagctagagatgccatttctgcaagaaaggtggtcatttcaagaaggactgccccaagaagaaaaaatggttcgaagagaaatgaattgcttatgatccaacccataagcggacctaaaatacatgggaatggagtgaaggcactgaattgaatggaccgggacttgtgaataatccttgacattggtctgtgctcttagagctaaaagggtgtctttatgtttttgaatgttctagaaatcttatgtctatgaaaaagttggatgtactaagttttaagtctgtggacatagacattgtgttctcttatataagaattaagtatggttatagttccggtaggttgattgatggtttataccgtttcaaccttgatatttttcgaaactcctctttcatgctgaacacattattgaaaataaatgtaatacacataatgagctgaaggctttcttgtggaacaaaaaaaaaaaaa

SEQ ID NO: 38204 - DNA, 353 bp, Setaria italica
  Peptide Sequence Number=SeqID_104178
agcctgaatatattgctttgatcaatgttatttgctgtaagagcatgccagctgaagtttgaagcctctgttgcattcccaattgttgttgcagttgattagactgagactggaactgtgacatcatatgttgttgagattgctgaagctggttctgctgagactgaggttgcatcatacccatcgatggctgctgagcatgctgttgctgctgtggttgctgcattgcctttgctggctgtaacatatgcattcgttgactgtttgcaacattaggcgtcgttccaagaagctgctgctgctgctgctgctgctgctgcttgatttgctgctgctgttgctgctgctgatgc

SEQ ID NO: 38205 - DNA, 586 bp, Setaria italica
  misc_feature (560)..(560): n is a, c, g, or t
  Peptide Sequence Number=SeqID_104179
attaaataaaagttaggccttaacctccattcctctcctgcctgctggctcctgcttgtctgaggggaaagggtcgcaatccatggacggcgccgccaactcgcgccccacgcagggtgccgatcctgcggccgtcgctgccgccggtggcgtcgaccctaacgccgccgcccccgccggaggcgactggcgcaccctgctcccgcccgaggcccgcagcaggatcgtcaataagataatggaggctctaaagaagcatcggccagtatcagcgcctgaggagctgagtgagcttcaaaaaattgctgtgcggtttgaagagaaaatttatactgcagccaccaacccgtctgattatttgcggaagatttctctgaaaatgctgtctatggagaaccctggaaatgctcaagtgattccaaatcaaaacccccccggtccagatcgcggagtacccgaggaggagcacgaggaggagtttgaccgcgagcccgagcccgaggaccagcagcacgagccggagctcccggaaggcttgagcgatgcttatgatccaaccntaagcggacctaaatacatgggaatg

SEQ ID NO: 38206 - DNA, 650 bp, Setaria italica
  misc_feature (634)..(650): n is a, c, g, or t
  Peptide Sequence Number=SeqID_104180
aagaagaaaaatttaataactgcagccaccaacccgtctgattatttgcggaagatttctctgaaaatgctgtctatggagaaccctggaaatgctcaagtgattccaaatcaaaaacccccccggtccagatcgcggagtacccgaggaggagcacgaggaggagtttgaccgcgagcccgagcccgaggaccagcagcacgagccggagctcccggaaggctttgaagacggaattgcttatgatccaacccataagcggacctaaaatacatgggaatggagtgaaggcactggattgaatggatcgggacttgtgaataatccttgacattggtctgtgcttttagagctaaaagggtgtctttatgtttttgaatgttctagaaatcttatgtctatgaaaaagttggatgtactagtttgaagtctgtggatatagacattgtggtctcttatataagaattaagtatagttatagttctggtacttcgattgatggtttataccgtttcaaccttgatatttttcaaaactcctctttcatgctgaacacatttattcaataaatgtaatacacataatgagctgaaggctttcttgtggaaaaaaaaaaaaaaaaaaaaaaaaacnnnnnnnnnnnnnnnnn

SEQ ID NO: 38207 - DNA, 1482 bp, Setaria italica
  Peptide Sequence Number=SeqID_104181
ccgacggtcatcttcctcgccgtctcgcgtgttggctttcctcaatttcttcgcacgcaagcagggtggaatcctcgattcctcctcctgcctgctggctgctgcttgtctgagcaaccggatccttggtcgcccagcggatcgatccaatccatccagcagtcaaatttcaagcaagagaggcggcggccgggtcgcaagccatggacggcgccgccaactggcgccccacgcagggtgccgatcctgcggccgtcgctgccgccggtggcgtcgaccctaacgccgccgcccccgccggaggcgactggcgcacccagctccagcccgaggcccgcagcaggatcgtcaataagataatggagactctaaagaagcatctgccagtatcagtgcctgaggggctgagtgagcttcaaaaaattgctgtgcggtttgaagagaaaatttatactgcagccaccaaccagtctgattatttgcggaagatttctctgaaaatgctgtctatggagagtcagacaaagacacaacagaaccctggaaatgctcaagtgattccaaatcaaaacccccccggtccagcacctggccttcctccacaaggcagtaatccagcacaatcatcagctatcccgttgatgtctcagcaacagacacggcagccaaatgcttctgcatctgttcaaggttctctccctagtattggtcagagcttgccaggtgtcagccagacatccacgctgcagaacatgtctggcatgccgcaaaacaccatgaacagtggtttggcacaaggtgctccacaagatatgtatgctgcacaaagacaaatggcaggtaggcagcagcagcagcagcagcagcagcaacaagcacagaatcagttaatttatcagcagcagaaaattttgatgaaccagaaattgcagcagaactcacttatgcaaccacacattcagcagcagcaatctttattgcagtcaacacagatgcaatcttcacagcagcccatgatgcaaatgtcacctggccttcagcctgcgcagtccatcatttcacaaacgcaacccatggccatgcagtcagctactcagagtggcattcaacagaatcctttgaactcagtacaatctgtgcaatcattactccagcagcctacgcaatctgtaatgaggcagcagcaacatccacagtccatgcaccagcagccttctttgcagcaaactcagcaaattcaacagcccaacatccctttgcaacaacagcaaccacaattaatgggccaacagtcgaatttacaacaaaatcagttaatgagtcatcagaatggtgctgggcttccagttcagtcaaataatcttttgaatatgcagcagacgcaacagatgttgaaccagcaatctatgcccttgcaccagtcacaacaattagccccccagggaaatatgtcaagtttgcatcagcagcagcaacagcagc

SEQ ID NO: 38208 - DNA, 2381 bp, Setaria italica
  Peptide Sequence Number=SeqID_104182
tttgtacataaaatatctatgaagatacaacatgttgacaaccacatgccagctcaaaagtcatcagaccagtatgaaaagatgaagaactttaaagcattgttggagcgcacattgcatttcctgcaagttaacaagagcagcattcagcctggttttagagaaaaaatccctatatacgagaggcaaattgtcaatatcctaaattctcaaagaaggaagcctgtgccagcaccaggacagcaacagtttcagcaacctggtgggcaagcttctggctctaacatttcacagcaacaccagaattcccaaggtttgcagcagcatgatagtcatactaatcagatgcctcaagcgagtttgccaagtatgagcacaggagtgcagtcctctggtgcacctggcatccagcatgtacctgcgcctcaagcaacaaactttggtgtttcaacaacacagcaaaatgtcacaaatgcaccgcaggcgggctctaatttggagggtgcccaaggaaataattttaatcctgtgcagcatggttcaatgggtgctgcattgcaacagggaagcactggtcccatgcagggtgcaatgaatgcacagcagcagtccagtagtaacctgttatccaacaatgcgatgagtacaatgcaacctaataccaattccatgcaagcaaatgcaagctcattgcagcagctaaagcagcaacatcaggagcatcagattatgcaaagtcagcaaatgaagcgtcagcagatgcttcatcaacagatacatcaaaagcaattgcatcaatcgcagctcccaatacagcaacaattacagaaacaacagcagcaagggcagatgcaggttccacagcttcattctggaaatgacatgaacgagctaaaggtcaggcaaggagctgcaatgaaatctggaatgtaccaacagctgggccaacgcaactattatcagcagatgaaacagggtagtgcctttccaatttcttctccacaaaacctccaagcatcatccccacaaatttcgcaccactctcctcaggttgatcagcacaatctgttgcagtctcaaatcaagaccggaacaccattgcattcagctaactcaccatttgttccatctccatccccacctgttgccccatctcctataccagtggattcagataaaccactctccaacttatcatcacttactagtactgggcaggctggacatcagcaaacttcccttgcacatcaatcgcaatcaatagccgttaacacaccaggcatttctgcgtcacccttgctagcagaattcacaagtgctgatggaagtcaggctaacgtacctactcaagttccaaccaaatcaaatgcagcagagaggcctctcgaccgcttgcttaaagcattgcgaacaacacagcgtcagtcccttactgctgctgttagcgatataggatctgtcgtgagtatgattgacaggattgctggatcagcacctggtaacggttctagagctgctgtgggtgaggatcttgtcgctatgacaaaatgccgcttgcaagccaggaacttcataacacatgatgggagtggtacatcaaagaaaatgaagcgggacacgagtgccatgcctcttaatgtgtcatcgcctggaagcgtcaatgatagcttgaagcaatcatatagcatggacactcctgagctacaatcaactgcaacctcacgcgttaagtggcaaaaggctgaggtaaaccatgctctaatggaggagattcaggagataaaccaacagctcatagatacagagctccatgtctccgaagatgatgctgagtcattcgcagctacatctgagggggccgaagggatggtcattagatgcacatttactgctgtcgctgttagccccagtttgaaatccatgtttgcttcggctcagatgagcccgattctgccgttgaggttgcttgttcctgctagctaccccaaatgctccccggtgctcctagacaagtttccggatgaacaaagcaggaactcggatgacctgtctacaaaggccaagtcaaagttcggcatattgctccgtggtctagcggagcccatgtcactgcgagaaatcgcaaggacatgggatgcctgcgcccgcaaagtgatcgcagagtatgcccagcaaactggtggaggcagtttcagctcgagctatggttgctgggaaagctgcgtaggcgcttgatgactctggcggacattggcgatggagtgcattttattattaatattatcatcgttattaccataagtatttatactatgtgtggcgagagagagagagagagagagagagagagagagagagaggtggtgtgtgtcgtgtcgtgt

SEQ ID NO: 38209 - DNA, 207 bp, Setaria italica
  Peptide Sequence Number=SeqID_104183
tcctctccatgccagccggcagctcccagtcaaaacggtacacaaggtttgccagcatgatctcaacagtagccatgccaaagttgaggccagggcagatcctccggccagccccgaacggcacaaactgaaagtcattgcccctgaaatcgacagccgcagcgctgccaccttcgaggaacctctctggcatgaactcctctgcct

SEQ ID NO: 38210 - DNA, 169 bp, Setaria italica
  misc_feature (166)..(166): n is a, c, g, or t
  Peptide Sequence Number=SeqID_104184
acattggtgtcaagaagcctttagaggtcgaaaatattgctgttgtcattgaagacattagtgtggagaagtttatagagattgaaaatgttgtggctatagaaggtgtcgatgtcaagcctgagctagcgagcgagctaagtatagtgattgtgcatgatggaancgt

SEQ ID NO: 38211 - DNA, 1104 bp, Setaria italica
  misc_feature (1025)..(1104): n is a, c, g, or t
  Peptide Sequence Number=SeqID_104185
aaaggaaacggaaaaggaaataagaaagaacggaacgggcggcgcggcgcgaggccggaggcgacgacggtgaaggagttccaggtgtaccggtggaacccggactcgccggggcggcggccgttcctgcagtcctacttcgtggacctggccgcctgcaggcccatggtgctggacgtgctgcagaagatcaaggcggagcacgacccgacgctgacgttccggcggtcgtgccgggagggcatctgcgggtcctgctcgatgtgcatcgacggcgtcaacacggtggcgtgcctcaagcccgtggacacggacgcgtcgagggcgagcatgatcacgccgctgccgcacatgttcgtggtgaaggacctcgtcgtggacctcaccggcttctaccagcagtacaagtcggtggagccgtggctcaagaccaagaggccgccgcccggcgggcgcgagcacccgcagtcgccggcgcagcggaagaagctggacgggctgtacgagtgcatcctatgcgcgtgctgcagcacggcgtgcccgtcctactggtggaactcggaggcgttcctgggccccgccgcgctgctgcacgcctaccgttgggtctccgacagccgcgacgactacggccaggagcgggtgcagtcgctggcggaaggctgggacaagctctacaggtgcaggatgatcaagagctgcaccgcgacgtgccccaagagcctcgaccccgccgccgccatctcctccatgaagaccttgcaccagctccgcaaggcctgatgaaatcatgaaagacaatagaatgccggcctgcatgtctacgcgactacgctggtgcaagtaggggacgtgccgtgtgtgttttgatctgggaataagaatgctttgtggatttcgttgctgcaatgtagtaagacgttgatccatcgagtgtactctgttctgtcccagagcccaaatgtgaacaacgttactttgtggtttgctctctctttggaaagcagaattgagttatacgaacnnnnnnnnnnnnnnnnnnnnnnnnnnnnnnnnnnnnnnnnnnnnnnnnnnnnnnnnnnnnnnnnnnnnnnnnnnnnnnnn

SEQ ID NO: 38212 - DNA, 386 bp, Setaria italica
  Peptide Sequence Number=SeqID_104186
atgaataatgcgttttattttttgattcctgaataatagattgttgttactcgattcctgaatagtaatggtttgtcattatttggtccctgcataatggtatctaatgcatataccgtactgcttctgtatattaagctaaatcgccgtgtcccaaagattagatctttttgtaaaacagggagacaagatccaagatcctgcatctctcaatgtcaatggagggttatagagaatttgcttatcctgttttctttgctgaaaatacagtaacttgttaatagcaaaactttccgatattttctatcgagttagttatgctgttgctgatttttggcctttgtctcttcctttttttttagtaatctgtagcaaatggctgacgg

SEQ ID NO: 38213 - DNA, 623 bp, Setaria italica
  Peptide Sequence Number=SeqID_104187
gatcgcctgaaccagtcaagatatttttcaagaggtaaagagcaagcgtgacaagaagaaagaggttgcagcctaagagcctcctgatttccgcagttgagtgccttgaatgtttcttcagtagcagattgttatctacgaaacattggcagatttaagttacaggtactatcgcgttgatggaagggtcaaggcggtctaggaaaccttttaaagaactcacaaatataacaattctaggtacgcaaaccctggatcatgtagatcctaatgaacgtgatagagagggtaagaggagaaaaacggaacaaggtgccattcagcacattccaaacaatcaccaagatgacagtgtacacatggaggcagatgaaaacgataggtggctccatagaggagatttgggagaaaataaagacatacttcatgtggggacagaaggctacttttggtgagatggaagattgatgcgatcagagttgtatcagccctatatgtgaaggagatataaacgctgcattacgcattgatgatgctactcttggtgacacggggacgttgcgttgaagttatagcagtactgtgggtggagcaggtgatggattagatccatgtctattgat

SEQ ID NO: 38214 - DNA, 611 bp, Setaria italica
  Peptide Sequence Number=SeqID_104188
aacaaaacacagcctagactgccgttcaaaaccaaacggactaattaaacccagccgccatcttgcagcagcaactgtcaccattgaacccacttgcattggcaaaccccgccgccttctggcagcagcaacagctagtcaaccaactagctttgacgagtcccgccgccttcttgcagcaacccatcgttggttctgccctcttctagattactgatgagttgtacttgaataattatgtttgcatgaggacatgggtgactccgcggaaataagaaaagtattggttgagattatgaagtcctatctgtgtccaaatgtgtttcgtaattctttgtgccatacattcgacaactaccaaatactatgtatcgtacctatggagccatacatgatttaagtacatattacatcatgcaaataccgtgaggcggttcagtatctccgaaagttcagatttcaccagatgggatagcacagccacgccacgggcgcgtagtaggacttaagataacacaatggttgtttcgaatgttccataggagagagaattggtcaacatcactaattattattgtgcatgttatatgccagtatatctacatgtttac

SEQ ID NO: 38215 - DNA, 826 bp, Setaria italica
  Peptide Sequence Number=SeqID_104189
agacgacgtaacgaccctaccaacctgccctcccgatagcgtcgcctcccgctcctccttccactgcatctccgccgcgccttcctcgagcgtgaacttgccgccgccggcgtcgccgccgacccagccgtgcgtcgccaccgtcacgcccacctcgtccttcacctcgtaccggagcgtctcgtagaagtccaccaccgcggctttcgccgccgagtagaggctcatcctgggcatgggcagccagctctcgacggacgcgttcaccacgacgcggccgtggctccgccgcaggtacgggagcgccgcgtaggtcgggtaaacgtttccccagaagttgatgtccatgaggtgagggaacgcggtggtgtccccggcctcctcgaagttgaaatcgtggcccaagctcacggtgttcaccagatggttcagctggccgaagtaggtgaaggtgtcgctgacgagcctccggcagtcgtcctccttgacgacgtcggcggcgatgacgaggacctgcccccgcgcccaggagccgcgcgttgtcgcgtatcgcgaacagccggtgctcccgccgcgccaccagcaccaggttcgcgttccgcctcgcgtactcgtacgcgatttgctcgccgatggcggaggatgcgccggtgatgacgacgaccttgccgagcatgtcctccttggtgagcgtcttgagcacccactcgacgccgcggaggaaggacagcgtcggccacgcgaacgccagcatcaccatgctcgccggcggcaccaccaggtccatcaccgcgttcaccacctgatccatctctgtcctccctcg

SEQ ID NO: 38216 - DNA, 580 bp, Setaria italica
  Peptide Sequence Number=SeqID_104190
ccgagagtgatcgagctcccccggtcgctaccacagctgccacgacacagcttgtactccaggtgcattgcacgatggcgcaggtggctaagcggcttctcctggtggccctgttggtggtgtcagcggtggagctgtgccgcgccatgccgtttgacaagaaggacctggagtcggacgaggcgctgtgggacctgtacgagcggtggcaggcgcaccaccgcgtgcaccggcaccacggcgagaagggccgccgcttcggcaccttcaaggagaacgtccgcttcatccacgcccacaacacgcgcggcgaccgcccccactaccgcctccgcctgaaccgcttcggcgacatgggccgcgaggagttccgctccgcgttcgccgactcccgcatcaacgacctccgccgggagccccacgccgcggccgcggtgcccgggttcatgtacgaggacgtcgcctacctgccgagctccgtggactggcggccaggagggcgcggtcaccgccgtcaagaaccagggcaagtgcggcagctgctgggccttctccacggtggtggccgtggagggcgatc

SEQ ID NO: 38217 - DNA, 275 bp, Setaria italica
  Peptide Sequence Number=SeqID_104191
aatccccaatcccaccccaactcaacaagcccgaccgatcctccgtcctctcgcgcccgatccgaccttgcctccacccgccgttgccctgcccgcccgaccatcgcgacgacctcttctcccgcgcgttcggcaccgccggcgaccgcatcaacaagtgcggaagaccgaggttgtgcgagggttcagccatggcgagcgcggatctgctgcggagggaggaggagttctactcttccctcttcgattccgctaaaggtgacggcgtcaggtcg

SEQ ID NO: 38218 - DNA, 674 bp, Setaria italica
  Peptide Sequence Number=SeqID_104192
agaggactcatgtggatgaagatgaattgatagcgctgaatgcttggcgtcgtatagatcgccaaacaagagaagctataaagagaaattttcttcccgatctgcttgaaatatatgaagaacgagttcggaccttcattgaagatactagtgataaagatgtgcttgtgctgaatgtccaggacccgtttcagaggctgcttctgcatggtgtttgtgagttctataacgtaacctcaacgaccttgagcagcgtgagagatgggaagccgtggaagacaaccaccatcaagaagaggcagggcacaggtgttccctcccgaatcacattagttaccttcctgaggacgaagaagaatgggtcccagtaacatgtagttgcacgaggacctgaagctcctgagtcctgccctcaggtctgcctgggtgtgtaccaaagcatcctaatgttggccaagatgacaaatttgttgctttaggttccctttaggatgtaagcagatgtaaattatccatattttcgcttgaaactcattgcaagtgatgggtcactggcaaccatgcccccatttcgcatccttgtgacagctggtggtgttctaacaggctgtacgatttgaatccgtgtcgtaatttcaggttcagttggaaggcttgcacagtcacgcttaaca

SEQ ID NO: 38219 - DNA, 1343 bp, Setaria italica
  Peptide Sequence Number=SeqID_104193
ccagtctgccgctgccctcgtgggaagacgaatcacgaacaccacaacctccagacttccgatcccctccccaatccgaccccaactcaagtactcagccaggttgcatccgccgccgcccaatcatccctcgccttcgaccaatcctccattcccctgcctattgcctccacccgccgctgccctgcgcccctgcccgaccatcgcgaccgcatcttctctcgctcgcgcgttcggcaccaccagcggccgcatcgacaggtgcaggaagaccgaagtcgttgtgcgaggcttcagccatggcgagcgcggatctgctgcggagggaggaggagttctactcttccctcttcgattccgctaaaggcgacggcgtcaggtcgcgctcgcagttgattgagaggaagattgaagccctcgaggacatggccaccaaggtcagtaacaggagatctcgtagatggttgaatgatcgcctgctgattgaacttgtccctcgtcttcatgttgaagaaatcaaaggcctctttgctcctccaccatggggtgaggaactgcccttgtcagcattctgcaggacaagtgttggtgaatgggatgccttcaggagcattgacatggatactgaggcaagattgatgcaacacatgaaaagatcatcggagaaacagaggactcatgtggatgaagatgaattgattgcactgaatgcttggcgtcgtatagatcgccaaacaagagaagctataaagagaaattttcttcccgatctgcttgaaatatatgaagaacgagttcggaccttcattgaagatgctagtgataaagatgtgcttgtgctcaatgtccaggacccatttcagaggctgcttctgcacggtgtttgtgagttctataacgtgacatcaacaaccacgagctgtgtaagagatgggaagctgtggaggacaacaagcatcaagaagaggcagggcacgggtgttccctccagaatcacattagcgagcttcctgaggaagaagaagaatgggtcccagtaacattagctgcgtgacagcgtgagggcctgcggctcctgtgcccagatctgccttggtgtgtgctcaagaagacaaatctgttgaggttccgtttaggatgtgggcaaatgtaaattatccagatttaaatttgaatcacattgcaaagcaggtgatgtgtcactggcaatcatacgcctagcatccttgtgaacgctgtggatgttctaacctagttggcaagttgcacgatttgaatccaactagggtagagcttccgtttcagttgattcagccttgcgcttaactttcatcagaaaggtt

SEQ ID NO: 38220 - DNA, 741 bp, Setaria italica
  misc_feature (83)..(83): n is a, c, g, or t
  Peptide Sequence Number=SeqID_104194
aaaaaccaagccttttccctgctaaaataagtaatcatgtttattgaaatgattataatcgattcggagactaattagtttcncttgtaaagaagacatctgtgagttgttgattatgtagctgtatgtcggtatatactagttcatgtagattatttatcattctcataccacatctaactggtttgctatttttagtttcaagactcaaaagataagtgaagtatatgaacatattttatttaatagatctttaataatcattgagtttccagtatcaacaagtatcagtttagcaccttgcttgtaaaagcaaacttgttactttcgtaacaatttctatggtgcttttagaatttgttagaaaaaaaactgcaggaaaaagatatagtgtgtcttttgtccagttcccagtaacttagttggataccttgtgtagatacgtttacaggcttcaaaggttggcaccatccttagataactaaagttcttgtcagttcatcagaactcggagcagagttattttcacttagaattatgttttcttcgctttactatgcccacttctaccaacttttcttccagcagaaattagctcagcttgtcagttgcttacattacagtttctgctttttatgattgcaggaacgagttcggaccttcattgaagatactagtgataaagatgtgcttgtgctgaaacgggtcctggacattcagcacaagcacatctttatcact

SEQ ID NO: 38221 - DNA, 408 bp, Setaria italica
  Peptide Sequence Number=SeqID_104195
cagaaaactttgaacaccatgaagattgtgaaacatggcgtttaaggtgcctgcatgacgtactcttgtcactcccttttgcttatttagttagcatggacttctgcaagggtgaaaccacccaacccaaaccatgcaagtggttgtagaaaaccctgtaaaaccatttggaggttaaggggttacctggtcatagagtttggggtgacaggcggagtttagagcaaaacttagggggttatttggacttcttaccgttcaaaaattggttaatcagttatatcttctattttgggttttattttccctgtttacacttagaccaaaccattttgctggattgctggtcaaaattagatgtctgggtggtagactggtagtagtattatgaaggaataacaaaaagtg

SEQ ID NO: 38222 - DNA, 873 bp, Setaria italica
  Peptide Sequence Number=SeqID_104196
acaccagagtaaggaatacagcagcgaagaggtcacggaatctgacatcaacaccagcaatgaaccgttagttgacaaaactgggacagtggcaactggttcattgtttgatgacttgtttccttcagacaatgaagactaccctaaaaaactttctagttgtgcaagtgctagtgactgtggaacactttcctccaagactgtatcgaatggcagaactaggaatgcagttgccaagaggaaaatgaaaactgtagaagacaaatcaggcagcaagtgtggcaaagttggtagtgtcattgcatctgtagcagaagctgtttcatcaaagagaactgaagagatttcatgcaatagcaacaaaataaccactgatcaggactctgacaaatccaataaggatgtgataaaagatgcatccggattgtttgtcaagattctggtacggtagacaagcaaggaggatcatacaattttaacttgagaagcagcaaaagaaataaagctcttacttcggatcatgaaaaggagaacagactagaccatagtaatctcaactctatatcaaatagaactagcagtttgcagtccaaatttgatgcaaaatcaattgagaaaagcacacgagtgctcagtgacagtgagcaccaaggggtaaaagtaagtgaatctggaaccttgatcgtgagtgaacctgcattatttattttaagtggaaatcgtgagcagagaagggattgtcgctcaattcttagacggctgaagggacgagtttgtagggattcacatcattggtcataccaagcaacacatttcattgccctgtatcctctcaggagaaccctcgtgtgctttctgcagctgcagcaggca

SEQ ID NO: 38223 - DNA, 489 bp, Setaria italica
  Peptide Sequence Number=SeqID_104197
cgcggcttcagctctgagaacaaacgacctccgcgccttgtccacagagctgaagccgcgaaaccgtgcatggactcgacggaagcgacgcaggccttctgctcgcccgccacctcgcgggggtgctcgcacgagctcagcgtggaccacatgccgtgggccatagagttggataccggcgcggacatggtgacaatgtcattgaagttctttctggatatcgggattgaatcggcagagtcggggcgaagccaagcgctgtgcaaggcggccgcccggtcgatgtagaggttgatcttggaccctggggtgaaggtggtctctgggtacagtagcttctctgaagctatcaagtgtgcccagttatggaatatctttgcatcttctttgttaagctggtctgactgtacagaccaatagtgctcctgttcccaacaggaccataccatcagccatactggaccacatcagttactacctattcttgtt

SEQ ID NO: 38224 - DNA, 617 bp, Setaria italica
  Peptide Sequence Number=SeqID_104198
tgtacgtctaggtcctttcttgtcttcgtcccgtcctaccttcgtcgggggttgtcttcgtcacgagctcagcgtggaccacatgccgtgggccatagagttggataccggcgcggacatggtgacaatgtcattgaagttctttctggatatcgggattgaatcggcagagtcggggcgaagccaagcgctgtgcaaggcggccgcccggtcgatgtagaggttgatcttggaccctggggtgaaggtggtctctgggtacagtagcttctctgaagctatcaagtgtgcccagttatggaatatctttgcatcttctttgttaagctggtctgactgtacagaccaatagtgctcctgttccttaacgttcctctcatttccagatggtgtactgatgtggtccagtatggctgatggtatggtcctgttgggaaacactgactgccagtatgcgttgagctctgacgcagaggcatagtatggcactgtcatcccctccgctcccatcgccagagctgcagagaccatggcgaccagaagtggcacgaagaacagaagaaacaacccaatttagttacctagtaactaactaagactaagacctagactagaca

SEQ ID NO: 38225 - DNA, 1508 bp, Setaria italica
  misc_feature (1)..(27): n is a, c, g, or t
  misc_feature (175)..(213): n is a, c, g, or t
  Peptide Sequence Number=SeqID_104199
nnnnnnnnnnnnnnnnnnnnnnnnnnngttgtagtattaggtactaaccttattttttgtttatttttttcttatttgtaagtcccttctaggtcttctaggtaattcgggtactaaactaactactagtcttcgtattgtctactacgaggtctttcggttcttcgttctttcnnnnnnnnnnnnnnnnnnnnnnnnnnnnnnnnnnnnnnngtctccctttctgtttgttttttttgagataggacaaccatttttgtattttttcattgaagccctcaggctcaggaatcgggacaaacaacacagctcgatgcacacgaggcttcggtctcgtcttccttattttctacatacaacatggcccacggtggagcatgcctctagccctctactcaggcagcagaggcgggtgcccagaggacgtcgccccttgtaaggaagtgacacaccggggcttcccctggcttgacaccaagcttcacccagtacttcagtgtggggtcaaaccctgaggtgttcacgtggcacaccgcaagtgcccgcaccaccgccggccttctcggcgcagggacggcagcagtctcctccttctgcaacgtaacctcatagatccttgttgggttgacggcgtggcagtagaacaacgcgaacgggaagctcatgctgtggcacgtcacggtgtccaccgccgccggcttggctcctccggcggtgactacacgcaccgccgccaccctgtacatgtgcgacggcgagctgatgccctcctcaggcacgtcgagggatgtggacaaggcgcggaggtcgtttgttctcagagctgaagccgcgaaaccgtgcatggactcgacggaagcgacgcaggccttctgctcgcccgccacctcgcgggggtgctcgcacgagctcagcgtggaccacatgccgtgggccatagagttggataccggcgcggacatggtgacaatgtcattgaagttctttctggatatcgggattgaatcggcagagtcggggcgaagccaagcgctgtgcaaggcggccgcccggtcgatgtagaggttgatcttggaccctggggtgaaggtggtctctgggtacagtagcttctctgaagctatcaagtgtgcccagttatggaatatctttgcatcttctttgttaagctggtctgactgtacagaccaatagtgctcctgttccttaacgttcctctcatttccagatggtgtactgatgtggtccagtatggctgatggtatggtcctgttgggaaacactgactgccagtatgcgttgagctctgacgcagaggcatagtatggcactgtcatcccctccgctcccatcgccagagctgcagagaccatggcgaccagaagtggcacgaagaacagaagaacacccatttgttcctgtactactagctagcctgctgctaagttagtccttttttttacgttacctagtaactaactaagactaagacctagactagacataaa

SEQ ID NO: 38226 - DNA, 440 bp, Setaria italica
  Peptide Sequence Number=SeqID_104200
tagttctcttttagtttttttttttttctatgaccaatcatgtcaattttgagacagcggcaccaaaatttaagtttcatcaatcgtccagatcgagctagtacttgaaaacaggggttccaaaaaaactaatctcagcatggttactagcctgcaatatccattttacataacagcgagtcccaaccttgagcaccttggctctcccttctccagtgaatgcctcactcatcatcagcgtgcttcttctttttcttcttgtctttcttaccagaatcttcattttgcattacaacatcctcaccatccacatcagatttcttctttttcttcttcttctcgccttcggcggcagccacagcaggctcctcgctctccttggacttcttttcttttcttctcaccatcagcagcagccactggagtcgagtcggtttcct

SEQ ID NO: 38227 - DNA, 822 bp, Setaria italica
  misc_feature (801)..(801): n is a, c, g, or t
  Peptide Sequence Number=SeqID_104201
catcaagacattgcgtctaaggtacttaaaaactttagtatggaatggaaagatattcgtttattattgggggatattgaatacatggaaattgtgactaaggatgaaaagctaatgaaggatgtgaataaggatcaaaaggatatagaggaagagagcaagcttgtgaaggatgtagaaataaagggtcaaaaggatagagggaagagcccaagcctgtgaaggagaaaaagataatatactctactttggatgagaatggggtatgggtgaaggatcagaaggaagaggataacctaaggttgattagcacaagctagcaaggaaaaagaagctcaggatgccatggaaaagagcaaaagtttcaggacctattgaggatcctaacaaagctgctagcatcgtcaaagatgccaatgaggatgacaatactataaaaagacaatcagagggcaagcaagaacatgtagcaactgatgaggtgccacaacagttgaagacagaaccaactcccacagtttagagagtgcaatcatcttttataatgatgatacagaaggaccgcagtttgaggaattcaaaggtcaaggctttgaagtcttcgaggagccgttccatgttgaggaaggacaagtcaactttgaggatgttcttcaagacttcaattagttctaggtgtacgtgttcccctagtcaactgcctgtggagtcatcatcttcgctagagttccactgctataataaagactcgatttgctgttcatttaagactatcggtcatgtaataaatataatactctntttacgtatagcactgtcttt

SEQ ID NO: 38228 - DNA, 885 bp, Setaria italica
  misc_feature (1)..(77): n is a, c, g, or t
  Peptide Sequence Number=SeqID_104202
nnnnnnnnnnnnnnnnnnnnnnnnnnnnnnnnnnnnnnnnnnnnnnnnnnnnnnnnnnnnnnnnnnnnnnnnnnnnnccttttactaatcaaataatacttaaacgacatatagtttataacaataagtagcagtgcatcattactaaccagtttttaaggataccaaagtagcaaacatgtttccaccataagaagcccctattgtttgatgcacattatgggtttgctcttactgaagtcatggcaatatacacagcttatagcgcagtacatggccatatacttttatttctgtccagatagatagttggcataattcagaacctacagaaaaccatgaggcagatctggcttgattgaatgacttggggcaactgaaacattttctgtggcatatttggcagcctttcttcctctagtagatttgttagttgtacctgtatacaaaatatgttatgtaaaccataatggacataaatcttaatttgaaagattgtcaacagaataaagagttcccaatttttcattttgctagtgaaataaacactagttgcacgattaaatgtacagtttccaagctacattgtaaaatacaataggcgcataggtttatcatcttaaggaaagcatatatttaatatgtttatatagttgaagggcacgaaccggcaggaccatcaccatccggaccaactatcttcttcttctgaagttttcttcctctgaatatgcctgttgccggtccgtttgtttccaggaattcttccacttcaagtttggaacggaagtccctgcagtacagcctatgttcgtaggtctacatataatcaattttaatcaaagtttaataccatttcttttaattgcagtacagccttaataa

SEQ ID NO: 38229 - DNA, 667 bp, Setaria italica
  Peptide Sequence Number=SeqID_104203
tttttaaatattataatatacccattgagaatttttctgtttccacaaacgaatattactgaaacaacatatataacttccacgaaataacatataggtagcaatgcattatcacatccagtttaaggataccaaactagtagcaaacatgtttccaccataagaagcctcatattgtttcatgcacttattggcttatactcttactggagctatgccaatgaacacagcttatagcacagtacatggccatatgcttttatttgtatccagaacctacagaaaaccctgaggcatatctggcttgattgaacgacttggggaacctgaacatttctgtggcatatttggcagcctttcttcctctagtagatttgttagttgtaccggcaggaccatcaccatccggaccaactatcttcttcttctgatgttttcttcctctgaatatgcctgttgccggtccatttgtttccaggaattcttccacttcaagtttggaacggaagtccctgcagtacagcctatgttcgtaggtctacatataatcagtttaatcaagttaataccattcttttaattgcagtacagccttaataatttgagaaaaatatatgataacaagttactaggactgtccatcttcagccttgagacatgcctacta

SEQ ID NO: 38230 - DNA, 604 bp, Setaria italica
  Peptide Sequence Number=SeqID_104204
gaagcaaatcatctaaataatataatatggccattgagaatttttctgtttaccacaaacgaatattacttaaacaacatatataacttccacgaaataacatataggtggcaatgcattatcacatccagtttaaggataccaaactagtagcaaacatagtttcatgcatttattggcttatactcttactggagctatgccaatgaacacagcttatagcacagtacatggccatatgcttttatttatatccagaacctacagaaaaccctgaggcatatctggcctgattgaacgacttgggccaagtgaaacattctctgtggcatagttggtagcctttcttcctctagtagatttagctttaccggcaggaccatcagcacccggaccaacaattttcttcttctgaagttttgtccctctgaacataccagtcgccggtccatttgtttccagaaactctttcacatcaggtttggaacgaaactccctgcggtacaacctatgttcgtaggtccaatccttgtgacacccataagctctagggttaacgaaagctttccaatccccttcctcgtagtttttaagtcgactttct

SEQ ID NO: 38231 - DNA, 1010 bp, Setaria italica
  misc_feature (1)..(22): n is a, c, g, or t
  Peptide Sequence Number=SeqID_104205
nnnnnnnnnnnnnnnnnnnnnnccttactaatcaaataatacttaaacgacatctagtatataacttccacgaaataacaataagtagcaatgcatcattacaaccagtttaaggataccaaagtagcaaacatgtttccaccataagaagcccctattgtttgatgcacattatgggtttgctcttactgaagtcatggcaatatacacagcttatagcacagtacatggccatatacttttatttctgtccagatagatagttggcataattcagaacctacagaaaaccatgaggcagatctggcttgattgaatgacttggggcaactgaaacattttctgtggcatatttggcagcctttcttcctctagtagatttattagttgtaccggcaggaccatcaccatccggaccaactatcttcttcttctgaagttttcttcctctgaatatgcctgttgccggtccgtttgtttccaggaattcttccacttcaagtttggaacggaagtccctgcagtacagcctatgttcgtaggtcctgtccttgtgacacccataagatctaggtttaatgaaagctttccagtccccttccttgtagtttttaagcaacttcagcgatgggggaacctcaacttcttgtcttccatcgcgcacagactgttctttgactggaacagactggtatcttaagcgagcaagcatattcttgtcaaaggggataggttcttttcctccatagggaacgagaaccattctcagaggaaccgcttctagtggatccagatccgtacccttcatctgtggatctggaatattcaccgggttttgcagagctggaatggtctgttcctcctcggctttgctcactgcaggaggcggggatccagataaggtcatctcagcgtcactcaacgaatcttggttttctactaaggatgaatccgtggcctattctttgttcttctttatataatatataaagtggagcaggggtggcttg

SEQ ID NO: 38232 - DNA, 256 bp, Setaria italica
  Peptide Sequence Number=SeqID_104206
ctataggcaagaagagctgaatccaatgatttatagtgcacataaacatttcctcgaagatggaaagatccattcctacataccttgaagttggcaagttcaccaaatttcagaaattctgtatgtacgtcttcataaaattcctcataactctgttcgatttcttcatctgtgaactgaagcatgttaaagaaaaaagcatattagttcaacattcaacaaagaaagaaataaaaaatcttaatgcaatttcact

SEQ ID NO: 38233 - DNA, 522 bp, Setaria italica
  Peptide Sequence Number=SeqID_104207
ccattcatgctgcataggcaagaagagctgaatccaatgatttatagtgcacataaacattcctcgaagatggaaagatccattcctacataccttgaagttggcaagttcaccaaatttcagaaattctgtatgtacgtcttcattgaattccacataactctgttcgatttcttcatctttgacctgtcaccctaatggtcatcaaacacgtccagtaaaagaataactcctcaatagttcaacgttaataattcccagttactatcaaaattgtcaaggagctgcttaataaatgataccaaaacaagttccaatttcaaatattgaaggcttttttaacagtttaaaaagaaacataaaaaagttcagtcaacatcaacaagaccatgataatttaggatacacgagcagatcaaagttcaggtcgtcctcagtcaagtgaaaccaactggccggatcactgtatgcctcaagtcggagttctggagagaattataacaaagcaaatgcaatctgtgg

SEQ ID NO: 38234 - DNA, 263 bp, Setaria italica
  Peptide Sequence Number=SeqID_104208
tccaatgatttatagtgcacataaacatttcctcgaagatggaaagatccattcctacataccttgaagttggcaagttcaccaaatttcagaaattctgtatgtacgtcttcataaaattcctcataactctgttcgatttcttcatctgtcaccctaatggtcatcaaacacgtccagtaaaagaataactcctcaatagttcaacgttaataattcccagttaacgagcagatcaaagttcaggtcgtcctcagtcaagt

SEQ ID NO: 38235 - DNA, 1535 bp, Setaria italica
  Peptide Sequence Number=SeqID_104209
tttcaaaatgcacatgtaattctaacaaagtgatataagagggcataacaaaacagggttatcccgtgctctaaatgctcgaaatctgtgtactagctactcgacttctccttactcctacttagcttcctctttgatctgtgcgttgaaaaattctcctcactgcttcttgatctaccgactacacgaatcagagctcaaacctctagtgtcagaatctctggtatcctcttctgttgtgctacgccgcttgtttccactgtgactcttccttctacgcttatcatcctttgttctgctgcttgatctctgatgctgagcttccgcatctgaatgagcatctcccttcccaccaaactttgtgccttcactacttgacctctgatatctatcaacatctgaatcaccatcgctatatgtagcaacccacctgtcatcagagtaattgtggtcatccttgtgctttctagatttcactcttccatcatctttctcatcataatagtcatcttctgtgccacgttgagagccccttctggtgctgtgttcttttcctgctgatttgtgcgctgtataacgtctttcaagattgtgagcctctgaggatttcctcatgctctttttcggatcgtcatacttgctactggatttgccgcctgaagggcccttgctggcgtctgtatcagttaagtctgaaggccaatcagaagaaccaggttcgcaacttccacgctgatcagactggtgcttcctagaactaattttgtcatattttcctccatcactatgatcacttctgcgcctttcctcatgcttgtgcttatggacctgactttcattttcttttgttgagaactgtctgccattagtcttagtatcttgcccatggtgtctatctgcggctgaagaacctcttctatgctgactgtactcataattcatgctgtggctactgcgttcttgcttagaatgtgaataatcttgggaagaatatcgtgtatgcacatcttcatccatggaccttcttggaacgtacctatcactggaacttttcagtcttttcctgtttgaatgttgcagcctttcaaaatctcgggtatcacttgccttgtcatgcgtagcatcagccgcaggaccaaaaagagcaaccatcttcctaatccagtatctaggaggaggattatcccaatcagcccactcataatctcctccaggattgcgaaaacagtgaataaaattacaagcaactccatgcgaacatgtcttgtatcttgacctcatgtattcaccacatatggaagctttccatcttgtcacagcaacaaattcgcatgttatctgctttccagcaaaatagcgtccattcatgctgctataggcaagaagagctgaatccaatgatttatagtgcacataaacatttcctcgaagatggaaagatccattcctacataccttacactattaactggaatcaatttttataatctatgggaaagaaaatttacacataaagcctagctttgagaaaagtt

SEQ ID NO: 38236 - DNA, 342 bp, Setaria italica
  misc_feature (296)..(296): n is a, c, g, or t
  Peptide Sequence Number=SeqID_104210
agaagccaattcgatcctccgattttgaagctgataataaaagatgcagctttttcagaagtagcaattctggttaggagaaatattaagaatcacattgaaacacaacattattgcttatgattactctgttgcactgtatgatacatttgatatctatcacatgattatattcctatccctaggatactgacataaggaggttggcggatgaaacttgtttaagaattttggtccatatgtaacacaatctgttcattcacaataagcacagatatatattattaactggaaancttagttatggacattgtgtacttgtgtatgaagtctcagtattgg

SEQ ID NO: 38237 - DNA, 619 bp, Setaria italica
  misc_feature (585)..(619): n is a, c, g, or t
  Peptide Sequence Number=SeqID_104211
ctcgatctctcttcacgtactgcgacgacgtccgtccgtccgtccgaccgactcatcagccagcaatggcgtccaaggccctcctcctgctcgcgctcctcgcgtcggccgccgtgctcgccgccgcggcggaccaacaaacccatgacaacgagcccgagaaggcgacggcgagcgacgccggtggcgtggaggacgactggcacggcggcagcgggtcagttgatcagtacggacacgcctgcgagaacggctgctgccaccgcgtgtaccacggaggctgccagaggtgctgcccgcccggcggcgcccgccggccggaggtgaagaactagctactagacccgcccgccatgacgccgagccggatcgagctgcctagctagtagagcgaggatgttcttgttagctgctcgtagataacacgggcgtggctaggtagtagtagcagcatctagcatccttacaagttttgttacgaatgaataacgtgcaacttgcatgtacggatagacccgtgtacggacgtgcgcacgtacgtcttcctgatgcagctggttcggaataataatgtgtcgtgaaccnnnnnnnnnnnnnnnnnnnnnnnnnnnnnnnnnnn

SEQ ID NO: 38238 - DNA, 414 bp, Setaria italica
  Peptide Sequence Number=SeqID_104212
ccattttgcttttcctgggaacaatctgcttcttcagaagtgtagactaaattaggaacatcatgttactagcctactcagtcaaccttttggtgttttcacttagtcttagttaaatttctgtccttttttgtccctttttttttctgttgaaactatgttaacaaattaatcttgtttcaggtatgctatcacgaaagcctttttgcattgctttcgtcatgaccttcttctctgtattcgacgttcctgtcttctggccaatacttctctgttattggatcgtgctctttttcctgacaatgaagcgacagattatgcatatgatcaagtacaagtatgtcccgttcacctttggaaagcagaggtatggcgaaaagaaagagccagctgccagtgcatctaaagactgaa

SEQ ID NO: 38239 - DNA, 851 bp, Setaria italica
  Peptide Sequence Number=SeqID_104213
acctgctcaacctcttcatcggcttcctctcccccatggtcgacccggagctcgaggcgctcgacgcagggcccgggctccccacccgcggctccgacgagttcaggcccttcgtccgccgcctccccgagttcaagttctggtatgctatcacgaaagccttttgcattgctttcgtcatgaccttcttctctgtattcgacgttcctgtcttctggccaatacttctctgttattggatcgtgctctttttcctgacaatgaagcgacagattatgcatatgatcaagtacaagtatgtcccgttcacctttggaaagcagaggtatggcgaaaagaaagagccagctgccagtgcatctaaagactgaagactgagggtctgggacctggagagcaaatgcttgtctgttatctgtgaggcaactatcctgctggcatggtggtattttgattaccagctgctgacagtaaatgcacaccaaattcgctagtggagagaagcgaagcaaacttctgcatcggttgatgattcttgtttttgcatatcagtagtttgtgtacaatgacttgggatatagctagtagatcactttccagttactctgttgtactacgcttgtattggacaagttgtgaacctgctgacccggtgcaacgcaatgcaagtgaaaaccaagaggacagtgacttaggacatagctagtaagtatatcacattttacttctgttgtactgcacttttgtggacaagttgtacacttgttgaatcggtgcaatttcaattcaagttgaaaaagacaaagaacaaagtccaacttgaggacctgggccacatggtggtgttaatt

SEQ ID NO: 38240 - DNA, 409 bp, Setaria italica
  Peptide Sequence Number=SeqID_104214
ggttgcacataggtgcgccggccgttccgtattcctgttcttattatatattgttgtatcagcatcattatattacagcatcatcacagcatggttctgccgtactaatcaacagagcatatgacgtagtactaatcaacagagcataggacacgtgcggcgatcgaggcaacagctatgatatgatgatctatatggcacgtgcactagtagcagcagccactgtactgattagatcgaccgatcaacaggccttctggcacgtgcaggtggccctccggcagtatccggcggtccatccgccgcgctgcttgatgcagtcgtcgctgcagtggcggtcggagatgcaaggggaaaggaagtaggtagactacgactacttaccccgttagtaccaacctaacccgaa

SEQ ID NO: 38241 - DNA, 548 bp, Setaria italica
  Peptide Sequence Number=SeqID_104215
ataaaaataaaacaaaagaaacaaaataacaaattaaataattaacaagacaatacaatacacagcatggttctgccgtactaatcaacagagcatatgacgtagtactaatcaacagagcataggacacgtgcggcgatcgaggcaacagctatgatatgatgatctatatggcacgtgcactagtagcagcagccactgtactgattagatcgaccgatcaacaggccttctggcacgtgcaggtggccctccggcagtatccggcggtccatccgccgcgctgcttgatgcagtcgtcgctgcagtggcggtcggagatgcaggggaaggagtggtgctcgctcttccccgtgcacacccgcgcctccaccgccagcatccggccgccgccgccgccgccgccatagccgccgtcgtgtgagaggacgagcagcaggagcaggagagcgcacacggtggccctggacttgagctccatcgtcgtcgatcgccggattctgctcgttcggatcggcgatgctgatgagcagcttggcgatgatcta

SEQ ID NO: 38242 - DNA, 567 bp, Setaria italica
  Peptide Sequence Number=SeqID_104216
agatctcaaatcgattgagttccttaattaaagtttttgtacacggcgtgtgaattcgaccgttgcaaaggttgcacataggtgcgccggccgtccgatcctgttcttattatatattgttgtatcagcatcattatattacagcatcatcacagcatggttctgccgtactaatcaacagagcatatgacgtagtactaatcaacagagcataggacacgtgcggcgatcgaggcaacagctatgatatgatgatctatatggcacgtgcactagtagcagcagccactgtactgattagatcgaccgatcaacaggccttctggcacgtgcaggtggccctccggcagtatccggcggtccatccgccgcgctgcttgatgcagtcgtcgctgcagtggcggtcggagatgcaggggaaggagtggtgctcgctcttccccgtgcacacccgcgcctccaccgccagcatccggccgccgccgccgccgccgccatagccgccgtcgtctgcgcagaacagatagggatgaagctcagaattgatgaacaatctgacgacgttgt

SEQ ID NO: 38243 - DNA, 479 bp, Setaria italica
  Peptide Sequence Number=SeqID_104217
atgccgtccagaaggcttctcccgagataagctctgatcgcgagagaagccttctggacggcatgccatctatgctgaggagatgatcacaccaatccaatccttttctgagctcacaacactgtcaaatggtgtgagcaatcgtctaccacagtttcaggtatcaaagatgaatattgcggagttagcgaagatcgaggaggaacagaagttcatccaaagagaaacagagagaggtgtggtgtacatacttggagagactgaggtggtggcaaggcctcagtcctcgctccttaagaagattgttgtcaactacatatactccttcctaaggaagaacttcatgcaaggagagaagatgctatcgattccccatggcaagctactgaaagttggaatctcatacgaaatttgatggtttattcgtatgccaaactgtcaaaacgttgggaactgaaagaagcaaagctaggatcgta

SEQ ID NO: 38244 - DNA, 1895 bp, Setaria italica
  Peptide Sequence Number=SeqID_104218
aagtccgacaatccaatatcaacaaacttcccccaccataccaagaatcccaaattcacatggcatgtcatctgcttcataatgggatgactgcgatgcgaattcgccatagaatacaggagcatcctgagctgttctgaccataagagagagtagaagaaaaaaaaatgaaaccaacgccctgcaagagatgttttgcaggtttttttcaggattggatcatagaaccatgccaggagctccagtttttttctggaagaagctgacttcttaggagagaaagaatcagccgacttttccaatactggatgcatcggatctacagacatcaccacgacaaagtggacaaaccctgtgaatctcttttagccatttatctacacatgttagatgaaattcatgattacatggaagtatacggacacagtctccctcctcatattcaacaaggcaaatgtagcattgtgcagcctcctcagttcgatgtttcaatggcttcctataaaccttaacaggaagacactcaacaatctcccttggagcaggaacagatccaattgaagaaaatgatggtcttgatgatgataatgcagcagactgctggtggatttcatctagaacctcaaaaagtgcttctgctaacataacaattcttgatatgctagcccttgtgccagtttcttcatcaggattacctggtcgaccgcttgttctgcagttgcaatttccagttctatgctgaccagatagaatgcaggatctctcatgaccagataaattttcaaacctgctgcccaatctttggagagctctgacctgagatcgtatcctcctcctcctttcaagaaaagctgatctgcgctccagtagatcccgattatttgcttctctcaaggtctcggagctcgaattgtacacgctgttggttgaaggatcagagcgcagttctgaacttctatctgaattagtcctttgcatcattgctgaatcctgcctagcactaccatttcctgatggccacactgctctatcataaagaagtgaatgggtgaatagcccatcggagaacggagtcctcctgagaactctgtcacgaagccgcccgacgcttaacgttcggctaaatcgaacactgccttcgaaaggctcctgggatcccgtccttctataggagttcctcaagctagcaccttcagattctagtagatttctcctagcctgacgagctgctctagcttgtgctgtgacactatctctaagcatatccagagtcgaatcgatcccagcagtaagcgcaccaccttgttgggcgataactgcatcagaagaattgttcgcctctccatggctttcacctggattagctgaagataggcctgatgacagaatagagcaagctacggatgatcccaagctgacagccctactcaatccaaagttggaaccaaaacgtggtcttggcctgtcagaaggatttggcaattgactggctgcagctgctgctgtgctagtggcagcagcattctgtagcgcatcatcatcttggtctctctcactatctgatgaaggcgctgctgtctcttcacctgggcgagatttaggcactgtgacagcatcttcatcagattttgcggagtgaatgagtgaaggcaggcttgcagtctcccctcccttgttagactcaaccgccggcggcggggcagcggaagcgtcgccttcgcccggcgtcgtggaaccgcggaagcaggaggagctcggcagcggcagcaggctcctcgcccgccgccccttggagcctcccacttcccctcttaacctcgccgccgacctccgatgccgccgaggaagacgacaacgacgaggaggcggcggcggccttgctcgcccccagatcc

SEQ ID NO: 38245 - DNA, 712 bp, Setaria italica
  Peptide Sequence Number=SeqID_104219
actgcgtccaagcatgccatccaggcggtgccccttgccagtgatgacaacaactctgggtccaagatcgccatcgaggcagtgccctatgccggcgaggacaacaacgccggcgggtccaagatcgccatgctggcggcgctccatgacggcgaggacaagaacgccacgtccgagctcactatccagatggtttccaatgccggcgaggacaacaatgccggatccaagtttgctagcccagcggcggtcaacgccgatgacaacaacgtcgagaaaggaaagaacaacatagtcggagaaggcggcgacaacattgcagcaggtggcggcggtggcggcgccccttccaacaccagcaagaagttgacatcagacggtggcggcgcatatgacgcagtcaaggatgcttccacagccgtcgccagcagaggtagaggcagaggcagaggtagaggaaatggcaagggcaagggtgtcgcaacggaggaggaaaaggggttgcacatctggacggagagggagcgaagaaagaagatgaagaacatgttcagcaccctgcacgcgctccttccccggctccccgaaaaggttgacaagtccactatagtggcggaggccgtgacctacatcaggtctctggaaggcaccatcaagagcctggagaagctgaagcaggaccgcatccgcgcgcagcaggaggcggtcctgc

SEQ ID NO: 38246 - DNA, 679 bp, Setaria italica
  misc_feature (611)..(679): n is a, c, g, or t
  Peptide Sequence Number=SeqID_104220
tcgtagttcgcatcagagaaaaacgaatccccaatcggccaatctcagtgagctcgtggttagggttcaagaggcctcgaagatggcggcgccgtggtgggactccgactggaaggaacgctcggagcgtgagtaccgctgttacgtgagcaacctctcgtatggcacaagcgaggcctccctcaagggtgctttctcaaactacggtcccctcaactctgagatcgtggtggatcgtgagacagggaggtcccgggggttcgggttcgtgcagttcgaggacaagaaatcgatggacaacgccatccaagacatgaacggccaggaggtcggcggccgcaacgtcagagtcagcgaggcgaagcagcgcccgcgccgatggagggcgtgaacgctggacggtggacacggtctgcggcgtggacgcgtatgacgaacaagttatcctgtcgttaggccttctattaatctcagtagcagtggttgtctcttatcgttccaagttatcccctggcctttgtagttattgtcatgatgttctagtgttagtgttcgtcgtcgttggattgctatatatggatgtgagctcgatgagttatcagtatttcttnnnnnnnnnnnnnnnnnnnnnnnnnnnnnnnnnnnnnnnnnnnnnnnnnnnnnnnnnnnnnnnnnnnnn

SEQ ID NO: 38247 - DNA, 143 bp, Setaria italica
  Peptide Sequence Number=SeqID_104221
agaaataaggaatatgatcacttctcctacgacttttgcccgaataatttttgttccgtcgtccttaaacaggctaagggactaaaagctcgaagatgttttcatggatagggctgagacaacagtgtttttgaccaaacatt

SEQ ID NO: 38248 - DNA, 593 bp, Setaria italica
  misc_feature (556)..(593): n is a, c, g, or t
  Peptide Sequence Number=SeqID_104222
atattggattggcgatggcgtaatcgacatggcctctactccctctctctcccaaatccgagctaggagcacggacttgagcccggcgatacagccacgacccaccacttcacagttgcagatagaggctctccaggcccaggtggaagaagcaaggaagaaacaagaggagatggtggcgcagatggaggagatgcggcggaggatggaggaagaaaatcagattaggatggagcagatgttccagtacatgcagaattttgcttcgagcatgggtcagtctttgcctccgccaccgccgatgttgttccctccgcctcagccatccacgactactcctaatcaatcggtggcttcgaataatgaagatcaagatttgtcgcagtggtctccttagcctccacggaactagacttggttgtgaacttggttgaaattaaattgtgacttgaacttggatttatggattgtttcgtgcttatgttgaattatgcctgtgatgtttatgaataatgtttctaatggtggttgtgaattatgcatgtgattgttattnnnnnnnnnnnnnnnnnnnnnnnnnnnnnnnnnnnnnn

SEQ ID NO: 38249 - DNA, 433 bp, Setaria italica
  Peptide Sequence Number=SeqID_104223
agactagaatagaacctaggtaatttgtttcaaagtgcagacaggtctcttgttgtaattatgttaccttgttcttcttttgtattccccaccaacattgtatttcatattggcctgcactaacccatttatgcctgcactactactctaatatcaactaatttattgatattatttagtcataggtacctttgacatgtgtttggtatataacaatgattcctgccaacaggctctaaagctgcctgcaatgttcttatagggatagcaatgaatgtgtacagtttggacaatgctcactttgtgatgttccaccattgtgtatcagtaattcatcacaagattaaaagctacagcaaaaccttccttggcagctgcatttaccatgtctgcttgaagttaccatgtctacctgtccttcgcgtctctgatg

SEQ ID NO: 38250 - DNA, 281 bp, Setaria italica
  Peptide Sequence Number=SeqID_104224
ctgtggtggggttgagcccaagcccttttgccggctgaaggatcgttaaaaaaaataccattttatttgtgatgtagtagcactcactacaataatcagtggagtggggtattatccgatcgaagaatccggtgatagcagctttgtattattgcccacgagttcgtcggaacccagcacgtgcctataaactactgagacgtgacgtgtgaccccggagcaaccgcgtcgctgtcacgggcaggccaccgatgggagggccccgcccctcgtggcggcga

SEQ ID NO: 38251 - DNA, 533 bp, Setaria italica
  misc_feature (527)..(533): n is a, c, g, or t
  Peptide Sequence Number=SeqID_104225
gggtgggcagacgcgcagcgagcagctcggccacgaggggtacagcgagatggggcgcaagggcgggctcagcaccaaggaggagtccggcggggagcgcgccgcccgcgagggcatcgagatcgacgagtccaagttcaggaccaagtcctagatgccgcgcctgctccgccgtgtacgtgcggcgccgtagcatgtagctgcaggcagggtagtgtggtagtgttaagcctagctagctagtcgaagacgtgctgctctcgtagtcgtagggagcttgagattggcacgcgtgtgctctgaataatgcagagtcgtcgcggcacgcatgtaggcggtcatgcgcatgtgtgcgtattgtcatgcgggctttgcttcagctaggtgtagtagtggtcagtgtcttgtcgtcctcgaggcaggcttcttcaggctttgtcccctttagtcgaacagcagcctgtgttgtttcttgttgaaggtcctgtttacttggaacttctttcgcgacaaaaaaaaaaaaactnnnnnnn

SEQ ID NO: 38252 - DNA, 515 bp, Setaria italica
  Peptide Sequence Number=SeqID_104226
attttttaaatttttaagacttaaaaggaacacataagcaaatgcagagtttgtcattttcagagttattgcttttatccatccaacgcattcagtctactttagcagatatctaacctactgagttgtagctcagtgatcctctcctttttttccccttacagtagcacctagaatactaactcttctttcaaactgctatttaatctaaacagcattcaggcctaattcatcatttataggttacttctgatcctaccatcaatcacatccatagaggggataccataatagaagctcagttcgacaataatgaaaacctgcagcactcaccatggtgtaagagacatccaggctggtgaaattcttgcactggagggcaaggagctgaagccctaaacctatcatccttatatatttggtgcattcccttccctctgccatactttggtgccgaactgcgttacttttaggtaagtactttaaaaaactaattaaggtaaaattaacctaaa

SEQ ID NO: 38253 - DNA, 473 bp, Setaria italica
  Peptide Sequence Number=SeqID_104227
taagggtagggtgcagcactcctccacatctagccatgtcgttcaacaagaacctcgtggtcgctggcttcaccttggccttgctcgtcgcgtcatcatatggtgattttcccggagccatggcgtcatcatacggcggaatggccggaaattactgctacgagaggacggaaaccgagtgcacgtccgacgagacgtgccgcaccatctgcctggaaaagggagactcctacgtcggtggctactgctccaaggtggcatcttcctcgtgcatatgcatcaagaaatgcgctgcgcagttcccccatggcgcagcgggaccagcgtccgcttgagacgctggtgatcaactgattcagtgacgccagagagagcatttttatccatcaagccgcacatgtgtagccagccaatggcgtgcaaataaatttgaactgaaataatgaattcttgtaacaaaaaaaaaaaaaaaa

SEQ ID NO: 38254 - DNA, 486 bp, Setaria italica
  Peptide Sequence Number=SeqID_104228
tttatagccttacatgtcatcatcaagcaacttattcatattccatgtcgccacagcctgaacacaaagaccagcagcgcagggcaatgccactgcagtgctgtacatccactagttgagcccggccgtctggcctcactactgctccttgatctccggcgaccggagcgacggcggctgcacggcgcggcgcacgcccggcagctcgacgagccacttccccagcgtgtcggtggtggaggtggcgccggccctgccgacggtgaggaggcgggagttccatgccaggacctccgggaggcagacccggagcaggtacacccccatgtaccacctcggctcgaacacgtacctggcgccccggcacacgtcgcgcaccaccgcccgtgcgaagtcgcccacgggctccgccggcgtcggccccaggatcgcgtctctttcgtcctggtccaccttcatctcgccctccttggtgaggatcttccc

SEQ ID NO: 38255 - DNA, 1142 bp, Setaria italica
  Peptide Sequence Number=SeqID_104229
tttgttttcgtttttctttttacgtttttcccggtttttctttttagttttcttttcgtggcagctcagcgagccacttccccagcgtgtcggtggtggaggtggcgccggccctgccgacggtgaggaggcgggagttccatgccaggacctccgggaggcagacccggagcaggtacacccccatgtaccacctcggctcgaacacgtacctggcgccccggcacacgtcgcgcaccaccgcccgtgcgaagtcgcccacgggctccgccggcgtcggccccaggatcgcgtctctttcgtcctggtccaccttcatctcgccctccttggtgaggatcttccccttggtgatctccgactccaccacgcccggcaccacctcggtgatgcggatgtcgccgccgagctccatccgcagggtgtcgtagaagttgagcgcagccgccttgctagcattgtagaaggtgttcctcccgatgaatatgtaggacgagttggaggtgacgccgacgatccggccgtgggttttcttcaggtgaggtatggcgagccgagttgggtacacatggccccagaagttgatgtccatgagtgttctgaagtggttcacgtcttccacctcttcgaacatgcacacctgccagatcgaggcgttgttcaccaggtgatccaatctaccgaagtagcggatcgtgtcgtcgatgaacttctcgcagtcttcaggcttggagacgtcggccggcaagacgaggacgcccggcgatccaagccccagcgccctgtcgccgacctcgcggaggctcatctccctcctcgccaccagcgccaggtaggctctcctcttggcgtactcgtaagccaggtgctcgccgatgccggaggaggcaccggtgatgaggacgaccttgccggcgacgtcctcggggaagacggcgccgaggaggtaggtggtgagcttccacacgtagtacggcgggaggaggaccgccaggagcgccatgagcgacgcctgcagcgccgctccggccagcttgctcatcaccgtcatcgctagcgcgtgcagttcgtcgtcgccggcggtaatgcaatgcgacctcgctccagaacagcggcgcgctagctcgtgacatacgtcacta

SEQ ID NO: 38256 - DNA, 292 bp, Setaria italica
  Peptide Sequence Number=SeqID_104230
gtattggtcgaggtagtttctagccgttattgtcaaggaggctgcagagctattgagcaaggccaaggtggccatggctgatgaagagactgcagacgcgctgctgtacaaatcagctaggctcctttctgcagctgtagctttgaggccaacaagtctggtagctgtgggtcagcttgggaacacctacctgctccacggagagctcaagctcaagattagtcgcgagctcagaacgctcttggccagcagcggggcttttctcaatggaagagagcgtgtttcacggtcc

SEQ ID NO: 38257 - DNA, 450 bp, Setaria italica
  Peptide Sequence Number=SeqID_104231
gagtcatggaatctgtcttatactgcatctgcaataacctgtaaatttttgtgcttgcctcatctgaacaggaaattggaacagtacgagttctgttgcatgctagtcccagtttgtaatagtgatgtgtttctgttttgcttttttgaactgttcggaggagttatatttccatgtcatagtgtagggctgcactgctgataatagtacatgaagtagagagttctatcatcagttggctgcttgtatctgatgttttctacattttcatcgtgggccatcttgactagactagtaaaatcgtcaaattgtaagcaagcctacttctgctatttgtagtaaactattaactttgggaagcatgaaaaaaagacttagtaaccaacttttttgacctgtccctgtcagtaatttcaccaatacgctgttttttaatattttatgcttaat

SEQ ID NO: 38258 - DNA, 298 bp, Setaria italica
  Peptide Sequence Number=SeqID_104232
tatacaaaataacataaaatgtatttagaaagatccttaggacatgcactgtcttctcaacactggaggtatggaagttttatatgaactatcaagcttccttaaatgctttgaccttctctattgactcatctagtaattttcttgtgattgtgcctatagaggtaatagtggactaaactatttcaatggaatgaaatgaacctgtccttgtttaggaatatttttcttgttctgctattattatttaggttactcttggcgttccttttgtgttgaagcaaattatttgaaaccc

SEQ ID NO: 38259 - DNA, 546 bp, Setaria italica
  misc_feature (524)..(546): n is a, c, g, or t
  Peptide Sequence Number=SeqID_104233
atttattaatagcttcactgctactgtagttaattagcacgtacagaggatccatggacgcatgcagcttcaacaatgtcgtgccatggcgaccggtcaacgagcgagcaagctaaggcaaaaatcaagccctgcaccctcatgcatgtacgcatgactcaagtgtgcgattatttattaattaattagtgcgtacttttcaagtctcagttatatatgtatatatatagctttatttgccctgctctgagacaaactgttgtaagtcggtcgtggctagagcagtgacgtcagatgttaagaaattaagacgcagcaatgtgctaataagcagcgcatatgcatgcaacacatctgacctggtttgcagctttggtttggttgaatctaggtaatgatgtactggctggtgagtattgagaatcattgaatcagcctgatgcatggtttcaagtctaaagataaaatttgcacctgcgatcacaattgattagtatatcaatcttcagaatataagaaaactnnnnnnnnnnnnnnnnnnnnnnn

SEQ ID NO: 38260 - DNA, 515 bp, Setaria italica
  Peptide Sequence Number=SeqID_104234
taattgtccggtcgggtcgggttccttgctgctcgtcatctggaacacggactgggaagccgaggtacttgttcttcgtcttcttcattcagttgccaattcccccaacttgttggcgacgaacctgcaggctgcgcaggcgaacgagcgcatccgggcgtggggaggggaggacgattgcgacagcgagcatctgggaacaaaggaagtgttccgagtgtgatgaggcgtctcacaggaagctcctatacatttgatgaagaaagaggaagacagagcttacatgaaggcaacacgcggggatttaggaacacgagaaaagtgcaaatccttgtgcaccggaactaaaggcgccgctgcgctaaatccgtggcaaattgaattcagttgggctaaaaaatgcaatgcatgtaacgatcaccgtattttgaatagaaatcaaaggaggttcgtttcatgacgaaaaaaaaaaaaaaaaaactagaagaactagccaaggacacacagggagtagg

SEQ ID NO: 38261 - DNA, 685 bp, Setaria italica
  Peptide Sequence Number=SeqID_104235
atgctcttcatcggcctgaacgccgccatcagcgtccgcgtgtccaacgagctggggtccggccgcccgcgcgccgccaagcacgcggtggcggcggtggtggcgcagtcgctggcgatgggtctggtggccatggccgtggtgctggcctaccggaacagcttcgcggcgctcttcacgggtgaccgggagatgcaggccgcggtggggaaggtggcgtacctgctggcggcgaccatggtgctcaacagcgtgcagccggtgatctccggcgtcgccatcggcggcgggtggcaggcgctcgtggcctacatcaacctgggatgctactacgcgttcgggctcccgctggggttctgcctggggtacttcctccggctgggcccgcaggggatctgggccgggatgctgtgcggcaccgcgctgcagacggtcatcctgctgctcgtcatctggaacacggactgggaagccgaggctgcgcaggcgaacgagcgcatccgggcgtggggaggggaggacgattgcgacagcgagcatctgggaacaaaggaagtgttccgagtgtgatgaggcgtctcacaggaagctcctatacattttgagtaaggttggttcgtttacctttgtttcttttggtttcggttttcgtttttacctttttattttttggtttttttgtttt

SEQ ID NO: 38262 - DNA, 501 bp, Setaria italica
  Peptide Sequence Number=SeqID_104236
acttcacagcgttattaactctgttgatcggatcctctgtgcagttgttaattcttgaagtactcatttgtgtaggtggtttaattcgatttgatatgcataactcaactgattagtcaatatgtaatccgaactctatcagaatcctcttctgttatgtttatgtagatatttgtaacagttgaaacatgattgggaaattttagcactggatattttttttgtgtttttaggatcatacttgtttatactgttgtatgggatgtgggctactagttattattatctgcacctgtatattagtttttttatgccacgcttggctcaggttgcttgaagtgttagtagctttgtcagtcttgggttactgaaacccttggggcaatccattcaagaattgttgaagttgcctgttcataagtggtttacctgatgaacatcagcttgcatgcttgctaattggttagtttacctggactatattaatttactatgcaattg

SEQ ID NO: 38263 - DNA, 239 bp, Setaria italica
  Peptide Sequence Number=SeqID_104237
aaataagtctgttcttccggcgctcgattgccaacaacgaccgctgcaccgccgccaaccgtctgttggttcgggcgatgagaagccccgccgccgccggagtaagtctgtctgtgtgcacgtctagtagtcgtcggcgttggcccaggccatgcactcctggtgcagctgccccagcgtccgcctgctgcttctgtcctcgcctcggccatgctgctgctgaggctgaggctgcgccg

SEQ ID NO: 38264 - DNA, 188 bp, Setaria italica
  Peptide Sequence Number=SeqID_104238
aagaaaccttcgaatggtgtcctccgcttttcttaaatcatgttagataatatgaaatggtgttaggctgggcctcacttgtatatattttttgttcttgtgtgtggttatttctggttattttgattccatttcgaattttgctgtttcagaaccttttcgtcaactatgaaagatttgtcagtttg

SEQ ID NO: 38265 - DNA, 357 bp, Setaria italica
  Peptide Sequence Number=SeqID_104239
agaagtagacgactagaatacaataagagcttggtagctgcgcaggtcaattgagctgcaagcctgcagcttggttcaggacagactgcctcacaagtttagaacctgcctctacaacctcagtgaaacatgcagaaatggatgctatagttagcttagaatcctcctttcagtagcttagaactagggacagaccgcaggcttgtaatctgatacgcatttgagctgatcctagtaaacaactgtctgcacatagagcttggtagctgcgcaggtctattgcgctgcaagcctgcagcttaattgacctgcgcagctaccaagctctatgatcagcgcactcagcgggagcgtttc

SEQ ID NO: 38266 - DNA, 592 bp, Setaria italica
  Peptide Sequence Number=SeqID_104240
aaattcttgtaatctgcagcaagagctcatgcagcgcataacagaaatggaatctgcaagggaaggtcacaaagaggagttggcagtgagcaagagtcgcatcaaaatgcttcaggcagacaaaaagagctgcagcgagagttgaagcaatgcataacagaaatggagtctgcaagaaaagatcacaaagaggagctggtaacgagcaattacctcgtcaaaaagcttcaagcagacaataagaagctgcattacgaccttgtcgagctgcttcagtcagacaaggagacgctgcagaaagatctacaggcagcattaactgaagctgtagacttgcgcaggaagagcttgctgtcatcagcatctgaggcagatagcacttccccaccatcatactttgtatgtccaatctctcaggtgagttacttactggaaagaatcgcgagtttcttgctacaacaatagatggttcagatccaaaatgtgaaactcgtttcgtgtcatggatggtttacaggaggtgatgagcgatccacacgttgcagcagatgggttcacctatggaggcgaagaaatcaggggatggctcgac

SEQ ID NO: 38267 - DNA, 550 bp, Setaria italica
  Peptide Sequence Number=SeqID_104241
cctcagccgctggttcgatatcttgtacggcttcttccccgagtaccccgtcccggaaaggtgctctgacgaggtgaacccaaggaagaagccgtacaagatatcgaaccagcggctgagggatctgggcctggagttcacgccgacggcgcaggccctgtacgagaccgtcatatgcttccaggagaagggcatcctgccagtccctgctgctgcccctgccccgtcgtcatccccgcagccctgatctacacaatccagcaaggctggccctgcagaaacaattagcatatggcatgcaaactatttttcagttcgtcgatcggtttggttaaaaaagaattatgtaccattgtgggctcaagtgatcagagcgttaagattcgacagtaattagcaattgggtttctatgtctgtagctaggtttggtctccaaataagcaaatgaaaggagatggcatgtagtatgatactactatatttgtttgagtacaaccgtttgccaaactttttcctaaaaaaaaaaaactaaaagagaactgccaaggc

SEQ ID NO: 38268 - DNA, 659 bp, Setaria italica
  Peptide Sequence Number=SeqID_104242
atcaaatcattgctgccagttattctgatgacgagctcactgatccacatgataatcttatagtaggatttcataaaatgttgggatattcaatgaaatactgagcacattatcggtaaagaacatacaatgaattacatccttctggttttattcttgaaaataaatatcttttgcagattgaaaatgtttcaatttttattttctgtcaacatgttttcaaatcgtatgagttctattgcaggaaacagtcacaatatattacattttttgtattctttgcatgtggcaatgtacactaatattgagaacaattcattccagggatggtgcattgtgtgaggaaaaatccctaaaccagtctatatcatatcttataaagagctgattttattattcttacatgacaaagatggaccaccatctgtttgaaaatccttgatttgttttgcatcaatgtttcttaaaattggcacgagtctattttcatgattacaagtttctcaagatattatggttttattatgctgtccttggacaaaacattacaaattgttgtttggaagataaattttgaagagtgcatgtctcaaggctgaagatggacagtcctagtaacttgttatcctatattttctcaaattattaaggctgtactg

SEQ ID NO: 38269 - DNA, 406 bp, Setaria italica
  Peptide Sequence Number=SeqID_104243
ccggcggccgtcgtcggcgtaggcgctggcttcggcggcgggggctactcgcacccccagtcgtcgtcggcgtcgccgtcgccgttcaagctgcgggaccacctccaccgcagcccggcgtcgctgttccacagcccggcctcctcgccggcgtccaggagcccgtccgtttcctggctcgccggccgcgagcgcgaccggctcttctccagcttcgtgcgcaacgcgctgggctcctgcattgactacgcgcccgtcaccagcctgcccctgggcgtccccgcggccgctggtgtcgacgcggccgagcttgcctttgagcttgacgagaacctctctgccgcggagccgtcctgcgaaccttatgctcatgaactcctcgccggtgctcaagctcgccaccgca

SEQ ID NO: 38270 - DNA, 550 bp, Setaria italica
  Peptide Sequence Number=SeqID_104244
cccggcaaaaaattcattatctcaaacaatcccaaactacacccaatacagttggcatgacgagccaacggacagagaaaagaaagatgttctaaggatctaaactgagaagcctgatcagttcatctctgcatcttcctccaaaacatcaactctaatgactactgaaacttcgcaaatgcaattcggctaccattcccatccaaaaactgatccgtgtaccatcctctactcctaacttctgatacgaaagtggggaaaaccctctccatcttctcataggcttcgttgagcactgcatcacgcgaacccacgcctgatctctccatctccgaagcaaatgcggcgaccagccaccccctcaatgcatcctctccacttgcgctttgctcaagaaccatgtatgtcttgttgctttttggttgagtaaaaacttctcgtttgggaaagttgctctcaactgttcgacgagctgtggactcaaaactctgcgaagtggttgcccaattttcactacttcctagctttctttcttatttagtccggttta

SEQ ID NO: 38271 - DNA, 633 bp, Setaria italica
  Peptide Sequence Number=SeqID_104245
ggtttggtgtccattcgtatcaccactcgtatcgctacttcaaaagattaaaaaaaaattcacattctgcaagatattgagcacgtgcagagcgcagctctgcgtttcctcggtttgttcgaacacggcaatcacttatcaattaccactcacatcaacaagctcttcatcagtcgccactttattcagcaggcatatacatctgcattgcacatcacattttctctactgagatcaacgtacggcggcgccggcacgagcacacttgtgccgcattcggcgtaggcggaggagcggccggcgtttgctcgccgacgacaatcaggggaggactttgccccatgcttgatggctggcgtcgtccgggtccggttcccctgtaggctggacggcctcctgcttctcgtggaagggcgccgccggccccacgccgtcttgcttctcgtggaaggggtgatcaggcagcgccgccggccagacagcgtcctgcttctcgtggaaggggtggtcgggcaacgctgccggcccgacgccatcctgcttctcgtggaaggcgtggtcgggcaacgcggccggcccgacgccgtcctgcttctcgtggaaggcttggtcgggcaacgcggccggcccgac

SEQ ID NO: 38272 - DNA, 576 bp, Setaria italica
  misc_feature (525)..(576): n is a, c, g, or t
  Peptide Sequence Number=SeqID_104246
aacgaccaaaggaagaaccgtggtcgccggcaaggacaagaccggcgccatcctgcagcaggcaggggagacggtgatgagcacggccgtgggcgccaaggacaaggtggtgagcgccgccgttggggcgaaggacgccgtggtgaactcgcttgggatggccggcgagaacaacgacggcaccaccaatgcccgcaaggacaccagtacctacaagcctggcactggcagggactactaagatgctcgtgtgctgcttttggtatagcaaccgtgctggtgccaaactgtgtatcttgtttaggttcaaagtaatttcagttacatatctacgtgtgcgtttcactttgctttgatttcaacccgtgtttactccccggttctgtgtggaggtctgtaacttttttattagaacagaggtgatgtagggggcaatgtctaaccggacgcctcttgtgttttcgtttcatgaccttctaaataataaagttgcaaaagcttgtgttttgtttccgtttagcaaannnnnnnnnnnnnnnnnnnnnnnnnnnnnnnnnnnnnnnnnnnnnnnnnnnn

SEQ ID NO: 38273 - DNA, 468 bp, Setaria italica
  misc_feature (1)..(70): n is a, c, g, or t
  Peptide Sequence Number=SeqID_104247
nnnnnnnnnnnnnnnnnnnnnnnnnnnnnnnnnnnnnnnnnnnnnnnnnnnnnnnnnnnnnnnnnnnnnnaaagttttacacaacacacatattatgtattcagaagaaaacaaagcacagcggacacagtagagtacacacaccatgcatgtggatgttacatacaaactcacactacacacagttggtggtgaacctctcggattcctgggttcatctttttattatctcggaacgccgtgacaggtagcacggtttgtcaccagtatatacgcgaccgcacttagtgctgtccgggcagcttctccttgatcttgtccatgatacccttcttctcgccggtgccctcggtgccgtaggcgccaccagttcccgtgccggtcatgccggtgtgtccctgctgcccataggtgccgccggtagccgtggcgtgctggtcgtccttgcggcctccgggcaacttctcc

SEQ ID NO: 38274 - DNA, 530 bp, Setaria italica
  Peptide Sequence Number=SeqID_104248
taaagtaaagaagacaaaggtactgcaggtgcttgtcgaggcgcggcggcggcggcggcagcggcgggcagcgggagcacacgacgtgcacgtgcggggagcactgcgagtgcagcccctgcacctgcgggcgggccacgctgccgtcgggacgggagagcaggagggccaactgctcctgcgggcccaactgcaactgcgcctcctgcagcgccacggcctgatccagtgatccatgagcagcccaaagccgagccactactctagacctgtctgcagctcgtagtattaaaggatagtatactactgtaggaaataaagggcttatgcaagtccagagtctatgtttgcagctcgcatcatgcgatgcggcgtggtgatgtgctactgtgctactgtacgagaagactgaaggatggcatgaaaactatataaaagttcgtaatatgtatggtggaatataagttcgtaatatgtatggtggaatataaaataaattacttcccttaacgtttaccttaaaaaaaaaa

SEQ ID NO: 38275 - DNA, 479 bp, Setaria italica
  Peptide Sequence Number=SeqID_104249
agagagagaagggaaattaaagagaggagaaaaaataaggaaagaaaagagaaaaataaaaaataaaaataaggaaagaaaagagaaaaataaaaaataaaaaaggaataagggcattatagacacttcatcatttttatctacgttacacagctaggagaagccgttttgccaaacattttttcatccagataagctgaagtcaaaaaaagctgcttcaccaaagaagccacagccgcagccgtttcagccacagccgtaccactgccaaacgagtctttagtgctcaaaaatgcattcggctcttcagcggccaagggcactagccccacccaaacaaaaaaaaaggctggagatgggactggacatggcgggccatgtcgctctaagtacctgttaaaaaagttggaaagagcagggatagacatacttagatcatgtttagatccattactccattagtgttaacagctataggt

SEQ ID NO: 38276 - DNA, 351 bp, Setaria italica
  Peptide Sequence Number=SeqID_104250
attcggacggatttaggagctgagagtttttcctctcaggcagccgttgaggacgttttctgccggcggtggctgcgactgcgacacattccaccacaccaacttcctggcgaggcggaaggccacgcagttcgcaggcgaacctgcggcactcttcttcgccgaggtcaaggcccttgatctgagctcctctgtccttttctccgaaccctgatcgcgcccggggtttctccgaacctgaggcattttccttttggcagggagcttgaaagcgggcaatcggagcttgaaagtgtacactgtttgtgcttgcggacagtatgaatggaaaataatgtttgattgtgttac

SEQ ID NO: 38277 - DNA, 485 bp, Setaria italica
  Peptide Sequence Number=SeqID_104251
attctcactcttctcagcttctgcaccatctccattctgagcactctctggatcagcagcatcacttccttccttgctcttcttcttcttctttttcttcccgctgcccttctcatctgccacatcgacctcctccttgacctccacggcctcagctgatcctgattcacccttgtctttctttttcttcttcttcttctcactcttctccccttcaactgtctcagcagcttcctcaaccttgatcttctttgaaggaacagaagcatcagcatcattgtcctcctcatccttctgcctcttctttttcttctccttgacctcgtcagtcacagctgcctccagttccaccttccaccttctctggctcaggagcagctgcaatgctggcaattgcaacatcaccaccagttggaagaaccacattcctaagccactcagctggggtcttctcatttggcttcccatgcttgtcaaggagacct

SEQ ID NO: 38278 - DNA, 769 bp, Setaria italica
  misc_feature (708)..(769): n is a, c, g, or t
  Peptide Sequence Number=SeqID_104252
cttcgactacacggccgacgccagcgacaacgccacgctcaagtacacgcccaagtcgactaaggtgaagacgctgaggtacaacgagacggtggagatggtgctgcagaacacgcggctgatcgccaaggagagccaccccatgcacctccacggcttcaacttcttcgtgctcgcgcagggcttcggcaactacaacgaggcggcagcaaagccacagttcaacctcgttaacccgcaggagcgcaacaccgtcgccgtacccactggcggctgggccgtcatccgcttccttgcaaacaatcctgggatgtggttcatgcactgccacttcgatgctcatcttgatttggggttggcaatggtgtttgaggtccaggacgggccgacggcggaaacatcggtgccgccacctccattggacctaccacagtgctaattaaccatccttgtcaaatgtgtggtttgttggaattgggatggatggacatgtcaacagaagaagcgtagaaccttggcttgctatgaggttgtagtagtttgatcattatttgtaagtaatgagattgtagtggtttgattgatataacctgcatagggagaacacacgttttttctgtgtagtagctcgagtcaaagatatgattgtttgcgtttggtgaataaataaatgacatgtcaacggggtgaagaggcttggattacctnnnnnnnnnnnnnnnnnnnnnnnnnnnnnnnnnnnnnnnnnnnnnnnnnnnnnnnnnnnnnn

SEQ ID NO: 38279 - DNA, 1197 bp, Setaria italica
  Peptide Sequence Number=SeqID_104253
tcgaacgccgcctacacggcgccgtacgacaccgacgtggtggtgatcgcgccggggcagaccgtcgacgcgctcatggtcgccggcgccgccccggggcaatactacatggcggcgtccccgtacgtgagcgccaccccgccgaaccgggggccgcggttcagcatgtccaacgccacggctgtcgtggagtacgccgggtcgacaacgacggcgccgccgcagccgccgacgatgccgccgtacaccgacaccgccacggccttccgcttcttcaccagcctgaaggcgcctgtgccctccggtgcgccggcggtgccgctgtccgtggacacccgcatgttcgtcaccgtcgggctcggcatctccgactgccagccggcgcagctgctgtgcaacccgaccgggaccaggacgctgcccgtcctcgcggcgagcatgaacaacgcgtccttcgtgctcccgcccgccggctccgtctccatgctccaggcgcactacgacgcggacggcagcgcgccggcgcccagcgtctacacccgcgacttccccgaccggccgccggtgatcttcaactacaccgccgacgccagcgatatccccacgctgcagtacacgaccaagtccaccaaggtgaagacgctgaggtacaacgagacggtggagatggtgctgcagagcacgcggctgctcgccaacgagagccaccccatgcacctccacggcgtcaacttctacgtcctcgcgcagggcgtcggcaactacgacgaggccgccgccgcgccgcggttcaacctcgagaacccgcaggagcgcaacaccgtcgccgtcccacccggcggctgggccgtcatccgcttccaggcaaacaaccccggggtgtggttcatgcactgccacatcgaagatcatcttgatgttgggctggcaatggcgtttgaggtccaggacgggccgacgccggagacatctgtgccgccacctccattggacctaccacagtgctaaatgcgatttgtcagcagaagaagtgtacaaccttggcttcctgatatgtatactttcgcaaatagggggcactcacactacaccttcttctgtatatgtaactcgagcccaatatatggttgcttgcatttgggaaataaatagatggtacgacactgatgaagaggcttttgattgctacaaaaaaaa

SEQ ID NO: 38280 - DNA, 519 bp, Setaria italica
  Peptide Sequence Number=SeqID_104254
tttcttctttatttccctgttgtccgtgtccgtcttatatgttgaacttaactttgacagatcgtaaaaagttcagtaaatgaggggttcgtgcatctaacattttttttcacttttttgtgggtggcactcaattttttattctagaatttttattctagaatcttttatactgctatgattcctaaaacaaaatcaaacaaatactctgaattccggtcgagcaaatttgatggttttgctatcggtcactgtactgatgatgaattatcctaaaaactttgaccaatatccccgtgagttgaaatctcatgcaaccatcagtgcacaccagaatgtcttctcgctctccttttcgccataccacacttgattaccctcatgcctccactgctccgtcgagcttcttgccgcttccagcctcccatcactgccttcctcctaagctggtggttcttgtggacgcgtatggcagtggcacccatgagttctgtcctgcaattgctacctcgcctctct

SEQ ID NO: 38281 - DNA, 399 bp, Setaria italica
  misc_feature (381)..(399): n is a, c, g, or t
  Peptide Sequence Number=SeqID_104255
cgaagaaggctgtgtggaaggaggtcaacgaggtcgccagtcgggccaacctcgccaaagccatggtcgagaaaatgctcggcgtcgtggacggctacgccacagaccattttattgatgatgatgacgacgacgacgacgacgagattagtgatgaccaccgcagcggcggtggcgccgacgatgacgacgatgacgatgactaggcaactaggcagctagctaagttacccctagataacaactgcgattgatgatgaataacgtactgtgtcaggtcaagcagaatatgctatgtaatttagaagtacctaccaaatactaaaagacaacaaaatacttagaacaacaaaactaaatagaagttaataagttttctannnnnnnnnnnnnnnnnnn

SEQ ID NO: 38282 - DNA, 1071 bp, Setaria italica
  misc_feature (1043)..(1071): n is a, c, g, or t
  Peptide Sequence Number=SeqID_104256
tttaaaattttaagtttaaccttttagttacttaacgttctacttgcgccacccccatcggtccatcgatacctctgcagaacgctagctacgtacgtgcatcggcatgatggcggcaccaacagccacggcgatctccgccgcggtactcctctgcgcggcggctttcctcgccaccggcggcgccgccaaggcctccgccgccgacgtcgtggccgacgcgtgcgccaacgtgacgaaccgctaccaccagtaccgcgggcctgggctcaccagggattcctgcgagatagcgctctggtcggacaagcgcagcgcgtcggcaaagcacccacgcgacctggcgctcgtcgccatggccctcgtccaggaaggcgccgcggtcgcgggcgccaaggtcgccggcgcgctcagctccggcgacgccgcgaagctgagcaaggacacgaagctcaacctccggtactgccggctggactacgaggccgtggcgcacaccgtcgcggtgtgccgggagatggtccaggagtacaacccgggcgtccaggggcacgacggcgacggtaatatgatcccctacaactacttggagtgcgcgaacaggctaatgaacgcggcgagtggctgctgggcccacatctcccacgattacgagacgaagaaggctgtgtggaaggaggtcaacgaggtcgccagtcgggccaacctcgccaaagccatggtcgagaaaatgctcggcgtcgtggacggctacgccacagaccattttattgatgatgatgacgacgacgacgacgacgagattagtgatgaccaccgcagcggcggtggcgccgacgatgacgacgatgacgatgactaggcaactaggcagctagctaagttacccctagataacaactgcgattgatgatgaataacgtactgtgtcaggtcaagcagaatatgctatgtatttgagtcctccaatctaaagcacaaatcttgacacaaactaatgagttatagttttactctaaaaaaaaaaaaaaccaaaactagannnnnnnnnnnnnnnnnnnnnnnnnnnnn

SEQ ID NO: 38283 - DNA, 277 bp, Setaria italica
  Peptide Sequence Number=SeqID_104257
acccatccagtagtagctcgagcgcaggaagcaccttcacgcaagggagcacaaactccagaacaacatgcatgagagagcttcggagagcttctctgttttgagtagaactgcattcatatatatagcaaccactttcttggagatgccatcagtgatccaagaatagatggcattatcgctaaaaagattcgtcagcaatacatcttgccggagcgcttgaggtgggcggagcaggccttgacgaaactcaatgccgaatcccgacctcctcggc

SEQ ID NO: 38284 - DNA, 510 bp, Setaria italica
  Peptide Sequence Number=SeqID_104258
tttttttttttacgtaaagttatggctacgatgctaatatatatggaaagtagtacacagtttgcagccacgaagttcacaaaatacatctagtcgatcaacatgggcaacagatatctttactgcctaacgccaagcatgagtcgaccaatgcacacatcaatgactcttacttccaggaaccaaatataataaagccccctctggtctaatcatcccagacattattttcttctcaagttcagatatatcaagccccaatttgtgatatttagcaagatcagtctctccagagtaatcaagcaaggtagcttcaccctccaacattacctattatatgacagtacaaagcatctataaaaggtcctgaaacaaaccttctcatactgaaactgatggaatgaattcctagtcacatgctctgaagtaaattggccttcaacacggttcattaagttcagaatactgcaatagctcagccgggaagtactgacaagaggtgccagtttg

SEQ ID NO: 38285 - DNA, 1544 bp, Setaria italica
  Peptide Sequence Number=SeqID_104259
atgaaactcgaggaggaatgaagaagatgatagaaacaatcacatctagggggcatatatataaagaaggggcatataaagaacgaggactcctctttccttgtgtcttaatggctactggaacattcggcgcgcgatgtcaacaatcaaatataagtaaacagaaggcaatgaaagatgacaagctcattccatctaagattacagatgatggatcagtagcaccgaatgcatgacacaagctcacaaccaggcaaccagcaaacattacagctggtagctgaataccgacccaaatgaacacatgatgtacgaaagtatggctacgatgctaatatatatggaaagtagtacacagtttgcagccacgaagttcacaaaatacatctagtcgatcaacatgggcaacagatatctttactgcctaacgccaagcatgagtcgaccaatgcacacatcaatgactcttacttccaggaaccaaatataataaagccccctctggtctaatcatcccagacattattttcttctcaagttcagatatatcaagccccaatttgtgatatttagcaagatcagtctgtccagggaaatgtgcaagtcaatcaacaatgacaacaataatgaagccacaggagaacaataatgaataatgcaggggaaatagcatacctctccagagtaatcaagcaaggtagcttcaccctccaacattacctattatatgacagtacaaagcatctataaaaggtcctgaaacaaaccttctcatactgaaactgatggaatgaattcctagtcacatgctctgaagtaaattggccttcaacacggttcattaagttcagaatactgcaatagctcagccgggaagtactgacaagaggtgccagtttgccaatcaccatgtccttgataacactcatttccatcttgcctgtttggcgacctcctgcctgcatctgagtgctgctgcctgcagctgccgctacccatccagtagtagctcgagcgcaggaagcaccttcacgcaagggagcacaaactccagaacaacatgctgatcaaaacaggagagaaaaaccagttttctgatgacaatactaatcaaggaatcctatcatcaagtgaaggaattactggagggaaagcgtagcttaatccttatcagaaaaattgcaagtaattatgctaataccatgagagagcttcggagagcttctctgttttgagtagaactgcattcatatatatagcaaccactttcttggagatgccatcagtgatccaagaatagatggcattatcgctaaaaagattcgtcagcaatacatctgtacatgagaaaaatagtcaggcaactggcaagtttccatctgaagatcactctcctattacaatttcacacacatctccagtatgtgcttctgagtttgttttgatcttgtagctatcgcgtaaagaacaggaagatcatgggaccaataaaatttccattacctccagtaagcggagacccaccatgttgtcagggagctaaa

SEQ ID NO: 38286 - DNA, 2830 bp, Setaria italica
  misc_feature (1)..(38): n is a, c, g, or t
  Peptide Sequence Number=SeqID_104260
nnnnnnnnnnnnnnnnnnnnnnnnnnnnnnnnnnnnnnagcaatcatccaaaaaaaacttagttgcaatcatccaaaaaaaacttagctgatgacattgctcctatcttgacctgatgtatacatgataacaattaacaagggcccatttaccctagggggctactaggttgtggaggctacgtcctactctactacagacaagggataatatccttggccttggtcaaaaatcgcactagcattttgttttgctagaatctggtgcaagtgctgctcattacagatacaatgagttggaaaacatgatgccccgacgcaagctctcgctcgccttcttaaacttctcctcaaggttaacctccccaacggcttcagccgcggctctcaactgattcagaaattcatccagccttctggcaagccttatgacacttccttcaaaaatgtcggtcatttccatcacctctgcaaaggtggctcccctcgaccagcagtatatgacatccatcaggtagggtctgcaggttgattcaacatattcctccacatttacttctaatttgcattctcgttgtacctcagctatttttctcgcagcctcctgaagttgcatcatcggcccagaaagttcatttcttaggcgtatttgctcacttgatttatcgcaaggtacaaagcagctagcaagggaagcaacttgatgatgatcgagatcattaaatgtaccattgaacataagttcagtgataagcagctcatcccctgtgtctattaaacaggcagcacgtccctttagctggagaacaccatcagcatcaatatgaccaagcatcttcagaacgcgtgaccggttcctaagttcatctctgaatttttgtagctgtgaatcccgcatctttgacttcaattgctgaatttcactattcaaatctgcttttctttggtaccatgatagttcctgctcactttgaccagacttatgaagtcggtgagaacattgtttctgttcaagttcctcaagtttatgaaccaagtctactagctcaggttcttgaatacccatgtcatttattggatgtagcttcggaaggccttgggggtagcgctttcctagttcttgcactgcaaaaagtatattttgccttgcttcaggtggtcgtagatccggaggaatgttgattctaacactgcttataccagatattaaaggcaatggtacaggtaccacatgcatttcacccttctcccctgggcgaggcgggcatggctttgaacgtgatccattctcattggaactagaagagcagtgaagcaaggtatccactatatagctattgctgcgtgatgcacttaatgcagggggaagagtcccagatgctggaggtttcttcactacatttacaaccacaccccatccccagtcggttgaaccatccctcactttaaccagccttccaggaaccaaatataacaaagccctctctggtctaatcatctcagacattattttcttctcaagttcagatatatcaagccccaatttgtgatattcagcaagatcaatctctcctgaggagtcaagcaaggttgcttcatcctccaaccgagtgatcttttgaactatttctggcaatgccttctcatactgaaactgatggaatgaatgcctaatcacatgttctgcggtaaattggccctccacacggctcattaagttcagaatactgtaatagctcagccggaaagtactgacaagaggtgccggtttgcctaacaccatgtccttgataacactcatttccatcttctcatctatcattataacacaaatgccacgttcatccttgccacgccggccagctcttccactcatctgtatatattctccagaaccaatatagcggttagtatcaccatcccattttttgacagatgtgaaaacaaccgtttttgcaggcatattaagacccatggcaaatgtctcagtagcaaagagagctttcacaaggccttcttgaaagagcaattccaccagctctttgattatgggaagtagtccagaatggtgtactgcaatgcctcgtttaagaagcggcaacatcaactctatagcaggtaaacttctatcttcttcgactaaacaaccaatagcattatggaaaacttgctcgatgcattccttttcatcttcagtgttgaagtcaagttttgacatagacatggcatggtgctcacattctcttctactaaagctgaaaataatgactggttgaaacttccgctccatgatcatcttgacaattctgtatatgtcagaattcccagaggcgcttccaccttttgcaattcgaccactcgctttaggtccaccacctctttggcgacctcctgcctgcatctgagtgctgctgcctccagctgccgctacccatccagtagtagctcgagcgcaggaagcacctaaagcaaagtaattatgctaataccatgagagagcttcggagagcttctctgttttgagtagaactgcattcatatatatagcaaccactttcttggagatgccatcagtgatccaagaatagatggcattatcgctaaaaagattcgtcagcaatacatctgtacatgagaaaaatagtcaggcaactggcaagtttccatctgaagatcactctcctattacaatttcacacacatctccagtatgtgcttctgagtttgttttgatcttgtagctatcgcgtaaagaacaggaagatcatgggaccaataaaatttccattacctccagtaagcggagacccaccatgttgtcagggagctaa

SEQ ID NO: 38287 - DNA, 640 bp, Setaria italica
  Peptide Sequence Number=SeqID_104261
ttttttttataaaaatgcttaaaagtctccaaagccttcatgatagaatggcaatatatcatatggatagaacgacacataacataattgctaaaaggatgcacactttattcgattaatatatgaaacaagagcacatgtacatacactaacagcatgcatgcacacacgcacacaaacctacaaccacaccatgcccttatttagtttattgctaaaggcagagggccttgtttgtcttccttaagtgtccttaattgtaagactagttttcacttgtgatgccaagtccttgactccctccttatcatttattccctttccatcacctaagatgttcttgttgttcacctttttattagtgctcaattcctcagagctctgatacttgatttcgttgcccacataaggtgtatcctcttttggtgacctttcctggcttgcaattatggtgtcatccaccatgatctcctcaaactgtagaatggcagcattctcaggaattatagaaggttgtcttctatggccccaagcagacataatcttgctgcacttgtaaacctccaaaatctatagtttgaaaaggaaaatatcgaacttgatgttggtgtaattttagaaattacaactggaagtacga

SEQ ID NO: 38288 - DNA, 428 bp, Setaria italica
  Peptide Sequence Number=SeqID_104262
cggcaaaatccaagagtatccttggtacccaccatgtatgttgggttcttgtaacactccccaatagcagcccatttagggcagaggtcgttgtcgtctgaacatggcgcatctgtcctcacatttggaggattatcgaatgatcggacatgaatccatttcgtggcagaccatttctcaccctcaattactgggcagcttccatgaagactacttgtatcagttgttgcgttgacatgaagactgaagaacaggagtgcgtctccttttttcggcttcactgccagaccagatcttgcacaatctgaccaagtttcatccttgtactgcaaatggccaccctgaaaacaacgtgccagataactccaactctcctactacctgagttacctagtactaaagtacgaactaactaaaattaagaacaa

SEQ ID NO: 38289 - DNA, 928 bp, Setaria italica
  misc_feature (1)..(48): n is a, c, g, or t
  Peptide Sequence Number=SeqID_104263
nnnnnnnnnnnnnnnnnnnnnnnnnnnnnnnnnnnnnnnnnnnnnnnnctagccataatcctgaccaaaatttcattactcttatatcaagatgttgtaacctgcaaggtcaattttcatgtagtatgcaaaagagtaaacattactccgatactactcaaggacctgcctcacctgttatttacaagccagtaacagaaaaccgatagggatgcaaacaatagcggcctaacaccccacagcacagcacgttgagattggtgagtagttcaggcatcacagagcccgcagcttttgcggcaaaatccaagagtatccttggtacccaccatgtatgttgggttcttgtaacactccccaatagcagcccatttagggcagaggtcgttgtcgtctgaacatggcgcatctgtcctcacatttggaggattatcgaatgatcggacatgaatccatttcgtggcagaccatttctcaccctcaattactgggcagcttccatgaagactacttgtatcagttgttgcgttgacatgaagactgaagaacaggagtgcgtctccttttttcggcttcactgccagaccagatcttgcacaatctgaccaagtttcatccttgtactgcaaatggccaccctcagcacttggaaatacagtctctccacccttcttgacatccgacaggtacataagtacagtggcaattcgatgaccaccacgcttcaggttgtttttgtcatgaaaataatcaaaatgggcatcatacttttgaccaatttcatagtgcagaacttgcattgattcagcattttcttcgggaagaaatgtccaagcagctacacgcttctcaatcccagagacgatttcatcctcgtgcttggccaagaggtgccggagctggtgcgcacctggctcatgacgctctt

SEQ ID NO: 38290 - DNA, 1000 bp, Setaria italica
  Peptide Sequence Number=SeqID_104264
cgcggcagcaccgtgctccttccaattctctccgcagcaacctcctccgtccggtgacttccccctcggcggaatcgacctccaggcgccgtaacaccgaaccatcggcttgtaacatcttcactataccagctctgtggtaatcactcatccgtagataaaacagtatgcaggcatctagagcaaggcttttcaaggagtacaaggaggtacagcgagagaagtcagctgaccctgatatccaattaatctgtgatgattcaaacatattcaagtggactgctcttatcaagggcccttctgaaacaccttttgaaggtggtgttttccaacttgcgttttcaattccagagcagtaccctctgctgcctccacaagttcgatttctgaccaaaattttccacccaaatgtgcatttcaagactggtgaaatttgcctggatattttgaagaatgcatggagccctgcatggacccttcagtctgtttgcagagcaataattgctctgatggcccatcctgaaccagacagcccacttaactgtgattcaggcaatctcctaagatcgggtgatatccgaggctatcaatcaatggcccgcatgtatacaaggttggcggccatgccaaagaaaggttagctgctcaagtgctaaggagacacgctccaagctaggaacgcaggccaattcatgtacaagtacaaattgtcaggttcccccttgtgctgtctgtgtttgaacttgtgcttttttttccttgacactcttatgcgtgattcagagtgaaagggagaaaatccgggtttccgatgtgtagtctgtgatgtaatgatgtaataagtcctggaattcggcaggtgccacccctaattttccttcattacttactgtttcaatcagtttgtgctgcgcgcactccgaaggtctcttgttccatatgctgtgagcaccagtaatcttatttgtgaagtatcgtatttttaagggacaaaaaaaaa

SEQ ID NO: 38291 - DNA, 931 bp, Setaria italica
  Peptide Sequence Number=SeqID_104265
agcaagaccatgagaagcaccagccacaacaacatcatcaccaccagcaacaacaccatcaccaagtccatatgcaacaacaacatcaccaacaacagtatgttcatgtgcagcagcaaccccaacaacaaaatcatgagcaaccacaacaacaacatcaccaacaatatcaaatccatgagcatgaagtgccactgcaacgtcaacacaagcagccaaaccatcagtcgaggcactaccttgagcagcaaccgcaacagcaacaacaacagttgtgtcaacagggttttgagcaacaaccaggtcagcaagataataagaagcagcagataaaaaggtgtggctacaacacatatattagtaaccaaaatttaaacaaattgtcgtgaattcctgaggcagcaatgtaacccgctagcaatgcctttcctccaatcacgtttgctacaaccgagcaactgtcaggtgctacaacagcattgttgccatgagcttagacaaatcgaaccacggtacctccaccaagcgatctgcaacatagttcagtccataacccaccaacaacaacagcaggagaaacaacaacaacaacaacattcatgtgagttatgtgggtctcagcaagcttctgaaggtgagttggctatacggatggtagcacaacacctaccatcaatgtgcggcatttaccactcatggagccaagacagtacatgcggcaacaaggatgctcgtggtgttcgcaactaaagcactatagctagttagctgtctatgttatagcggcaacaagaaataaagtttcatgcattatgatgtgtgaacaatagtatctgaataataatagtgaatgtattagtgatgactccgaatcaatttgtttgtgatggatacattacacatggtcccatctacaaactaaatttgtatt

SEQ ID NO: 38292 - DNA, 432 bp, Setaria italica
  Peptide Sequence Number=SeqID_104266
tccggcggtggctgcacccgactggaacagaatctgcccctgcgtctgcggctgcatggaggtctgcagcgaccgaggcaattccctggatatctgcgccggcggctgcatgccctcctgcatcttcttcaccagcaagcagagcaaggaggtcgccgtcagctggcccaactccatcgcctggggcaagttctgcccctgcatgtgcagctgcatggtgagctgcagcggcaaaggcaattccctggagtcctgcggccccttctgcgccatccattgcaacaacacccagaacaagcagcaggtcgcccccaccaccagctgggccaactccaccgcctaggctcagtagctgttgaataaaattgcttgtactcgtgtcgtgtgtgtacgtatcagcaagcaagcaagctatctatgtactgtactcca

SEQ ID NO: 38293 - DNA, 474 bp, Setaria italica
  Peptide Sequence Number=SeqID_104267
agcatgtacacttctcaagaaaacaattgttcctaaagaaggcacaagacatgctgcgtatagatcaagcttggcagttgcatttctgtttagttttctttgtccagtgaccaaagaaactttgaagcctgtaaaggcagttcatcttaacggctctgtgccttctggcaccaatggaaatccaaattgtggacctgatgcgtgtgttgatgcttcactgaagaagataaataatgtgaaacccggttcatatggcaatgattgcatacttgaatattcaaaacagaaaattgaaatcaataaagactatctcccagttggcataccagccaagaaagttggagcagcactccaagcctctggtgaggctgtgtttgtggatgacatcccctctcctaaggattgtctttatggtgcctttatatatagcacaaaacctttagcccatgtgaggagcatagaactcaacccgtc

SEQ ID NO: 38294 - DNA, 1155 bp, Setaria italica
  Peptide Sequence Number=SeqID_104268
tacctcttcatgctccaccaggccaaacagtacacctgagatacctgcatcgaacctaccttgccttcaccttgaagattcaccacaaatatattgcataaatctatcggatccaggccaagattaagcaaggacgcgtgtagaatttcttcatcgtatggaggactttcgtaagatctacatgggcagaatttcttcatcgccttctatttggcaatctaaggagagtgaaagcatccaaatgaatataatagaagaaaaggaggacttatttgttatttgcaatatgcgtgcattcatgagaagagaaaccacgaagctcacatcacctgaagaagttgccaatcataaaacaggtaagcattttattctaaaatgtcgataactttatgctccattgcttttgtatatcatttaatttgatattgagataacttttatagattctcatgttttgcatgctaaagatgattttagtgaaaaatcattcataatatgctaaaataaagcttagtggttctttcttgtcgttccattttctgcatagctagaacttaaatgcttaaaaatagctttgtttgcctacaaattaaaatggagtttcttaggtcaacaactttcatcataaatattgttctctttgttatataccacaatatttttatgtgggcatatttgtggatctattactccatgttgagaagatgccaggtttacacgagtactaaaaaacaaagttagttaccttttctatgtctagaacataacacaaaatagaatatgtcatattgctaaactaactaggttaaaaagcacggctcatgttgccctaaacatgtgccttctgagaaattaacacctaagcaatgatggtagactattgtccctacctaccatattgggaatgaaaaattgttaaattaccatatagtccgaacattaataccatcgatatgaagaatccaaacttaatatgcttgatttattttggttttgtgagccacttcgtgacttcagaaggatcactagaatcgacttcaataaacggcaatataattccaacatagctaacattttttcaattatatgaattcttgcctttgttactattttctttttggcattatgacaatgcatgtaaagaaggaatcgtac

SEQ ID NO: 38295 - DNA, 605 bp, Setaria italica
  Peptide Sequence Number=SeqID_104269
actacttaccttcatgctccaccaggccaaacagtacacctgagatacctgcatcgaacctaccttgccttcaccttgaagattcaccacaaatatattgcataaatctatcggatccaggccaagattaagcaaggacgcgtgtagaatttcttcatcgtatggaggactttcgtaagatctacatgggcagaatttcttcatcgcctgtgaggaatttcgtaagatctatattttcctcatcaatctatttcttttccatgtcactgttcaacatgtggagtttgacatcaggtttttttttgtaattctcatgatttatctctttgaacttcttgtgtagctggaagatctattatctaactcctctttgaataaattttattttctgtttttttgaaatcgccaatcacactttttttaagcccacttctttgatctattgcagatataccgctttcttattcaaagatacgttgttttcttatttgaacctgaaaatactaatatccttgtaaattgacaactatgtccgtcttcaagatcctattatttcatctgtcgtagatttataactttcatctcatgggaattttttaaaaaaa

SEQ ID NO: 38296 - DNA, 793 bp, Setaria italica
  Peptide Sequence Number=SeqID_104270
cggatctcttcttctagctccagcaacacaacggcatcatcatcatggctgttgtcaaacatatttccagaagaggttatcaacgtgcttctgaagtggcatgtcccgctatctgatcagggcacaaacaatacaagttcaacttctgtacatggaggaagtagaagtatttctcataattcagatatccctactctgaagataggagttttggtcatgccccatgaatcttcagacgacatagaccctgcagccgatagctacgctttggaggtcattgatggagaggaacaaggaatcatacacgccaatgcacacctgcaggacttgggtgagaagttactgccaaaggccgcagattaccttcatcagaattctgaatcggagttgtaccaattgtctttgaagtctaggcatggcactgctcacatttgtttggagaaggcaagcatacgaatccaatcggctgcgatggttaagagtgaagccgcaagacgtgctcagcaggacaaaagcgcaactctacagcaagacatggagcgatggaagcagatatctggtgacctgctgaagttatgggttgtgcgtggatccgacaagctgcaaggtctcactcatggccactcacaacttggcctagatactggctctgtatatgcatgaagttttctgaagatgatgctaccaacagatgtgtagaaattaatgtcgtcagtcaatggcagccttgtgccacgtggcagtgagacgacatggcatcctcctaattctatcaaaccattatctttttgtg

SEQ ID NO: 38297 - DNA, 798 bp, Setaria italica
  Peptide Sequence Number=SeqID_104271
catagtgtcaaagttgggagttgggagtaactaaacatggccaagatcgagtcacaaagttcggcccattcctccgtctcttttcacccacgagggtcacgcattttgaggagcacaggacaaacagtgaaaagtgccaatggatgcaggagactaggagagcatccaaacgtgtgacgatacaatcggtgatccaatccaattcagaagaacgaacgattgttctgattcctcagtttctcatcagtccatgaatgaaatgaaacaacatcatcactacacctacatcgaaacgcccgatcgaatcggccgcagcacgaaacgcttcgtcagtttcgtcacgcggctactacacattcttttgccgctgatctcacaatgtcacaagaaccgcgatcagctggttctcgatgctcacgggttcatggcattgcagacttgcagcacatgagctcaaagatccgagcttttgcgagatgactgtcccttcacttggtgccgacgccgagcgtgaggtcgagctcctcggcggcgacctcgtggatcctctcgccttcccacggcgtgacgcggcccttgtcgaactcgaactccgcgggcccgcctcggccgatgtccgcggcggccatcccgtccagctccatggagttcgaggcggaggcgccgccgctcgggttgaccaggttgtaggtgggcgacgcgggcgcggtcgtcgccgccgacatctggaagctgatccagcggccggagtccacggtggagcagacgtcggactcgtcgctacttcggggtattggt

SEQ ID NO: 38298 - DNA, 475 bp, Setaria italica
  Peptide Sequence Number=SeqID_104272
gatgaggccggcggaggagggcggcaaggcggcgatcgtcaggtacgtcgtccgccgcgccgcggcggtcctgcccgccaacaaggttgccacgagggaggacgccgagaaggtggcggcggccgccgcgcgcaacgaggggaagagggcaggcgccggcggtggcggggggaagggtagtagtggcgtcgtcgatgcggtggcggcggccgcggacatgaacgagggacggatgatgtaatcacgtactgtaccgtacctctaatattgtcagttcgtttgtcacgataggtcgctactccgctagcctacctagcagtacaatgtatttcttcaataaaatcgagaagcatcatctagaagaagaaaagggtaaccacgcatggtaatcgaaaagcgtctcctgaaccagtttgggcccagcgttggttctcactcactcgggacggtattcctaagttcatatgtatatgtt

SEQ ID NO: 38299 - DNA, 305 bp, Setaria italica
  misc_feature (285)..(305): n is a, c, g, or t
  Peptide Sequence Number=SeqID_104273
gagtgccaatgatggaggatgtaaagttgtaaactagaagtagggagatgccaaaactacactttatgtttttgtagtctttttgtcacttaatacacaagtgttaggtactcaagctgattcttgctgtacaattgggcgcaagatacatttagtacgagtatctgtcttgtgcagtggagcactgtcaaatattcacatcaatactgtacagttatgtatctatcatatttcaagaaagctttggcgcaatgtgtgaggagtacctccattacttcaaagttnnnnnnnnnnnnnnnnnnnnn

SEQ ID NO: 38300 - DNA, 581 bp, Setaria italica
  misc_feature (202)..(202): n is a, c, g, or t
  Peptide Sequence Number=SeqID_104274
cccaggtccttgagctcggaattttggtgcattctgtgatcattggagtgtccttaggtacatctgtgaggtcatccaccatcaggcctcttgttggtgcccttagctttcatcaactctttgaaggcataggcttgggtggttgcattgtgcaggcaaatttcaagttaagggcaaccgtcatgatggcaattttttttcnccctaactgcacccataggtattgcattagggattggcatatcatctagctacaatggccatagcgctactgccttcgttgttgaaggagttttcaactcagcctcagcaggaattttgatttacatgtcattagttgatcttctggccacagatttcaacaacccgaaactacagacaaatacaaagcttcagctgatgacatatcttgcacttttcttaggtgcaggaatgatgtctatgcttgccatatgggcatagatctacagaccatcagaaaatggtgtttccaccagtattctctgtttgagttcaaggctagattgtatttgttcaagagttctccattttctcataataagatggctcatggtgaagga

SEQ ID NO: 38301 - DNA, 961 bp, Setaria italica
  Peptide Sequence Number=SeqID_104275
tgtacaacctagaatctccaattcacaaatgggaggttcactctagaattagtaattgggggtaataaggctccatgctgcaagagagatgctaaggatgtcaccgccgtccccttctagcttcctagtgttctcactgtatgacgacctgcctaaaggtgattttgtacttgaacaactagcgagcaacctgaaacagacctccaccattactcgattgagtgcatcctatgtgttcaagggtttaagcaaatcttcttatgtgatacccttgagtgcggagatagcaaaagatcatgacacagactccagtggccacgagcagcccctggcatccctagaaaacaagattgatcaagcgaaagatgaggccagggaagtcaccgctgccaatgctgccattgaagggatgcaggaggaaggcatcactgatagccttcttgtactggtggggttggtcggtcccattggcaaattgcgtccattggtccagcagataatctcgtgggagcgaccgtttgttactggcagtgtccttgctgtaactttgctaaccatatacaatgagtggttcaattatatgttagccgcatccctgatactggcagttggcgtgatggtttgggctaggcaaagaaagatcggcaagatatgctcggaagtgatcatcgacacttcatcggacaagactacaatggagagcatagtggaagcacagcaaagcctgaggaaagtgcacgagtacatcaagacggcaaacgtggtcatcctcaggctgtggtcgatcgcgctagcgaggtcgccaaagcacacagagacaatgatatggatgctgaccgggtccgcggtggtggcggccgtgatcccgttcaagttcatcctgatcgggctggcggctggcggcttcgtggcgaacacgagggtcgcgaaggctgtgtcgaacccgctagggcggtccggt

SEQ ID NO: 38302 - DNA, 648 bp, Setaria italica
  misc_feature (429)..(429): n is a, c, g, or t
  misc_feature (476)..(476): n is a, c, g, or t
  misc_feature (484)..(484): n is a, c, g, or t
  Peptide Sequence Number=SeqID_104276
cagtaagaaactccccatgatccttacattctgtaggctctgacgagacgcatctgccaaagaatctagaaactccattgagcaacccaattcacagtgaattgtcagagacttgaggcacccggatctatggatggctgattgtagtgcactcgtgcatttctcatcatagcactggtggaaagaccattttactgcaagcacctctaggaatcgcaggtcggccagattctcgataaagctcgcagagcaattgcttaagtcgacagtctccagtgcctctaggaatctccagttcacgatgtcctttggaacctccgtcactattttatccatttggtggtcgttaacaaggaggcgacgcaagcactggcgccgtaagccatgtgcccgacaaggcacataccgaggcagcagctttacttgcgngtttcttaggtccagtgcctgaagctccaggagctcccacacttganaagggagntcccttatctgcgtatggctgatgtccaatgtttcaagatacccaagctcgataatctggggcgggagccagctgactcgtgtgcaccggatgcttagatacttgagcagaaagaattgactgctgcatatctgtaccatatcatcatccttcaagttctccca

SEQ ID NO: 38303 - DNA, 1127 bp, Setaria italica
  Peptide Sequence Number=SeqID_104277
ctcagttttttttttagtttttttttttgttatttaggatgtacgatgtaccatagacttttaaactctgggatgtatacatcttacatgtaacatgacacttaacaatagcactaaaaaatttcggagcaaccacaagttcagacagtacgacagactcaacatactaagtagactaggataattaggcacccttgacatgagggcaatacaaaggcctgctacaccacctagctccagaccagcagcgcatagcacagaagccccgacttggatgccaatttagtccatttcatgtcctcttggtgatatggatggtggaaacccaatatatgggtagatacggccattgcacctctccgccctgccaatcctctctatcttcatagtcttaacctcaagtgagaaataagctgagtgtggtcttgttactggactggctaataggataatatatcctccaagtgcaccagcaatgagaaagcgataaccctcaggcaatgagattatatcctccgtcttccactcattggacctcagccccccattttgcctagtggcataatatagagactcttgattgctagttacattaaacatcccaagccttgcttctgctgtctccacgataacaggtttcgtcgtcatgttgtgatctagcgggaagtcgacagtgcagaactccaaactattaatgttgaattggagcaacttgttcatgcctaacagtttccaatagacgcagccacaagcataatcactgtgcaaactcaatggtactatgtttctacctggtggtattggtatggccaagcccagagcatcccaggtagtagatttcccgatattccagcagccggagcttgaagagaagataaacacgaccaacttttccacacaatacatcgtgctgatcaccctgaacgacgatgtgtcttcctcttcatgcccacaaggcaggagggcgggcaaaatacatctctttttctcggcagcagaggaaattaggtcgccggggatgcgaggcagaagcagggatcgccgggacaaggggtcgcacaccgtgagatctgggaaccagtagccgtccttcttaccttgaggaggacgcccgaggaggaggcggt

SEQ ID NO: 38304 - DNA, 327 bp, Setaria italica
  misc_feature (221)..(327): n is a, c, g, or t
  Peptide Sequence Number=SeqID_104278
tgcacttttgaatgtggcggtggcggtggcggcggcggcggcggggggatggtacaaccaccaccaatgccgcgggcttggagagctggaagctctgcatgaggagttgctagactcggtcgccaggtctccgattgtgtacaagtatcacagggcgactcgtatatgcgaactcaagttctgagttgacgataataataacaaaaaagaaaaaaaaaaannnnnnnnnnnnnnnnnnnnnnnnnnnnnnnnnnnnnnnnnnnnnnnnnnnnnnnnnnnnnnnnnnnnnnnnnnnnnnnnnnnnnnnnnnnnnnnnnnnnnnnnnnn

SEQ ID NO: 38305 - DNA, 297 bp, Setaria italica
  Peptide Sequence Number=SeqID_104279
agtagaaattacaagggactaatgcatgagctcaaaaaagaagagagttcgtggagcaggcagaaaggagaggcagccagagcgcttgcgacgggccacaaagttgccatgagtccaacgagtgccatcgtgccaccggatgcatgtagttgtagtgctgcaggcattccataacaagctggcgatcgatggctaagcgcttgaagtgccccggctccttagctctgcgcttttcctcccgaagccgcttgcatcatggaatcaagcgtaggcaaacggtttccagatggatgcgag

SEQ ID NO: 38306 - DNA, 483 bp, Setaria italica
  Peptide Sequence Number=SeqID_104280
ctgcatcatttgagacttgctattcatttcggcttctctactatgctggctcattctatcctatcatgggagctttaagattgggttattgctacaggatggcttatccaaataaatatgagatttatcgaagggttgatgagcccgatgggaaagagaaatatgctcttatagctgaattcacagacaagccaactcctgatgacattacaagttgctttcaaaggacggaaaaatacgttggtttttctcaattttatacagggacgacgaaaaggcaccttcaggattctggtaacttatggccctaactttttctgtatttgaatatttgcttgttatattattcacatgtgaattatgggatactgaaatgttggatcattgtgtaggggtttcttaagtggtatattgtgaggcaagcgatctatttatagaatgatgctgtccatcttcttggtattatttccaaggtcagaatgg

SEQ ID NO: 38307 - DNA, 281 bp, Setaria italica
  Peptide Sequence Number=SeqID_104281
caaagccttgaaagtttgaaaataagaccagatatattcattgtgctggaagttcctgatgacattctaatcaacagatgtgttggaagacggctggatcctgtgactggcaaaatttaccatgtaaaaacttccccccggagaatgaggagatttctgcccgacttattacacgttctgacgatacatttgagaaggttcttgcattgcccacttagttaacgttttgttttgttttctggtcatcttaagacccaaagatccaaacaaacagtcaagta

SEQ ID NO: 38308 - DNA, 598 bp, Setaria italica
  Peptide Sequence Number=SeqID_104282
cattaatattggagctgtaggtgctaacgaaggttgacaaagaagatgatatgtttgtcctcattgctcccaaaatgctgttggaaactgcataattgatgatatgagagctatgactgatgctgctggtgacagacctgtgattcttgtaaaccctcgcctgaaggttttgaccaaaaaatatatcctgtttcctttattgtcttcccttaatattgttatcatgtctaatctgaagagatcttatgtatacattgtgcctatttggtgggatattggaggtagtagttctaaaaattaaaattaaatcatgaaggatcctcatttctagaaacaggtacaactcggtgacaaagaaactctattccttggtatgtaagatactttcatgcaaaactagctaatttttattcgcttcaaggacatcatgaattactgaacatcttaaagtagatgtaataaaatcatgaagacccgttcttctctaatatttaacttttctcagtttccaatctttgtgatttatagtccaataattctggattatatttaaattctttgtaatgtataaagaaataatggtatcattattgggtga

SEQ ID NO: 38309 - DNA, 568 bp, Setaria italica
  Peptide Sequence Number=SeqID_104283
taccttcattaatattggagctgtaggtgctagcgaggttgacaaagaagatgatatgtttgtcctcattgctccccaaaatgctgttggaaactgcataattgatgatatgagagctatgactgatgctgctggtgacagacctgtgattcttgtaaaccctcgcctgaaggatatgcctggatcaagtggtgtaatgcaaacgatgggaagagacatgaggctaaagtatgctgcatcatttgagacttgctattcatttcggcttctctactatgctggctcattctatcctatcatgggagctttaaggatggcttatccaaataaatatgagatttatcgaagggttgatgagcccgatgggaaagagaaatatgctcttatagctgaattcacagacaagccaactcctgatgacattacaagtgctttcaaaggacggaaaaaggacgacgaaaaggcaccttcaggattctggggtttcttaagtggtatattgtgaggcaagcgatctatttatagaatgatgctgtccatcttcttggtattatttccaaggtcagaa

SEQ ID NO: 38310 - DNA, 850 bp, Setaria italica
  Peptide Sequence Number=SeqID_104284
tccttcctcaccaggccgatggcggccttctccccggccaagacctcgcctcctctcgccgcgccggggacccaccgctgccatggccccgcgatccgccgcatctcgccgtcgccgtcctgctacccgtctctggcgttgtcctcctcaccggtcgtcccctccgtctgcgccccggccggcgccctcaaaccaaagccctggggtctaggacttcggtgccgggccgcggaggaggcttcgatgccggcgcgggggaatgctccgctcaaggtgatgatctcgggagcgcccgcgtcgggcaaagggacgcaatgccgcatgatcgtcgagaagtatggtttagttcacatatcaactggagatcttctgcgagctgaagtatcttctggcacagaaattggcaaaaaagcaaaggaatatatgggcagtggaaagcttgtaccggatcaagttgtcacagatatggtggtatcccgactatcacaaccagatgtacaagaaagagggtggcttcttgatggctaccccaggagcttcagtcaagcacaaagccttgaaagtttgaaaataagaccagatatattcattgtgctggaagttcctgatgacattctaatcaacagatgtgttggaagacggctggatcctgtgactggcaaaatttaccatgtaaaaaaacttccccccggagaatgaggagatttctgcccgacttattacacgttctgacgatacatttgagaaggttaaatcacgtcttgatacatacaagcaaaattctgaagctattcttcctgcatactcagattttcttaatcagattgatggaaatcgcctgttgaagtca

SEQ ID NO: 38311 - DNA, 2199 bp, Setaria italica
  Peptide Sequence Number=SeqID_104285
ttacttcttagttcttagtcgtacttctagtattattatttctatttgttgtcctggaagttcctgatgacattctaatcaacagatgtgttggaagacggctggatcctgtgactggcaaaatttaccatgtaaaaaacttccccccggagaatgaggagatttctgcccgacttattacacgttctgacgatacatttgagaaggttaaatcacgtcttgatacatacaagcaaaattctgaagctattcttcctgcatactcagattttcttaatcagattgatggaaatcgccctgttgaagtcatttttcaggagatagattccctattacagaagatctgtgagaacacttcagcaaacaagttgatcaaagcaaatggaaaatcaccagcttctgtggatacaggttcaaaaaatgagtggcgtggaattccaacaagattgaataacattccacattccagggaaattaggaaatacttctacgatgatgtattacaagctacaaaacgtgctattgaagataaaaagactcggttgcagatagatatcaacatccctgaacttaaccctgaaatggatgtttatcgcataggaacccttatggaacttgtaagagaactttctctatcctttgctgatgatggaaaacgtgtcaaggtctgtgttcaaggctccatggggcaaggtgcatttgctggcatcccacttcaactggcaggaaccagaaaaattttggaattcatggactggggtgactatggggcgaagggtaccttcattaatattggagctgtaggtgctagcgaggttgacaaagaagatgatatgtttgtcctcattgctccccaaaatgctgttggaaactgcataattgatgatatgagagctatgactgatgctgctggtgacagacctgtgattcttgtaaaccctcgcctgaaggatatgccccttgtaaattggtattgttttattcgttcttatttaggttaaccctttgtttttgaccaaaaaataatatcctgtttcctttattgtcttcccttaatattgttatcatgtctaatctgaagagatcttatgtatacattgtgcctatttggtgggatattggaggtagtagttctaaaaattaaaattaaatcatgaaggatcctcatttctagaaacaggtacaactcggtgacaaagaaactctattccttggtatgtaagatactttcatgcaaaactagctaattttttattcgcttcaaggacatcatgaattactgaacatcttaaagtagatgtaataaaatcatgaagacccgttcttctctaatatttaacttttctcagtttccaatctttgtgatttatagtccaataattctggattatatttaaattctttgtaatgtataaagaataatggtatcattattgggtgataactaagttcctgaatttacatttccaggatatgcctggatcaagtggtgtaatgcaaacgatgggaagagacatgaggctaaagtatgctgcatcatttgagacttgctattcatttcggcttctctactatgctggctcattctatcctatcatgggagctttaaggatggcttatccaaataaatatgagatttatcgaagggttgatgagcccgatgggaaagagaaatatgctcttatagctgaattcacagacaagccaactcctgatgacattacaagtgctttcaaaggacggaaaaaggacgacgaaaaggcaccttcaggattctggggtttcttaagtggtatattgtgaggcaagcgatctatttatagaatgatgctgtccatcttcttggtattatttccaaggtcagaatggtagaagcaaattaaaaaagttactttttccatgcatcacctatgaaacgcagttggtttgtaggtttaatatgttttccccattcagccttagagtgaatgcctattttccctaattcactgctccttagattctccacctatatccgtatcgaattattgatgtaaagcttcacgtgcatattgagggataaaaagttctagagattttttggtcagcttactagtaccctacttcagtggttgaattgctggtatgtaattttacaatatgtggtattcggcatttcaatcaacgattttcatgtttgaaagtttcacttaaaaaact

SEQ ID NO: 38312 - DNA, 725 bp, Setaria italica
  Peptide Sequence Number=SeqID_104286
tgcacaacttagcgtcacagcagggtgggctacttgatttaatatcatcacctagcgcactacatgctcttaacacacacgacgggggtgaccatcatcatcagggggtgtatggatctagctaacttcagatatcaatggcggaggcggcggttcttcagatgctcacagccatggaggcggctccctggtggcgagcccgcctcgcaccttgctgcgacctccccttgcaggcgccgtcaggcttgttggtcccgtcggcgatgacgatgccgtcatcagaagaaccaccggctttctctggacctggagacccatgcttgttcttgcctaccgcgctggaaccattgccctggtcctgatgagcaggcctcaccttcacgccccgtatcagatatttgccagacttgacatcagagtagatcactatgaaatccccctcctgaagctcattggaacgaacaaattccccggtgttctccaacagatacattctgctcttgttgttgggccaaaacctgtaccgcatgttccagacccgcgatgtcccaatgtcctccatggggatggagatgccatccctcgtcttcagctccggcaggtgaacctccgcttcctttttggggagcacgatgcggccgaggctcccgacgtcgctctgcttcagaaccttctgcagcaggtagcgcaggttctttgttccgacttcgccccctgccgcttat

SEQ ID NO: 38313 - DNA, 579 bp, Setaria italica
  Peptide Sequence Number=SeqID_104287
ccgttggcgaaggggaccacccgcgccgccgtgcacggctcgcgctcgccgacgaacacgaccgtcgaggtgtgcgtacgtacggtaccatcatgctcctaatctatagccgccggcgccgagcggtcgtggcctgaccgcctgacgtcgagcggtcgtgcagggcagggaggaagcggaggaggcgatcaagaaaaggaaggaggagaagcggaaggtgagggagcaggtggaggccaaggtcgacgacgcgcagatcggctcttcctcccctgctcctcctcgccgcaagtgaccggccaggcgggcggcagaggccttgtgctgtgcctgttgccacatcccacatgtttctttcatcccttctgtttgtgttcgcttagtttttgttcgggtgtagtacagtactgatacagtcgctctgagtaatcgacagttcgacacctcgattacggaataaatcttcctcgtgtaactgactcaaatccatgcatggtcttgtggacacgaatcggattgccgacgcgcaaaaaccaagcgcgttataaccagaagaaatggatcagctgcaagcagtca

SEQ ID NO: 38314 - DNA, 255 bp, Setaria italica
  misc_feature (120)..(120): n is a, c, g, or t
  Peptide Sequence Number=SeqID_104288
cggaggacgaggaggaggaaggggaggaggcggacagcggggccacggcggcgtccgcggcggcgagtaggaagggcgccggcggcgcgctctcgtgcatggacggcctcgacgacgcgntccccatcaagtaagccagcatcccattcccacgccacgcatcgatcgatcgagcgtgtacgcggcttcttcctcgctggatcataccagttctctgacgcgggtggatggaacgatttatgggtgcaggagggg

SEQ ID NO: 38315 - DNA, 396 bp, Setaria italica
  Peptide Sequence Number=SeqID_104289
cggaattcatgctaatctatcaagtacgccttccctgcaaagcagtgatgctgatacaccttcaaggcctccacctgcagtggcagaatcccctggtatgttgggcacacaggtggaacagaatttgcatcctgacattgcaccatccacctcgttgtcgggtgtccaacttcaagggatgttcctggatgaaaggagtccagcaggctgtcgatcagatggagtaactgatttgtcagaggaaagtgaaactgaatatctaactggtgctacatgcaatctggccaccgtaccagtgtatagggaagctgaaaactgaggacgatcaagcaaaagtgtgcctgcacaggaaatcagaagtcccatgcccaacgtagtttagcaacttcgcagctt

SEQ ID NO: 38316 - DNA, 356 bp, Setaria italica
  Peptide Sequence Number=SeqID_104290
acccccgtctgccaaacaacccccgaactcgttctatttgtgcgacatacgaagttgattgagcccatttgtctgagacattcagtataatgacaattacagagaaatcagtggatagtcatatatgttattctggatagtctagaatctagatcttcctatttatatagcctgcaatctttttttttcattctgatggcttgcagttatcatggcttgtcaccggatacttgatttgttgtcagtgtactgcacaaataggatgatcggtccgtgtgcatgatatacttctgctagtttgttgctgtcattgtgtatgacataatgctttctacctatgcatggctactgtaacc

SEQ ID NO: 38317 - DNA, 428 bp, Setaria italica
  Peptide Sequence Number=SeqID_104291
gtcatttctcatttggtcttcttgtttgacggaacttggttccgcttgttatttgctctctagctatctgcccatctttttcccctgaaaacctgtctatctgctagtatttttagatgctaccatttaatggtctacttctgatttgattttgtgttggcagcagtggctgacccgctgaaggatattgtcttgttcatcaatgaggctcaaacttcgttttaccatacgaaagtgcacaagattaaaaatgcacagaacaggccactttgtggatgatctagatgacacatcctagctttgttttcagttttggaatctcttttgtcctttagttttcctcgttccattattacttcttatgtggaaatgttcaaagatagccctactttcgtgcaccaattatgcagtgtcttgttatagtgtct

SEQ ID NO: 38318 - DNA, 715 bp, Setaria italica
  Peptide Sequence Number=SeqID_104292
ccgtgatcatgtttatgggttctattgatctgtgccggtgaacaatctgagatattcttctcaggaaacaaagaggcattttgaacaatttgcgcaaacataccctaacatccattccttattcggtctgtacatttttctacgaacatagtaatacacagatacagactgcagagatactgcacaccattactagtactcgacagagtcaccggagttcacttggcgtgcgctttggtcggcttgacgaccagcaccgggcagcaggcgtgatggctgaggtagtcgctcacgctgcccaggaacgccctcttgattttgccgagcccccgactgccgaggacgaggagcccggcttggaaccgctccacggcctggcagatggcctccttggcgtcgccctccacgacggccgccgtggcgtccacctgccgctccttgcacatgcccagcgcgcgcgccaggatcctccgggagttctcctcctgcgccttccgcatggactccaccgccgcgggccgcgcgtacgcgatgccttcggatcagcagcggagcacgcccgaattacccaaagcatcagcgtccagtcccatggttagagggcgggcaaagactagcgttaccgtgcgtggcgatggggtagacgaagtggtcgacggcgtgctgggcgtggacgacgacgagcgacgcgtccgggtggcaccgcacgacgttg

SEQ ID NO: 38319 - DNA, 680 bp, Setaria italica
  Peptide Sequence Number=SeqID_104293
cgcgcaccccggcggcgcgaaggccggcagcaagctgccccgcggcgactacgtgccggtgtacgtggcgctgggcctgatcgcgctgtcggtgacgctggggctgagcaccgcgcggcagcagctggcgcacgcgcccaacgtccgggtcgacaagaagaagcgcgagacggtgcccgaggtggcggcgcccgacctggcgctcgacgagggcgagcgcttcgtcgggaactcgctcttccgcaaggtcgcccacgtgcaggacgaccgcagcctcgccgccggcgtcgccgaccccgtcgccgagtacccgacgaagaaggctgtgacgctcaaggacgtgggcgtggagacgccgggcatcgagcagagcagggagggcataatcgacaggatcttcaagaagaaccacgcttaattgacgagcgagagtgtcgactttacttcctgctttcatttagagtctagtttggagtcgaatcggctgtacttttaaaggtcgatgtgccacctgatgtacatagtcgagaacactctggtttctcaaaaagaaataatgaaacgtctgcaacatgggtccacatccagaaatcttcgtcacggagcttccggggatggatgagatgagattgaggacgatggcgctgtcatatcagtagtaaaccatatgtacatccagg

SEQ ID NO: 38320 - DNA, 358 bp, Setaria italica
  Peptide Sequence Number=SeqID_104294
agtctaaagtcaagactgcttcggcaggcagtcggagttgccgagcccgacggtgacgaacatgcgggtgtccacggacagcggcaccgtcggcttgccggggagcaccagcgccgtcaggttggacaggaaacggaacgccgtgtcggtgtcgttgtactccggccgcgatggcagctgtggcggcgcctccgcggccgagccagcgtactcgacgatggcggtggcagtgctcatgctgaacggtggccccaccgggatggcgctgtcgtacggggacgccgccatgtagtagcgcccaacggcggcgccggcgaccatgagcgcgtccacggtctggcccggcgcgaccaccacc

SEQ ID NO: 38321 - DNA, 371 bp, Setaria italica
  Peptide Sequence Number=SeqID_104295
agaaatcagaacaactttatgtgcagggaaaaaaacttctccactttcagatctcagagagaacatttccccctgatattcttctctttcatgtgcagagcaaagaaggtgggatttgcttagctacggagcagatggtcaagttgacatgcagttatctaagaacaggcgcacatgattctgcctgtcatacctgatcatgtagaataagcaccaggcagaatctcatctaagaaatgtcaaattctctctcaagttatgtttagctttcagttgtttttttaaaattcaaccattatttttatcctaaaaaacttttggtgtaatccggattcaaggatatccatacagatagtgtggaagaagtatca

SEQ ID NO: 38322 - DNA, 424 bp, Setaria italica
  Peptide Sequence Number=SeqID_104296
cgaccacttcatcggctcccgggactcggagtcgctgtacatgatcgcgccccagggcggcggcacgggccccgagctcgccgtcttcttcgtccggctctgacccccggtccggccgccatggacgtgcgttcatttgcatggccacacacatgcaagatcgaagggcatccatccatttagcgcccgtaaagaattgactcgtgcaccctcataatgaccttgagattgactaagaaccaagaacagagtcgcccaaattgcgattagcgcggttaactttgattaagctctagtggggtgtacgtgattcagtataggttgtgtgaggtgttcttggatctgtgccctgtgcatcattgtcacaatctatcatctagtggagtacgacagaaatagtcactgaatggtggaattgtggtcc

SEQ ID NO: 38323 - DNA, 1454 bp, Setaria italica
  Peptide Sequence Number=SeqID_104297
acatggtgttcttagaacaagagccgggtacggcgacagcgacgccaacccgaggaggtgcctgaagagcgacgccacggacgtcgaggagctcgccgacgcgctgcggctcggggacaagttctacgtggtcggctgctccatgggcggatacgttgcctggagctgcctcaactacattccgcacaggctggctggagtggctctggtcgtgccggcggtgaactactggtggccgctgccggacgacgtgcggaggatcgcgtacgggaagctggacgcccgggaccagaggacgttctggatcgcgcaccacgcgccgtggctgttccacgcctggctcacgcagaagtggctcccggtgtcgccgatcatcaggggcgagcgcggcgcgttcaccgccatggactgggagatcctcaccgacctccggaggaagcagcgcgagagcggccaggtggatccggccaaaacgacgcagcaggggacctacgagtcgctgtgccgcgacgcgacgaccctgttcggcacgtgggagttcgatcccacggaggtcaagaacccgttccccgacggcgagggcgtcgtgagcatctggcaggggtacaaggacaggatcgtgcaggtggagatccagcggtacgtggcgcggaagctgccgtgggtgcggtaccacgagcaccccgaggccgggcacttgctcccggacatggacggggtcggcgacgagatcgtcagggagctcttgctcggcggggcgccgccaggctcgcagctgcagagcgagccgcgccaggatcaggatgggtgaacgtactgcgtactgaaaggttggtggagaaattgaaacgagcaggtagatacttgcatgtagctgaagctgaagaataaacgtcgctgggacaagtcgatgcactgattgccggacgagttgggaagtgcaagaacatggtattggactattggtagttgatgaacctcagtccatggatttaggcatatttagcaattagcacagttggccagtggcgtgtcatgctatccgatcctcattgatggattcagcctgtgctctgctctccccgatgctcgaaacagtgaccacgtagtattcatcggaggaagtacaagtagggtggaccttatcagatatgtgagccgggatttgtgcagacgtacagtacctttgcatgcagagccagcagacctgagcatcggttgatatgggctggatgttctgcgaggcctgctcagaacggaaaaaatgatcggcactaccggcccaagaagcatttgtaggaaccgaaatgatacaggtacagtcgtgactcattcggcgttgaagtaacaactactaccagaaatcccagaaccgaaataggacaatttttaagtaaattttttcgtttcccttaacccaacgaaatagcaataaatttaagttcaaagttacg

SEQ ID NO: 38324 - DNA, 669 bp, Setaria italica
  Peptide Sequence Number=SeqID_104298
gcgatcgtcggattcggcatcgtaggcgccatcggcttcttggtgctgtaccagaaggccaggcccggcacgccggataggaaggaggctaaggtggccgtcgggcacggggaccccgccgccgggcgtgagccccccgacggcgcgcgtcaagggaagtaagcgcaggtccgtggtacgtagctgtagaggtagcctgctgttccgtgttgagctcagcttttgtcgaggacctagcgtttgcgttgtaaaagactcaagtagatccaacagaataagatttcgtctcagaagaagaaaggcttttgattccagttgaggaactgacgctgtacaaacaaataaagttgtagagtttatcctgccagatgagaaaaaaggagatgaacaggtcagctagcgtttggtacggtggatcgatcaacggcagaggcgcacgctgcagcgcattacaacccggagctctcacttatattttgcttgtttaaacaacttcatgcaggaatgcagctgctcatttgcaggggttggtgtttttatagcctgcttgtgcttgatgaggtcttactgtatcagcgatggtggttgtttcgttgttttctgctaaatgtaaacccggtatctctgtgtgattcctgttgcagaggaagtgcagattcaatgttcaaa

SEQ ID NO: 38325 - DNA, 804 bp, Setaria italica
  Peptide Sequence Number=SeqID_104299
gggtagtgaaaagggatggagcaagggtacaacttgtggttgatgattggcaaagggaggatgaggtggaggaacagtagacagtgatgaagctgcattaggtagtgttggctgcgtagatgccatgggtgcaaggagttgtggttttacatttagtagacttgcagattgggtagtggcggagctctgtggtctatgagcatcaaagggcctcagagtaactgatgaagttcgcgaaggaagcatactgtgcaaggaacaagcctgcggtgcactagcattatgcaattcatgactagaagaagaaatagtcctgaaagattggtttggttgtactgcgcctgttccaccaatcatatctacacatgcagctaccttcgaaggggttagcaagaactcttcaacatcatctgctatcatggtaagtgatgttgaccgttctagagtatcttcagctgcaggtagagcagatgaaacagatgctgcttcctgctcttcaaacacacttttggaaggaagctttgccttgggagacgccctagaatatgcattctttatccttttaaaaagatgtccaacttcttcacattcctttgggttattgaacaaaattccaaggatttcatctgcggcattacggtacatcacgtagggaacttgcacctcgacatcaaaatccgtcaagagatcttcgactagattttctgtatttagttgattcatgacaaccaattggaatctgggctgggtattcctcttgacgacgaagagcgacccctccaccggcttccggttccactcctg

SEQ ID NO: 38326 - DNA, 1089 bp, Setaria italica
  misc_feature (1058)..(1089): n is a, c, g, or t
  Peptide Sequence Number=SeqID_104300
caggagcgcgagagtggagcgccctgaaagcacttcacaaactgataaataaagcacgtggggaacgcgactgagaggccgaggcagccacatggcgagaggcgttgcctccaacccgctaatgctttcgctcgaggcggccgtgctgctcctcgtcgccgccggggtccccgcggcggccctccgcgacgacatggacgccattcgcgtccccacccatgtcagaggcgttgctgaccttgtcacggcggtggcgcgcgcgacgaagggtgacgatgagaagaggccgtggaagtgctgcgacctcgccatgtgcatgaggtcgtggccgccgatctgccggtgcctcgacgaggtcgagcgctgctccggcgcctgcaggaactgcgaggagacgggggactcgcgccgcacctgcgtcgactggtacaagggccagcccgggccccagtgccaccacaaggacgcagctgagcgacaggcggcagctgctgctgacgcggagaagaagggcggcgacgagaagaggccgtggaaatgctgcagcctgcccatctgcaccaggtcgcagcctccgatctgccactgctgggacgaggtgaagcgctgctccagcgcctgcgtgcactgcgaggtggtggagggctcgtcgggcggcccgcgccgctaccgctgcctggacacgcaccacggcgaccccgggccgaggtgccgggagaaacagtgggcgccgaccgtcgccaccagctaccgtttctagctagctagcggctagcgcagacgtttgttgcgacgctgatcgatcgatcagcgttgctgcgtgcccttggtgacctcatgttatgtttctgtttgctgtcctaggtagtagtagtagtaagacttgttgtaatgtgctgtactgtatcagtgtatcctgatcgaccaggaggctcctctgctctgaataaataaagtggacaaggggcagctggtgcacggtcccgtgcatgcatggcgcggggcctgtagtacgagccctgcactcgttaagtttcttacaaaaaaaaaaaaaaaannnnnnnnnnnnnnnnnnnnnnnnnnnnnnnn

SEQ ID NO: 38327 - DNA, 384 bp, Setaria italica
  misc_feature (379)..(379): n is a, c, g, or t
  Peptide Sequence Number=SeqID_104301
tggataattcacactccacagtgatgaacaaaacgaaagtactgcactattgctccatggattacactgagatatgtgggtgtgtgcactcagggttgtaccctttcttcttctttagaataatgatatgcacctctcttgcgtgttcgataaaaaaaatgtatacaacagaaagatgactgaggaaaatgtatgtccaaagaaactcaggggaaattcaaaatcacaaactgaaggaccagatggagaatagcatggaaccaccagcatgtgcatgggaggctaacttccaacagggtaaagcttccaaacaacattcacaagcatgctaagatcacaaaacattagacataggcaagatatgaaatcaaatgcaagngaaat

SEQ ID NO: 38328 - DNA, 568 bp, Setaria italica
  Peptide Sequence Number=SeqID_104302
ttagtcccacaatgaccttaactcatccacacataattactttttttctaaaaaacttaacatcagcgcagaattaccacatactagccatgtttaaacatatcagagcccattccctcccatgagcatgataccactagtgtagtacaccaccaggcccagttgaatgatggcaattggcatactagccatgtttaaacatatcagaaaccattccttccagtgaattaacagaaatatctatagataacattagcatagcattgccactgaaaataaaactacaggtagttccgtgccaacacagatttgtactaatagattccaagagaatatcaacctagatgatttattaacatggtatttttcttactagcacatagaggtacacatactggctcaaatgcctgtccattgccaattaaacaaattcaggatacttgtgaaagcagcaattattttcaatctttattcagaacaaatggttcctgataatcgaagtacttcattggaggccctcttagtttcttgtagattgcacaaatctgttggtgttctaatgacccca

SEQ ID NO: 38329 - DNA, 1486 bp, Setaria italica
  misc_feature (37)..(37): n is a, c, g, or t
  Peptide Sequence Number=SeqID_104303
gtcctttggtctagttctctttttagttttttttttntttttttttttttttagttattaacattagcatagcattgccactgaaaataaaactacaggtagttccgtgccaacacagatttgtactaatagattccaagagaatatcaacctagatgatttattaacatggtatttttcttactagcacatagaggtacacatactggctcaaatgcctgtccattgccaattaaacaaattcaggatacttgtgaaagcagcaattatttttcaatctttattcagaacaaatggttcctgataatcgaagtacttcattggaggccctcttagtttcttgtagattgcacaaatctgttggtgttctaatgaccaaatctcaaaatcaagagggaaaattagtttaaatgagcgtagagtcagatcaccaaatatcaaatgaatatttggaggacataaataaatattagtatcagtttatcagcaacatacaaccagcaaagttgtgatgtatatacaagtcaaacatggaggattgactagaagagagaaaaatcagttagattgtaaaaaaagaaggagattttctgtcacttctgtttcaaaattgaaatgattcctacactattgctggatttgtgtcaaataatgcctctaaaagatagcaaattggaaactaaaagaagtgccgtaaagatctgaaattctagttacagattcctctatgcctcatcaagggggatgagaaagaacctggaatccttcttcaggatgccaatgcacatcccaacatctgtgatgacaaaatcgtatccaaaaacagagccgatagtgaagctcctccacctaggcaaactagtggctagcaggtgtcatgcgattaacattacaggttatcaatttaccttgaaatttacacttcaattacagagataaagatgtattctcatttaacactaaagtggggactgtgctatccctgttgggctgggccattcttataaggccccactgtcaaaaatgtttagtcagaatgtcatagctacacaaagcttcatccatttgtggaatccattgaagaccgatatttttctgggaggaacttccgatggtgtcgatatttcccaccagtgcctagtgatgtcaacagggaagaagtagaagcttctagggagaaatgattctcatcaattttggaaaggtaaaacccagctctgcttacctcacctctctgcaatagcctcctaactacagaatttagcatacgggagtcaggggcacaaccattctcctgcatggacagaaacagactatcggactcttctagcaacccttcttctataaaatgtaccatcactaaggtgtaggttacaacatcaggcgccaatctattggccaagatataagaaaacagattcatggcctctccctttctgccacctttaagcagtgtgccaatcattatgtttaaagtcccaatttt

SEQ ID NO: 38330 - DNA, 926 bp, Setaria italica
  misc_feature (897)..(926): n is a, c, g, or t
  Peptide Sequence Number=SeqID_104304
ccggattcccctcccaactccgtcgatcccaccaccgcgccgacctcgatggcctccgccgcctcctcggccgccggcgccggcaagtcgctgttccagggcctccgcaggttcctcaagaagccgtgggagatcacggggccctgcgcctcgcccgagtaccgcagcgcgctcccgaacgcgctcgagtaccgcgacaagtgcccggccaccatccgggacgaccgcgacaaggccatcgtgcccacctccgatccggagaccgtctacgacatcaagtacttcacccgcgaccgccgccggaaccgcccgcccgtgcgtcgcacgctgctccgcaagcccgacctcgagcgctacatggctgccaagcagttcgaccccaccaaggacttccccgtgccatacgtcaacaccaccgtcgaggaggacgacaacaccattggcggaggctaccagaagtgagccaggcatccatgttgttgtgatgggactccatcagcatctgcactgttttcatctcgggtttaaagtatccctctcttgttcccagtgaaaattttctggttgtaaaagatgatggcggcaataatatggcactcgtggagctcactgaatgcacctttcttgtaagttgtattccaagactctgtctacctgatacggatgttatgattgaatgcaaaaaatgtaaggtttccgttcaaatgcgaacatcatctgctttaactgcgaaattatgatgatttgacaaaagatggaatacttccctcttgtacttctgtactatgtagaactatgtgcatatggcttgcaaactcataccggtacattttgtagttcccttgtgtacctctattttggcttgcagaagtcaatcgtgggacgtgcatgtgactnnnnnnnnnnnnnnnnnnnnnnnnnnnnnn

SEQ ID NO: 38331 - DNA, 408 bp, Setaria italica
  Peptide Sequence Number=SeqID_104305
ggcgaactgaagaagattttcatggtcaagaagctccacctagggcacgtagcgaggagcttcgggctgaaggagcagccatcgttggtggggaggtcgcaccaggtgcagctgaagaagaggaagaaggagcagaagcgtgaacggcctgccaagaggagaaagctcccctccaagaagtgagcttgcacatccgaagtggctcggcccttgtcttagatcgtgggtcatggtccactccgattttggaactaacagcagtggtggcctgaagttgaatgctccactgataagagctgttttgttcgctaaattacatatttggatgttggcttggaaattggaatgtagcagctagcaacacatatacaccatgtctgttgggatgagattatgtatcatttgagt

SEQ ID NO: 38332 - DNA, 501 bp, Setaria italica
  Peptide Sequence Number=SeqID_104306
aggggggaggctctcctgtttctgcaacctattgaacttgactacttgaaagatctggagtcacacggtgtatcactgacagaatatccctttcaaaaggttttggatagttttcctgtaaatggacagaaacctcacaaaaggaagatgatatctttagacatgcacccttggataatgtctctgcagagatcgctggagggttttgtcactgctgaggatgctacaaagaagcttgccagggatgctttctgttcctgggttcgtgcctacactgcccacagaggcgaactgaagaagattttcatggtcaagaagctccacctagggcacgtagcgaggagcttcgggctgaaggagcagccatcgttggtggggaggtcgcaccaggtgcagctgaagaagaggaagaaggagcagaagcgtgaacggccgagccacttcggatgtgcaagctcacttcttggaggggagctttcttccttctttggtctaggtcct

SEQ ID NO: 38333 - DNA, 1554 bp, Setaria italica
  misc_feature (1546)..(1554): n is a, c, g, or t
  Peptide Sequence Number=SeqID_104307
cgacggtcggcgccgccaccgtggaccgggttttcccggtgagcgccacgcttggaaacggccaggtcctcaccggtcaatctctctacgcccaggcggccaaacaaacaccaatggtccggctgttgcccagcgactgcactggcaacgacctggtgccggacaggatcatgggcaagatcgtcgtgtgcagtagcaatttcggagtttctccaccatacggcgttgcagtgcagagggccggtggcagcgggctagtttccgttgccaccgtggagcagcatatggacgggctcatggtccaggcgttcacccttccggctgtcagcctcagcgcccgtgaagccgaaaagctcgcggcgtacatccactcggaaccttacccggtggcgtcgtttcgcttcacctgcagcacggtcaccggcgagaaccgcgcgccgatggtagcgaccttctcgtcgcgcggacccaaccaactcgtccgcgagatcctcaagccggacgtcatcgcgcccggcacgaacatcctcgccgcctggcccggcgagtcgcccctgacacgcgccgacggcgacacgagaagatcaagcttcaacatcatctcgggcacctccatggcgtgcccgcacgtcgccggcgtcgccgcgttgctgaagaagaagcaccccgactggactccggccatggttcggtcggcgctcatgacgacggcgacgatgctcgacagccacggcaggcccatcacggacaacgcccgccccggcggcagcacgacgccgatggcggccggggccgggcttgtccggccgcagctagcgctctacccgggcctggtctacgacgccgtggagcaggactacgtcgacttcttctgcaccatgaactacaccaccgcgcagatccggatgtttgtgccagacttcgccggctgcacgaggacgctccccggcggcgtcggcgacctcaactacccgtcgttcgttgtggacttcagcaacggcaccgacgtccgtgtcctgacacgcaacgtgacgagggtctcggagggtccggagatctacactgtcagggtcgtggtgccggacgagctggtggcggtgaccgtcacgccggcgacgcttgagttcggcgagctgaatgagacgaagagctacaaggtcgtgttccagagcaagaacagctcggctggtgcgcatggcgcgggtagtaagatgcagttcgggcacatcgtgtgggaaaacgacgcgcatcgagtgaggagccccgtcgtgttcacctggaactgaacctgacggcggcctgttctgtttcaggcgctgaataaagtcaggccagcgcagacgtgttcgttacttgttggtggtgtacttcacatctggtgtccagtaataaaaggttgcatatcactgtatctaaactgctcgagttcaacgtcatgagacgcagagttcaacatgaatgaaagttgtagtgctaaactgctaatatgataccttcttcgtgtccgtaaagttctagtgctaaggtaaaaaaaaaaaaaaaaacnnnnnnnnn

SEQ ID NO: 38334 - DNA, 776 bp, Setaria italica
  misc_feature (738)..(776): n is a, c, g, or t
  Peptide Sequence Number=SeqID_104308
catggaggtggagaaggccaagtgcgagtgctgcgggttcacggaggagtgcacgccgccgcacggccggaaggtggccgcgggcccgggtgccccgacggagccgacgcctgaagcaagagctctcgcagtcgcagcaggctccgccgccgcgcgaactctagctaagctacctgcttgctcggcggcggcggcggcggcgggcaatgattgggtcattggtgggttggagctggtggtggaattgattacttgtagctgtacaagaataaaaaccatggcggcatgtgggagcagcgctcgtgtaggtcgccttcattcgtgatgaggaaataataatttggtgccgcgatcggttgatgattgctcgagggagaggagcgaatcgggctccgaatgatcatcgagcatgaagttagttattacgtatgtattgcgtctgtctagctattgtttgtactatctggaaattatggtggaggacaaggactgttccagtagctcagtatactgctatatactacgtactcagctagatactgtagtcaggtcgcatgaacactgcactgggctaccggggttacccttgtgcttgtgcttgtgctggctttcttggaggatagatgcagctgtatctatgtaaatttaatatctcttgtaatttgctatggctctatacaataattcatgtctcacatcgacatttaggttacttgtttatatacaaaaaaaacaaannnnnnnnnnnnnnnnnnnnnnnnnnnnnnnnnnnnnnn

SEQ ID NO: 38335 - DNA, 1069 bp, Setaria italica
  misc_feature (1063)..(1069): n is a, c, g, or t
  Peptide Sequence Number=SeqID_104309
acatcatctatccgccaccgatcactccctgcacgctcacaacctcatcacacagagagaagagagatcaagaagaagaagaagaagccatggcgggcgagaagaagggcctgcagctgctggacttctgggtgagcccgttcgggcagcggtgccgcatcgcgctggccgagaagggcctcccctacgagtacctggaacaggacctgagcaacaagagcgagctcctcctccgctccaaccccatccacaagaagatccccgtgctcctccacgacggccgccccgtctgcgagtccctcatcatcgtccagtacatcgacgaggcgttcccggggcagggcgcgccgctgctccccgccgacccctacgcgcgcgcgcaggccaggttctgggccgactacgtggacaagaaggtctacgactgcgggtcccggctgtggaagctcaagggcgaggcccagcagcaggcgaggaaggagatggtcgagatcctcaagacgctggagggcgcgctcggcgacggcaagttcttcggcggcgaggcgttcggcttcctcgacgtcgcgttcgtgcccttcacggcgtggttcctcacctacgagaggtacggggagttcagcgtggaggaggagtgccccaggctggcggcgtgggccaagcgctgcgcggagagggagagcgtcgccaagaacctctacccgccggagaaggtctacgagttcgtcggcggcatgaagaagaggctcggcatcgagtagtggggatcgatgaggagtgatgaaggttgcaggttccagttgcagctgcttcgcatgtagacgcgtgattgtgttgtagtgctgcgtcattgggttggtgttggtggtggcgtctgtgatgcatggacgctcctgttcgtacgtgtcttcgttgtcggttgagttgtttgtgtcattggcgtgagtccgtgttcggtgtcccgatcccgaaaatggcctcctgcactctagcgtcctgtaccagaactgaataaaggtttccatggatttcttggtagttaaaaaaaaaaaaaaaaaataannnnnnn

SEQ ID NO: 38336 - DNA, 1345 bp, Setaria italica
  misc_feature (1330)..(1330): n is a, c, g, or t
  Peptide Sequence Number=SeqID_104310
atcgagcgacgatgaggatacgatgccagaaggtgaatttcgtttccaagaatcaggccacgagtcatttgtgttggataatagtgcacagaaagaggaggacaacgagtatattaccatggaggcggtgttgctcccaaaggacttcgatgagtccatatcagcaacaccggcgttgtgcgaggaagacgatatggttcctaaaatcgtagaagccctggtccaagagttatctgtatcagacagtggagataaaacagaggatggcaagcgcacaggtatggatggagtggagcctagcaaggagatggtgtcaccgggcatcgacatcggcaccactgaagtgagcggcttcccagtgccggacgataacacgctgcagagcaaggtagaaggtgatgtagcagtggaaatgttgcaggaggaagtgaccattaacaccaatcctgttactgaggaggtggttggtgtgcaaatggaggccactgctactgaactgcctgaatgtgaattgctgcacccgagtgatcgtgtgtctcaggagccacaagcgatggcagaagctgcgtgtgttgatgatattctcgagagtaccttaacacaagacattgtactggatactggtgatgcaaattcagagagtgtggagcacactggtgtgggagatgtttctagtgtggtctcagtggtgaccgtggatgatgttgcagatctagcttgcagtatgagtacaccggatgtctcagccatcagtgacgataagatgaatgttgagagtaggccagatgttgaccactccaatcagacaactggtgtagaatacacatgggcgaacaagtcagcgaaaacagaggagaggaaaagcatggacagcgaagtgtctactaggagcatgacaccgcaagaaattgatgtttctaaatcaccagtgccagatgatcagagcaagagagaagatgaagtaacagtggagacggtgctggaagaagtgacgagtactactgatcttgttacaggggaggtggttggcgtgcaagtggacattgtcgctagtggaagcgagtcactgccactgagtgaccttgtggcacaagagttacaggcagtgactgaagctgcaagtgttgaaagtattcagggaagtactgtaaggggagacattgtgatggatactgatgatacaaacacagagggtgtggagcaacacggtgagggaggtgcttccagttttatctcaggggcatctgtggtgaccagggatgatgatgaggatataatgtccagtacgaaaccttatagtactgcctaaagaaaaccaaaaaataaaaanaaaaaaataaaaaaa

SEQ ID NO: 38337 - DNA, 247 bp, Setaria italica
  Peptide Sequence Number=SeqID_104311
tctctgctgtgaactgggattcagaatgctgtgaatcttgtagccttttgacggctaggaaggaaccatcaggtagcactgccttgtacatagtccctgtcctcccagtacctatgatgttctctttgctgaattggtgctttcacctcttaacacagacggcgaaaccctggacgaactcatcgttgccaagtaattgccaacccatatgtcgcccaaaggaataacctcgcagtcttgttgtttg

SEQ ID NO: 38338 - DNA, 263 bp, Setaria italica
  Peptide Sequence Number=SeqID_104312
cgactatcagggactattcctcctactcttcagaaattccggggcagttcagtttatttgctcggttgtcagcaacgttgagtgattgtaaccgagcaaataaactgaactgccccggaatttgaccactcaattggttatgttgaagattaagggtgtttaggtacgtaatgttatagataagtactggaatttctcctgagaaaccattataggagaggtctagcgatgtcaaaaatggcacttgcagagagatatctgga

SEQ ID NO: 38339 - DNA, 936 bp, Setaria italica
  Peptide Sequence Number=SeqID_104313
tggagatatgcaagcccctttcgctgcaccgatgccaattcttaacctcagaggccaatccatcttactaccttcctcttggtttaactgaccatagagtgagcctttgggcatgtgcttgtacaccaacagcttctccttcttggcaatgcaaaatccaaggagagggaccaagttccggtgccttacttggccaagtgtcttcatctctgctgtgaactgggattcagaatgctgtgaatcttgtagccttttgacggctaggaaggaaccatcaggtagcactgccttgtacatagtccctgtcctcccagtacctatgatgttctctttgctgaattggtcagtggccttcatgagatcacttaatttcatctttgaaactgggttctcaaacatagagaccttgatggtttttgttcctttgatactctttgcccacttgttgtcatcctcatcctttgccttcttcttggctggtattctccgcagacaaaagaacacaactattgcaccaattatgacaacaagcaccacgccaacaacagctccaatgattgctgcgttgctcttactctttgctgaagcctggcagtcacctaatggaggtccacacagtcctggattaccagcaaagtttgatggtgggaatttctgaagagtaggaggaatagtccctgatagtcggttgtcagcaacgttgagtgattgtaaccgagcaaataaactgaactgccccggaatttgaccactcaattggttatgttgaagattaagggtgtttaggtacgtaatgttatagataagtactggaatttctcctgagaaaccattataggagaggtctagcgatgtcaaaaatggcacttgcagagagatatctggaggaatagggcctgtaaagttgttgcttgacagatccaacgcagtcatacg

SEQ ID NO: 38340 - DNA, 826 bp, Setaria italica
  Peptide Sequence Number=SeqID_104314
ggcctctgaggttaagaattggcatcggtgcagcaaaggggcttgcatatctccaccacacctgcaatcctcgagttcttcaccgcaacatcagctccaaatgcatcctcttggatgaggactatgaaccaaagatatcagattttggacttgctaggctcatgaacccaatagacacccatctcagcacttttgtcaacggtgaattcggagatctcggttacgtggcacccgagtacgctcgaactctgatggctacaccgaagggtgacgtttacagctttggtgtagttctcctcgagctcatcactggcgagaagcctacccaagtttccacggctccagagaatttcagagggagcctagtggaatggatcaattatctttcaaacaatgcactcctccaagatgccatcgataagtcgctgataggaaaggacgctgatggcgagttgatgcagttcctgaaagtcgcgtgttcctgcacacttgccaccccgaaggagagaccgaccatgtttgaagtttaccagctccttagagccattggcgaaaggtaccatttcactgccgatgatgaactggtgctttcacctcttaacacagacggcgaaaccctggacgaactcatcgttgccaagtaattgccaacccatatgtcgcccaaaggcaaacaacaagactgcgaggttattccttttttccccctccatgggagttagcatatgctggagtgagtaaggaggcttataagatgccccaattagtagcaggtacttcatccgctgtatagttcttgtagcttggttgttacccacccttgggg

SEQ ID NO: 38341 - DNA, 1271 bp, Setaria italica
  Peptide Sequence Number=SeqID_104315
tgtttagggccggaatgatgcctactcagcttcttcggcgcaagtgaagaaggtgggcctgctgcagctcgcttctccggcctccgtcgccttgccggcgtccaccctagtgacgatcctggccatcttgctccgtcccatcaacgccacggcttgcctcttcctgttcttgtccagctcgccgaggtggtaatcatccctgcagccccgtgagcagaaccccatgctcatgtacacgtagacggtgcggccgttggtattgcggcggcagaggttgcaggtgaggaaggacatgtcgacggcatgggacggggtggtgcgggtgatgcagcatagcttcgcggacagccctagggtgatgtcgcgggcactggtgcgtgcaggctcggcaacacggacgaggtgagccgacgcaggaggctccacgacggcggccaggagcccgacacgggcggtctccaagatacaggggacccccatcgtgagtgcgcccacgaagcgcttcttctccgtgggtgcgggtgcgtgctgtggcagttgcccttgcatcggcatagttttgggtgctagtgcctgcactgtgtgctcgagagggagaagggaagtgatctgatggagtgtggtgtggtggagggatggtggggggttttcatagggcctgagggactgcaggggaaggggtgttccttgttgcgaatttctatctaattattatgtgatttatgtttctctggagaaatctgttttgttggcacccttggtgtagctagagaaacatcatgatgctacccacaggtccccgggttgttattgcacaggaacatctcgatctaatatttaatagtctttcaagaatttcgagtccagaattgacaaattcctcgaccttgattttggtaaaccttatctgttgttacctattccgaaagctacgataccaattctaccattgagaccaatggcgcaatgatgaaaagtatttacatacttattcctgtaattgagatctcatatcaatatcaattgtatcaccacatacaatatctagtttctgccattgctattgtactctggatcttcaaagcccttacctatatggtatctttttatgatattacatatttgctcacaaatattacataggcatcacttgttatagacacttgtgttattctttatgttttgctcaataaacttagttgaatgtatatagattatcaaggctcttatcgacacattgcacccaacaattcttaaaaatgaaaatataa

SEQ ID NO: 38342 - DNA, 642 bp, Setaria italica
  Peptide Sequence Number=SeqID_104316
ttacttcgaagaaagttatattatttaaagagaagtaaaaatatatagttttttatttagcttggatgacacatacgacacatagcacacacatcagaaagacacatacgacgacatactacatacgcatgtagttgcacgctacactcctgcagctgtccatataccgacgcatattgttgcatatgcacgaggctgctgctgctttattcatcttgaggtgacgacgaaacttgtttaggggccggaatgatgcctactcagcttcttcggcgcaagtgaagaaggtgggcctgctgcagctcgcttctccggcctccgtcgccttgccggcgtccaccctagtgacgatcctggccatcttgctccgtcccatcaacgccacggcttgcctcttcctgttcttgtccagctcgccgaggtggtaatcatccctgcagccccgtgagcagaaccccatgctccatgtatcgatccgcaactctcctcgacaaggtgaaaatggactatgaaataatattcccttatggagctctagtatctagcattccctcattacctggcacctgatttgctcttgaacgaactcttgagcagcagcacttcccgtggctaacctaatccacaatttacctaactaaa

SEQ ID NO: 38343 - DNA, 432 bp, Setaria italica
  Peptide Sequence Number=SeqID_104317
gttgtgcacagcatttcacctatgacacagccagaaattcctgacgcccaaggccgacgagccaccgaaggtcccgatccccacgcctctggtcgccggagccatggccggagttgcctcgaccctctgcacctaccccatggagctgatcaagaccagggttaccgtcgaggtaaaccaaatgacaagccatcttctcatgatcacaagcaacagctagcagcttaatgctaaccatcgtgtcatgcatggcgtgcagaaggacgcgtacgacaacgtggcgcacgcgttcgtgaagatcctgcgcgacgagggcccgtcggagctgtaccgcgggctggcgccgagcctgatcggcgtggtgccgtacgcggcctgcaacttctacgcctacgagacgctgaagcggctctaccgccgcgccaccgggcg

SEQ ID NO: 38344 - DNA, 755 bp, Setaria italica
  Peptide Sequence Number=SeqID_104318
gcgacatcgcgcgccagctcggcgccgccgtgcccgggcaacaggcggccggcgaggcggcggcggcggaggaggaggacgtgaggaagaagaagaagggcggcaagaagcagctggccctgggcggcggcctgaggaaggtgagggtcaagatcgccaatccgcacctccggcgcctggtcagcggcgccatcgccggcgccgtgtcgaggacgttcgtggcgccgctggagacgatccggacgcacctgatggtcggcagcagcggcgccgactccatggccggggtgttccagtggatcatgcagaacgagggctggaccggcctgttccgcggcaacgccgtcaacgtcctccgcgtcgcaccaagcaaggctattgagcatttcacctatgacacagccaagaaattcctgacgcccaaggccgacgagccaccgaaggtcccgatccccacgcctctggtcgccggagccatggccggagttgcctcgaccctctgcacctaccccatggagctgatcaagaccagggttaccgtcgagaaggacgcgtacgacaacgtggcgcacgcgttcgtgaagatcctgcgcgacgagggcccgtcggagctgtaccgcgggctggcgccgagcctgatcggcgtggtgccgtacgcggcctgcaacttctacgcctacgagacgctgaagcggctctaccgccgcgccaccgggcggcgccccggcgccgacgtcggcgcggcggcgacgctg

SEQ ID NO: 38345 - DNA, 458 bp, Setaria italica
  misc_feature (95)..(95): n is a, c, g, or t
  Peptide Sequence Number=SeqID_104319
gaagcgcacgactgcaagaagccgtccatcccagccgcggagcgagctcagaggaacctatggcgcaagttgggcatctccaacgatgagatggntcccattgaggaggtactgcgcgacttcatctccatgttttgcggactgcttccagagcacatcgtggtggcaatgacagccatcttcgacttagatgatgagggagcggacatgttggacgaggccctaatccgccacgcaggcgcggcggtggcggacctacaagaggtaaatgcaatgcttgcgatctgaaccttcagcggcgagcgtcgaactgcacaacatgtatcagtctactaagtctactttatctactgtttcaaaaaaccctgctggctttgaccttcgggcaatctaacatgcacgccctgctggcctcgacctttgggcgtacgtacttattgtttgtttaaaaaaaaaaa

SEQ ID NO: 38346 - DNA, 1116 bp, Setaria italica
  misc_feature (1095)..(1116): n is a, c, g, or t
  Peptide Sequence Number=SeqID_104320
caccactgccgccgacggtcaatgacgtcgagaaggccctggacgacatggtgctaggcatgaatcacgccttggtgcgggaactgacgtcggacagaagcaacggcgaagcggcacagggaggggcacttgggcctccaactgtcaccggcagctaagaaggccgaggcagcccgcgtggaggtggcctgcgcggatgcgacccgcgtggccagaaagtcagtccacgtggtcgaggaggtggtctttgcgaccaaggcggcccatgcggtcgaggctaaggcagcacgtgtggaggtagcccgcgtggctatggaggctgttcacacggcccaggaggtggcggtcgaggtcgaggtggcccaagtggtcgaggagtaaggccggggcggacatcgcgaccgaagaggcccagggggcccacacggtcgcagtggcccaggaggttggggaggccaaccagatggctccagagaaccctgaaggggttctagtggctcctgaggccactccagacggggcccaggacttcggcccacacgaggaagaacagccgcgggatcagactgggatagaatccctattctgcaccccaggccgccgctgctacaacagctggcgccgtgccgtccccgacagagatgttccttcgatatgatgacggtaagaagaagcgcacgacttgcaaagaagccgtccatcccagccgcggagcgagctcagaggaacctatggcgcaagttgggcatctccaacgatgagatggctcccattgaggaggtactgcgcgacttcatctccatgttttgcggactgcttccagagcacatcgtggtggcaatgacagccatcttcgacttagatgatgagggagcggacatgttggacgaggccctaatccgccacgcaggcgcggcggtggcggacctacaagaggtaaatgcaatgcttgcgatctgaaccttcagcggcgagcgtcgaactgcacaacatgtatcagtctactaagtctactttatctactgtttcaaaaaacccagcagggcgtgcatgttcgattgcccgaaggtcaaaagccgcagggttttgtttttnnnnnnnnnnnnnnnnnnnnnn

SEQ ID NO: 38347 - DNA, 1124 bp, Setaria italica
  Peptide Sequence Number=SeqID_104321
caaatttattcattgctatacactacttgtaatctctaaaaatctgctctaattgataactcctacttcccttccatcaccgtttcaaggtttcaaaatatagacttgaagaggtgggaagatcagctagcatcaagaaccggcccagccaacatgtcttgagcagttgtcacatcatctccgcggaaccatttgcccggattcatccttctcgaagatccttgcgatccactcgttccagaccgctctgcgcctaccgctgtccgataggagtggggaggactcctatcggacagcggtaggattttcgtcgaacgtaccatatgttgatggaacattaacatcagcaacccctagcgcaactgcacgtctcagtgccgcctgctgctcctcgtcatgatcccttgatatggtgatctcattgcccatcctttgaacttcaggtgcttccatggttttctcattctccagcaacaaatctagcgccctttgagcttctctttctatccatataatagcatggtcggatgtcgcgttgcaagatagaacaatgtgctcaaatctgccatccaccggaactgctgttcttacaacaggggggtatcttccacagctgaaaggttgcctttcaacaatgtggtaaagccgacctggtgcatagaggcgccttggatctctcaacatcacactttcaggtatacatgtgtctattagacaccttccacacaaaaggcatggcaagcagacaagtgacttgaagatgtcttccagaggaatgtctgtgcgcggcaaaaaatcatcctgaagaataaccgcattaatgacatctgcgtaacggactgccaagttgagggacatgcaccgggcaggtgccattgcaaagcatcttatcatcttcctttctatgccgcccagccgctccctgttatgcactgccactagagccagcattgccacgacaccagaaccaagagaatgtccagcgaacgtgagcgtgtaaccaggattcttctccaaaaggtccctcagaacatcacattcagcatcaaacacccactcggcggccttgagcaagccattgtgcacatagccgccatcaaacctcctctgcccaagcttattat

SEQ ID NO: 38348 - DNA, 482 bp, Setaria italica
  Peptide Sequence Number=SeqID_104322
cggcgggcattctttgatgaataaaaattttacgaattcagtttttcctcgttgatggactataatttaatgaacttgcttgtggaggaatgttatgtgtcctatgatgaaccatttatgtacaaaaaaggaaaattgcgctgtcattgtgcttttgcagatctgcaagcgctgaaaaccccgctgtttagcgtcggagcgtgcacaatcactgtggacttgcaaaccttccaagttccaaaagaaccacgacacatctttgtttgaggatacactgtacataaacgtagttgctaatctctcatgccaatcctgaaagctgtactgccatccactgttctttcaaaagttctgacactttaccgttctgaatcagttaagtggacacaacctcaagtctgaaccaaatatggatggctgcttaaccagccttaacaataaattttgtttcattaccagtctttttagggccaaaacatgtc

SEQ ID NO: 38349 - DNA, 808 bp, Setaria italica
  Peptide Sequence Number=SeqID_104323
cgaatactggctgcatagctcaagccaagcatgatctggaagtcccagttccagtaattgatgcagatagagagggaatcaagtgcaatctccgagttggggaggaatccagtaagaagcacaaatccttgcacataccaaatctccaatgctagcatgatggctgaggcaaaggcgagcttgaccttttaagagaggcccctaaaggcaagcaaggagagtcaggtccaggtctcttacaagctggactacagacgatgtaaccccatgtcaacaccacaagcacccaccaagagaagctcagtgtgagcgcagcaccaaggaggcctgagccgagcacaaacactgccagccatgaggcaaggctgtggaagatcagcaccgccagtgtgatatatgccacggggttgacaatgttctgggcctgcaggaacctctgcatcgggcagaagagggcaaaagcaagcagctgtggcagcagcccacgagcgtacagctgccccgccacagccacatctgcctcctgcccaatgagccgcaagaacgggccagcataccagtagaggaaggcgatcggaatagctgttgcgagctggagcacgagcgccctctggcacacaacgcccatggccgtgtacctcctggctccataggcctggccacagacagtttgcactgcactcgccatgccaatcatgatgccgtaagctaggccctggataccgatgttggtgattgaggcgccggcaagctcaagctcaccgaggtgtccaacaaacatctgtgtgacgaggctgagcatgaagct

SEQ ID NO: 38350 - DNA, 735 bp, Setaria italica
  Peptide Sequence Number=SeqID_104324
ttcacggcgaccgcgtccgcggcaccggtgacccggcgatcgagcggctctccgacgccgctcacatcgccggggttctcgctgggaagctcagcggggagaccaacgcatgggtggtcgacgccgcatgcttcacggggccatttgcggtgtaccgagaacttgtcccgtccgtggacgccgctggacatcccaagggatataaccccactggcttcccagctgctgccggcattgccaacatccttgcgcacggcattgctgagatacaaaataagttcttggggtgctcagcaaaggagtcggctgttaatcagcatcgttccgcaacattgtcatcctactgtcctcctaggactatcatcctgggattcagcaaaggtggcattgttgtcaaccagcttatggcagaactttcgttttgggcatcagaatcaatgaaaaacttgttcgatgtttcacaaccgaatccatctcattcaagccataatctcctggttcctacttcgattagtgatgtgttaccaagtgtttctgaattccattatgtggatgtgggcctaaattgtgctggagcgtacattactgaccaagcggtgatcaagaagatcggcgattatgttttgcatactggtcggaaccttcggtttgtccttcatggtactccgaggcagtggtctgatccaaaccggttatggatttgcaaggagaaaggacataatgctgcagctgctt

SEQ ID NO: 38351 - DNA, 846 bp, Setaria italica
  Peptide Sequence Number=SeqID_104325
caaggacaagcgccgctccagcatccatgacatcaccacaatcaacctccccgacgaggaccgcggcaacgcctcgccgtcgccgccgtccgcggccaccgccgccaccaacccctccgtcgccgaccagttcgccgcccttgttgacgcgaagcccttcatggcgccgctcccgggcgcgctcggcgtggcgcacccctacggcaacgtgaagctcgagcccaagagcgcgctcgtggccggcctcggcttcgacgactcaatcctcgtgcagatgcaatgcgcggcccagttgtgacgggcggttcttggcgcggcaagaaccgcacggaagaaagaacggctcccggtcgtcagggatgggccaggtcgcaggtcgtcgtcgtgctaggcttggttgcagagttatggggtatcaatcagatggcacgtcccgtgtggagatgagagtgacagagtctcgtcgtcgagctgccaccctcctatgtccagcagctccgagtgactgtgatcattgcgaaccaagaggccatgagcgtgccactccagcgtccaatttcagttcagtgtacataaatgcaaccacgactatagggcccaagaagaacttccgctgtaccgaataagcattcgatgaagcctttggtttgtttccagcgtcaccaccggcggcttggatcaaggattcaggatcaccgggtctgaagatttctataccggtctgttcatgtattgttggtgtgtaacggtagcactcctatcctatggagatggagtagcacttgagcagagtgtgtgatgcttgtaacttgtaaggtctcgcaaggtttttgtccgccaaaaaaa

SEQ ID NO: 38352 - DNA, 356 bp, Setaria italica
  Peptide Sequence Number=SeqID_104326
aattgtccgtcgtcgtccctttcgtgtggttcagaatatcggcgcgcaccttgcccttccgtagcagttcatccacgacgcgcggcgcgccggcggccaccgcgaggtggagcggcgtgttcccgtccttgtcctgcacgtccaggaggccgcgcagcatggggttctcgattgcgagagatacgaccgagtggcggtgcttctcctttgcgaacgagtcgctcttctccttggccgcggcgtgcacgaaggtcccgccattgtcgtcgcggagctccgcggcgtcggggcaccactccagaatctcattgacgacgcggtggtggcccatccgagccgcgacgaagaaggactcc

SEQ ID NO: 38353 - DNA, 688 bp, Setaria italica
  Peptide Sequence Number=SeqID_104327
gcgcgcatgcatatcaagatttaaagttaaaatctttaatcaataatttagctaataattttttatttttaatataaatttggtatggttggatttgtaatcaaatgtactctccaatgattataagtttataaccataaataatataatataatggagattataaatttataaccataaataatataatataaaataaatgaatagtcaaagtttaatttggaagaccgtgctatgtcatgtgccatgccttataaatagggaacggaggagggagtaatttaacagtgcattgcatcaacgaaaaataatactcatcacttagactaacacctggagtctgactacagtagtgtattacatttcacatttcgtctatatttaaacctacttaaacattatcgtagaaatcttttgaaataaactctactctcacttttttatagattgatcgacctatagtatttaaggaaaattgatataagacataacaaaagcttaaataactcacctagaagatatcagattgaatgatgaagcattctatgtggcattttgtaaacacaattagtactgactaaagtagtagtattgtaccatgtataccataaacaattgaaacaaagacacgcacagtttacggtataaatctaactgcacgtaactatcgaagaaatgtattgtggag

SEQ ID NO: 38354 - DNA, 465 bp, Setaria italica
  misc_feature (406)..(465): n is a, c, g, or t
  Peptide Sequence Number=SeqID_104328
cggcgcgcgccatgccgggcgattatgcggagaggccgtggaagtgctgcgacatgcaggtgtgcaccctgtcggtagtgctgccgtcctgctggtgccacgacaggctcgagcggtgctcgttggcctgcaaggagtgcagcaaggtgaggggctcggaccctccacgctacgtttgcaaggacatgtacagaggcgagcccgcgcccatgtgcactacccacgcatgacgcgaagaacgtagaggggatgacgagccgtcttccacggccatggctgtcccaagtttattcctgttgtatttcctgcagatagctagccgcttctgcttcctgttgttcctgcaccatgctgctgcctcctgtttcaataacgaccatatagcaggtcggggttttaaatttcnnnnnnnnnnnnnnnnnnnnnnnnnnnnnnnnnnnnnnnnnnnnnnnnnnnnnnnnnnnn

SEQ ID NO: 38355 - DNA, 870 bp, Setaria italica
  Peptide Sequence Number=SeqID_104329
gatagagagaggaagagatatgcaaacctgttagacttggcaagagaaaagaagatattaaaaaataatgagggtcggagatgcaagaacatgtctaaccaagccttggcttctcaagctccagtgtttgggtccgcgcagtctgtcgtaacagaagtattaacacgttctaaaacaagaggggttaatcaatgggatgaatagtggttcaaacaatgtagagcaagtggaccatggaatttgggaatcagaagatcacggttgctttggaagaggaagatttggattgcttggagcccaaggttggtgatattgatatttatgaagatgatgaagcaagggtgtttcatgagcgagctattcggtatgagccatgtagagattcagacgtggttgtgctagaccatgatcagtacgatgcagtatataaagatctgccgactgctcaccatattctccgcaaaagtgccgaattgttgagtattgtggtgctataaagtttccgagtgaaggtgaatatatatattccaaatgtgcccattgagcttcgtcacttgttcacaagccagatagacagggatgcactgtattttagaaagaatattcgatatttcaactcacacttctcattgactcgatcgtcgtctcgccactgctgctggtacggatgtttatactttcaaggtacatggtcagatatatcataagctagatcaattaaagcccagtgcaaagagtccaaggcacatgcaactatatttttatgatacggatgggactatggcacgtgaagcacattggtctcctcatcttgatgccaagttgattagaaccattttggatatacagatacagaataacaatccgtat

SEQ ID NO: 38356 - DNA, 567 bp, Setaria italica
  Peptide Sequence Number=SeqID_104330
cgccgacctgcgcgacgaggaagaagggaccgaaggagagagagcagattcgcagaagcaagccacggaggagaccaaccaaacaagaggaggatggtggcgccgatggatccgatgctgtggcacaaggtggccgccgtctccggggttgctgctcttggactcggcacctacggcgcgcacatgttccgccccaagaaccccgcgtacaaggaggtttggcacaccgcgtccctgtaccatctcgtccacaccgccgcgctgctcggggctcccatcacgaaacgccccaacattttcggagggcttctcacggctggaatcgtgttcttctctggaacgtgttacactgtggcttatctcgaagacaggaagttttcttcaccagcaccactgggtggctttgcattcatcgccgcttgggccagccttctcttctgacaaaattgtgctttagccaataaaacaaaattctcaaagctttgcatctggtactttaataggttatgggcttgtacttgtactgtatgcacctttggttaaatataatacagtccatcctttcct

SEQ ID NO: 38357 - DNA, 748 bp, Setaria italica
  Peptide Sequence Number=SeqID_104331
catcgaggagacaaggtcggattggctcctcatttccgattatggcttcctcacaatcctgctgcagagctccccagggcttgaagtgacgccccatggcgacgacgcctggacagctgtccctttgatccccggagccctccacgtccatattggagaccacctagaagtcttgagcaatggtcagctcaagtcccttgtccatcaagccgttctcaaccctgatgaagcaagaatttctattgccagcattcatggtctgtcaaaggatgaaaaggtccgctgcgccaaggagctagtagatgaggagaacccggaaatgtacagggaaagcagtttccaggacttcctcgacttcctaccatcaaatatcaacaactacaggaggtttatcgagagcctcaagatcaacagagcttgaaaagaaaacattggttctgctgcaccagaacataatcaaatggcatttttcagataagagtgtaaagctggatcaaacaaaatgttggtgtctttcaacagggacagagtattgtgacaagtagggatatctatgcggtgcagcactgccacacacggccagttcctatttgaagatagattcgtatagcaaatacaattggtgctgctatgttctgcagagctcctctcttcaagtgatatctggttgatgcctctctagaaattgagtctacattcttagttgtacaaatgatcatttaattatgtgttaatgctgaggaaccag

SEQ ID NO: 38358 - DNA, 775 bp, Setaria italica
  Peptide Sequence Number=SeqID_104332
cctggatcacctttccagagcgtgtatgactcgtcttcgatgccgtttatattctcaatatccctctgcaggtaatacagagtcccaggaaggaagagatcctcaggcacaaacacatcatttgtactattcgatgacagcaccttcgtcgagtcagctggatctttggcaacatcagaatttgttgatgctgatacaattttggcatagtcaccgagtttacgtgccacatcttgaattgatgaaacgacaagcttggcattagtcacaatatccactatatgcttcaagtcttccttttccagaacacttacccaatctgttttgagtatttcatttcgcagtcttgccagtgaagctgcactgagcctaggtataatatcatcctggagcacaacagtagagacatagctagcacaactttcagcagcttccttcgatatgcaaggtggtgttccatatccaacagctgaaataatgtccggactgaaaccaggctcctcctttgacttcttccgtaacattatggccagtaaagctgctgaagctcctccaagggagtgccctaccaaccgcaacttgtagtccttgtgcttctccaaacattttctgattattcccagctcatggcgaaggtaccaacgggccgcctcatatgttccaaagtgtgttgagaaaccttttggtgataccttcttatcgcttagagcaatcaaatcagtaacaagatcatacactgtatgacgtcccaacgaactacccaagaatcacctag

SEQ ID NO: 38359 - DNA, 497 bp, Setaria italica
  Peptide Sequence Number=SeqID_104333
atgaactgtgttctctcagtttctgaactgccttctgatattttcttctcagagttgattgtagtggcaactagggtaacactattttcttccttctccctgcattctccaacctcttcagactttttattcattcccactagagctatttcttccatattcagttccctcttgccttccatttctgaagcttcaatccttacagaattactgctttcttgtcccattcctttatccagtttattcgatgggcttttgtttatcgcttcatcagtaacctgctgcttcttacctcttcttttgtatacgtgtttgataggaggcttttgtatacctttgacacggtcttctccaataattgttgttgagtttcgacatatggattgcaccccttcaggttttgaactttctattgttgtttccttcgatttgttcacattggcagctgcagtacttgttttgttttctttggtcttgccatctaaatacaactcttc

SEQ ID NO: 38360 - DNA, 510 bp, Setaria italica
  Peptide Sequence Number=SeqID_104334
aagactcattaacacaggcacacgaactccacatagcacgcagccacatgctacatgcacgagttctacatagcatgcactccgtgctttacgaactgatcaatttgcttcactcgcaaactgatcaacactacaccaccaccctccactcacctacattgctcccccttctatctttctcacactcacactcacaccaccacaccttttatagcacaagacagccctaatgccttactcttgaagactcaagtcttgacttacacactaaggcaaagacttgacttgcaccctaaggcaaagacttgacttgcactaagagaagacttgactcaaactaacatccaacaaggattacactaacaacctccccctaatccttgttggctttattctgcacctctgagcatgcaccttcacaccagggctcgcaccgacctcactcccacagccgcaccaccaccatgacgccatctgctccccaacgccatccgcggcttgcagcacgag

SEQ ID NO: 38361 - DNA, 406 bp, Setaria italica
  Peptide Sequence Number=SeqID_104335
aactacctcggtcatggctgaagagaccagcctccacttgcccttcatcttgagcatggtgtgcttcctcctcccgctgctggtgccgtggtctgggtcgatgtaggacacagccgacacgagcagcttgaccatgtcgctggtccacttgacccggggccattgggaggccgagacagccgccttgccatcatcagcgccctcctcttctctcagcgaggcctccaccacattcccaaactcctgaatcttgttcatggtggtggcagcgatcacaccctggtgaacctgaaccacctggggttgggcagcaaagtggagcggctgtcccagatcgaagggggctccgctcgggatcagtgcttgcggtgacagattcccctccatctccgacgagaaaacacca

SEQ ID NO: 38362 - DNA, 713 bp, Setaria italica
  Peptide Sequence Number=SeqID_104336
gtccgccgcagcctccgacgcggtaaccccggccgccgtccttgccctcgccgccgccgacctacgcaccatcggcgtctccggccgcaaggcctcttacctccacgacctcgcgatcagattcgcagccggggagctctccgactccgccgtggccgcgatggacgagtctgcgctcctcgccgagctcaccaaggtgaaaggcgtcggcgagtggaccgtccacatgttcatgatcttctcgctgcaccgccccgacgtgctcccgtgcggcgaccttggcgtgcgtaagggcgttcaggagctgtacaagctgaaggcgctgcccaagccagaggagatggcggcattatgcgagcggtggaggccgtaccggtcggtaggcgcgtggtacatgtggcgcctcatggagagcaagggcgctgcggccaagaagaagggcaaggcgagctcttagctaggtatgtaatattatgcgatgatcttatgtatctgttgtcccaatctgttaaatttagattattctggtgtagatagtgtcccagatttgtcaattgttgtggacgctgccttgtccttgcagagtttcaactgaagtcgattaggttcagacttcagagtctagtgctagtatgcttgtagttgtattagatattcaaaactgatgctactatgcttgtaagcttgtactgtggagcataataatttaaggg

SEQ ID NO: 38363 - DNA, 627 bp, Setaria italica
  Peptide Sequence Number=SeqID_104337
gaggtaaacacagattttcttcttggcatggcatcaattgatccagctaattcattttatccttatgacaaggataagttacttaaacttttgctcggttttatcccatagacttctcaaggaaagatttgtcaaatcttcccatccatctcacacgctttattgctgatatgcgtgaggatgaaaggtttagagaagtgaaaagttttgttgagctctcagttatgcttgttgaaacaaggaagagcctcaaacatcctattgtttacaagcttcttaaattggtgctagttcttcccatagcaactgctagtgttgagagggtattttatgcagtggatcttgttatgaataaactaagaaatagagtgggggagcaattattgtacgattgcctggttacattccctagccgagttgttagtggaaccgagcggcactcctcaggtcctgggttcgactccccgtgggagcgaatttcaggctgaggttaaaaaaaacctcctcgtctatcccacaccaaagcatgctgcaaggcccggcctaggctcacgcaggcgcaggtgccgccatgtaagggtggggtaggggttcgggggttttcttgacctgcgtgagaaggtcttt

SEQ ID NO: 38364 - DNA, 749 bp, Setaria italica
  Peptide Sequence Number=SeqID_104338
gtagttaggaaggttgacgaagctactcgtcgtgcccgtcgtagctcccgcggcggtagaagaaattgcgtagtccgcgttgtgcggcggcgcggcgttgacgttcgtcgtgctgggcaggctgctgccggcagagttgaagtacatggaattgatcatggagtctagaaagtcatctccttcgccggcgtcgtctgaaatcacggagctgacgttgggcgtgccggcagagtactcctcggcgggcttcttggcttccccattcttgtggtgcaccttgcacacaacccattcatccttaggattgaagcgtagtttggagttgttgtgcctagactttccctcgaggcggaactcgtgcatcacccagttggtcttggatccccttggagccctgcccatgtagaacacgagtgtcttcttcatacccaccagctcacggcctgcacctgcagcagcagccggcttgaagatctccctgtccttgccggtggccttccagtagccctccttggtggcgcggttggtgcgcatccccgtcgggtatttcatgtccttgtggcagaagaagaaccattccttctcccccatcttcgccttgcttgggagatcccatggctcgcacttgttgaggtccacctccccaatggcttgtgggtcaaagctagggttcaagaacttctccaggagatagcttgtgatgacctcctcgtctgtgggatggaacctgaacccgggaggcagaaacg

SEQ ID NO: 38365 - DNA, 506 bp, Setaria italica
  Peptide Sequence Number=SeqID_104339
ggaacatgtgaagcattctgttacgggctaggttggagttaagggtgtaaacagtgtaggaattctcggccactgcctagattctgtggttgttttaggtcagtcatcgtttcttggtccagtagtgcgcagcgcacatgttgtaaacttttatgacatgtggtgttgtgttgagtctatttgttttcatcttgtttcttctataatgaaatgatatgcagctctcctaagtatttgagggaaaaatcagagttggagactacggcagaggataaggtccctaacaacggctcactatgggaagggtggtgaagagagatggttgtgagccaagatgtcctcataattcggcttcttgcctgccctttattatgtcttcataaatagagagcagtttcatatttaaaaatagcagataacagataggcaaatatcttcaaaggaatctactcgctctcaataacttcctatctgttagtaatttcttggcaagccaatacagtcaa

SEQ ID NO: 38366 - DNA, 693 bp, Setaria italica
  misc_feature (1)..(59): n is a, c, g, or t
  Peptide Sequence Number=SeqID_104340
nnnnnnnnnnnnnnnnnnnnnnnnnnnnnnnnnnnnnnnnnnnnnnnnnnnnnnnnnnnaaaacgaccaacataagccatggcacattgaaatattacacgagcaataacttcaagcaatatgcattaccgaagcatctttccaatcgcccgagcgactagggttaaccagttaccagtaccactatgttacatatatatggtaaccatataacttaaacttctccacttatccatagtactacaatatattatagggcagcatcatagattaccagctacgccagacagttttgtttactaattgacaaactgcatatctcaaccatgttcctccacttcacccatataatctgtaagctaagcacggggcttgctcaaaagaatagaccagcacctgaggcagtcctgatgatctgaaagagagatgatccaacgacaacgaagacaaagaacccaagcagaataggtccaacaggataatcatttgctttcttgattgtttcaggaacagcgcccctctttgtgatattcttctcaaatcgtgcaattttccatcagcaacacgccttgaggtagtcatagctggtcgggtcgccgcagccggagggacgcggcgggcggcggagacggggtgggggcgcggagagaattgggagatggggacggggtgttggagaggcgtagtattggt

SEQ ID NO: 38367 - DNA, 922 bp, Setaria italica
  Peptide Sequence Number=SeqID_104341
acacccttaagaacatgattcgctggaagggatttgacatgtcgaagcctaaggagatagaatgccaaatttcttcattgaaggaggaacttgaatctctttatgatgaagagttcaggttggatgatgaaataagggaagcaagagacaaactacaagccctcacactagatgaggacaaaagaaagtttttatatctttcgaaggaagatataaataagattcctcactttcagggatccactcttattgctgtaaatggtcctcacggaacatgtgttgaagttctagaccctaatgcggatctgtacttgtatgggaacctgggtttgcaagagaagcattacaaaattgtcttgagaagttcaatgggtcccattgattgctatttaataagtgaccaccaggagatacttaacccagaccagcaggtggcatctgacaaattagaacctgtggttgctgctggcagttctcaagctgtgcaggagatggattgtgatccgaatcaaacaccagaaaagggacatagcaatgctgtttgtacacatgcatcagaactgtcaagaaagcatgagatcatgtctggcattctgagaattgttccatcccattccgatgcgaactctgattactggctcgcttctgacgttgatgctagcatgacagatgcatggggcacatagaaggtggatcctcatacttagggctcttaatctgtcccttagatagacataatagaatgattccaaagtacacagttgcattggggtaaatgcacattgcatcccccctggtccatgctctgaccccattaaccaacaaagcaaagggtacatggtagacagtagatcttgtacattggcagcatgtttgtagttgtcggtcagttgggataggatcagcatgtgcggttaggtct

SEQ ID NO: 38368 - DNA, 797 bp, Setaria italica
  Peptide Sequence Number=SeqID_104342
atgacacacagggcgattacgagtgcaaatgcaaatttggacacaaaggagatggtaaaagtgaggaaggatgccagcccataattgaaggatatgcaatcgctatagtaggtgggattcatgaattgttgtcaaatactctgttattatataagagagtcttcatgattattttctattcaaataatcatgaagactctcttaaagtctaaaccattccatttgacactagcttaaagtctaaaccattccatttgaaatatcacattttacaatgtaataattactaaattatagataatactgaatggttatattttatatatactatatgtagtaatattttgtattgtaaagagctcttcggacaacaataagattgaagggagctagtaaatatacttctattatctctcctgatggattgggatgccatggtatatacatataatcgacaatgacatgattaacagcagtataaagatatgcatgtttcgtgtgcttgtagttacatttgtctccctcactattctggtgatcctactatgtctcctgtacatggagtacagacgacgtattcggagagggcactttgacaaaaatggtggtaaaatcctagagggcgctgcgaacatcgtcaccttctcggaagatgagttgaggaagatcacaaacaacttctcgaaagatcgtcaaattggaagaggtgcctttggcatggtctacaaaggcaccaccgatgacaacaagcgagtcgcggttaaacgacccatagtagaaggagagaaatcccggca

SEQ ID NO: 38369 - DNA, 1129 bp, Setaria italica
  misc_feature (134)..(134): n is a, c, g, or t
  Peptide Sequence Number=SeqID_104343
gcctggggcttcgacttcaacattactgcaaccatagctttaaccctccaagaccatactatggcggtggcgacgacttggagcctttggaggtcatgaacatctcgttggaggccggcgagatgcgtgtcttntcccccgtggcctacatctgctacaactcatccgacaccactgattcaaccggattcatcaactggacattcaaattcttcccatttcttatctcgccgacgcgcaacgtctttacaggcatcggctgcgacacgttggcgtttctaaacggcagagaggattccagcttcttcagtggctgcatcacctcatgcgacagcttgcatgccgcggctcgagacggcgaggagtgcacgggccttggctgctgccagagttccatcccgacgaacctctccaggataaagatctactgggggaacgatgagagctatacgccatcaaataatgcatggggatacagcccctgcaactacgctttcatcgcggagaaaggctggtaccacttcaaacagagagacctcatcacacatgttgcagacaagacctttaatgaccgttttggagacagaagaatccctatggtgcttgattgggccgtcagggatggtggctcttgccaggctccaacaaaggatgctggggcacccacggctcccgcttgcatcagtagaaacagtttatgtgctaacgccacacagggacctgggtacgtctgcaattgttccacgggctacacgggcaacccctacgtcaccgatggctgcacaaacattaacgaatgcgaccttcgaaaatcaaatcctgcgatttatgaaaaactttgtggcagtaatagcaaatgccatgacacacagggcgattacgagtgcaaatgcaaatttggacacaaaggagatggtaaaagtgaggaaggatgccagcccataattgaaggatatgcaatcgctatagtagacgacgtattcggagagggcactttgacaaaaatggtggtaaaatcctagagggcgctgcgaacatcgtcaccttctcggaagatgagttgaggaagatcacaaacaacttctcgcttgttgtcatcggtggttgtccttttgttagtacctattgt

SEQ ID NO: 38370 - DNA, 620 bp, Setaria italica
  Peptide Sequence Number=SeqID_104344
ttgtctgatttggactaaatactggagcaaatgatgaaaagtatgataatggttttaaaatgaacctggaaaagctaattgagttttttcaaaagtttggatcttttgaatggcacctcacaaattctctttatgttaaaaagggcaggtcccaccgggattcgaacccaggttgccagattcaaagtctggagtgataaccactacaccatggaaccattttgtgtgttttctccctaggatatggtttggcaagtggcgaaaatcatcttgatgctctctcaggctactccatcttttggtgttggcattgtaacgtgcgataagctgaaccatgtgcccgagttcgttttgtcattggacaatgaattcaatctgaaaacggttattgagacccttttggtgactactgagtactgactagaagtgtttaggacaaggaaaagagcgagctgtatcacgagacgaggagcttgatcttctcccccattttgagcagctatatccgaactctttgaacaggatgctgattttgtatctggacagttgttacctcactctttagactttatatccattgttgttacttaaaaagtaatttcttagtaaaaaaaaaaaaa

SEQ ID NO: 38371 - DNA, 165 bp, Setaria italica
  Peptide Sequence Number=SeqID_104345
agcaaatctcccgtctccatttcaaacgcccgcccaacctctccgcctccgattccccagctccccaccggacccaccccaatccctcggcagctggcgacgaaggcggcgcgcaagtcggccccggcgacgggcggcgtgaagaagccccaccgcttccgcccg

SEQ ID NO: 38372 - DNA, 209 bp, Setaria italica
  Peptide Sequence Number=SeqID_104346
ctcgccgcttggtcgccgccgagttccagcccccaaatcagccgaggagaaaagcgaagggaggaggaaggaagtcgccgagaagaggagagatggcccgtacgaagcagaccgcccgcaagtccaccggagggaaggccccccgcagacttcctcgccgccttggtggcgaggaagtctgcgccgacgaccggcggcgtgaagaagcc

SEQ ID NO: 38373 - DNA, 144 bp, Setaria italica
  Peptide Sequence Number=SeqID_104347
tgctagcgccgccgatccgccgctccgctccgatggcccgcaccaagcagacggcccgcaagtccaccggcggcaaggcgccgaggaagcagctggccaccaaggccgcccgcaagtcggcgccggccaccggcggcgtcaaga

SEQ ID NO: 38374 - DNA, 397 bp, Setaria italica
  Peptide Sequence Number=SeqID_104348
ctaaatcttgtgtcttattatgcagtgaaatccgcaagtaccagaagagcactgagctgttcataaggaagcttccattccagaggcttgtcagggagattgcccaggattttaaggtgagatatatgtcttcatactgctattgtgctaagtcatgtgatgccacagttctgaagtacacctagaatcttctcttaacctcctgttgtatttgtgcagactgatctgcgtttccagagccatgcggtgcttgccctgcaggaggccgcggaagcatacctggtgggtctgttcgaggacaccaacctgtgcgccatccacgccaagcgtgtgaccatcatgcccaaggcattcagctggctaggaggatccgtggcgagagggcttaggttctctg

SEQ ID NO: 38375 - DNA, 409 bp, Setaria italica
  Peptide Sequence Number=SeqID_104349
ctcccaaaagttcagactttgacacgatagccttgaatgttgcttctgctagcaaggacactgcttttgtattcaattgccaggtactgcagctcatttctttactgttatagcatacaacatcaagtaaaggattgactcttgatttatgtgagagttttcaaaacctaaatgtcgacttttgtggtgtttctatagatgggcaggggcagaacaactactggaactgtgattgcttgcctgctgaaacttcgaattgatcatggcaggcctattagaattccatcatgtcaaaataaccatgaagatgccaatgatgctgcttactcaactggagaagatacagcagactacaatgggcacttgagttcagaatcttggaaaactcgcacttttgtactaaagtctt

SEQ ID NO: 38376 - DNA, 229 bp, Setaria italica
  Peptide Sequence Number=SeqID_104350
ctccggttccagagccacgcggtcctggcgctccaggaggtccgtcttgaagtcctgcgcgatctcgcggacaaggcgctggaacgggagcttgcggatcaggagctccggttccagagccacgcggtcctggcgctccaggaggcggccgaggcctacctcgtcggcctcttcgaggacaccaacctctgcgccatccacgccaagcgcgtcaccatcatgcccaagg

SEQ ID NO: 38377 - DNA, 148 bp, Setaria italica
  Peptide Sequence Number=SeqID_104351
catcagcagctaatgcttctctttccctggtgagaggtattcatttaaaggctggctgcaacagagaccagagatccaaaccatgaaatggagcgtaagactgcgacctggccgtttttcactgtaccgcatgagcagaaagcaacat

SEQ ID NO: 38378 - DNA, 250 bp, Setaria italica
  Peptide Sequence Number=SeqID_104352
tttttttttttttttttttaagttaacagtgtaatttcacttctagaaacagcacggattaggtctttaacaagcttagctccacatctcgaagcgaagccaaaataacagcagagtacgaagcagaccgcccgcaagtccaccggagggaaggccccccgcaagcagctcgccaccaaggcggcgaggaagtctgcgccgacgaccggcggcgtgaagaagccccaccgctacaggcctggtacggtgg

SEQ ID NO: 38379 - DNA, 331 bp, Setaria italica
  Peptide Sequence Number=SeqID_104353
ggcaaaaaaaagtaagcgacacgaatactccgtccctctttctgtcgctgcagatttttggggggaaaaggggaatccggcgaagcgcaagtcgagagtcatttgggacatttgctagatggcgcgtaccaagcagactgctcgcaagtccacaggaggaaaggctcctaggaagcaactcgctacaaaggcagcccgtaagtcggcacctacaactggaggagtcaagaagcctcaccgttaccgcccagggactgttgctcttcgtgagatccgcaagtaccagaagagcactgagttgctgataaggagctgccattccagaggcttg

SEQ ID NO: 38380 - DNA, 312 bp, Setaria italica
  Peptide Sequence Number=SeqID_104354
aaaactgctggaatgtaagtttttgttttttgtcatgcatattctgcaccttttgatggcagacttacattttattctttttgcaggcatgtagtgatggtcccagatgcaaggttggatgtttcacatcacaaagaagctgaccaagttcacagttcactactggatttcaatcctagctcatggggcttgccactgtttaaggattagaatctaatcattaataattttcatatgagatctgtgatacatgtggtgggcatcctaaaattcatctttacgaagattccaaagggaaaaggaaaactcaga

SEQ ID NO: 38381 - DNA, 389 bp, Setaria italica
  Peptide Sequence Number=SeqID_104355
taacctaagaaagaagacaacggagctgctgatccgcaagctccccttccagcgcctcgtccgcgagatcgcgcaggacttcaagacggacctgcggttccagtcctcggccgtggcggcgctgcaggaggccgcggaggcgtacctcgtggggctgttcgaggacaccaacctctgcgcgatccacgccaagcgcgtcaccatcatgcccaaggacataccaagctcgcccgccgcatcaggggcgagagggcttgagcgcgcgtgatgctgcgtcttcgttgtagtgctggaactagatgggtggttcgtttcttgccgtgctatcttgtagtaatgttctgaatgtgttggtcacacttcaatggaatgcgattgcaagtttctag

SEQ ID NO: 38382 - DNA, 428 bp, Setaria italica
  Peptide Sequence Number=SeqID_104356
attttcacattctgaaatgaagatttatctgcatattctttactgattcaatttggattgtaatttggggggatgtgattttttcttcttattgcagatggcccgtaccaagcaaactgctcgtaagtccacgggagggaaggcccccaggaagcagcttgcaactaaggtaaggttcttcagatatgtattgttttgtcgtaagacttaggtttcaagcttcaactgaatatgacctttgttgtattgcatcataggctgcccgtaagtcagcacccaccactggaggagtgaagaagccccaccgctaccgccctggaactgttgccctccggtttgtaaaataacacccttggatttttcacctgtccagcctagtattttgctgcttgattgatttgctgtgttgcaattgcattttaacagtg

SEQ ID NO: 38383 - DNA, 757 bp, Setaria italica
  Peptide Sequence Number=SeqID_104357
gtcccccaaatcctccaatctccccgcgccgccgtgtaatcccagcctcctcgccccgctccgatggcccgcaccaagcagacggcgcgcaagtccaccggcggcaaggctccccgcaagcagctggccaccaaggccgcccgcaagtcggccccggcgaccggcggcgtgaagaagccccacaggttccgccccggcaccgtcgcgctccgtgagatccgcaagtaccagaagagcacggagctcctgatctggaagctgccgttccagcggctggtgcgcgagatcgcgcaggacttcaagaccgacctccggttccagtcctcggcggtggcggcgctgcaggaggccgctgaggcgtacctggtgggtctgttcgaggacaccaacctgtgcgccatccacgccaagcgtgtgaccatcatgcccaaggacattcagctggctaggaggatccgtggcgagagggcttaggttctctgctgctacagagaatagctctggtgtgcatctgttcgatgcggctgctttgtgatgttggtgcttaacgtctgccagtgttttgaaccctgaaatagttagtgttcgttcgtagtgctaggtggtgctgcagtgttttctagtgtgttttaggatttaatcgtcttctactatttgtctgaaacggctggttttcatccatccacctgatgggtctgcatctaggcttatctgaaccttaaattgatatgtacaaagcaaagttgtgaacttttag

SEQ ID NO: 38384 - DNA, 656 bp, Setaria italica
  Peptide Sequence Number=SeqID_104358
gctctctcccaaaaccccctcgtttaattcctcccccttcaccaccctcagcaccttcccactccaatcctcgaacaccgcctcgagttcgccaccatccacatcgccctccccgagggggaccacctcaacggcgccgagcgcgcgcagccaccgcgagaagttcctagaggcggcgttgaaggtctccccatagacccgggacccgaccccgaagacggcgaagcgaagaccggatagcaggagcgcccccgcgcggaagtcggcggtcgactcctcgagccagcgagctaggaaggccgcggagggtggcggcgcgccaccgtcgtgggtggggacgacaaggaggaggagcgggacggaggggaggtcgtcgggttcgaaggaggaagcgtcagtggcgaggatgggaacgccggcgttggcggtcagtcggtcggagaggcgcgtggcgagggtcttggaggtcccggtgacggaggcgtagaggagggtcggggtggtggtgcgggcggggccgctggcgggggaaggtttgcggcggaggcggatagatttgtagaggaagaatagcgaggaagaggagaggaggacgaggagggcgaggtgggaggtggcggaggcggtggtacgaccgtacgggaaagggaaggaca

SEQ ID NO: 38385 - DNA, 543 bp, Setaria italica
  Peptide Sequence Number=SeqID_104359
cgccgccgagttccagcccccaaactcagccgaggagaaaagcgaagggaggaggaaggaagtcgccgagaagaggagagatggcccgtacgaagcagaccgcccgcaagtccaccggagggaaggcccccgcaagcagctcgccaccaaggcggcgaggaagtctgcgccgacgaccggcggcgtgaagaagcccaccgctacaggcctggtacggtggcgctccgggagatccgcaagtaccagaagagcacggagctcctgatccgcaagctcccgttccagcgccttgtccgcgagatcgcgcaggacttcaagacggacctccggttccagagccacgcggtcctggcgctccaggaggcggccgaggcctacctcgtcggcctcttcgaggacaccaacctctgcgccatccacgccaagcgcgtcaccatcatgcccaaggacattccagtcttcgtcccgtccgcatccgcggcgagcgcgcgtaagcagccgcccccgccgccgtttccatcagtcaggagggaggggaggagt

SEQ ID NO: 38386 - DNA, 628 bp, Setaria italica
  Peptide Sequence Number=SeqID_104360
caaatccccagatcaccgtcgcctccggcctcttccaccccaatcccccggcgatggcccgcacgaagcagacggcgcgcaagtccaccggcggcaaggccccgcggaagcagctggcgacgaaggcggcgcggaagtcggccccggcgacgggcggcgtgaagaagccccaccgcttccgcccgggcaccgtcgcgctccgtgagatccgcaagtaccagaagagcacggagctgctgatccggaagctccccttccagcggctggtgcgggagatcgcgcaggacttcaagaccgacctccggttccagtcctcggccgtcgccgcgctgcaggaggccgcggaggcctacctcgtggggctcttcgaggacaccaacctctgcgccatccacgccaagcgcgtcaccatcatgcccaaggacatccagctcgcgcgccgcatccgcggggagcgcgcctaggcgccggatcttcgatgagattatctagtcgctagctagtactagttgtggaaggaacggtgtagtttgtcagtgggaagaatgatgtaatttgcatccagtgcctgtcgactgctgttataatctctggttgccatgaatggaaatcgtccatgtttcatgct

SEQ ID NO: 38387 - DNA, 788 bp, Setaria italica
  Peptide Sequence Number=SeqID_104361
caaatctcccgtctccatttcaaacgcccgcccaacctctccgcctccgattccccagctccccaccggacccaccccaatcccctcggcgatggcccgcacgaagcagacggcgcgcaagtccaccggcggcaaggcgccgcggaagcagctggcgacgaaggcggcgcgcaagtcggccccggcgacgggcggcgtgaagaagccccaccgcttccgcccgggcaccgtcgcgctccgtgagatccgcaagtaccagaagagcacggagctgctgatccggaagctccccttccagcgcctcgtccgggagatcgcgcaggactttaagacggacctccggttccagtcctcggccgtcgccgccctgcaggaggccgcggaggcctaccttgtcgggctcttcgaggacaccaacctctgcgccatccacgccaagcgcgtcaccatcatgcccaaggacatccagctcgcccgccgcatccgcggggagcgcgcctaggcgtttcgcttcccgcgcttggttgctgctactaggtgtttaggctgctgtcgtcgttcttctaggcgttgcgttgttattgggttcctgcaatgtgctggtgctatcgatgaattatgaatttatgactagcagttgtcaagtcgagagaaatgcagtggaagtttgtgatgctctgctgaattgctagtacagatttctttgttaggctctctgaatctgttcttgaaatgacccatgtgatggattgtgacttatttgtgacttaaaaaaaaacctaaaaaag

SEQ ID NO: 38388 - DNA, 793 bp, Setaria italica
  Peptide Sequence Number=SeqID_104362
ggcaaaaaaaagtaagcgacacgaatactccgtccctctttctgtcgctgcagatttttggggggaaaaggggaatccggcgaagcgcaagtcgagagatggcgcgtaccaagcagactgctcgcaagtccacaggaggaaaggctcctaggaagcaactcgctacaaaggcagcccgtaagtcggcacctacaactggaggagtcaagaagcctcaccgttaccgcccagggactgttgctcttcgtgagatccgcaagtaccagaagagcactgagttgctgataaggaagctgccattccagaggcttgtcagggagattgctcaggatttcaagaccgatctgcgcttccagagccatgccgtgcttgctctgcaggaggcagcagaggcctacctggtgggtctcttcgaggacaccaacctgtgcgccatccacgccaagcgcgtcaccatcatgcccaaggacattcagttggcaaggaggatccgtggcgagagagcttagtctgctgatgggtcttcgttgtgtgctcgttagcctttgtgaaaagatgatatagtaaccactggtcagtttgactgaagccgtagtagcttactagcatgtgtcagttcttcacgtgtctggagtctggacagagtaagtattcgtgtcatttgaactgatggtctggtgtcgtggtatttcatccgccagctgatggatgtgtatcctggtctaagtaactatggttgtctgaacagtcagttattttcgtctcatggtatgtttgccatttactaaaaaaa

SEQ ID NO: 38389 - DNA, 803 bp, Setaria italica
  Peptide Sequence Number=SeqID_104363
caattcgcattccaatttcccatccccccaaatcctccaatctccccgcgccgccgctcgatcccatcctcctcgccccgctccgatggcccgcaccaagcagacggccaggaagtccaccggcggcaaggccccgaggaagcagctggccaccaaggccgctcgcaagtctgctccggccaccggcggcgtgaagaagccccaccgcttccgccccggcaccgtcgcgctccgggagatccgcaagtaccagaagagcacggagctgctcatccgcaagctccccttccagcggctggtgcgggagatcgcgcaggacttcaagaccgacctccgcttccagtcgtccgccgtggcggcgctgcaggaggccgcggaggcctacctggtggggctcttcgaggacaccaacctctgcgccatccacgccaagagggtcaccatcatgcccaaggacatccagctcgcccgccgcatcaggggcgagagggcgtgagcgcgcgtgctgctagtgctgctgtgtcgtggtgttctttctctgttcagtagggctggcactagatggatgaattctgtgctgctgtgcaatcctttagtaatcttatggatgtattggtctcactgcaatggaatatgatgactggtttctgaaatttctgaatggcttcgccctttctggatttcctgtttgttatgcgccatctatttgtagcagactggaaagaagcaaccaggagttgatttcagcatttgatatgtccccccaggattgatctgtttaaataaaaaaaaaaaaaaaaaaa

SEQ ID NO: 38390 - DNA, 707 bp, Setaria italica
  Peptide Sequence Number=SeqID_104364
gcgcgtccggtttccagtcccccaaactcctccaatctccccgccgccgccgtgtaatcccagcctcctcgccccgctccgatggcccgcaccaagcagacggcgcgcaagtccaccggcggcaaggctccccgcaaggcagctggccaccaaggccgcccgcaagtcggccccggcgaccggcggcgtgaagaagccccacaggttccgccccggcaccgtcgcgctccgtgagatccgcaagtaccagaagagcacggagctcctgatccggaagctgccgttccagcggctggtgcgcgagatcgcgcaggacttcaagaccgacctccggttccagtcctcggcggtggcggcgctgcaggaggccgctgaggcgtacctggtgggtctgttcgaggacaccaacctgtgcgccatccacgccaagcgcgtcaccatcatgcccaaggacatccagctcgcccgccgcatcaggggcgagagggcctgagcgatgctcgtcgtcagtgttcttttgatttgttggtctgtagtgctagcctgctctgctagaactgggttgggaatcttgtaatgatctgtatgttggcctcgcctcagtggaatatgatccgtgtctcctgaattccttttgtacttgcaacgtttgctgtctgatctgttctcaagcatgcaatgtagaaggaaacaactcgctgctgtta

SEQ ID NO: 38391 - DNA, 757 bp, Setaria italica
  Peptide Sequence Number=SeqID_104365
aatcaaatcctcctccaaatcccccgccctcttctcccctcgccgccggctcgccgtcctccgccacccaccaaaagcccgcgatggcccgcacgaagcagacggcgcgcaagtcgacgggcggcaaggccccgaggaagcagctggcgaccaaggcggcgcgcaagtcggccccggccaccggcggcgtgaagaagccccaccgcttccgccccggcaccgtcgcgctccgggagatccgcaagtaccagaagagcacggagttgctcatccgcaagctccccttccagcgcctcgtccgggagatcgcgcaggacttcaagaccgacctccgcttccagtcctccgccgtcgccgcgctgcaggaggccgccgaggcctacctcgtcgggctcttcgaggacaccaacctctgcgccatccacgccaagcgcgtcaccatcatgcccaaggacatccagctcgcgcgccgcatcaggggcgagagggcctgagcgacgcgatctgcccccatggtcgtcgccgctgttgcttccttccttttggtgtctgcttgtagttgtaggatctgtgtttctcttgggttcctcctggtcgcttgttattagtatcgatatggttgtgtcagtagtgctgggagctgttttcggtcgcttggtaatcttcttgtttatcttgcactgatgatgctgctgctgtaatttgatatgttatcttaatggaaatgaaatgtgcttctcaaatacaaaaaaaaaaa

SEQ ID NO: 38392 - DNA, 611 bp, Setaria italica
  misc_feature (552)..(552): n is a, c, g, or t
  Peptide Sequence Number=SeqID_104366
tttccgcacccgccgcttggtcgccgccgagttccagcccccaaatcagccgaggagaaaagcgaagggaggaggaaggaagtcgccgagaagaggagagatggcccgtacgaagcagaccgcccgcaagtccaccggagggaacggccccccgcaagcagctcgccaccaaggcggcgaggaagtctgcgccgacgaccggcggcgtgaagaagccccaccgctacaggccctggtacggtggcgctccggggagatccgcaagtaccagaagagcacggagctcctgatccgcaagctcccgttcagcgccttgtccgcgagatcgcgcaggacttcaagacggacctccggttccagagccacgcggtcctggcgctccaggaggcggccgaggcctacctcgtcggcctcttcgaggacaccaacctctgcgccatccacgccaagcgcgtcaccatcatgcccaaggacatccagctcgcccgccgcatccgcggcgagcgcgcgtaagcagccgcccgcaagtccaccggagggaaggccccccgnaagcagctcgccaccaaggcggcgaggaagtctgcgccgacgaccggcggcgtgaagag

SEQ ID NO: 38393 - DNA, 696 bp, Setaria italica
  Peptide Sequence Number=SeqID_104367
tctaatttgtcctaaaattccttcctgcaacctcgcgccctccacttcccaaccctcccgcctccgatggcccgcacgaagcagacggcgaggaagtccaccggcggcaaggcgccccgcaaggcagctggcgaccaaggcggcccgcaagtcggccccggcgaccggcggagtgaagaagccccaccgcttccgccccggcaccgtcgcgctccgtgagatccgcaagtaccagaagagcacggagctgctgatacgcaagctccccttccagcggctggtgcgggagattgcgcaggacttcaagaccgatctccgcttccagagctccgccgtcgccgcgctgcaggaggccgccgaggcgtacctcgtcgggctcttcgaggacaccaacctctgcgccatacacgccaagcgcgtcaccatcatgcccaaggacatccagctcgcgcgccgcatccgtggcgagagggcctagagggcgtggttcgccgtcttttgtggtgcctgcctgatcgggggaagtgtagagatgtgttcctaagtcacttagcctgtgttatgtcgttgtgaggtagaagttttatttctcgtgatgtggttctgtcctggtgatgtagcgtctgatgtaacctctcattatcatcagcaatggaaacttaattatctgatattggatctgtgctctccaaaaaa

SEQ ID NO: 38394 - DNA, 769 bp, Setaria italica
  Peptide Sequence Number=SeqID_104368
acaaattacctacaagaagcaatcactattagaatccactactcgcgaagcaactaccccgatggcccgcacgaagcagacggcgaggaagtccaccggcggcaaggcgccgaggaagcagctggcgacgaaggcggcgcgcaagtcggccccggcgaccggcggtgtgaagaagccccaccgcttccgccccggcaccgtcgcgctccgggagatccgcaagtatcagaagagcacggagctgctgatccgcaagctgccgttccagcgcctggtgcgggagatcgcgcaggacttcaagaccgacctccgcttccagagctccgccgtcgccgcgctgcaggaggcggcagaggcctacctcgtcgggctcttcgaggacaccaacctctgcgccatccacgccaagcgcgtcaccatcatgcccaaggacatccagctcgcccgccgcatccgtggtgagagggcctaggcgtcgtcgtcgtggaggtggaagttgtagtactagtagctgctggcatcagtgtccaatcagaaggtgtagagatgtggtgggttccttagaaaagtctggtcggatcatggagtagttggtcctctgctgtaatttatcgcatcgtaactggaatttttgtttagatccgtcctcgttctctgccctttgaaatattttataatatttgtcgatgcatatggagggatttttttccagttgccggttggcgattttgtacgtgtactgaattgttgatgcgtattcgctctaacc

SEQ ID NO: 38395 - DNA, 938 bp, Setaria italica
  Peptide Sequence Number=SeqID_104369
acttaaatctacaaggttgggggaaaaaagtctcgccggtcgcaaaccactctccgcggatttgggatttgggcggcgctcgaggtaaaccagaccttagtgacacatggctcgtactaagcaaactgctcgcaagtccactggagggaaggctcccaggaagcaactagccaccaaggctgcccgtaagtctgcgcccacaactggtggagtgaagaagcctcaccgttaccgccctgggactgttgctcttcgtgaaatccgcaagtaccagaagagcactgagctgctcataaggaagcttccattccagaggcttgtcagggagattgcccaggattttaagactgatctgcgtttccagagccatgcggtgcttgccctgcaggaggccgcggaagcatacctggtgggtctgttcgaggacaccaacctgtgcgccatccacgccaagcgtgtgaccatcatgcccaaggacattcagctggctaggaggatccgtggcgagagggcttaggttctctgctgctacagagaatagctctggtgtgcatctgttcgatgcggctgcttttgtgatgttggtgcttaacgtctgccagtgttttgaaccctgaaatagttagtgttcgttcgtagtgctaggtggtgctgcagtgttttctagtgtgttttaggatttaatcgtcttctactatttgtcactgtaccgcatgagcagaaagcaacatatccacctccacaaggtgatgtaacaatggaaaccgttgtcaaagctcgtaatggttctgttctaggaaagggatcaatactcaaaatgtacttctttcctggacagaaaaggtcaagcagcgtgaatttccggggtgcaccacatgtttttaaggtagatggataccctgtgtatagcatggcaacaccaacactagtgtcgactt

SEQ ID NO: 38396 - DNA, 4077 bp, Setaria italica
  Peptide Sequence Number=SeqID_104370
gccagaacaagcgactctccccgcaaatcgatggcgcgcccaattaccgacaggctggatcattgcgtgttcatggtgttgcaatgccgacaatggaagggatcgctaatgtgctaaatcatattggagcaaaaaagaaaggaaagcaaacccggattctatggcatagtcttcgggaggaaccggttatctacatcaatggtcggccctttgtcttgcgggatgttgaaaagcccttctcaaatctggaatacacgggaattaaccgagagagagtagagcaaatggagtttcgccttaaggaagatattcttcaggaagcttcaagatatgggaataagatacttgtcaccgatgagctgccaagtggtcagatggtagaccagtgggaatcagtggtatctgatacagtgaaaactccacttgaggtctatgaggagttgcaacatcaagggtaccttgttgactacgaacgtgttccaattactgatgaaaaagcaccaaaggaaggggattttgacaacttggtacgtcgaatctcccaagttgatttagaaacagaaattgtgtttaactgccaaatggggaggggacggacaactactggaatggtcatagctacattggtttacctaaaccgaataggagcttcaggtatcccgaggacagggtcgattgggaaggtattctatgctggaaatgatgtagatgactatatgcctagctcagaagaagcaatactcagaggagaatatgctgtcatcaggagcttagtccgagttcttgaaggtggtgttgaaggcaaaaggcaagttgacaaagttattgacaaatgtgactctatgcagaacctaagagaagctattgctacctaccgcaatagcattcttcggcagtctgatgagatgaaacgggaggcatcactttccttctttgtggagtacttggaacgttattacttcctgatatgttttgctgtctatgtgcattcagtgagctctgctcaccaaacaacattttcagtagaagttagtttttctgattggatgagagcaaggcctgaactgtacagcattcttcgaaggctactgaggagagatccaatgggtgctcttggttattcaagttcaaaaccccctcttacaaaaattgttgagtctgctgatgggcgtccacaagatatggatgtcgttgctgccatgaggaatggagaagttcttgggcgtcaaactgttttaaaaagtgatcactgcccaggttgtcacaaccttaatttgcctgaaagggtagagggtgcgccaaattttcgggaaatccctggatttccagtctatggtgttgcaaatcctacggttgatggtattcgagctgttattcagcgtatcagtacaagcaaaggagggcgaccaatactgtggcataatatgagagaagaaccagttatctacataaatggaaaaccatttgtgctacgtgaggtggaaagaccttgcaagaatatgttggagtacacggggatagatcgtgaaagggtggaacgcatggaagctcggctgaaggaggacattttacgggaggcggaacggtatggtggagcaataatggttattcatgaaactgacaatggtgagatctttgacacatgggaaaatgtggataatgaagctgttctgactccattggaggtatacaaacacttggagtgtgaaggccttcagataaaatatgcacgtgtacccattactgatggtaaagctcccaaaagttcagactttgacacgatagccttgaatgttgcttctgctagcaaggacactgcttttgtattcaattgccagatgggcaggggcagaacaactactggaactgtgattgcttgcctgctgaaacttcgaattgatcatggcaggcctattagaattccatcatgtcaaaataaccatgaagatgccaatgatgctgcttactcaactggagaagatacagcagactacaatgggcacttgagttcagaatcttggaaaactcgcactttgacaaagctaaattctggatttggaattaaagacatccttctgctgcgaaaaattactagattatttgataatggaattgagtgtagacagactttggatactgttattgatagatgttcagctttgcagaatattcgccaagctgttctgaagtatacaaaagtaattaatcaacaacatgtggagcctagagttaggagggttgcattgaatcgtggtgctgaatatttggagagatacctcaagttaattgcattctcggcataccttggtagtgaagcatttgatggtttctgtgggcaaggagaagtgaagatctcatttaaaggctggctgcaacagagaccagagatccaaaccatgaaatggagcgtaagactgcgacctggccgttttttcactgtaccgcatgagcagaaagcaacatatccacctccacaaggtgatgtaacaatggaaaccgttgtcaaagctcgtaatggttctgttctaggaaagggatcaatactcaaaatgtacttctttcctggacagaaaaggtcaagcagcgtgaatttccggggtgcaccacatgtttttaaggtagatggataccctgtgtatagcatggcaacaccaactattgatggagctagtgatgttctgtcatatctgggctctaaagacacaaccggaagaagcattgcccagaaggtggtcgtcaccgatcttagggaagaagtggttgtttacatcaagggcacaccatttgttttgagagaactggatcaacctgttgatactctgaagcatgttggcattagtggtccaatggtagagagcatagagacaaggctaaaggaggatatacttgctgaagtcaaacaactaggtggccggttacttctccatcaagaagaatttaatgcggacacgaatcaatgtaatgtggtaggttattgggaacgcatagatctggaggacgtgatgacaccagctgaagtgtacggcacattgagaggcaagggctatgatatcaactataaaagaatacctctcaccagggaaagagaagcattagctgctgatgtagatgctatacaatcattaatcgatgaatctgctaggtactatctctttatttcacacactggatatggtggtgttgcttatgcaatggccattacctgcctgacactgggtgcagatgcaaagtttgtcatggaagaaacagcagaaacacactttgtatcaacttctcttacaaaaaatgtgtccatcaaaacatccactgacatagcacttaggcaggttgactaccgtgacatattaaaccttattagagtgttggtacatgggcccaagagcaaagaagaggttgatgcagttattgacaggtgttctggtgctggtaatttgcgagaggatattctgcaatacaggaaagcactgcaagatttttcgcatgacgatgatgatgacgatgaggagctctcttatctcactgatatgggtacaaaagctttgaggcgctacttctttctgatcaccttcaggtcctacctctactgtgcaacgccacgtgaagcaacgtttagatcatggatgaaggctaggcctgagcttgggcacctttgcgataatttaaagctggataaatagataatcttcagggacgtgattatgtagttaattgtggctcttccttgggcaaactcacctcgagttttagaaagggaaggagacagaatggctagctagagaggaagctgtggtcatgggagttcgggagaaagaaagcagcttaggctgggcattgtactgtacttgtcggtgttaattgacaccagcaagcatgtatatattgtcaagcttattgtaggtcacatattagaacttttcagtttagtattttcctccccttttttctttttaccgttgtatttagttcattctcatgtatgtatatcatatgtgtgcttcttggacagctttgatttatgagttttctgggcatcgatatatggccagtgccctttttataaattatattgcgttaaaa

SEQ ID NO: 38397 - DNA, 962 bp, Setaria italica
  misc_feature (879)..(879): n is a, c, g, or t
  misc_feature (897)..(897): n is a, c, g, or t
  misc_feature (913)..(913): n is a, c, g, or t
  misc_feature (928)..(928): n is a, c, g, or t
  misc_feature (950)..(950): n is a, c, g, or t
  misc_feature (958)..(958): n is a, c, g, or t
  Peptide Sequence Number=SeqID_104371
tcggtcggagaggcgcgtggcgagggtcttggaggtcccggtgacggaggcgtagaggagggtcggggtggtggtgcgggcggggccgctggcgggggaaggtttgcggcggaggcggatagatttgtagaggagaaaagcgaagggaggaggaaggaagtcgccgagaagaggagagatggcccgtacgaagcagaccgcccgcaagtccaccggagggaaggcccccccgccaagcagctcgccaccaaggcggcgaggaagtctgcgccgacgaccggcggcgtgaagaagccccaccgctacaggcctggtacggtggcgctccgggagatccgcaagtaccagaagagcacggagctcctgatccgcaagctcccgttccagcgccttgtccgcgagatcgcgcaggacttcaagacggacctccggttccagagccacgcggtcctggcgctccaggaggcggccgaggcctacctcgtcggcctcttcgaggacaccaacctctgcgccatccacgccaagcgcgtcaccatcatgcccaaggacatccagctcgcccgccgcatccgcggcgagcgcgcgtaagcagccgcccccgccgccgtttccatcagtcaggagggaggggaggaggtcaagatggaatcggcttgttgatctcctcctgaagcgtctagcagatctgaattagcagtattagctgtcggtttctcgatttggttggttagtgtaaaaacaggtttacaagtctacttcgtgctctgctgttattttggcttcgcttcgagatgtggagctaagcttgttaaagacctaatccgtgctgtttctagaagtgaaattacactgttcttaaaaaaaaaaaaaaaaaanaaaaaaaaaaaaaaaaanaaaaaaaaaaaaaaanaaaaaaaaaaaaaanaaaaaaaaaaaaaaaaaaaaanaaaaaaanaaaa

SEQ ID NO: 38398 - DNA, 624 bp, Setaria italica
  Peptide Sequence Number=SeqID_104372
ttcttccgtacttctagtgtgagtagttcctcgcgcggcgcctgccccgattcgaagcgtgcgaagagagcgaagccagcccggagagatggcccgtaccaagcaaactgctcgtaagtccacgggagggaaggccccccaggaagcagcttgcaactaaggctgcccgtaagtcagcacccaccactggaggagtgaagaagccccaccgctaccgccctggaactgttgccctccgtgagatccgtaagtaccagaagagcactgagctgttgatcaggaagctgcccttccagaggcttgttagggaaattgcacaggacttcaagactgatctgcgtttccagagccatgccgtacttgccctccaggaggctgctgaggcgtaccttgttggtctgtttgaggacaccaacctgtgcgccatccatgctaagcgtgtgaccatcatgcccaaggacattcagctggccaggaggatccgtggcgagagggcttaatccccctcaatcattgtgacaaaatgaagaatctcgtgtcgtagtagtggcttaatgtggtgccatgatccggacatctgagtagggcttgttctgtggaatacaataagtttctcttctgaca

SEQ ID NO: 38399 - DNA, 731 bp, Setaria italica
  Peptide Sequence Number=SeqID_104373
ttggatgttgaagatgctagtcctgaaatgttgccacaagggatggtgcatctgacactgtggaaatccgtgataattttgatgaaccagaatctgttgcatatgacggtcataataaggtagacgaggaagctgatggtgaccatgaagcttcggatgatcttgcatcaatgccaatctccgcaagtgatgatactgtggaccttctggtaaaagaaccggaggacaacgtgcctgcttccaaaggcacacgctttggtgtggatgattcagatgatgtggaggtaaacggcgatgatgaatatgaagaggaggtgaatggaaaggaaatcgagctttttgattatgcagctctagttgaacttctaagggccgcaaacatctcatcaggacaaggcaaggccaaggtttttccatttgaatcttctgagcccaagcatctgcctcccactgtaaccagcattcctaggactgacgtggcttctacagaaagagatgaccctgagaaagagatgaccgatgaggaaaagaagatatacagaaaggtggacctggtacgaatcaagtacatgcgtctcattcatagattgggttatgatactaaccatctggtaccagtgcaagtgctgtatcggcttagtcttgttgaaggtggcagtctaggtcgttgtttaggtaaattcctctgagctcgagaatgcctggaagagggctttgcagcttgaggaaga

SEQ ID NO: 38400 - DNA, 345 bp, Setaria italica
  Peptide Sequence Number=SeqID_104374
tattccgtctatccgccgccgctgccgcccgcggtacccctccgagggcgtcggcgccgaccgggccgtgccgcgcaacgtcctggagcagatcatctgggacaaggaggtcgaggtgtcccagcggaaagccaagacgccgctccagaaggtgatggagtccgccgagcgcgcgccgccgcccagggacttcgtcggggcgctggacgccgcgcgccaccgcaacggcgtccccgcgctgattgccgaggtcaagaaggcgtcgcccatcaagggcctgctcagggagcacttcaatccggtcgagatcgcgcacgcctacgagaagaacggcgccgcctgctt

SEQ ID NO: 38401 - DNA, 1270 bp, Setaria italica
  misc_feature (7)..(7): n is a, c, g, or t
  Peptide Sequence Number=SeqID_104375
ttttttntttttttttttttttttttgttttagtttgaaagcttgacatactagagcctttacaaatatggtttcttacaatcaaaatcggcagtctgtaattttgtattgtgtatgctttcaatgtgtcctacactagatcgcaacaagttcagaactacaatgcagcaactatcaactccgaatcatacaaaggatcctacacatacagatgaaacggtagcctcccgtaatctcaagtccaatcaatggcgttcttcagcaaactggatctgttcaagtggcgtaaattgtgcagcgctcctattcttagagacccggtggcccacaaagatagacaggcaaatggctaccaccgaaaggagcagagcaaagccagtcacagcatcccaagagcgattaggagcagggcggtaatatgtagcttccgacgaaggctgtatatccaaaatcaaccagttgcagctggatgagtaatgctccgaatcgctccattctttgccgtcggttgggtaccagaaggctacggccatattgctgggctggcctattgtgaactgtgcatcctgctgaaattgatccattgttcttaagggtctcgagaactcaaaataatatgtgcccttctcatcttgttttccataaggattatcatcatcaacaaagcctgaatggacggtcagtgaactgtgccaccaagccccatgccaatcgttttgagcatttgaattgttctctttagggcccagtccatcaaggtatcggcaatgtggattccatgcatagacatcaacaaggtgaccaaatctgtcgcctccatttccagcagcattatctatgtgattgccaccataaagacgtccaggaatagcatttccaatttcaaagtgcataatgtcaacctcatgacctctacaacttttacttgtgcaagaacctggcatatctttgcatcctcccatattgtagtatgtggcattatctccaacttggaacatcagagcaacagaagggcacttgctacttttccctttactgtaagcgtaagccccatcaacctgcagcatgaagaagacgttgacgccatcatgcacagccttgacggcaaccttgccgccggagtaggccttgtcttcgtctgggtcgagcgccggcagcagcgcgaactccgaggcctccacgccgtcccagtcgtcgctgtgcccgtccacggtcacctccccggggcggaactccgcgagcacgcgcgcgctgccgccggagcacgtgg

SEQ ID NO: 38402 - DNA, 649 bp, Setaria italica
  Peptide Sequence Number=SeqID_104376
atataccttttagaaacaaataagttactttatgcttgctttcctatattcaactaattcttaagacgcttttgcctactatctgtagacattgacgcgagggtctcacgaaaatagtaaatgcatgactgactaattttactggtttgcactttgtagtaaaaggggaagagaaggaaagctgataaatatgtatttttggtccatggcaaagtctacatgttccacttttagctctgcaactgcaaagcttcttatttggtaattgatattccgctgacctccttagctggcatttttggtattaattaccaatgccttcgtgtactctgactggaaaaacttactgcacattatacattccgaaaaccaggaacaaattaagaaagtaaattttgtgaactccagtgccgcattttttttaatacattgtcttgtgctgactatgttttttaaaaaaaaactccgtatgttatgaaatagcattccatctatgtgactccctgttctttatatgatgttatgatgctctctgtgcgtaatgcaaggtgcttaattatcagaatgcttcgttgtgctttatggtgttttggtttgattgtgcaataataattgaacaataataagaaacttagtagtaccctaggaa

SEQ ID NO: 38403 - DNA, 993 bp, Setaria italica
  Peptide Sequence Number=SeqID_104377
agtttttgtttttttttttgtcatccctctgcaatcaaatccttatgtagaatctcggcaatattaaatgatttacaagtaaatgaacaaaagttgcatggacttgaagtccaacaagcagaattattgatttttctccaggttcagtccctggattatttgtttgaaactaacatcacataccaagcttgaaatcttcatcatttgttgaatcaggtgcgatgaccattaagctctcacaatatgacatgtctagaagatctgctatacttgccagatgtagctgccgtgactctggatcagcactactgcaaatcgcatcagaatgtacattgcttgattgaaaactaagtgctggtgggatttccagaaagtttgttgattcctcttctttcaggggctttggagaattcgctgcaacacaagagaccttctcatccactgaactcaacggcgaaaccaatttttcctcggttagtatgcgcaaactagatccaactgttcgcccatccaccatttgcgagacattaactgaatgaggtatagacccttcgtcatgtatagaatctaggacctttttctttcagtgtacatgcatttctacaagcttctgtgagtccatgtttagatttaagtcttactggcaggtcggctgatgaaattggaatattattggatgaatcttgactgcttgttgcggtggagtccctacccactggaatcaatgaatcattggggcagggtgaaagttgctctggcgatccactacctaaatttgacttaatctttttcttcatagcaccagtccagtaattcttaattgccttccctgtcctcccaggaaagaatttagccagttcacaccatttgtttccatgaattttgtgagcacggataagatctatctcctcctgttccgaccacggcatctggttcacagcagggtcaagataatgcgtccacctgtctctacactgctttcgactacgaccg

SEQ ID NO: 38404 - DNA, 502 bp, Setaria italica
  Peptide Sequence Number=SeqID_104378
cgcgcttggcggcctgctcggcgagctccgacagctcgcggtagctgttggtgtcgccgaagaggtcggagctggtggtggcctggttgagcccgtgcagcgtcctctgcgccgtcgcccactgcgcctcccgctcgcccttgccgtagtccgtcctgttggtgaaggccgtcttgttgttgatgttgttccaggccttgccgctgagcgcgtagcggatggcgaacttgagcacgtccagcgggaagtaggtgacgatgctgaacacccagatggcggcgccccagccccagccgatgccctgcatcttgcagaactcccagttggcgtacacggcgatgcacgtcgccaccagctgcgccgccaggaaggcgatcaccagcagcgcgccgggccgctccacgaaggaccagctccgggaccgggtcacgaagatgagcgcctggctgatgatgctcacttgcaggtacagcgccgccatcagctccttgtcgttctcctt

SEQ ID NO: 38405 - DNA, 660 bp, Setaria italica
  Peptide Sequence Number=SeqID_104379
tgcgcgtggtggtgggtgtttatgtggatgacctcatcattactggagcaagtgcggtgaacattgaagctttcaaggaggatatgcggagggcgttccgcatgagtgatcttggccttctgtcattctacctggggattgaggtgaaacagggaaggagtgccatcactcttgggcaggcagcatacgcaaagaagctgcttgagaaggcgggatgaacaactgcaatccctgtcaaactccaatggaagctcgtcttcaattgtccaccaggagcacgtcaccggaggtcgatgcgacgatgtaccgcagcttggtgggcagcttgcgatatctggttcacacccggccagacatctcttttgccgtgggatatgttagtaggttcatggagaaacctcagcaggagcatctggtagcagtcaagcacttgttgcgctacattgcaggcatggtggagtatgggatcgtgtaccccaagtactcaggtagcaacaacaagcttctgggttatagtgatagtgactttgggagagatgttgatgacagaaagagcactacaagggtgatgttcttcataggtgagatgccaatttcctggcagtcacacaagcagacagcagtggctctttctacatgtgaagctgaatacatggccgt

SEQ ID NO: 38406 - DNA, 287 bp, Setaria italica
  Peptide Sequence Number=SeqID_104380
atcaatatacgtgtcatatgtaatgtgttgatcattctttaagcagaacatagtcgttaaacgacgtggtcaagatagaaaaaccttattttaatcatcacgccatgctagacgacaatgacgtggagttgacaaccacagaccagctatccacacatcacgccatgctagacgacaatgacgtggagttgacaaccacagaccagctatccacacatcaggccccgtacatagccttgtaatcctgccacagctgctgcacgtccttgcccaggatctgagcgaag

SEQ ID NO: 38407 - DNA, 335 bp, Setaria italica
  Peptide Sequence Number=SeqID_104381
actttcttttgcacggtataaacgtcaacacattacatatgacacgtatattgatcattctttaagcagaacatagtcgttaaacgacgtggtcaagatagaaaaaccttatttaatcatcacgccatgctagacgacaatgacgtggagttgacaaccacagaccagctatccacacatcaggccccgtacatagccttgtaatcctgccacagctgctgcacgtccttgcccaggatctgagcgaagagatcgtcggtgtagccgtacctcatcttggcgttgagcagcgccacgatgaggtacggctacaccgacgatctcttcgctcagat

SEQ ID NO: 38408 - DNA, 974 bp, Setaria italica
  Peptide Sequence Number=SeqID_104382
ttttttttttttgttttcttatgtccgtctaaatattgttcaggtctcaatatatactttctttttgcacggtataaacgtcaacacattacatatgacacgtatattgatcattctttaagcagaacatagtcgttaaacgacgtggtcaagatagaaaaaccttattttaatcatcacgccatgctagacgacaatgacgtggagttgacaaccacagaccagctatccacacatcaggccccgtacatagccttgtaatcctgccacagctgctgcacgtccttgcccaggatctgagcgaagagatcgtcggtgtagccgtacctcatcttggcgttgagcagcgccacgaagcccggcctgagcgtgtcgcagtagaccaggaacatcgccgtcacggagtacccctcatcccacctttctccctgcccctgctgcacccagtacgccggtctgtagcccgccgtgtacacgatgtagtcggcgatgccctcgatgaggccgcggctcgcctgcccctgcccgtcccactgccacacgtgcgtcgtctcgtggaacagcacgctggccacctcgattctgacattgccggagtagttgccgatgtactgggcgctgagggtgatgacgtcgttgctggtgaaggcgacgccgccgacgtcggcgacgacgagggcgatcgcgtcgacgggcttgcggtcggcggggttggtctggttgaaggtcatccagatgaacatggacgcttcagagatgatctgcctcgggaaatcgagaccgacttcccggtcgaaccgctggccgccgagggtgttggacgccgtgttcgtcacgtcgatcgtgacgatggcgccggccgtcgcggcaagggcaagcaggagggatgcgaccgcggcgacgcgaagcagcttcatcttgtgctggtgctgcacttctatttgttcttttactattagttagtacttaggtta

SEQ ID NO: 38409 - DNA, 497 bp, Setaria italica
  Peptide Sequence Number=SeqID_104383
gagccgtgaggcaggtccttcctccaaaggctacgataacttgcctcagagtggtgatgatggtgcaaaagcacctggatccagtagaccagaaaaagaagtacccaaaggtgatgtgaaaatcacagggaagaacactgcttttgcaccacgatctgtggttaaacctcttgggtggactaccaaggatgagaagccagatggtggtgcaggagagttgaaatcaaacgaggagttcagaaatctgttgcttaagaagtgatgttagtaggcaggttagtactttatcatctttacagtagatgtccaagctagtgtctgtacaaccaccaccccacgcacatatttctgggcccgcgatgtatgtttcagcgcttagctcttgttgcctgctttaggctttgaagaaactttatacaggatcctgcaattctgtttgtttcctcagctgcaaattttaagtacctggcacattgtactaaaaaaaaaaaaaaaaa

SEQ ID NO: 38410 - DNA, 2196 bp, Setaria italica
  misc_feature (2184)..(2196): n is a, c, g, or t
  Peptide Sequence Number=SeqID_104384
tgtatggtgtccctcaaatgtcgtatctgcttacaaaaaggccaatgatatgtacaatgaaaggaagcaatatgaggatcaactaagcaatgcaggcgcatctgaagctgacaaactgcaggagtttctgaaatatctcaaatttgaagaatcgtctggtgaccctgctcgtgttcaagttctgtacgaacgagctgtttcagagctgcctgtttcaaccgatgtatggataggatacacgagctacctggatagaaccttgaaggtgccttctgtactaagaagtgtttatcacagagccacaagaaactgtacatgggttggtgagctatgggtccattatctcttgtctttggagcgggttcgtgcttctgaagaagaactacgcaatgtatttgaacgggcagtacagtgttcttttccaaccatacaagagtatctcaatatttatctcactcgagttcatagtctaagacggaggatttcagatgggttggatttccagctgatcaggcagacattcaagaatgctgcagaatttctctcacctcaactgggaaccaaggagttactgcacttgaatgcttattgggccaaattagagcgcagtcttggcaaagatctttctgcagctcgtgtcgtttgggaaaacgctatcaaaaaaagtggctctgttttggaagtttggcagcagtacatttcaatggaggtagaaatgggacatatacatgaggcgagatcgctttataagcgctgttatagcaaaagatttgctgggtctggatcagaggacatatgtcatgcatggataagatttgaagaggagcatggcaccttggatgattatgaccttgctgtaaaaaaggtcacccctcggctaaaggagcttatggtgttcaagtctcaagaggaggctaaagtcgaggcttactctatgctcaatgataattctaatgcagatgactcttctcagaaaagaaaagcaagtaaaatgaccaataaacagcagccccctgctaagaaaaggaaagagaatccaccaaaaagtgtcaagtcatcagacgaccaagaaaagacccaaagtggacatagtggtgctgttactgctgtagaggttggagaggcatccacagaaatgaaagtggacagcaactgccgaacagggaatacaggttcaaatgaaccaaaaccatccttctacaatgacaagtgcacagtatttgtctcaaatatagacttgaaggcaactgaggatgaccttcgccggttcttctctgacattggtggtgccacagcaataagattgctgaaggacaaattcaccaaaaagtcaagggggttggcctatgtggacttttcagacaacaagcatcttgaggcagcccttcagaaaaacaagcataggttgcttggaaagaaagtgagtatcgctcgatcagatccaagcaggagtaagaagagccgtgaggcaggtccttcctccaaaggctacgataacttgcctcagagtggtgatgatggtgcaaaagcacctggatccagtagaccagaaaaagaagtacccaaaggtgatgtgaaaatcacagggaagaacactgcttttgcaccacgatctgtggttaaacctcttgggtggactaccaaggatgagaagccagatggtggtgcaggagagttgaaatcaaacgaggagttcagaaatctgttgcttaagaagtgatgttagtaggcaggcgcgtggatctccatgccccatccagcttgatctgtttagatttccagtggtttcatgattatgttagaccgacttctaccacttcaactaggaaatcgaggacaatgagcaccttggaaattcagaatcattggccaggagcaatggatatgaaatcgaggacaattagcatcttggaattgagaatcatggccatgagccatggatatttctgttaatcgagggaggttatatgccatgtagaaactagtcctttgcagggaattatgtgcggttgcgtccgagcagaaaaaccccgaccatgtaaagcaaaaacagcgatcttaagatattacgtttgtttttagtatttttggtataatgttcaaacttactgtctctctggctgctaaaaatgtttaaacttgtattcccttcgttttaaaatgtaggtcgttttgacttttctnnnnnnnnnnnnn

SEQ ID NO: 38411 - DNA, 653 bp, Setaria italica
  Peptide Sequence Number=SeqID_104385
tttttttctatcagagcaaagtagccacaatctgattacgctgaagacttatttgctaatttacggtacgtttcatacatgtgggatcacgcaagttggctaagcttatgcactagaagcatagtttagcagctaaacagcaacaaacttaacacaaataagtaggtacacaactacacaagtcgactgccactgcccctaaacgagtgaggcccagcgtttatttgtacgggacaacgactggaacactgctcagccactcttgaacgtgccagcacggtagcgcttctttagtttcttggacaagcgatacagtagcggctcgtcactctccggctcgtctccatgtccgccgccaccctcttcctcctccctccgccgttcttcttcctccctttgcctttcttcctcctcccgctgcctctgctcctcctccctccgtgcacgctcttcctcctccctcctctgcttttcctcttgctctcgcctctccctctcttcttcctttctcctctgccgctcctcttcctccttcctctccctttcctcttgctctctcttccgttcttcctcctctcgctccctcctctccttttcctcctctttcctccgttcttcctcttcccgctccctcctctccttttcctcctcgc

SEQ ID NO: 38412 - DNA, 598 bp, Setaria italica
  misc_feature (574)..(574): n is a, c, g, or t
  Peptide Sequence Number=SeqID_104386
ccgtagaactgtatacaccttatcgctttgcagcagaagcatttcgtgcaagtacggggtcacgaacacacttcggagttcacatacatgatgcgcgccaaatgaaggagtgtgttgaacgtccactgaacagcgatatatctagctaggatacacgagcagcactgaatctacagaagtttttgctgatctctgcccgatctcgtcgccttcactgcagatggtcgccctcagtcttggctatgtgcaccttctggtcgtcggcggcggccgcggcggcgcccgtgcgcaggtgcctggcgcggtacttcctcagctgctccctgacgagcttctcgtagataaaggaggcgcctttgaactgcggcagcaccagccacgccacgaacagcagcttcacagggtaccatatcggtatccagtagaggacgggttcggcgaccatctcgaggagggtgatgaaggagtagatgatccagtaggacagccactgctcgtcgtccaccttggacgggctctccatcgcgcacaccgacgcgtacagagggtacagcagggtgatgctcggcccggngacggtgtggaggtgggtgatgag

SEQ ID NO: 38413 - DNA, 508 bp, Setaria italica
  misc_feature (41)..(41): n is a, c, g, or t
  Peptide Sequence Number=SeqID_104387
cttgcgctgcaggcagtgatctacttctcggcgtcgtggtngggccctgccgcttcatcgagccggccttgaagcagatggcctccacgttcgccgacgtcgagttcatcaagatcgacgtcgacgagctcgcggtacgcctcctgcgtgcggccctgattcagttttcgtttcttctttcgcatgtgcttttcgcggcctcgtagtcaattcggcagctgcgatgtgactatgtgaggaaccagcgtgaattggcgcttgtgttgcggttggggaaagattctgatcactcgcggagtctcacttaacagttcggagactggaagatttaggaatttgttgtgattcccaccaatcatccagatgttccaatatggagtagctgtgggaaaatcgagctcggtgctgctaggctgggaatctggctgcatccttgcattagtgtaggtgaaggctactttaaaatttccttcacaaggctgcaatgacagtttacatatccagcaaa

SEQ ID NO: 38414 - DNA, 518 bp, Setaria italica
  Peptide Sequence Number=SeqID_104388
gtcgagcgtgcttggcgtcgccgtcggagccgtccgccgaggccgacgacctggactcgcgcgtggtttccctccacaagaaggcctactaggacttgcatatggcgggactcaaggagaacgcccaggccaagctggcagtgatctacttctcggcgtcgtggtgcgggccctgccgcttcatcgagccggccttgaagcagatggcctccacgttcgccgacgtcgagttcatcaagatcgacgtcgacgagctcgcggaggtcgcacgggagtggaaggtagaggcgatgccgacattcatactagtcaagcgtgggaaggaggtgagccgtgtggttggggcgaacaagggcgagctggagaggaatgtcgaaaagcaaagattgttgattagcgcttgaggcaatgacacagcttgtgagatcgtgttagtctgcctgtgataaacgtccctagggttaattaaagtttctagaaacttggatgtggatgtgtcagtgtgcctgttcggttta

SEQ ID NO: 38415 - DNA, 881 bp, Setaria italica
  Peptide Sequence Number=SeqID_104389
taaaagtaaaaaccagccggtagcagaggagaacaaaccagcaacctactccaccagcaaccagcaaaccgagcagagcaggcaagggagatgggttccttcctctcgtccttggtcacgccgcccccggcggccgacgaccccaactgcgccgtggtcgccgcgcactccaaggccacctacgacgagcagtgggcggccgccaagagcagcggcaagctgatggtgatcgacttctcggcgtcttggtgcgggccctgccgcttcatcgagccggccttcaaggagatggcctccaagtacaccgacgtcgccttcgtcaagatcgacgtcgacgagctcgcggacgtcgcaaggacatggaaggtagaggcgatgccgacatttgtcctagccaagggtgggaaggaggtgagccgtgtggttggggcgaagaaggatgagcttgagaggaagatcggcatgttcagatcgtcttcctcatactaacttaacagtgcatgcaatcccatcatagtacaggtttctggtttcactaagaattctaggggctcctgtggttcgcccaggttgaaatgccatgtcattctcctctatgaatgctgcaaaatttgtgtgaagtgctgatgaacgtgcctgggttaataaagtttctgaaacttggatgtgaatgtgtcagtctggctgttcggtttactccatatgagtcatattagtttgctgcatgggtttcagaattggaacagtgctggatgtgatgatgttgtgctggtagtatcataacatcaatgtggtggtgatttgtgagcagacatgcaacaattacttttccataagttaactgccgttctagttcggtgtccttgattttgggaaaaaaa

SEQ ID NO: 38416 - DNA, 537 bp, Setaria italica
  Peptide Sequence Number=SeqID_104390
ttacgttacgttacctttttactttttagttagttagttctttcggttagttatttcctttcagatactcccaccgtatgcaccaccgcgacatcgtcgtcgttacgcggatgttgtctcctcactacgacaacgtgctgccgccctacgcagcggggcggcgggcggcggcgctgctcgaccaccggcggtaccggccgaacgtggaggtggcgcccaactgcccgcgctgcgactcgcccaacaccaagttctgctactacaacaactacagcctcagccagcccaggtacttctgcaagggctgccgccgctactggaccaagggcggctccctccgcaacgtgcctgtcggcggtggttgccggaagaaccgccggggaaagccggtgcgggccatgccggtcgacgcggccgcgaccggtactgctggtggcgcgacggcgccgtactaccagcggtcgtcgtcgttccccggcacgctgcggccggacctgctcctggaaggcatggtcggcagcccggccggcctgtgcc

SEQ ID NO: 38417 - DNA, 407 bp, Setaria italica
  Peptide Sequence Number=SeqID_104391
cggcgccggccgcctcgatgagccagtagaagagcgccgccccgcggccgcgtcgacggtgacatacccggagtacatggagaacttgaccggcggctggcccggcaggctcgcgatgcggtctgcctccgcctccgccgtcacagctgccgtagccatgccggacgccgcgcggcaggacagcgccagtactgcaaccaggaccgcggcggccgccattggcgctcgcggcgtgtcaactggaacccgcgccgattcgagcagatcagcagagcagagcagagcacggagagtgattgaggtagtgggggagggggtggagccaaatagccaatggatggaacggaatggcagctgactagtgcttggaatcggggaagcgtgggaggcatggactggttggttgc

SEQ ID NO: 38418 - DNA, 623 bp, Setaria italica
  Peptide Sequence Number=SeqID_104392
tgaggaacataatgtcctgcaaagtgcaaacatcagagcacgcaattgaatctttatggagctagccaaaacagaattcagaacttctcccacagaagcttgtcctgcataactttctccagcgatatagaactccctgtacttgtactgtgggaatctctccaaccaattcacgagaaaagcataggcatccagtgctgtctttgcgtctcctgcggtgtacagatccagcgacgaattcgagtaggagaaccccacgccggccggcgactccaggaagagcaaaattggccgccttgttccaagaattggggttgaggtagagcgtctggccgtcgggcctgatgcggaacgggccgacctcctcggacgcgccgtagccgaccgacgagcacccgggcccgccgttgagccagaggacgagcggcgcgatgggccccgccgccggcaccgcctctacgagccagtagaagagggcgcgcccccgcgccgggttcaccgtgacgtacccagagtactgcgagaactccacgttgggcggctgccccgggagctcccggatccggtcgctctccctctcctggtcggcggtggccacggccgccgctactaccactgagacc

SEQ ID NO: 38419 - DNA, 485 bp, Setaria italica
  Peptide Sequence Number=SeqID_104393
ttctatctgatttctgaaaccgctcgaaacaatgaaacgcgatggctgtctaacatcgattattgtacaaagcaaaggcgaaacacgttcacctgaaaatgtgtcaacggatgttttacaagaagatggcttggcgcagcgccgcagcctgttcttcatcattcatcaagcgagatagcacattctaaaacgtttgaatgctatctgcaggcttgggcatgggctcatcgcgcaggaagtgctcgaagagcttcaggccaagccgtggacggtggaggggaacctcatgccccgcaccacggatcgtcaccagtgtcaagcccttgtatacttggcaccatccaccaacctctccttggtcataccaagcataccagttacttatcgttggtagaaagagcgcatcgatggagtatcttgtcccagggagggggacaacagcatcagcatcgccactgaagacccatatccttttgcctgcagcg

SEQ ID NO: 38420 - DNA, 1481 bp, Setaria italica
  Peptide Sequence Number=SeqID_104394
ttttctattctttttttctgaaaccgctcgaaacaatgaaacgcgatggctgtctaacatcgattattgtacaaagcaaaggcgaaacacgttcacctgaaaatgtgtcaacggatgttttacaagaagatggcttggcgcagcgccgcagcctgttcttcatcattcatcaagcgagatagcacattctaaaacgtttgaatgctatctgcaggcttgggcatgggctcatcgcgcaggaagtgctcgaagagcttcaggccaagccgtggacggtggaggggaacctcatgccccgcaccacggatcgtcaccagtgtcaagcccttgtatacttggcaccatccaccaacctaagcaagcaagattcacgccattagaacatgataaaagtagctttgaaagtaaattaacctgtcactgttgctgtagtagtggcactgactaacctctccttggtcataccaagcataccagttacttatcgttggtagaaagagcgcatcgatggagtatcttgtcccagggagggggacaacagcatcagcatcgccactgaagacccatatccttatgcctgccgcgatgagttcacattaagtaggaagcatggacttcggtgaatctttccagtagtcataaattggatcactgcaggctacccaggcatacggtattccagtgacattggcatgtaaagctttctgcacctcgggtaagttgtagtacttttcggagtacttttcggtgcagggatcatatcctctcggcaaccagggcgttcttccccttatttgcctgcgcttatgaagtgaagtcttcttacaagtgggcgtgtagatgctgtatgcgtcaatactcccatgctctgcttcagcaatatcattgatcttgttgcactccttagaggggtgctctgctgaatcaaattcacaggccaaccgcaacttctgataggtttcatcggagataagcccatgcgtccaccagtactcaaatgtgccaatgtagtcatggtaatcgtcaattaccgcattcccaaccatgaagcctttgaaatttaggattggcttttcaattcctttgttgttctcgtatactagctgagacagctgaggcacatagtgacctgcgtagctctctcctgtgatgtagaaatcgcgatgcttgtactgcggaaaccgctccaaccaattcaccaagaaattgtacgcatcatgagctgtcttgttgtctccggcggtgtacagatcggcggtggtgttggagtaggagtagccgacgccggccggcgagtccaggaacagcatgttggccactttgttccaggggtaggggttcctggagagcgacctgccgtcggggttgatccggaaggcgccgagctcctcggacgcgccgtagccgacggaggagcacccgggcccgccgttgaagaccaagaagtaacgaagacggacgacggaacgaccgacgggaca

SEQ ID NO: 38421 - DNA, 1737 bp, Setaria italica
  Peptide Sequence Number=SeqID_104395
ggctaattgaggaacataatgtcctgcaaagtgcaaacatcagagcacgcaattgaatctttatggagctagccgaaaacagaattcagaacttctccgatcgaaggattgtcaggaatttcgtagtgtccgttcctctggaaggaattgcatgtacgcaagaaatccgaaaggcaaagatgtgacggccgatcgacgtcgatttattgcgcaggcgaaatgcgttcaccatggcttttacaactacatggcttgacgcagcctgttttttctcctccatcaatcgagatagcacattctaaaacgtttgaatgctatctgcagccttggacatgggctcatcgcgcaggaagtgctcgaagagcttcaggccaagccgtggacggtggaggggaacctcatgccccgcaccacggatcgtcaccagtgtcaagcccttgtatacttggcaccatccaccaacctctccttggtcataccaagcataccagttacttatcgttggtagaaagagcgcatcgatggagtatcttgtcccagggagggggacaacagcatcagcatcgccactgaagacccatatccttttgcctgcagcgatgagttcacgataaataggaagcatggatctcggtgaatctttccaatatttgtaaattgggtcgctgcaggctacccaggcatatggtattccagtgacattggcatgtaaagctttctgcacctcaggtaagttgtagtactttgtggagtattgtgtggtgcagggatcatatcctctgggcaaccagggcgttcttcctcttattagcctgtgcctatgcagcgaagtcttcttacaagtaggagtatagatgctgtatgtatcaatcttcccttgctcagccgaagcaacttctaaaatcttctcacattccttcgacgggtgctcagatacttcaaactcacaggtcaaccgcaacttctcataggtttcatctgagataagcccatgcgtccacaagtactcaaatgtgccaatgtagtcatggtagtcgtcaatcaccgcatttccaaccatgaagcctttgaggttcaggacaggctttttaactcctttgttgttccggtatactagctgagacaactgaggcacatagtgacctccgtagctctctcctgtgatgtagaaatcgcgttgcttgtactgtggaaaccgctccaaccaattcaccaagaaagtgtacgcatcatgagctgtcttgttgtctccggcggtgtacagatcggcggtggtgttggagtaggagtagccgacgccggccggcgagtccaggaacagcatgttggccactttgttccaggggtaggggttcctggagagcgacctgccgtcggggttgatccggaaggcgccgagctcctcggacgcgccgtagccgacggaggagcacccgggcccgccgttgagccagagtacgagcggcgcggacgccgcgggcgcgccggccgcctcgatgagccagtagaagagcgcccgccccgcggccgcgtcgacggtgacatacccggagtacatggagaacttgaccggcggctggcccggcaggctcgcgatgcggtctgcctccgcctccgccgtcacagctgccgtagccatgccggacgccgcgcggcaggacagcgccagagaacaagactaagaaggaacaaacaaataaagtaaagaaaacctaaagaaaacgtaaaagaaacaaa

SEQ ID NO: 38422 - DNA, 601 bp, Setaria italica
  Peptide Sequence Number=SeqID_104396
tttttttttttttgtttaactttaaaacttgcagatttaacttgcacacatgttactacaagctactcctagcaccggatacaactgacactgacattaccactagacttactgccgttcaagtcaccaccggcttacagccacgcatcaagaaccctaagaaaaactacacgatcggcatgcatgtcagattcacaaagatggcccgagtccgggaagcactagcaccccgtgaagccgtgacacgacacggactgatcttatctagcaggcggtgcccgtattgatgcggcgcgccaggtgcacgaggtgccaggtgagcgacatcagcgacagcacgttgcacagggacgagtagccgttcagctgcttcagccgcttgctcagcctcaccaccctgctcttcgacatctccgggttgcccgccttcgccttcgccgtcgccgcgccgtcgacgggagtggtatgcgcagctgctgcttccgggcgggccgccctggcggcgttcgtgtccgtcgtggccacggtggccgccggcgggtcgacgatgtccgccacgtcacgtccccggccttcttccttctccaccttcatcctctcg

SEQ ID NO: 38423 - DNA, 257 bp, Setaria italica
  Peptide Sequence Number=SeqID_104397
ctggaatttttctgcgaatggctgtccaatgggttttacacaacgctttgttttaagtttttggcttgatgcaatgtcattgagataacacagtgaatgctgacacaatggtttgtaatgttcccctgaaagtgacaaaaatggtttggatacttcacctccctcttcctgagccccggtgcagggcttaaaccggccaggtggacaccctggctcctctgctcccatcttatcagtcacgcttgcacacgcaccac

SEQ ID NO: 38424 - DNA, 1109 bp, Setaria italica
  Peptide Sequence Number=SeqID_104398
taatctaccatcacgcaccatggaggcgaagctcactaccagtcttgctatcctcaccgcactactcatcatgcatcacccctctatcacagccgccgccaccattgcccaccacacaacaacgccggccaacgctagcttggccgccggtttcagcctccagctggtggtccccgaccacgacgacctagaccacaccgtccgccgcggcagcgacggcttcctgcatctgcagagcctccgcaccgacctaccgccacgcccgccatcaggcgctaacagctcctcggcggcgagcgccaccaccctacgcccagagatgacgtacaccccgctacgcctgccaaaagccttggtcatcggcgtcggcaccggcgccgggcaccaggactacctcttccaggtcgtcgacacctcgagccacctgatatggatgcagtgcatggggtgcgacccgcactccccgcagcgccaccgtctcttcgactcgaccacctcgccgacttaccacctcgtcgccggcaccgacccgttctgccggccgccctactggtccgagttcaacggggaagcatgcgctttccgcttcgacggcccgagggacatgtccgtcgagggctacttgggcaccgaccagctgacctacaacaacgcggtgcaccagaacgtccccttcggttgcgctcacaaggcccaccatttccagaacgacggcgtgttcgccggcgtcatcggcgcggcggccgtggcccgcgggctcacgcggttctcctactgcctcttccacggcggcgagacgaaccgccagggattcctccgtttcggcaccgacgtcccgcgcaacccgcggtacaggaccaccgagatcctgccggcggcggcgctcgacgccgcccatgactcgtcggggcactacgttagcctcgtcggcgtcagcctgggcgcccgcaggctcgacgggatccggccggagatgttcgcccgccgcgaggacgggcagggagggtgcgtggtcgacctcggcacgccggtgacggtgatggctcgggcggcgtacgacgtcgtcgaggaggccgtgtggtcggacctcgagcgccacggagcggagc

SEQ ID NO: 38425 - DNA, 341 bp, Setaria italica
  misc_feature (322)..(322): n is a, c, g, or t
  Peptide Sequence Number=SeqID_104399
ataagacaattactctgttagtgttagtaccctctgctctgcgtagcagatttggttggcttcatggctcccaagcggcgtagtagtggcaaggtggtcggctccgtggtgaagaccaaggtggtgcaggagaccgtggaggtcaccaccgccattgtcgccgatggtgagccggagcagcagctggctccaggggctctggccctggcaccccgcaccggggaggtctcgcgctccaaggtggtgcacgtcgagatcactactccggacagcgacaacaccaccggccgctccagtgcgaagcagcagcccaccgccaagngaggccgtggtggccggcg

SEQ ID NO: 38426 - DNA, 511 bp, Setaria italica
  Peptide Sequence Number=SeqID_104400
cctatccctgtgtgtccttggtctagttcttcttttagttttttttttgttttttttttcaaaaaaagtttagatcaagcatcgattgcattcaaccatctgatcaagcatggtttcacttatttttttcactgagattggtagcaaagcagtctgaatattgaaacgaaaacgacgacgacgttggacgtgtgacaggcggctggcgacgccggcggtcaggccgaaagctggtggagctcgattgctctcgcttctcgccatggatcacgtcttattcctctcccttgatttgcagcatcctcgtctcattcctcaggcagagcagttgactggggcgaggctgcagcgtccgggcaggctgttgatgatgcccatggtgctgcaggcgcactcgtgcgacacggcgctgagcgcgccgcagcagtcggcgctggggtccggcgcgccgggcaccaggtacgcgcggcacgccaggagccggttcagctgcggcacgcactgcctgcct

SEQ ID NO: 38427 - DNA, 1009 bp, Setaria italica
  Peptide Sequence Number=SeqID_104401
ccgccccctccaagagcagcggccccaagcggcagcaacggcagcaggtgccgcagcccgctccaccgctgagcagcgcggcggtgtcggcgtcggcggccatggtgccgctgctgctggccctgccgccggacgcgctggcggtggagggcgagttcgggatcctcgagggccggagcttcgcgctgctgcacccgctcgtcatgggcgggctcttcgcctacacgctctgggcgggatacctcggctggcagtggcgccgggtccgcaccatccaggacgagatcaacgacctcaagaagcagctcaagcccgccgccgccgccacgcccgccgcggtcggcgccgggtccggagacgcctcctcctcctccacgccgccgcccgctcccaagtcgccggtcgagatcaagatcgaggagctcaccgaggagcggaagaagctgctcaaggggtcgttccgggaccggcacttcaacgcgggctccatcctgctgggcctcggcgtgctcgagtccgtcggcggcgcgctcaacacctggttccgcaccggcaagctcttcccgggcccccacctcttcgccggcgctgccatcacggtgctgtgggcgggggccgccgcgctcgtcccggcgatgcagaagggggacgagacggccaggagcctgcacatcgcgctcaacacgatcaacgtcctgctcttcatctggcagatccccacggggctcgagatcgtcggcaaggtcttcgagttcactacctggccatgatgattgctgacaaggccgggcatccctctgcttccgcactctgcatgtctcttctcttccatccagttttaggttgttgacttgatgatagccgtgtgtgttcagttcgttctgtctgtctgcaggggtgttttcttgacctctgtcgatgttcataaggttgtgatgtgaggctgtcaaattccaagttttttttatgcacgagtgagagctcgttttgaagcaacaaaaaaaaaaaa

SEQ ID NO: 38428 - DNA, 336 bp, Setaria italica
  Peptide Sequence Number=SeqID_104402
ttcccccggcggtggcagggggaaaaggagggggcggcgcacagaggccagtggctcacgtaggggcaggtaggcggcaaggaggggaacgaccagtgggggctttcacaagctgccagaccggcggagggagctcaccgcggaggtgcctgcccgacgagggaggacggctgggaagtagcgaacttgatgcgcgagctcgagaaggtgctatggctgtaaggaatcgagcagtggctcagcaacggcggtggatttctccagcaaacaaagacggacgaacttggagatggtggcgagaagtttctgattatttgccgcggaggcacggcgagg

SEQ ID NO: 38429 - DNA, 1316 bp, Setaria italica
  Peptide Sequence Number=SeqID_104403
tttttccttagcagacacaaaggacaacatctgctgaataagtttcgtaggttcccaccccacgaatccagtactatgtatggatttcagtctagaaattcagtctagaaacaaactcataaccacagttcttttgtcctcagcaagcttaaaagaacttgcatatatatgggcgtttagttattctgtgactcttaagctacatgtccattacatattcatggtttcaaaagccaaggatgagttgccacaggcagtatgcctggcgatgctgctgtgccctctccacttctcttcacctaaccaactttgcgctgcctccaccttgttcgctgaagttcatggcggggcggaagccaactgacggaaagcaggtgcggtcctggttggtccttgaagcacttgcggtgtcggaagaagcaggtgctgaaggtgtggtagggttgggatcactctgggagcttatggtgttgccaatgacctttgagcagctcgaaccacctgatgcctgatgctgctggttctgctcctggagctgctttgtgttgaggaaccgtcctcctgacccacgagctcgcttcatggcgtggcggtgtcgagactcgtgaaggtatggcttccggcctttcaccagcttattctgggcctccaatttagcacgtgtctgtctcctcctaaggattgcatggtattgctttgcattaacatatattggctcttctgctgcaggttcgacaggcaacacaactggagcatttgttgtttgattttgctggggatggacaacagcatgtggaggatatcctgtcaaaaccccaccatagtaagcatcagcattataaggaacacaggcaaaagatgcattgtaatctagttttggtggcgaaaaggcagatccttgcttccccatggacaatactggcttcactgtgaactgattatgcttcccatgaccttcatcattgtcagattgaattgaggtgtgttcgtttagacttgtctcactcactgccgacgcttcttggtgagactggccagaccctgatgacgaatccctgtcgtgaattttatgacctaaatgcttcatctcatggtcatttcctgacaagacgccatggttggacttagacatgggatggacgggatggtccttcacagaaatatgatgaatgaaacctgcattaactttgattatttgctctgtactcgttcactcaaatatgcttatgcatagcgacttgaagtgtctctctctacctcctctccccttcgagtttctctctctacctcctccggtcccttgagccgtagagaga

SEQ ID NO: 38430 - DNA, 275 bp, Setaria italica
  Peptide Sequence Number=SeqID_104404
cacactctccaagctcgactaactaagcaggaagctcggacacatgaccaagaagctcacctccgccatggccgggaagcaggattttattcgcaaggcgcaattcgacgatcagcgtggaggcggcgagagcgcggcggcggggttcgggggcaggttggtctcccacgagcaggaggacgccatcatcgtcgcggcgctgcggcacgtggtgtccgggtacagcacgccgccgccggaggtcgtcacggtggcgggcggcgaggcgtgcgggg

SEQ ID NO: 38431 - DNA, 996 bp, Setaria italica
  Peptide Sequence Number=SeqID_104405
gtaagcccaatgagtccttcaatgccataaatacagatcacagacacatgtcaccagtgcacaaggaataaaattgagattggacaagtcaatcacccagaatttttaagaaataagaaaagagaaaagaccaatgaatatcattagttggaattgatttttccacagaactttgccaccagcgaacttcatgcgtccccaagaagaaattaggatagaacttttttctacggcgcatggtgcactagggaggagcaaggacatcttatatgaacctcatcattcagtgcgtctgtcctaacagtttatatggtcaatcaacacatgaagattctcccaccctcctctgctcctaaattttgaagaatatgtttgtgaacccatgatatattatcatgagctacaaaatttaaattggcaaacttataaagttcacaactttataattttcgatatgtatatagctgcataattaggaattccagtatcaagtccatcatcccccgcccgcccttaaggaagtccatcatgttgcccaagcataacttcctgttctggtgtatcagtttcagcctttggggctttcatcccttttcagcttattgccaacagtactaacaattagctatcatactttgttcaaatagatctaagagactaagacatcaaggtaatgtacaactcagcagaagaccttacttgccacaggccaagataccagcacaagttatatatatgaaaagaatgttggcattttgaaacttcactttggcaaaagttcatgtcacttctgcaaattaaaactatatattctttactacatctttggtcaagattagatgatttgcctgaacacattctaagacatcaatttccttactggggtacattgagtcatcgataagtaagggaagctggtaaggaccctgaagttattggaacaaagaacagagatagtggctaaggtctctcgtgacaagtgaaaatgctggatgg

SEQ ID NO: 38432 - DNA, 811 bp, Setaria italica
  Peptide Sequence Number=SeqID_104406
gaagtgaaaatgacaaaattgctccatgtccgcatgaaactaaactggctctgatcagaaataggttatgagatttaactattgcacggacagaacagagcaccatcaaagacaatacatgtatgtacaaactaagagagtgtaagatgtcccaacacgaacagcacagatgttgctgcattgcttctctgaaagcaacagcatcctgtcgtttgctaatcttcttcgaaatacttctcctctgcatcgtagttggcttccctggaccaatggtcatccagcatctcatcattatcgatctgagaatagtccatatgctcagtgtcttcaccagtcaggaacttttgttgcatcacatatgtgaattgttccagctgatcctgcatttcttcacaagacaacgtttggttgaaagtccctgcagccgaacctctaccattgctggagtccatgggggcagactcattggcaacaacctcagtcgcaatgggcttcacgacctctgtctccttttccttcatgctctgctcttcttcgtcctcctcttcctcttcttcttcctcttcctcctcttcctcctgctcctgcatcgcctcctcagggccaccaccgacccattcgctgggatcaacccctctcctaatctgctccccgcggatcttctccacgatgaccgcctcctccgccctgcgcatcagcgtctcggaccacctctccccgggccgcgccatggccctgccgagcgggtcctggaacctcccgaggtactcgtggtgcaggtagggctcccgctcccgcatggcctcctcga

SEQ ID NO: 38433 - DNA, 386 bp, Setaria italica
  Peptide Sequence Number=SeqID_104407
gggcacggtgctggcgctgatcgtggcgacgccgctgctggtgatcttcagccccgtgctggtgccggcggccatcacgttggcgctgctcacggcgggcttcgtgtcgtcgggagggttcggcgcggcggcggtcggcgtgctggcgtggatgtaccgccacctgcagacggcgccggatcagcagcagctctccagcaaggactgggcgcaccaccgcatcgagcaggcgcgcgcgcactgatacacgccagtttagttgcatgtaccagcaataatataataatgcataccagtccagttcaagtgctttactaggtggtgatgtaatcttgtcagcaataattattaataattagtacctaaaaactacaaacaaaaaaaaa

SEQ ID NO: 38434 - DNA, 710 bp, Setaria italica
  misc_feature (481)..(481): n is a, c, g, or t
  Peptide Sequence Number=SeqID_104408
aacagccatacacaaatctttccttgttgccgttttttgtctttgcaagcaccttgcagcataatctcatggatcaagagtgattatggccaatggactgcttttcttgctctgttggtgcgcttgttcttcttcattccaggtagagtaacaaacaccatttgtaaaacattcatggtgaagtttctttcttgtcatgctaataaataagttcacacattgtttgtcaggtaatgcaacatttacagttcttttacgggaacaactcagaccttatggccaacatgaacagattccattacttttgcaagtattcatacaaagttgaagcagaagttataggaggaatgaggacacaattagatcatagttctattggaccaaattagaagacagttcacatcttgtagtgtagactctgaatcaacttatgttataaaagtctacagttgcttatacctacatctgactatcataggtnaactggagcttccgctgtcaacaatgctgcttgtgagtgttgctccttaccaattgatgaatctgaggggaactcaaggcggtgcagtgctgtcattggccatagctgggtatctcgcatttcagcacttcaccagggtgggaggtctaggcaagcattgagcagggatcggttattgcgaccttggccattatctgcatcacagtcatcccttaatgctgctattctg

SEQ ID NO: 38435 - DNA, 694 bp, Setaria italica
  Peptide Sequence Number=SeqID_104409
aggaccgccgtgtgccactcgtcggcgcacctgagcgcgcggacgatgcagtggatctccgccggggccagcgcagtgctattgcttgctaaaggaacagccatacacaaatctttccttgtgccgttttttgctttgcaagcaccttgcagcataatctcatggatcaagagtgattatggccaatggactgcttttcttgctctgttggtgcgcttgttcttcttcattccaggtgaactggagcttccgctgtcaacaatgctgcttgtgagtgttgctccttaccaattgatgaatctgaggggaactcaaggcggtgcagtgctgtcattggccatagctgggtatctcgcatttcagcacttcaccagggtgggaggtctaggcaaagcatttgagcagggatcggttattgcgaccttggccattatctgcatcacagtcatccccttaatgctgctattctgatctggactaggttggcaagagtttgcccctcattgcgcatggaatgatggataaataaaaaacttgtaatgcaacatcctttcagtcttcctagttcctttcccccaaaaaagactgatctgttatatagtccgaaaagtatgtactgatatagcctgattgtttggcctggtaatgttgcaatccaaaagattgcatgatactccgtaaaaaaaaaaaaaaa

SEQ ID NO: 38436 - DNA, 327 bp, Setaria italica
  Peptide Sequence Number=SeqID_104410
catgcacatagaaaaatgatccacctctaaatgcacacctacagtttcaaggcaaaatggaaagatttttcaggggcgttttgaaaattgtgccatccgtatcatatgagtggcacacaatttgccattctggcccaccttcagtgatatcagatgatcacacgtgtcggtgacactggtagaaaataccttgggtttctcaaacccctattcttcttaatatattgatacgcagctctcctgcgtgttcgaagaaaaaaaaaagcactggtagaaaatcaaaatgccccctttttcgggacatggacaaggtttgaatcatcagct

SEQ ID NO: 38437 - DNA, 274 bp, Setaria italica
  Peptide Sequence Number=SeqID_104411
ttttttgtagaagtgttaccagccagtgctcctatataatcgacaaacccagatattgcagagctatcagccgattttacatcgcataaaaaattaacataaaaaaggtgagacacaagccatcgacagacagcgaaagcaaagaataacaactacaacaggcagcaaggactgtaagattcatgcttcaagcaatcttctccatctctttattccagcactaccaaaagtgaaatacaggcacacgcacacgtccgctactttgtttatcaac

SEQ ID NO: 38438 - DNA, 451 bp, Setaria italica
  Peptide Sequence Number=SeqID_104412
tgtattctttgtattcttggtaggggtttttgcttggacacttaaggccgactcgtacgacatctatgtcctcgggttccaagagatcgtgcagctgaacgcgaggaacgtgcttgggccgaaacagagatcggcagccatgaagtggcagctgctcatcgaggacgcattgaacaacaggaggagcgcacaagacggaggaggagaagaagcaatggatcaagaacgggacgtgttcaggtgcgtcatgagcaagcagatggtcggcatcttcgtctcggtctggacgaggagcggcctccgccggcacgtccgccacgccggcgcctccaccgtcggcgccggcgtcctcggccggctcggcaacaagggcgcggtgtctgtccggttcttgctgcacgacacgagcttctgcttcgtttgcttcttgtcctacctcggcgccgccgta

SEQ ID NO: 38439 - DNA, 407 bp, Setaria italica
  Peptide Sequence Number=SeqID_104413
ggaggacccggccccgatcgagaacgatatgcgcgtcgtgctcgtcgcagtcccggccggttgcgcgacgtagctaggcgtagagctagctagcgaggtcgatcgctgtaagcttgtatgccgacgcggaaattccacatgtcgcgacgggcgtccgacgtggacgggtgacctggatcgcctgcctcgctgtcgaagaactggtagatagtgatgcacttgtacgcgcgctccatgcgctttgggtccggactccagaaccattgctttccggtgcagtcactgtatggacagctagctagcctgttctcacggaatagatcgtggtaattctcaacacatacatgcacaccgagttcaagtggaaagatcgcacgtaaagcgctttctggtcaaaaagaaactag

SEQ ID NO: 38440 - DNA, 502 bp, Setaria italica
  Peptide Sequence Number=SeqID_104414
agctagctagctagcactgcctcgcgcacttgcactgtcgcctgaatccgtcgcagttgccgccgccccatccttcctgcaggcacacctgcgcgcagttgtggtcggagaggcaaggcccccggaaccccgcgctccgttgccggcacacgcgcgcctccgccgccggcgccaccgacgactcctctgcacgtgcgcgtcatggtgatattagttattagtgcatgcatctatcgttgcagcttattgaacagcagcagtagtagtagtgcacgtggttaattaaggacgatgtggttggttgatgaacggcgagacggccggccgccggcgtacgtacgtgcgacgacgatgagcaggaggaggaggacggccacccgcgccgccgccttcgtcgtccacatggctgccgcctttgctgtgttgctacgatgagcacaccgggcagcaggtgagtgagacagtgagactagtagctagctcgcgctgctctcgatggatg

SEQ ID NO: 38441 - DNA, 722 bp, Setaria italica
  misc_feature (1)..(53): n is a, c, g, or t
  Peptide Sequence Number=SeqID_104415
nnnnnnnnnnnnnnnnnnnnnnnnnnnnnnnnnnnnnnnnnnnnnnnnnnnnngaatatttgatatgatgctgcagttttattgtcatcatcattatggctgcgcgaccaccatatacatggatgatgcatggtcacctttggccttcagacgtagacatttcactcatttttatcgacaccgagaaatttcattactcgctacagtggaggacacggcatatttgcatgaactatttaatgtgtattatacatattactgcaagtttattgtcacagcagacaacaagccgtgccgtgcgtatctctctgccacagctgggctgatcgcgctctggcccggccggccctgcaaggtaggcagggagaggcagctagctagctagcactgcctcgcgcacttgcactgtcgcctgaatccgtcgcagttgccgccgccccatccttcctgcaggcacacctgcgcgcagttgtggtcggagaggcaaggcccccggaaccccgcgctccgttgccggcacacgcgcgcctccgccgccggcgccaccgacgactcctgtgcgacgacgatgagcaggaggaggaggacggccacccgcgccgccgccttcgtcgtccacatggctgccgcctttgctgtgttgctacgatgagcacaccgggcagcaggtgagtgagacagtgagactagtagctagctcgcgctgctctcgatggatggta

SEQ ID NO: 38442 - DNA, 553 bp, Setaria italica
  Peptide Sequence Number=SeqID_104416
tattattgagttagataaaaaagtaaccagtttaacatgttatcatccatcaggccaattaaatagcccgtgaaccgacctatcagaaagatttccaaaagcaagcttttgaatgcacggtactgaacaaagcattaatgcccggtactgaacaaatcattaatcatgaggaatcaattatctctttatgggtaccaatgtagcaggcccgcattcgaaaattgcagctcatctgtttgcaaaggattacaactcaccaggaggaaactgaaatcccatgtacacccataagtactctatagatagaaaaggtggagaaggaatgaaaagaacaaaacaaaacttcgttttcacaaaccctattacagaaaactacttgcactgatgcgcagtaggcatcaactcagagtaatcaaatttagatattgatatacacaacttcgctatcacagtagtaaccatcctcatgaggtgtttggatagacaaagctctgcctgtgacacctatcacatcaaatatttggatactaattaagagtattaaacatagtct

SEQ ID NO: 38443 - DNA, 372 bp, Setaria italica
  Peptide Sequence Number=SeqID_104417
caagtagacaagccacttcttccctgcgaccacccatcatgtctggagaggatggagagaccactaccgtcatggttggaccatggggtgagagggaagtgaattctccacttcaattcacacccaagcgtctcgtagccatggcgtttcagactggtagagtcattgtgacattaggtttcacctgtgttgatgtagcaggcaagaggcacactattggcttagttggcggtgaccgtgggaaaaatactaactttcctttccttttcctttttccccgtgcagatcaagtttgcaccaacggagtatgtgacggaattcgctggatcaaccattgttgacaccgatggaacatctgctgtgaagtatctc

SEQ ID NO: 38444 - DNA, 574 bp, Setaria italica
  Peptide Sequence Number=SeqID_104418
cgcttttccatatggcccatacacccggaagttggttcgatagttagggacgctacaaccggatatccatcccaagtaccagttgttccagagacattcttcacatactctgatggttcaagctggatcgtggtaagactcccaccactcccaccatatggacctcgagtgaacttctcaccagattgatcagtataggaaaagccaaatgcatcaatgatttcaccagctcgaatcatcacactgtcgaggcgcttaggtggcgctccgactgggacatcaaaccccgccgcaaaacccccaccccacattccaatcttgataggaggggtctgtccagtgatggtgggctgtagtgggtaggattcttcatctttgttacctgaggtttcttcatcatatgcaatagggatgggtctcgggatgacggattttcttgacgccattggtgtttacataggtcagagaaatccgtcatcccgagacccatccctattgcatatgatgaagaaacctcaggtaacaaagatgaagaatcctacccactacagcccacaatacctgtccagtgatg

SEQ ID NO: 38445 - DNA, 196 bp, Setaria italica
  Peptide Sequence Number=SeqID_104419
accaaaactaagtctgagcaagggcccgagaaggcacctcaaataaaccaggaccttcgtcctcagcgagttcagctttccagtgtgtttcagtcaaaataagatgatcatatcatcatgagcgtggtctgcgcttgccactgcaagggtagtcctaataatcccttgttgccaacactcgcattacaatgttggc

SEQ ID NO: 38446 - DNA, 1819 bp, Setaria italica
  Peptide Sequence Number=SeqID_104420
tccttgttgttgatgtagcaggcaagaggcacacgtattggcttagttggcggtgaccgtgggaaaaatactaacatcaagtttgcaccaacggagtatgtgacggaattcgctggatcaaccattgttgacaccgatggaacatctgctgtgaagtatctcaggattcaaacaaacttaaaaacatatgagataaatgaaaaagggtcgaacgcttcagatacggaacacccttttagagtccctctgccagagaattctaccattgtggattctttggacgtcaacatatgttaaggacatgtatattcaatttgggatttatgtgaattccacaacacaggttgttccccttggagcttgggggtgggggatggaggtgaagcatttgatgtctcggcgccacccttgcgccttgaaagcatgactattcgtgctggcaacactgttgatgcatttgggttttcctatgttgacgaagcagggcggaggcacatcagaggtccatctggtggtaccggtggccaacttacaacaatcaggctcgcaccaacggagtttgtgaatagcatttctggaaccattggtcggtcttttggttcccaatcaagatcgttagtggcatcgctacagattggaacgaacgtcagaacgtatgggccatacggaagaaggaacccggcgacgatccattcagcatcccgttgccggagaatttttgcgtcgtgggattttggggacgtgctgggaatcttcttgacgccattggtgtttacataggtcagagaaaatccgtcatcccgagacccatccctattgcatatgatgaagaaacctcaggtaacaaagatgaagaatcctacccactacagcccaccatcactggacagacccctcctatcaagattggaatggtggggtgggggttttgcggcggggtttgatgtcccagtcggagcgccacctaagcgcctcgacagtgtgatgattcgagctggtgaaatcattgatgcatttggcttttcctatactgatcaatctggtgagaagttcactcgaggtccatatggtgggagtggtgggagtcttaccacggtgagtgaactttgcaggctgtaggtctctctttgcatatgtgaaattaaagctgctaaacccagtgaggattgtgggttagctgccttacttttggcatgtttaatttcttcctgcagatccagcttgaaccatcagagtatgtgaagaatgtctctggaacaactggtacttgggatggatatccggttgtagcgtccctaactatcgaaaccaacttccgggtgtatgggccatatggaaaagcgcaggacatgcatttcagagttcccctccccgagaatgcttgcgttgtgggattctttggaatgtatgaaaccaaccatcttgatgcaattggcgtttacgtgagtggttgcgtcccaaactagtctgagcagggcccgagaaggcacctcaaataaaccaggaccttcgtcctcagcgagttcagctttccagtgtgtttcagtcaaaataagatgatcatatcatcatgagcgtggtctgcgcttgccactgcaagggtagtcctaataatcccttgttgccaacattgtaatgcgagtgttgttttttcttcatgtatgagagtggttatgttgtcacctatggtgtggaataaattttctatgggattatctcttttggatgcagaaaatttgataatgttcatacgtttttgtaaaagttcatcttactgttattaattagagtcttcttttagttaaaaaaaaaaaaaaaa

SEQ ID NO: 38447 - DNA, 733 bp, Setaria italica
  Peptide Sequence Number=SeqID_104421
ttactttttttaaagttttttttaagtttttttaacttttttaaaagtttttaaccttaaacttttaactttaccccttagtacgtaacctaaccctaattcatgtctggagaggatggagagaccactaccgtcatggttggaccatggggtgagagggaagtgaattctccacttcaattcacacccaagcgtctcgtagccatggcgtttcagactggtagagtcattgtgacattaggtttcacctgtgttgatgtagcaggcaagaggcacactattggcttagttggcggtgaccgtgggaaaaatactaacatcaagtttgcaccaacggagtatgtgacggaattcgctggatcaaccattgttgacaccgatggaacatctgctgtgaagtatctcaggattcaaacaaacttaaaaacatatgagataaatgaaaaagggtcgaacgcttcagatacggaacacccttttagagtccctctgccagagaattctaccattgtgggattctttggacgtcaacatattgttaaaggacatgtatattcaattgggatttatgtgaattccacaacacaggaaagccaagacacttatcccccagatatatctgttcctgtgttcatttcatactcatttagaccctgcatcaacagtgttgccagcacgaatagtcatgctttcaaggcgcaagggtggcgccgagacatcaaatgcttcacct

SEQ ID NO: 38448 - DNA, 1969 bp, Setaria italica
  misc_feature (1929)..(1929): n is a, c, g, or t
  Peptide Sequence Number=SeqID_104422
aagaaaccaagtagacaagccacttcttccctgcgaccacccatcatgtctggagaggatggagagaccactaccgtcatggttggaccatggggtgagagggaagtgaattctccacttcaattcacacccaagcgtctcgtagccatggcgtttcagactggtagagtcattgtgacattaggtttcacctgtgttgatgtagcaggcaagaggcacactattggcttagttggcggtgaccgtgggaaaaatactaacatcaagtttgcaccaacggagtatgtgacggaattcgctggatcaaccattgttgacaccgatggaacatctgctgtgaagtatctcaggattcaaacaaacttaaaaacatatgagataaatgaaaaagggtcgaacgcttcagatacggaacacccttttagagtccctctgccagagaattctaccattgtgggattctttggacgtcaacatattgttaaaggacatgtatattcaattgggatttatgtgaattccacaacacaggttgttccccttggagcttggggtggggatggaggtgaagcatttgatgtctcggcgccacccttgcgccttgaaagcatgactattcgtgctggcaacactgttgatgcatttgggttttcctatgttgacgaagcagggcggaggcacatcagaggtccatctggtggtaccggtggccaacttacaacaatcaggctcgcaccaacggagtttgtgaatagcatttctggaaccattggtcggtcttttggttcccaatcaagatcgttagtggcatcgctacagattggaacgaacgtcagaacgtatgggccatacggaagaaggaaccccggcgacgatccattcagcatcccgttgccggagaatttttgcgtcgtgggattttggggacgtgctgggaatcttcttgacgccattggtgtttacataggtcagagaaaatccgtcatcccgagacccatccctattgcatatgatgaagaaacctcaggtaacaaagatgaagaatcctacccactacagcccaccatcactggacaggtattgtgcccctttgttcgtcattacataccttgttagagcccgatattcactgttcataccttagctctatacgtgcaactttctctttgaaaaaaaatgctgcctcatctataatttacagacccctcctatcaagattggaatgtggggtgggggttttgcggcggggtttgatgtcccagtcggagcgccacctaagcgcctcgacagtgtgatgattcgagctggtgaaatcattgatgcatttggcttttcctatactgatcaatctggtgagaagttcactcgaggtccatatggtgggagtggtgggagtcttaccacgatccagcttgaaccatcagagtatgtgaagaatgtctctggaacaactggtacttgggatggatatccggttgtagcgtccctaactatcgaaaccaacttccgggtgtatgggccatatggaaaagcgcaggacatgcatttcagagttcccctccccgagaatgcttgcgttgtgggattctttggaatgtatgaaaccaaccatcttgatgcaattggcgtttacgtgagtggttgcgtcccaaactagtctgagcagggcccgagaaggcacctcaaataaaccaggaccttcgtcctcagcgagttcagctttccagtgtgtttcagtcaaataagatgatcatatcatcatgagcgtggtctgcgcttgccactgcaagggtagtcctaataatcccttgttgccaacattgtaatgcgagtgttgtttttcttcatgtatgagagtggttatgttgtcacctatggtgtggaataaattttctatgggattatctcttttggatgcaaagaaaaaanaaaaactaaaaagagaactgccaaggcacacagggatagg

SEQ ID NO: 38449 - DNA, 2169 bp, Setaria italica
  Peptide Sequence Number=SeqID_104423
ttgtactaagtcctactttctttcccttgtcgtacctaccctattcatgtctggagaggatggagagaccactaccgtcatggttggaccatggggtgagagggaagtgaattctccacttcaattcacacccaagcgtctcgtagccatggcgtttcagactggtagagtcattgtgacattaggtttcacctgtgttgatgtagcaggcaagaggcacactattggcttagttggcggtgaccgtgggaaaaatactaacgtaagtgaactctaaattctgcagaggttgtctttaatttgtgggtgttgcgaatttgctaccctgtttttcaatgtttgtcctgctcggcatcatgttttaacatgaggcatcagtggaaccttgcaagcaagctggtatgcttgttcaatcttgtgagaggtatactaaccaatataatcttagttttcctttcctttttccttttttccccgtgcagatcaagtttgcaccaacggagtatgtgacggaattcgctggatcaaccattgttgacaccgatggaacatctgctgtgaagtatctcaggattcaaacaaacttaaaaacatatgagataaatgaaaaagggtcgaacgcttcagatacggaacacccttttagagtccctctgccagagaattctaccattgtgggattctttggacgtcaacatattgttaaaggacatgtatattcaattgggatttatgtgaattccacaacacaggaaagccaagacacttatcccccagatatatctgttcctgtgttcatttcatactcatttagaccctgcatatccgtctgtaatataatttgcaggttgttccccttggagcttggggtggggatggaggtgaagcatttgatgtctcggcgccacccttgcgccttgaaagcatgactattcgtgctggcaacactgttgatgcatttgggttttcctatgttgacgaagcagggcggaggcacatcagaggtccatctggtggtaccggtggccaacttacaacaatcaggctcgcaccaacggagtttgtgaatagcatttctggaaccattggtcggtcttttggttcccaatcaagatcgttagtggcatcgctacagattggaacgaacgtcagaacgtatgggccatacggaagaaggaaccccggcgacgatccattcagcatcccgttgccggagaatttttgcgtcgtgggattttggggacgtgctgggaatcttcttgacgccattggtgtttacataggtcagagaaaatccgtcatcccgagacccatccctattgcatatgatgaagaaacctcaggtaacaaagatgaagaatcctacccactacagcccaccatcactggacagacccctcctatcaagattggaatgtggggtgggggttttgcggcggggtttgatgtcccagtcggagcgccacctaagcgcctcgacagtgtgatgattcgagctggtgaaatcattgatgcatttggcttttcctatactgatcaatctggtgagaagttcactcgaggtccatatggtgggagtggtgggagtcttaccacgatccagcttgaaccatcagagtatgtgaagaatgtctctggaacaactggtacttgggatggatatccggttgtagcgtccctaactatcgaaaccaacttccgggtgtatgggccatatggaaaagcgcaggacatgcatttcagagttcccctccccgagaatgcttgcgttgtgggattctttggaatgtatgaaaccaaccatcttgatgcaattggcgtttacgtgagtggttgcgtcccaaactagtctgagcagggcccgagaaggcacctcaaataaaccaggaccttcgtcctcagcgagttcagctttccagtgtgtttcagtcaaaataagatgatcatatcatcatgagcgtggtctgcgcttgccactgcaagggtagtcctaataatcccttgttgccaacattgtaatgcgagtgttgttttttcttcatgtatgagagtggttatgttgtcacctatggtgtggaataaattttctatgggattatctcttttggatgcagaaaatttgataatgttcatacgtttttgtaaaagttcatcttactgttattaatt

SEQ ID NO: 38450 - DNA, 682 bp, Setaria italica
  Peptide Sequence Number=SeqID_104424
taattttcgttcttttttcctaattattccttcaccacaaccagcaattcctcttaagacctccaggtcctgctctgacaaacccctattcacagaatgggaaatgtctgtaaattttgttatgatcccaggaatggcagatgaccaaagagcacgttcattgttctttgagatcatgctccaagtatcagcaccctcctgagcaatcgcttagacattaatatttggtttctggtggtgggagcatccactatacaatgagacctgatctgcaagttttactaagtcatctttggtaaagtaggagctgcacctctaagaaactttgaccggtcatatgtgctatctagacagtatctgaaaaccacagcatctgaaaaggtttcgatatcatctccatctgacccactccaagaacttcctgaatcaaagctgtcatagttggatgttgaagagtctgtccccatgacatcctgcgcttctttgcttaccaccatctttctggcatgcttattctgtgatagtattttgtttgactctactaccttcgccattccatcgccttctatcttggaaaacttgggcatatgaaaacgcactactgaactttggccatgagaatgtaggcgaccatttactctgtcagcattacctaaaccttggccattattgagcaagtcag

SEQ ID NO: 38451 - DNA, 391 bp, Setaria italica
  Peptide Sequence Number=SeqID_104425
ccgacgagcctcggtacgacgccgacgccgccgccgggagcgccggctctgtggcgggcgcggcgaagaagagcttcgagatgggcaaggagacggtggagcaggcggcggcgaccgcggcaagagccacgggggacgccgtggaggcgaccaaggagaaggtgaagggagcaggctcgccgtcctcctccgactcggagctctgagcagagcgcgccgcgttcgttggccctgtgcagtgttttgtgtagcatcatgtaaaaagctgttctgtttctctatacgctatacagtgaccagtagctacgttacgtagacttggctgttggctctgaacagagtaacctgcacttgagacagactgaaactaactaaaaaaaaaaaaaaaaaa

SEQ ID NO: 38452 - DNA, 487 bp, Setaria italica
  Peptide Sequence Number=SeqID_104426
atttttttagtttttttttttaagtagaagtagatccgcccttccgggtttattgctgagacggcaggcatgaaatggaatgaaataatcagaataggacacacacaaaggcgatcgacaagccgatcgaatcgattacacacacacgggctcagccgctagctgcagcctggccgtctgaatctgatgaaccaacccgctcgctcgcattatctacctcctcctcatcatctctcgccggctcatcacacggggctcagtatggctggccccgtgggtgccaaggcgctactcgcctacgggcccggctacctcccactccaccacctcgaccggtcaacgggcttgcatgcatgcagactgcggagagacaagtcacgcatgcatgcatgtcgccgatacatctgaccgctgctactgtaggctgtagcgtagcaggccggcgttcttcttcacatgagaattactactgagtactgattgatac

SEQ ID NO: 38453 - DNA, 701 bp, Setaria italica
  Peptide Sequence Number=SeqID_104427
tgtaatcgattcgatcggcttgtcgatcgcctttgtgtgtgtcctattctgattatttcattccatttcatccgatcgaatcgattacacacacacgggctcagccgctagctgcagcctggccgtctgaatctgatgaaccaacccgctcgctcgcattatctacctcctcctcatcatctctcgccggctcatcacacggggctcagtatggctggccccgtgggtgccaaggcgctactcgcctacgggcccggctacctcccactccaccacctcgaccggtcaacgggcttgcatgcatgcagactgcggagagacaagtcacgcatgcatgcatgtggccgatacatctgaccgctgctactgtaggctgtagcgtagcaggcccggccgttcttcttcacatgagaattactactgagtactgattgatactagctagagacttctgctgccttctgccattggctattggctaacctacacctccacggcaatggccgtgtcaggcttgatcatcgccagctccggcgccacgaggccgtcgccatcgaccctgccggccgctgccgcgcaagtgacgggctccacgtcgatggccaccgcgacctgcgggtcttgtgccgccaccgccgccgcgggtggctcgaccggcaggatgtcgtacgaatggggccttcggtcgtccgtctagtctt

SEQ ID NO: 38454 - DNA, 832 bp, Setaria italica
  Peptide Sequence Number=SeqID_104428
gtgggcgtggagaacacggcgggcgcccggaaccaccaggcggtggcgctgcgggtgcagagcgacatgtcggccttctacgagtgccgcttcgacgggtaccaggacacgctgtacacgcacacgtcgcggcaatactaccgcgactgcgtggtgacgggcaccatcgacttcatcttcggcaacgcgcaggtggtgttccagaactgcctcatccaggtgcgcaagtgcatggacaaccagcagaacatcgtgacggcgcagggccgcaaggagaggcgctcggcggggggcacggtcatccacaactgcaccgtggagccgcacccggagttcgagtcgagcgccgggaggctcaagacctacctggggaggccgtggaaggagcactcgcgcacgctctacatccagtcggagatcggcgggttcgtcgacccgcaggggtggctgccgtggctcggcgacttcggcctcagcacctgctactacgccgaggtggagaaccacgggcccggggccgacaccagcaagcgcgccaagtggaagggcgtcaagaacatcacctaccagcaggcgcagcagaagtacaccgtcgagaggttcatccagggacagacgtggctccccaagctcggcgtgcccttcatcccggggctcctgccgcagaatcaaaccggcaggatacactgagagccatggccatgcgcgtggaagatgtatatatgcacatgcacgggttgtgacttgtgaattctgatcggcggtctgcgttgtcgatgtggaccaacatttacagtggtggttgtttgttggctgcgtattgttgatgttg

SEQ ID NO: 38455 - DNA, 484 bp, Setaria italica
  Peptide Sequence Number=SeqID_104429
tgtccctttgtagttattgtattcctagtaggttttgttctattgttgcacaatcatcgtgcttctgtgcagaagcaagtagttttcaaggaggccatacccattaaaatgcttatgtggcctcaaagattcatcaaacatacagaatacgctatataaaggatgttatattaccaaaagtgctggatgaagctactgcagagagcattgactcaattattcgtgggaacaatgttcttgttgtttgtgtactgagggacgatgcttcttttatccaagatctatttgcaaagatgaaatcttcaaatatctctgctgaatcaaaaagcaaactgggatcttgtaagaaaaggtgtgtttgacatcatttatgatgtgttacggagtcagaataaagtactcgtctcagctgggatgaatgtacttaagctatttttcttgatcaggatcctaattcttagaactatttattgcccatcatgaa

SEQ ID NO: 38456 - DNA, 827 bp, Setaria italica
  misc_feature (779)..(827): n is a, c, g, or t
  Peptide Sequence Number=SeqID_104430
cgacacgtacgcgcgcaccgctgaattccaagcagcagttgcccaagtaacgtaggagcgcggggaaggaaggagcaacgccatggcctccggcgacgcgagccctgacgcgttgtacgcctacaccatcgtgtacgtcacggacgtggagaaggcggccgccttctacgccgccgccttcggctacgccgtccgccgcctcgaccagtcccacaagtgggcggagctggagagcggggcgacgacgatcgcgttcacgccgctgcaccagcgggagacggatgggctgtcggggcaggtgcagctgccggacgcgaccgccgcgcggggccccgtcgagatctgcttcgtctacgcggacgtcgacgcggcgtacaggcgcgccgtcgagcacggggcgacgcccgtgagcgcgccggagcagaagccctgggggcagaagtccggcttcgtgcgggacatggacgggaacgtcgtgcgcatcgggagccacgtccgcgagtgatctcgggctctcgctccgccccgggcgatccgtcggttccggtcagctgcttcctgctgcgtggcatgcgtatggcctatggcggcatggatgcggaggtttaatcggtgtcgacgtgtcgtgtacatggcttattatagaacaataataataataaattaaatcgtgtagggagctctagtcgtggagctaggtgtatatgtgtgcagaccagtgtacaaggctagtagcaaaataaacgtgatctcgatcgccagtggctagtaggtaaacnnnnnnnnnnnnnnnnnnnnnnnnnnnnnnnnnnnnnnnnnnnnnnnnn

SEQ ID NO: 38457 - DNA, 447 bp, Setaria italica
  Peptide Sequence Number=SeqID_104431
gggagcaagagatctttttgtaacatagcctgtatatattcaccatgtgaatataggtcaagttttatcctttatctaaaaacaatcctgtccgtagcattgctaattggtagataagagagggagagcttgcagatgccaactggagaggtctccgtcgagttccatggcagtcatgtctttctcatctcggtacgacggcgggcaaagtgacagaggaacataggaaaggcaaaaactgccaagcgaaaagaatcgatgactttgctcaaatggaacagaactgaatgtgaactggagcgccaaagtttggccaggcacggggcatcagccacgggccctaggaaacgttcatgatgcaaagagactccatcttttaaagttgagcttagcatcactgcggttggtcctctcggccagaatcgatttcgtttctccagaacgccg

SEQ ID NO: 38458 - DNA, 494 bp, Setaria italica
  misc_feature (469)..(469): n is a, c, g, or t
  Peptide Sequence Number=SeqID_104432
agactaacttacgaaagccccatctgctcagatgttcttgtattgcattatcaccctcctgaaagtctcgaaggttcaagatttgagtttaggaatatgctattagtttattatcggatgtgctggtttcagtatccaggttttgaactggataacagaaatgtgccaaacttacttaatagtccgggaattgcttctactgggtagtctaacatggttagtttctattttagctggagattaatgatgcttaagatttgctgttggtggtcctcatattgttggttggggtgcacttttttcatgttattgacggttggagtatctagtgtttctattggtgggaagcattgaatagctcaggcagttgatatggcttgtcgtctagcaggatttatttctgtttttagcttggggaaaccgcacttgaatgcctgatagagttcaatcttggaataatccaaaaagngttcttagagctggacatagttgtt

SEQ ID NO: 38459 - DNA, 699 bp, Setaria italica
  misc_feature (646)..(699): n is a, c, g, or t
  Peptide Sequence Number=SeqID_104433
ctagcatccatggacctcgcccgaccgggaggccgaccggggcgccgctccggagttcgtggcgctcgacatccgcggcgaggcggagtcgccggggtcggagcactagaatagaatggagccctcattcgccgctaaggggttcgagcgggagcggagcggagacgccaattcttcttccaccggtgtggcgggtgtgcatgagaagcaggcggtgccggtgcacgtagatggcagcccgagggaccagtacctcccctcaacaccaaagcgccgccgtgcgagccggcgtgttcctggatggcgtgatcccaggaaaatcctcttcgccttcgcagcattgtccagcgtgggcacgttgatactgctctactttacgctctccatggggaagatgacaggaggtcaagctgacgaccagtgaggcagcgataaactgataccattgcttttgccttgcttgccatcgcattactaatgtttgtacagaagaaattgagaaatgggtggatgctaatgtagaaagccatacatcagtgtggataccagcatgatttgagacgtttgtacatagggacaggaaaggttttacagataaagtttttaagggaagagcctttttttttacttaaaaaaaaaaaaaaannnnnnnnnnnnnnnnnnnnnnnnnnnnnnnnnnnnnnnnnnnnnnnnnnnnnn

SEQ ID NO: 38460 - DNA, 464 bp, Setaria italica
  Peptide Sequence Number=SeqID_104434
aacgacggacttacgaacgtctggatcgccaacaacaggggcacgcgctggagccgccgccacgtctccctcgacccgtcaagccggctctactggaactggtcctgggatgacctggtggtcaacgacctcccggccatggttgactacatttgcagtcagacccggcagaagccccactacgtcggacactccatggggacgctggtggcgctggcggccttctcggagggccggctggtggaccagctcaagtcggcggcgctgctgacgccggtcgcctacctcgcccacatcaccacgcccatcggcatcctgctcgccagagcgttcgtcggagagctcctctccgacttgctgggcgtggccgagttcaacccgctagcgcctccggtgacgaacctgatcagggcgttctgccgcaggcccgggtggaactgctacgacctcgtcggctccatcac

SEQ ID NO: 38461 - DNA, 729 bp, Setaria italica
  Peptide Sequence Number=SeqID_104435
atgctattgaggatgccataagagcatcacacccagtagatccgaccacttcgccactggctagaaggcttttcgttgttattggggccggtggtgcagcaaaagcagtagcatatggtgcaaaagagaagggagcaagagttgtaattgccaaccgtacttttgcgcgtgctcaagaacttgccagattaattggggggactgctttaaccatggctgagttggaaagctaccatccggaggatggcatgattcttgcaaatgcaacatctgtcggaatgtatcctaatgtcaatgaaactcctttatctaaggaagctcttagaaactactctgttgtctttgatgcggtctacatcccaaaagagaccagacttctccgagaagctgcagaatgtggaaccacagtcgttaacggtctggagatgttagcaagactagcggtggttcaatttgagcttttcacagggggcatgccagctccacaaaggttgatacatgatgctatgacaaagacgcagtaatgcttctcaaaagagcaaggtccctgccaccacctgcatatcatggtttctgcagaatggttctagttcactagttgtatgcatgtcgtcctccttgcttggccctcaactttgtacaaaaaccactgtcttgaacgcaggtggacaagcggttttcatctcactgcttttctcctactaccttcaaagatgccatgttgttttc

SEQ ID NO: 38462 - DNA, 289 bp, Setaria italica
  Peptide Sequence Number=SeqID_104436
cagacggtgccattggcgacgtcagcgcacagcgccgccgcctcctcgtcgggccgcgtcctcctaccgagctgcagcagctcgtccatggcggcggatatggggctgcctgggagcagcagcaggaggcaggatacgagcgcgaaaccagcgagcatgcggagcagcgcgtcgtggccgtgcttccggtggtggcaggcgtagtccgccaggcggccccggagctccttcatcctgccgccgccgccgcctccgcctcctccctccgcctgcagcgggtcctctgccg

SEQ ID NO: 38463 - DNA, 2517 bp, Setaria italica
  Peptide Sequence Number=SeqID_104437
tttcagagactggttatttacgtgatgtggatgtataagatgacggaacagattagtgatgtcatgaaacctccatcagcaagtggtgaaaggaagcggaaagggatggcaaatttggaaacgcatgttcatgataactctgaagtgcatgaaatcaatgaaaatgccaatgatccattcaggttaacagagagtgaaaggcttgccagtaggtcagatcatgcagtccaagattctaatggtgattttggtggtactgaaagagtaagtggcagctctgggtccaaaaaaaacaaaaggaagagttgaagttcctagccaggatgagcaaagtgagcatgtgccatctggttcaaagatgaccgagaacatcggtggctcgaagaagaaaagcaaaaagaagccagagagcaccacagatgcagttactgtagcagaacccgctgctgatgtgccagaaaataatgttgtagcagtagagcctgagaagctggagaagcctgagaagattgagaagcccaagaagaagtatgtaccgatatcaccaactatacatactggcttttcattctccgttgtacatcttttaactgccgtaaagaaggctatggtctctcctgctgaggatactccagcagtagcgaagcagcctgatggagaggaaggcaaaaaaatggttcaacaatgaagagaacagcaaaacacctcaagaacaaaatacgacagaacaaactcagcaggttcttgagggtgcagatgccagtgctgcagagcaggctgcacagagcaattcaccggcactgactgttcaagagattgtcaatcgaattagatcaaatcctggagatcctaggatacttgaaactcaggagcccctccaggatttagttcgaggagtattgaaggtactatcatctagaacagctcctctaggagcaaagggctggaaagcactagttgcctatgaaaaggcaaacaaaagttggttttgggttggtccaataccttctgtttcatcatatgatgatcctgatgaagaaacttctgcggaagcatggtgtataccacacaagatgcttgtgaagttggttgatgcattttctaattggctgaaaagtggtcaggaaacccttaagcagataggatcccttccaccacctccaccaccaaatcctgcaaacttggatttgaaggaaagattcaaggagcttagagcccagaaaagtctgaacacaataagcccaagctcagatgaagcaagggcatatttccagcgtgaggaatttttgaggtactcaatacctgatagagccttttgctatactgctgctgacggggagaagtctatagttgctcccttgagaagaggtggtggaaagcccactgcgaaagctaggggtcaccccatgctcttacctgatcgtccgccacatgttactatcctctgtcttgtaagagatgctgcttctaggttgcctgcaagaactggaactagagctgatgtctgcacactgctcagagattcacaatacctgaaccatgaagaagccaataaagaggctgctattaatcaagttgtcagcggtgctcttgatcgcttgcactatgaacgtgacccttgtgtactgtatgataatgacaaaaaattgtggacctatctacacaggggtagggaggaggaagattttgaggatgatggcacgtcatctacgaaaaaatggaagagaccgaggaaagatccctctgattctgcagagccaggtgcagcaaacgatgattttgatgatgatggcactgggaccccttcggcgaacaatgcaaaaaagcaaaagacagaccatggagatccttcagtatcaggagaagctaacgatgagggagatcatgcaactcagaatccatcttttggtggcatggagggtgatcctgatcttaatgctgttccatcaacaaaaaattatgaagaatctggtggagttgtttacgttgatgcaaggccaaatgatggtggctcagattcagtagatgcaaaaccaggcagcagggctgatgataatccagaacagaataaaatcaacacagcactccctgagaacaccagcagcatggatgctctccatgaataatgatatgtcatggttcaatcagctgtgcatgtgttgaagtgtcagcatagggtagaaagcggtgttcatcttcttgttgctatatatatggagagtcatcttcttgttgctatatatatggacatgaacaccatagcaagcaccgctatacaaggcctcgactctgccaaaatcaatcttttgtagttgagatagcttgtacattcttgccataatttaaaagagcttctgtagtttactactccttttcttttctagtgggcttgtgcagctgctgtgccacaattctaatctgaagttgttaggcatctcatgtatttgtgtgttcatgttcggatgaaatggaatagaaagttcagtagtgtacccaatctcccatcagcccgcacat

SEQ ID NO: 38464 - DNA, 708 bp, Setaria italica
  Peptide Sequence Number=SeqID_104438
attcgtgtcattttcgtccttgatggtggacactttgagcagctgtacgaggttttcacccttgatggcaacatccatgctcagtggagggcaaagcaagccccaccataccaagttgaaatggaccattgggataatgtggtcatcaatgggattgtctacttcttcttatcatataatgtggacgaagataagcgccgtataggctcattcaaccttgagacagaagagtggagtccaagtatccctggacccctaagcagccttatggatgctgctgctgatcatatagactgctcgttccaattaacaataggtgcactgagtggaagcttagttattgcttgtcacccagctactagcacacattcctctatggacctatggttcttggttgactttgagaagggcctatgggtcaaacaatatagcatagaattgagtttcagacatcctgcatatgcgattcaccccttcttggtgttgaatgatgggaggatagtgtttgtcattgacacaataaacagcggaggacttttgagtatttataatcctgagaccaaaacttctgaagatgtgatggagatggggtatggtgttgccgttggtttgtacacaggaagcgcactgagcctggcaaaaaagtgccagttagtgagaacacaactggatttgctgatggaccagtgaaacataagggaaattgga

SEQ ID NO: 38465 - DNA, 887 bp, Setaria italica
  Peptide Sequence Number=SeqID_104439
agtatgcacttctagcacttgcatgtttggatggatgatgtttacggacggatagaggtcttcccccaatactttgcaccatcaaaagaagctatggagagtcctgatggtctatccacaagtaagagtaacctggatactccaccaagttcacaaagacgatcctggacgccaaaacgagctaagggagctgcatctcttttgcgtttgttgtccattcctcgcttgagatggtctacgagcaatgaggatgatgacaagatcgaattatccagggctgaagtggagtctttacgaactgaaatagcagatgctgaggaaagggaatcccacttaaaagctcggttggaaaacattgatgaagttttgagatatgctcgcctttctggctatctctacattagaagtcgatggacccaacttcctggagaaccacctatcttagacgatgctgatgtggatgactggcttcctcgctttgttgttctacaagggcagtgtgtgtactattatctgaaatcgacagacttgagcccacaagaatctacactgttacacgatattgttgaagtagggcggcttccaaactttgtgccagaagatgaaaagataagatatgcgttttacctgttgacccgccaaggcttgaagtttcaatgctccagtacctccgaaatacaggttgattcatgggtaagagcactgacaagtgattgcaaattgcgggatggtgctggcgaggatgtgatgaagaagacgagtagccaactagaagatgggtcatggtaatcgatcgatcatgggtttcggttcccagccaagaatgctctgcgtgcaggatgtacgtacagtacagcagagtaattggctcgtgctggtagcaaaaa

SEQ ID NO: 38466 - DNA, 1152 bp, Setaria italica
  Peptide Sequence Number=SeqID_104440
agaagtctttactaggctttggtagctttggaaagcgaggaatgattacaggtttaacaataacaaatggtctgtgagtagattaaatcatgaagtaagagcagacatagcttcttcctttttgtttgattctcatgcagcttcagacagaaatttgtcaaatgggagacctgctgctactaatgccattaatcagtcctctcctgctatcatgccttctcttgatctcatgcaggatttacaaagcaaccaaatttggcagccttttgtctttgcttatgctggtatacgcttgaacctagcgaccgtcaaatagtttgctaccaatatttatacgggatgtatccttgtccgtaatcagataaatggatctatactgtcctagcataagcatgtgggaacatccttgggaagtaagcgtgcttcgccttcacgatcaaccagtaaagaaagaagcaggggatgtgagcgatggccatgccgaagtaccatagaggggctccagacgatgaaaggtccagaaatgggtacggccaccaggataagccaccacaagcatgaagaacccactggaatgttacataggcacagctccagaaaacaaagaaagccattcggtaccagggaaaaggcatattgttgagaactgtgtctatgagtagaaaaacggcatttagagagtgcatgccatcagtgaccaatgataacccaaacttgtcacggtagaaaaatggcacaaggagcccccaaaatgtgacatcagtcaacattgttgcacctgcactagtctggtatatgatttgcatgcaacgtccccagaacccagctcttttctcgttcactatttgttcataatagctcggcaacttgttcgtctcatccttttccctctctacagatacagaagaggaaaggccacgattttcaacatcgtcattaagaaatccatgggattcatcagctttccttgagcttttctttgagtacacccaacatccatgagctgatatggctgttgcaaacgcaaaatatatggtgaccaatagaaaggtccactgggtgtagaagtagaagacggagatgccgtggccgatgaggagtcgcgcgaggagcgcgaccgcggcggcgagcgcgaaggcgcggtagccgagg

SEQ ID NO: 38467 - DNA, 355 bp, Setaria italica
  Peptide Sequence Number=SeqID_104441
ggcatgatccacgacaagggccccaacggcgacgcaggcgctgacggtggcgacgctgttcccgctgggcgggctgctgctggtgctgtccggggctggcgctggcgggctccgtggtggggctcgccgtggccacccccgtgttcctgctcttcagcccggtgctcgtcccggcggcgctgctcatcgggatggccgtgacggggttcctcacgtcgggcgcgctgggcctgggggggcctctcctcgctcacgtgcctggccaacacggcgcggcaggcgttccagcgcaccccggatacgtggaggaggcgcgccgcaggatggcagaggccgcggcgcacgcgggccacaa

SEQ ID NO: 38468 - DNA, 1334 bp, Setaria italica
  misc_feature (1303)..(1334): n is a, c, g, or t
  Peptide Sequence Number=SeqID_104442
agggaccaatagacgaagacggtacgtcggcgaggtcgtgcagcccaaccccgggttgctcagggagatcgatccgggtaccaggttgattgacgcgctggagctcatgaggcacggagtgaagcgcttccttgttcgcaagagtgggagctggaaaggcattaccaagaggttttcagtactttataatggcaaatggctgaagaatatggaatcaacatctccaagcgcagcgagcagcagcaggcagttgtcctcgtctactggttctgcttctgcagacaagttttgctgcctctcaagggaagatgttctccggtttctaattggatgcctcggtgctctcgcgcccatcccattgactcagatatcttcccttggagccatcaacccacactacagttacgtagaagcatctgcgcccgccatggaagcaattcagaagatccctcaagacccatgcgccgttgccgtagtggagacgactccagatggaacccgtaagatactaggagacatctctacttacaaactgtggaaatgtgactatgtttcagcagcatgggctctggcaaacctgtcagccgggcagttcgtcattggcgccgacgagaacgggtcaacgcctatctctgtcctcccggagcctcccatcagcccatcatcaccggtggaagagatcagccccgggcgctcgcccagggcgaagaagttcagcagcaggagcatcggtttccaagcgaaccagatgtcggcatggcggacgcggagctcgttccaccggggcaggagcacgccgctgacgtgcaagagcacgagcaccctcgccgcggtcatggcgcagatgctgtcccaccgggccacgcacgtctgggtgacggacgcggagtcggaggaggacggcgtccttgtcggcgtggtgggctacaccgagatcttctatgccgccaccagaagcgcctccccgagcccgacaccgtcttcttgatgcaccgcactgtattgtacagtagacttgatcctggtggtcagccccggtgcacggcctcgcaccgaactgtacactgtagtcgtctgatctgttggtttgtctggagagtttttagatattcttggtctgcgtagcgcaagacttgtggtatatattgtttgcattcgaataaagtttaggacttgcctgggagcctacaccattttgcatgctcccctgcagctgccaaatgtacgtatggatgataccttactctttcacatgtataaattttttttgaacggctttcccttaactaaactaaaaaaaaannnnnnnnnnnnnnnnnnnnnnnnnnnnnnnn

SEQ ID NO: 38469 - DNA, 323 bp, Setaria italica
  misc_feature (296)..(296): n is a, c, g, or t
  Peptide Sequence Number=SeqID_104443
tgggttattatttgaaatcgggattgagagatcgatccttattctcccgcccccttccagatccaggactctggattatctgaagggcaatgatgggaggctggggggtttcggatgggtacgagggatcaaagaggccacgaatgatgatggaatcgaatccctacttcgcagtgaacgcagggagtccattggatgtctcaaagagggccaggatgatggaaccaggccctccctattttggggctatgggcagcaacgctggtggtgccagcggtggcttctaccagcccttnagcagcaacttagctggtgcaggggtt

SEQ ID NO: 38470 - DNA, 294 bp, Setaria italica
  Peptide Sequence Number=SeqID_104444
tcgccttctccgtccggttctcccccgatacccctaacccctagccgcccgaggcagagtcccctctcctgaccgcgaccgggcgccctctcctccgccaccccgccggtcgtcggccgatccagatgaacacgcctccttccagatccaggtatgcttgggccgcatctgcacctctcccccttatccccagctgcttattcctcttttactggttgcgatgccctagcttgattggcgtgattgctcgcttattctgccttagaatccgccctttgatgtgagcccctgtaa

SEQ ID NO: 38471 - DNA, 1284 bp, Setaria italica
  Peptide Sequence Number=SeqID_104445
gtcgccttctccgtccggttctcccccgatacccctaaccctagccgcccgaggcagagtcccctctcctgaccgcgaccgggcgccctctcctccgccaccccgccggtcgtcggccgatccagatgaacacgcctccttccagatccagggcaatgatgggaggctggggggtttcggatgggtacgagggatcaaagaggccacgaatgatgatggaatcgaatccctacttcgcagtgaacgcagggagtccattggatgtctcaaagagggccaggatgatggaaccaggccctccctattttggggctatgggcagcaacgctggtggtgccagcggtggcttctaccagcccttcagcagcaacttagctggtgcaggggttagcactggcatccaaaactttccaggtgtccggctgcgaggactcccttttgattgcaacgaaattgacatctgcaagttctttgcggggctggaaatagtggattgcctcctggttaacaagaatggccgctttactggtgaggcttttgtggtcttccagggggccatgcaagcagaatttgctctgcatcgcaacaggcagaacatgggccggagatatgttgaggtgttcagatgcaagaaacaggagtactactgtgcaatagccaatgaggtgaaccaaggtgggtactttgagccagagtaccgccgctccccaccacctccaaggccgaagaagccagcggaagacaagggcagcatggagtacactgaggtgctgaagctccgtggccttccctactctgccaccaccgaggacatcatcaagttcttcctggagtatgagctgacagaggagaatgtgcatattgcataccgctccgatggtaaggctaccggcgaagcctttgttgagttccccacagctgaagttgcaaagactgccatgtgcaaggataagatgaccatcgggacgaggtacgtggagcttttcccgtcgaccccggaggaggctagcagggcaaaatcccgaggcaggcaatgaagaaatatagcttgacgctctctggttgtatgcagcagctgcgctcgagtttagctttcactctgcatgcttactgtatcgctgttaggttgtgctagtcagtgtcgtcccgttgctactgctcttgtggtatcttcttttatgcgaaaaaaatgtaacggttatcctctgttggatgcacttgtatggcataaatcattcatggattttgcttagtctgagttttatccacttcctgttgctaacg

SEQ ID NO: 38472 - DNA, 1430 bp, Setaria italica
  Peptide Sequence Number=SeqID_104446
tactgatgcatagccaaaaaaaagggacaagaatcactttacattcgaaaggcgtcagtagcagaggaagggacaagctgagtctacgacctatgctgccggcgagcacatgatagatacatcgatgatagttatacatatgcaaagccgcatcttcagtgtgcgcgcaggccccgtgcgcagacaggtcttatctaaagtctagacaaccacaagaatataagatgtacaagatacaagcatcaaaccggtcacaagttacatacaggcttacagctcccctaatgccaaagcttcatggaatgccatttgctaccagcaagcactgcacagtggaaacagatcgacctgcttaccatcttatgcttgcgggaaaactttatttggggggatattttcgcgccgctcaacataggcagctgggaaccacccggccttccctcggcattctccttcggcccaaccattgggagcaatctgacgaacaacaacataatcaccaacaattaagctaagttccttctctgtcgttccattgaagttatgcactgcctcagcaaggaagtattgggctttctcagcacgcttatgcgaagatataataggcggtgccgattctctcttctgcttctcagaggacatctcagcctcaacgtcatcaagtattgcagctaacctcagatggaataatttttctgcttctaccatgccaaccagccgctgaagggttacccgttgctgctgagattcaacagccgcaagcgcagctgctgcttcctttcctaacacagccatgcttgctttgtgctctatcattttagcttcagactgttgaagctttgtagtgtgctccggaattggagcttctctgacccgtgcctttcttctagcaatttcagcagaaaggatctcagcttcatgcctcatccggctataacgctgtgcaagaccgcgagcatcttccaggggtgcacccatagacattgccctcaatgggtctatagtctgggaagataaagttctgttgaaatcttcatactctttctcaatatttctcaaagcacctccatataatgatgctgcttttgcaagggcctcatcgcttgcactattttcacctccatatctatagcagtcctctgaaaattttgttcccacttcaatatgcttgtttccaatagataccaaaccttcaccagctctaacaatgtccttctggaaatcccttccagaacgagtagagctatacaatttatcgagctgttgatgtctctgtagttcaacctcatcaattacaacagaatctgagcgctcataaccagtagtactgaactgctttataacagcctgctgctgcttggcgacctgctccttgaacttgttcgcctgcttccttagcgcctccatctctcccccagctcctctcgtct

SEQ ID NO: 38473 - DNA, 503 bp, Setaria italica
  Peptide Sequence Number=SeqID_104447
aaacggcggcgtcctcggcgcggtcaagcgctgcaaggacaggctctgcggcgcgggcaggagagccgaggagggagccaaggacgcggcgtcccgcgccgagcacgccgcggaggacgcggcgaggggcgccgtggagacggtctcggacgccaaggacagcgccgagaacaaggcgttggacgccgcccggcacgggaaggagagactgaagagcgccaaggacagggcgtccgacgcggcgcgacaagggaaggagacgctgaaagacaaggcgtccgacgaggcgcaccaagggaaggagactgtgaagagcgccaaggacaaggtcgccgaggcggccagcaaggccaaggagaaggcgtccgacgtccagcacggagcagccgaagccgcaaagggcgcgaaagatcgggtgtccgaggcggccaagcacgccaaggagaccgtccggggcgccaaggacagggtctcggacatggccgagagggccgaggagtacg

SEQ ID NO: 38474 - DNA, 496 bp, Setaria italica
  Peptide Sequence Number=SeqID_104448
ctcgacgcgctccgacgaggaggggttcggcggggtgtacggccggaccgatccggtggagcaccacggcacggagattcaccccagccatcccgagtacgacacgtcgcaggggtctgaggtgaaggagaaggagaaggcgcgccacctcaaggacgacaagcgcgccacctaggcggcgggcggcgatgcatgtttcgatgtcaggctcgtcgccgtttagtttgcttagatttcgagatgctatttcaagtttgctgagatgtagtaagggtttagtaagctgttttaaggaacttgctacggaggttgttctttctactccagctccttttatgtacgataagaaattaagaactattggaatgccttccccgggcattgtctactaaacctgttttaaggaacttgctacggaggttgtcgtttctactccagctccttttatgtacgataagaaattaagaactattggaatgccttcccgggcattgtc

SEQ ID NO: 38475 - DNA, 865 bp, Setaria italica
  Peptide Sequence Number=SeqID_104449
ggcccatgttgtggacgctcttgttgggcgcacctgcaggcggcgcctacagctccggcaaatgaggcgctcggttggtttagataggcggcaggaggttagcactagttggcctgttattcaggacttggtttgttaagtagccggcagtatcataagcgcgaagctgaacccgttgtaagccgcgcggcctcaattcactaccgcgcgctttggtgccttggagcgagtggcagcaccacagtacaaggctgcaaccaaatcacaggcctaactgacagtcttatacggaaatccaacatatctacaactacagacagatacacgacacagcccagacataaactcgagccaaacctaacgaaaaggaggtacgcacgtacccaaatccaactacgcagcacacagcagctgatgcgacttccataacacaagcaacacacttccacacgacacacggcaaaccgaccgacgaacgaacgacgctaccgaacacgtacacgatattacagcgcgacgtgcacgatcgacgtacgctcatcagtggtgtcccgggagcttctccttgatcttgtccatgaagcccttcttctcgtgcgcccccgctgcatgcgtcgtccccgtcgtcgtcgtcgccggtgccgcgtgcccggccttgcgctcctcgtgcttgtgggtgcccgggagcttctccgagatcttctccttgatgctcttcttcttccgccgcccgccctgcccgtcgtcctcggagaacgagctggagctggagctggagctgccggaacgcgtcagcttctcgccgagcgtcgtgtgctcctccctgctggccggctccagctgggagctgccgaacgtgtgctcc

SEQ ID NO: 38476 - DNA, 435 bp, Setaria italica
  Peptide Sequence Number=SeqID_104450
actatttatcctgggctgtatgtaccggcggagcgggtgcggggcgtgtgaggccagtgttgtgattttggattaggtacagggtttaattaccatggagagctggttttacttgatggtcatggatagtttggtttatcttgtctatagtcgattcctggaacatctcgttggagctcagtcctctgattcctgtgtgattttgtataaaattgatctgatctggaattgtgtggtatttttttttcttgaaggatcaagtgccgttagttctgagcattgtatagattaatataggtaagatttcatagaagatctgagcatatgctcgtatgaagtttgtaaatgcaaacgaaggatgggtttgtccggagtcttgttttgaaaggattttgaaatcgtggtagacctttataaagtacatttattaattaa

SEQ ID NO: 38477 - DNA, 355 bp, Setaria italica
  Peptide Sequence Number=SeqID_104451
cacgtaaacaatgactattgatgcaagtctttattttcctagtagttatttctatgttttatgactattgtatggctatgtgctctgtgattatctatgcttttatgcttttattcaaataccaaattacttaacaaaataataatatagtttcttccttgtgctatactttctagaaatttttctttcctgttgctatgttgtctagtttttgttgagtattagttgtactcataattcaaagtgcaggatactaagcggcaggaggaggcatagcttgctgtcgcttgggtatccaacacacagctgtattggcttcacatggaggtgaatttggttctggttggggttggac

SEQ ID NO: 38478 - DNA, 875 bp, Setaria italica
  Peptide Sequence Number=SeqID_104452
taagacaaggacacagacatctttttacaggagctgaggaaactggttcagcatttggctttgacctggcgcccgaacccatacctggtcgtactctaccagcagagagtggtcgttctggcagtcttgtcctcaagtttggtggagtttcacttggaaatctggaatatctagtgggcgaactggagctcgtggccgtgtatttggggaacttggacgggatgatggcgctgatgaaggtgctgaactccgaccactactggctaaggatctgccattagatgtcaagttattgctgccagaaatccgcccaacagaaggtgagcgaccaacagatggtgctgatgaacgcatggttggctgacgagtgggtgtggatgaccgagagctagaacggttcactgaaggaactgtacttgatgaagaactggtacgagttattgcaggaattttaccagaggatgagctgggacggctcactgcactagttgtgcttgaagatgaactggacaagattcgagaccgagatgttggagttgatgatcttgagctttgtactgacatggtcttgggagcagtggagttggccatagagctagacacagaaggatgatttttaactggagtagatggacgagttttagttggtgtagacgtacgggctttgacaggtgtagaggaccgtgttggcactggacgtgaagatgtaacagatgattttgatgcagtaagagtggcagtccgcttgcgtcggggttgtaggtcttgaactgatagaggaaatgtttgcattgaggattgatgagctgctgttgctagacataagagtagattgaactgcgtggggcgggagacagagttacttcgtgctggtc

SEQ ID NO: 38479 - DNA, 428 bp, Setaria italica
  Peptide Sequence Number=SeqID_104453
cagaccaccactttacagctatcattggccctttttccagcaaacagggccttcactttggaatttcgcctcatccctcgaactgcaatacccattggcatacgcaaccacaagcatcttcagcatctgtgcactctcaacaaagaacttaaggaaggcaagctcattccgctcccctcggaaatcatagaatgacaacatgttgatgctcgacaggacgcatttgatggcacaagattcctgccagaacttgatgccgagcctgccagtagattccgtagttttcttggaatggatatgcagcacctcgatgttgggaaagcatctgaggatgctgggaagcatcttggatcattgcgtactccaaatcgcacatttacgtccagggtcgtgacagatgggaccatgacacttgggttcaccactgt

SEQ ID NO: 38480 - DNA, 1243 bp, Setaria italica
  Peptide Sequence Number=SeqID_104454
cccaatggattactcattctctatgccacaataatccagtatattttagccgacaaaacatttactatcacaaacaagctaaaaaatctacaagaacattgttgcccagcacaaagatacaaacttccctacagaggagcaactttgctagagataatataggtaccactaatgtgcgatcgaagctcttttgccccgcaaaaataatgtgtgtcagtggtatccttattctcggagaatctcttgaatttcttcaaagaccaaagttacatagggttaggaattccatttcagtgtcgacatgctttgtccacagggccttgtattggttcaaagcgacatcaagccagggcttcatgttcccatcgaagtgtatcactgcagcacttcggattgcctcagggctgatgcttggattatagccaagacccattacatgccatgacttgtccaatgccttggtattgccatagaatgacatcagtccggctgttagaacagatgttggatcccatagctcgccatcctcattcatttccatgtactgatggaacaattctgtgcagccatcccgccgccatgcctcaagatcaaacacatttaccccgtatgcccatgcacaggcaccgggattgaaccgatcccgcacaatgggttgggtgaagttgaggtactttctatacctcctgaaacccccaaagcacatctcaacggcaccattcacctttccatccaagtcaacatgccaaagtgccgccaaatccttctgcaccaccacatcgtcctccaaaagcactacccttcgcagcccagggaacatatctgggaggtagaacctcaggtaatccagcaacacgacatccctgttgccgccctcgatctgcctaatcactggcgagttggtggtgttgaggaacaggaagtcggagtagtcaaggagctggacgtgcacgccgagcggcggcgggcggcgcaaaaaccaacgcggaatgcaggcaggtacatgggcgccgtgaccacgtggaagacgtggcgcgaggggtcggccgcggcacgcgcggcagaggccaccacgacggagacggcgagcacattgtcggagaagacggcgtagtggtacagcgcggggtcgtcgaactcgggggacgcctcgggttcgtcggcgaaagcggacgggttggcgagacgggcctcgaggaggcgcatggcgaggcagtggagcgacgttgggggtggagcccgc

SEQ ID NO: 38481 - DNA, 541 bp, Setaria italica
  Peptide Sequence Number=SeqID_104455
tgcacacggccttgcaccagacatcaggactggccgtcgctgacctctcccgtcctcgagactcatgaggtttctcgacacggcgccgcgtaaggcctcgcgtgccggaaaagaatggagcgcatcgtcgagcaggtcatagaaaggaagaaggaagccatggaccgcggcgacgacggccaggcggtgcccgggcacgacggcttcctcaatgtcctgctaaggctccagaaggagcgcagcacgcccatccctgtcaccaacgacatcatcgtgaagttggtctttgacatggttggtgccggcactgacacctcgtcgaccatgctgaactggtgcatgacggagcttgtccggtcaccggcggtgatggcgaaagcgcaggccgaggtgcggaaggtcctcaaggggaagagtgccatcaccgaggacgacctcaaagggctcagctacctcaagctggtgatgaaggaagccctccggctgcgcaccccgggtcccttctagttccgagggtttgccgcgagacatgcaaggtcat

SEQ ID NO: 38482 - DNA, 776 bp, Setaria italica
  Peptide Sequence Number=SeqID_104456
caccaacctcccgctcgtcttgacccctctccttcccttccgtcgtcgagtccaactccggcgcattcgtttcgattggaagcggcaagatgtccggcgaggaggaggagaacgctgccgagctcaagatcggcgaagagttcctgaaggccaagtgcctgatgaactgcgaggtggcgatcatcctggagcacaagtacgagcagatccagcagcacgcgtcggagtcggacccgtcgtcgcaggtgtcgcaggtgttcgagaagtcgctgcagtacgtgaagcgcttcagccgctacaagaaccccgacgccgtgcgccaggtccgcgagacgctcagccgctacggcctcgccgagttcgagctctgcacgctcggcaacctctgcccggacaccagcggcgaggccaccgcgctcgtaccatccctcaagtccggggggaggttcgtcggtgacgccggcaacgagaagattgagaagatgctcaacgacctctccctcatcaagaagttcgagtagagagtgccatgggcgtgccattgttcagttcttcagtttccctagctgtgtgagacttctcttatcaggcaacgatggtagtaggatttcctaccgatcatcaatgttacagtcaacttcatctgcctcaatcctgaattcctgatgtatgcttatccaagttaagagccctattgatctttgtttgtaattctgcacgaaaagcctgaaattgagctgatgagtattcctttgaaagtaagaaaaaaaaaaaat

SEQ ID NO: 38483 - DNA, 377 bp, Setaria italica
  Peptide Sequence Number=SeqID_104457
caatggatggtgggcgtcgaggagaaagggggctgctggggggagccggccgaggaggcgagaaacgatgtattggacggcatggtttttgggtgagtctccgcggtcggaatcagggagctatggttgaagaaggagtcgattttgctcaagattcggtggtgggtgggggtgatgacttcctctttgtatctgattcagaggaagaagtaagcaatgacttcaatgatcgttctttcgccccgcactccaaggtcccagcagccgggtgccgtttgcgctcccttcacggcgccgccgtactcagatggtctggaagctgttgcatggcatgacattgccggccactctcaaccaccggaagaagaagcatacgt

SEQ ID NO: 38484 - DNA, 287 bp, Setaria italica
  misc_feature (233)..(233): n is a, c, g, or t
  misc_feature (253)..(253): n is a, c, g, or t
  Peptide Sequence Number=SeqID_104458
ctctaacgattgcagaatgatgattgggttatccgtgaccaaccccaacagaaaacatgtccattaggtcccagcacgtaggatgatatccagctccagcaccagaccactattccttcctagtgagtccgtggcgccgcagccctaatcgctctcctccccttccgccccctcctcgggaaccacgtcggcgtcatcgtcgtcgtcgtcctcggcgacagcctcctcgggcncgacgaggtacgccccgggntgcggaggcgcgcggcggcgggtccgcgaaggga

SEQ ID NO: 38485 - DNA, 1147 bp, Setaria italica
  Peptide Sequence Number=SeqID_104459
taaggaaagaacttaaccaaataaggaactaactaagtaataaacggactacccaaaataagttacaaggactttagacaaaagtttagtaaacaggatgctaaggtaacaatgcttggactggttcccagcatcgcccgtacatggaaaaatacagattgtacagctggatttgactggtccgccatccgatgctttagctcatctggggaggcgtccagtgtggatgactatttatggttgatgggaagagcttgctacaagccagtaattgaatattgtggaggcacagagattggaggtggatttgttgctggatctttgctgcaacctcaagcgttgtctgcattcagcacacctgccatgggctgtaacttgtttattcttgatggcagcgggaatcccttgccacaggattcggtgggtattggtgaacttgcacttgatccagttttatttggatcatcaacaacactactaaacgctgatcatcaggaagtttattttaacgggatgccggaatggaacgggaaagtcctccgcagacatggagatgaatttgagcgtacttgtgatggatattatagggctcatgggcgcgctgatgacacaatgaaccttggtggcattaaggttagttccatcgagattgagaggatctgcaacagagtgaatgatgccatccttgaaacagctgctattggggttccgcctatcggtggtggccctgaacaactaaccatagccgtcgtcttgaaagaccagagctcacaagtagaggacttgaaccagctgaaactagcattcaatgtggctctgaagaagctgaaccctctcttcaaggtttcttctgtagtcgtggttccatcgctcccaagaacagcctcgaacaaggtcatgaggagagtcctgcgcaaggagttcacccaagcagcacaggcgaaaaagtcaaaaatctagatagaattttacttcctgcaaatgtacctcaaaaaaagagctatacagcaaactgtgcatatcaatatacataggccctccaacatccagttgtttatttacctccaaaaaaagaggtatgaggtgtattcatatttcgggaaaataaatgagctgtatttcctgggaattgttcacttgatgtgaa

SEQ ID NO: 38486 - DNA, 462 bp, Setaria italica
  Peptide Sequence Number=SeqID_104460
gtaccgtgctggcccaagcacgatacgaaaatgatccattagcatatctgtaggttatatcatcataacaatagattatgtctagtaaaagacttaagaagtgtcacgatgcagcacgaggcacgagaggctggaccgggcccacctctacatgtagtagcagcttaggagacctgtagttgattgatttggtttaagaaagtacatggtccttggatgctgtataacgatcgaggctctttaatttcattctctcactcatcgatccttagtcagcaggaggcgttgatgagtaaataattaattaagtgcttgtacaagtaatcacatgcagctcgatggatcgatctttattagcattcaccatgcatgcatgcttcttgctgactaaggatcgatgagtgagagaatgaaattaaagagcctcgatcgttaatacatggtccttggatgctgtataac

SEQ ID NO: 38487 - DNA, 704 bp, Setaria italica
  misc_feature (28)..(28): n is a, c, g, or t
  misc_feature (45)..(45): n is a, c, g, or t
  Peptide Sequence Number=SeqID_104461
tatccctgtgtgtccttggctagtcttntttagtttttttttttnttttttttttttttttttttttgtttaagcagcttaggagacctgtagttgattgatttggtttaagaaagtacatggtccttggatgctgtataacgatcgaggctctttaatttcattctctcactcatcgatccttagtcagcaggaggcgttgatgagtaaataattaataaagtgcttgtacaagtaatcacatgcagctcgatggatcgatctttattagcattcaccatgcatgcatgcttcttgctctctcactgcaccttggcgcagtcggtggagggcctgatggggtatgggatgtcgacgccgcacttgctggggatgccggccacgatgtccggcttcagcgccggcatgctgccggtgatctgcttcaggcacttgcaggcggcctgccggtcggcggtgctgcgggccgccgcgttcaggttcctcacgccggagcagcaggcctccggcggggcgctgccatggcccatggcgtagctgatgcacgggttcaggtaacccgccacctgcccgcacgtcaccgcgctgatcacagacggcgccgccaggaacagcgccagcatgaggagcacgacggcgagctgctgctggcatgcagggcgagccatggccggcctcgattggtgtgagatgctgcgagtgtg

SEQ ID NO: 38488 - DNA, 496 bp, Setaria italica
  Peptide Sequence Number=SeqID_104462
ggggggagggagccgcaaaaaccctagcccccacgtcccgatccaccacatcccatgaactagctcacctccccaaagcccccaccttttgggatcgatccccccggccgatcgatccgaatagccagtagatttcggaatttttagcacccgatttgatttaatttcctccccaatatctaattcctcgccgcatttcagcctaatttgcttagttcggatcccatcccgatcccgtagtaggcagcagcaagcattaggggttggtcaattaagcatcaccaccaccaccagcagcaagtacaagcactacagggagacaaagctctgacggtcggcggggatgcagatggacgcagagacggtgcaggcggctcctgcgctcgcggcccatctgctgaactcgccgaagccacaggtgagcaagtactacttcaagaagaagaccagtaaccacagcagcagaaatgacagggatgatgccaaccacgacacc

SEQ ID NO: 38489 - DNA, 609 bp, Setaria italica
  Peptide Sequence Number=SeqID_104463
ccacaacatacagggccagcacttaaaacttaaatatgccaacaacagtaccaactgcacccctagagtgcgcacgactcgagcaatctgcagcacttatatttccatgtctgcatgatgagtaccatatgaaaacatcagcagtaaaatagagatttcgtaccaattcatcaggaaagctggcaatagtgaatttatagatcgttgccatgctattcatgaacagtagttcaataattaaaaaaatacatcctcctacacttgcaaatagttgttttagacttgcctattcaaaaatagagccaccgcatacaaagaaaggatgactctgaagaaaagcagtgggcaggtccgcaggtgtctgcctgtacaaactatatcaaccaccggcgaccctggccagaacaataatttcatttcaattttgaagtgcaggcattgcgattggctcttgaaatgacaagataccactcccctatgactaattagcatcaaaatcacactgagcactgggcatcactgtatcaaaaactgggcatccttaaattgaatacgttggagtttgggtttgaatggatagagcttcgctggatgcaccatctgttctgc

SEQ ID NO: 38490 - DNA, 443 bp, Setaria italica
  Peptide Sequence Number=SeqID_104464
tttatgcggcaagtgccacaacatacagggccagcacttaaaacttaaatatgccaacaacagtaccaactgcacccctagagtgcgcacgactcgagcaatctgcagcacttatatttccatgtcttatcatcaccggtggtgttgtcccagcaagagctcaactcccggctccaggacatgtccaaaccacctgccactctcctctgcatccatcccggacactcgtggcagcactgtccacaaaccatcagccgcatcaaacatgaccagcctaccatccacaacattgtacaagcaaacaatccccaatctgtccgcggcctgaaaatgccagaaacttccatgccgaccagccaccaactcatcgaacgcctccactggcatcacacccacctccctccataacatcacctccttcccgtcctccagccgccacacca

SEQ ID NO: 38491 - DNA, 1210 bp, Setaria italica
  Peptide Sequence Number=SeqID_104465
tacctaccggacgggaccaaggcgctaactgccgcgcgttcctccaggggaggcgagcctccggccagctcagcgacaagtggctcatcgccgaaggcttgcccggcgaggtcgcttacggcttggacttcccctggaaggcgagcttgccgcgcgtcgagacgaggatgtatctggagcagtacggtggcggtgccgacgtgtggattgggaaggtcctctacaggatgcacctctttaacaacgacctgtacctcaagatggcaaaggccgatttcatcagcttccagagatcatcccgggctgagtggcacggcctccaaaggtggtgcgacaagaacaatcttgaaatgtacggtgtgacttcagagagggcattgagagcctacttcctggctgcagcaaacatcttcgaaccggagcgagcagcggagcgcctgggatgggcgcaaactgcagtgcttgcagaggccgtgacctcgcacatcctgagccattctagttctgacaacacaagggaaaggatcctatgcagactcgccagtggcagtctgaaaaggggagagaaggattcaacagctgaggatggcctcctgaatgcgcttaatgatcttatcgaccaccttacatctggcaatgcttcggacagtctccagggagcttggaagcagtggctgatggaatggaccgcagagaatggttcatacaaagggaacacagcgttgctgttagttcgctcagtcgagatctgttcggggaggctgggttcaactgagcagaatcagaagcttccggagtattcccagcttgagcaactcacgtattccatatgcagtaaacttggccatggagttcattcccaagtatgcagcttgcatacaaagaacgttgagaatttagacggccaagtggatgaggagatgcaggaactagctcagagtgtttctcagatcagcgaccctatgaacagggtgaccaagcaaacatttctccatgttgctaggagctactgctacgtcgctcattgttcgcctgaaacaattgacagccacatctccaaggtcttattcgaggaggtcatttaggaaagatcagggtgttacatgagtgctgtactctaggtctgaatatattatacgacattttggcctttggaccaaaacaaaaagtaaattatctaactattaaattgttctatttcgttctaaaa

SEQ ID NO: 38492 - DNA, 206 bp, Setaria italica
  misc_feature (164)..(206): n is a, c, g, or t
  Peptide Sequence Number=SeqID_104466
acttaactcaacgcacaagttttttccaatctgtccaaattgaaaacagagcgctcaaagcctcagatagctggtatgaatgtatgttatgatgactatgtttttactccctccatctatgtttatagagaaaattcctatgtgccactggaagatagaaaccnnnnnnnnnnnnnnnnnnnnnnnnnnnnnnnnnnnnnnnnnnn

SEQ ID NO: 38493 - DNA, 477 bp, Setaria italica
  Peptide Sequence Number=SeqID_104467
attaaatagataggagtatttgagaagcagagagctctggtagctggcagctctcgcacagtcgccgactaggcgtcgacgaccttgaagtggtccctgttcttgacgacgacgtcgtacatgtgggtggaacggaggctggcgaagtcgcgcgggatggtgatgaggtctgcgccgccgtcgcgcttgtggagctgcacgatggtccggttctcgtagtagcgctcccaccccagcgtccccagccgccgctccagcgcctccaccgaccgcatcacctcgttcgtcggcacgtacaccaacgccttccggctcgccgccgccggctgctccagctgcatcacgccgttccgaaacacccacacgccggcgcccgaccccgacatctatcgtctattcccagcagcctctgccttctttctagtatgcttcgctgattagctttgcttgctgctagccgaatgaagctactgtagc

SEQ ID NO: 38494 - DNA, 799 bp, Setaria italica
  Peptide Sequence Number=SeqID_104468
accttgaagaacatggttcgtgttgagcgcggcgttgatgatccggagcaggtacctcccgttgctccgcaccttggaacctgtacgtctgattcgcgttggagcagttgtagaagtctcccggcttgccgttgatggtgtaggcgttggagttgatcggcgggttgcctctgaggaacgcgttccgccttaggtcgtagacgttggcgttccaccactcgccgaggatgacggtctcctccccgtcgggcgtggggaacgggtaggcggcggcgccggcgcgggggcggatgacgatggcgccgtagacggtggcgcggaggtaggactcggtgtgggcgtgccaccacagcgtgccctcctgccccgtcacgttgaagcggtacgtgtaggcgccgcccggcttgacggggcactgcgtcaccatcgccggcccgtccgaccacggcgtgccgcgctggaataccccatgccaatggatggtcatgttgtagggtgactggttgacgaggcgaacaaccaccgtgtcgccctcgcgggcctcgatggtcgggccggggagctgcccgttcaccgccgtgatgatcaacggcggctggcacagctggcttatagaaaggttaccgacattgaatgtgtactccacgacagcagcttgagcaacacaggcaaaaagcaaggcgatgacgagaccaaaaggaagaaccagtgaccaagatcgagccatgcatatgcccagcaaagttctgctggttgatctctcggagaagaaaactgctgtgtcagtgtgtacgtaaaa

SEQ ID NO: 38495 - DNA, 269 bp, Setaria italica
  Peptide Sequence Number=SeqID_104469
cagataaccaaactgaccttcttgacgggaagaacacaaattgtcctgccgactactccgccctctccttggagaactgggagatgtcgctgtgcttgaaaaaatcctcccagttcctcccatcgaatttcctgtactcgacatgcttcagggtgccggggtcgacgcaggtcacggtgacggccacgccgtccgggttggacctcggggagtagaaggaggtgatgccgcagaccttgcagaaggtgtgcttggccgtatgcgtgccg

SEQ ID NO: 38496 - DNA, 912 bp, Setaria italica
  misc_feature (880)..(880): n is a, c, g, or t
  misc_feature (886)..(912): n is a, c, g, or t
  Peptide Sequence Number=SeqID_104470
gttgtctggtccgcggcgcgccaccgccgccgcgcgccgagcgggccgcgggccggctaggggtgctgttcgcgtgctcgcaccggacgctgctggaccccatcttcctctccgccgcgctgggccgtcccgtggcggcggtgacctactcgctgtcgcggctgtcggagttcctgtcgccgatccggacggtgcggctgacgcgggacagggcgtcggacgccgccatgatccgggagctgctggaggagggcgacctggcgatctgcccggaggggaccacgtgcagggagccattcctgctgcgcttctcggcgctgttcgcggagctcaccgacgaggtggtgcccgtggcgatggagaaccggatgggcatgttccacggcacgacggcgaggggctggaaggggatggaccccttctacttcttcatgaacccgagcccggcgtacgtggtcacgttcctcagcaagctcccgacggagctcacctgcgcggggggcaagaccagccacgaggtggccaactacatccagaggctcatcgccgccacgctctcctacgagtgcaccagcctcaccaggaaggacaagtaccgggcgctcgccggcaacgacggcgtcgtcgccgctccaaagagctagtaatggttgctagattatattaaaaaaggggggaagattgggttatattaattattgtgatgtgtctttgcttgtgaagtcattgttgatgatgcatggcaaattggcaatgggcagtggttttctttctctttggtttggtcacctctctagctactgtattgtactgggtgtgtaccggcaggagttgaatgcaagatcacacagttaaaagtgaagaaaggggacaaaaaaanaaaaannnnnnnnnnnnnnnnnnnnnnnnnnn

SEQ ID NO: 38497 - DNA, 817 bp, Setaria italica
  Peptide Sequence Number=SeqID_104471
gtctggctacgggttccgtagttaccggtcggcgtctttcttcatctgctcgcaccgcacgctgctggaccccatcttcctctccaccgccctcggccgccccatcaccgccgtcacctactccgtgtctcggctgtcggagatcctgtcaccgatccggacggtgcggctgacgcgcgaccgcgcggccgacgcggcgatgatccggcggctgctgacggagggcgacctggtgatctgcccggaggggacgacgtgccgggagccgttcctgctgcggttctcggcgctgttcgcggagctgacggacgagatggtgcccgtggcgatggagaaccggatgggcatgttccacggcacgacggcgagcggctggaaggggctggaccccttctacttcttcatgaacccgagccccgggtacgtggtcaccttcctcaacaagctccccgccgagctcacctgcagcggcggcaggagcagccacgaggtggccaactacatccagaggctcatcgcgtccacgctgtcctacgagtgcaccagcttcacccgcaaggacaagtacaaagcgctcgccggcaacgacggcaccgtcgtctccaagcccaacatcgacaagaagcaggtcatgggctgttagcaaagattaatcgtacgtcttgcggttgtttgtacggcctgtctgacaaaatggccaataagcagcatcgtactgtgcagtatcagtgtacacatatatgtacgcgcccttccgtgcttcattttcttggttttggcacgcacatacgtgcgtatgtaattgttcttttaacgt

SEQ ID NO: 38498 - DNA, 777 bp, Setaria italica
  Peptide Sequence Number=SeqID_104472
tgagtggtgcgatgccaaaatgggttccgaatatttttcatgtatgttctttaattcctttttaagtatccgaaggcgttttgccaccacattcatctgaggacgtttatgaatgtccagtgttaggcattcagtagccaatttcttcatttcttttagaatcttcatattgttctcatttgctattgcagcatcaaatatttctctacctttcccatatgcacaggctttattgaacgatccaataaggttaatgtcaccttttcttatccttttccgagctattagttccaagagaactattccaaaactataaacatcactcctcggagtaagacagccctcctgaaagtatataggatccatgtaagatacgcttccttttatatgtacagtgtactgagtgacaccacctgaaagaagccttgacactccaaagtcagacaattttgctgtcagattgccatctagaagtatgttggcaggcttaatatcaccatgacaaacaaggctgtcgcttgataaatgcattgaatgcatatagctcaatgcttctgcacaccctatagcaatacccagtcttacatccaaagggatgggaatttcactgtcgtggagtatgtcatccaggtttcctttggagatatacttagtaacaatcattagagtactttccccaatgcaatagcctatgagctccaccacatttttgtgactcatttgactatggatgcttacttcttccataaactcttttcttaaatctttgctgatata

SEQ ID NO: 38499 - DNA, 940 bp, Setaria italica
  Peptide Sequence Number=SeqID_104473
ggaggccatgctggccgccttctcccgcgtggacggcgaggtcgccgccatccagatcgcgaggaaggacaccagcccccgcacaccgagggctccaccgccgtggtggtcgtggtggagcccggcgcatcgtggtcgccaactgcgggactcccgcgccgtgctctgccgcggcggcgtcgccgtgccgctctccaccgaccacaagccagaacgcccggatgagttggcaaggatagaatcagtaggtggccaggtcatctactggcagggaccccgtgtcctgggggtgcttgcaatgtcaaggtcaattggagactatttcatgaagccaagcatatcagctgagccagaggtgaccgtgactgaccgcacgggcacggacgagttcatcatcctggggagcgacgggctgtgggacgccatgtccaacgagtacgcttgcagggtcgtgaggtactgcctgagcgggcgcttggcggccaagtaccccgcgacggtccacgggagctcggccaccgacgccgccaagctgctggcggacatggcgatggcgcggggcagcgaggacaacgtcagcgtcgtggtggtccagctgaggcgcatggtgtggaggaggaaggctgctcgccagaacggcaggacgtagcctgcgggagtcccctcccggctcgtcgcaaatataaagcatgcatggcgacggagcgagggaaggagaaggaaactcgcagtatgacgggacggtgtgggggaaaaaaaaagaaaaaagggctatgagagctgctcctatatatggtgtgattaggagtgtgttactcgtaggcttcgtagtccgtgccgttgtgttgcgttggttctttagttatcctgacatgcatgtggcattccggacatatgcatggaagcataatgaaacatgggatgcttttaccaaaaaaaa

SEQ ID NO: 38500 - DNA, 727 bp, Setaria italica
  misc_feature (607)..(607): n is a, c, g, or t
  Peptide Sequence Number=SeqID_104474
gaagcaggcttgcaaatttgccaaagatcatggcctcgaaaatggaccaattattcttgagatggacacctatagataccatgggcactctatgtcagatccaggtagcacctaccgcactagggatgagattgcagggataagacaggagcgtgatccaatcgaaagggttaggaagctcatgttggcccatgacttcgccacggcccaagagctaaaggacatggaaaaggagataaggaagcaagttgacgcagccattgccaaagcaaaggagagtccaatgcccgatccgtctgagctcttcacaaacgtttatgtcaacgactgtggttgggagtcctttggagtagacaggaaggtgctgaggactgttcttccgtaggctggcgaacaagaacacatacactaatacggtgtgtacgaggagagataccagaccagcgaatacaggcgaagaatcctcagtgttgctatgcgtttcctttctggcacgaaataagttcttgtgtgcgtgggtgtatagatttgcatccaattgcagaattgctggattctgtttctgccgcagtggttttccttatgggcccctggttttttttttacngttgcctctgcacggtgggtgagttgtaacaatgtgcagctgaaatttctcaggttcccgtgcgatgtggatgtgttcatctcctgcgctaatgtattgtgttcacagattccttacttt

SEQ ID NO: 38501 - DNA, 1461 bp, Setaria italica
  Peptide Sequence Number=SeqID_104475
gactagactacgtagcttccccctccccttcggagtacttctcggccagccacctacccaaggatgccggcgttggcagcgagctccacccggtcgttctggtgcctgggcaaagctgcagcgacctggaggcgcggctcaccgaggcgtacaagccgtcggcgccacgctgcggcgcaatgaaggggaatggatggtttggcctgtggaagaacgtttcagacctggcggccaatgactacgtcgactgcttcctggagcagatgcgcctcgtctacgaccctgccatcaacgactaccgaaacctgcccggtgtcgagacgcgcgtccccaacttcggctccgcgagagggttccactgtaaagaccctcttcacccgaaagagtgcctcgattacgtcagagaaggcctggaaagagtcggatatcgcgacggagataccctgtttggagctccttacgactggcgctacgctcctccagtgcctggccagcaatctcaggtctattcacgctactttagacagttgaagtcgctcgtcgagaccgcgagcaagaaacatcacaagaaggtcatcatctttgggcatagctacggaggaatggttgtactcgacttcgtcaggaacactccgctggcgtggagaaacgagtacatcaagcaccttatcctggtagcgcctgtactctctctgggtatcctaattcaggcacagctcattgcctttggtccaaatatgaaattcgtcggagctacccagtcatctttgagaacgatgtggaggagtttcgaaactggcatcgtggatctgccatctccgaaagtattcgggcacatgccacttgtgatcaccgagcaacgaaactactctgcatatgacatggaggatttccttgtcgccatcggtttcggcgacagtgttgagcctttcagacggcggatggtcccgaagatgaggtacttcaaggtacccatggtgcctgtaacatgcatcaatggagtgggcattaggacggcaaagcaactcgtgtactggaagagtgactacgacaggtccccagaaatagcgtatggagatggagatgggactgtcaatttgattagtatgttgacatttgacaaagagatgagacggcagccagcacaaaagaagcaattcaagtccgttaagattcatggggcggaacactctgggcttcttacggaggaatgggcggtaaagagagtcattcaagaatttttggaagcaaatcgaatttcttcataggctcacccgggtgctactatgtgctttaagtatgatatcttgtgaacttgtgtgtggatggattccaccattggcctgtgtagtcgtcaatctattaataaataagaattgcacgggcagggtaagtgttgcagaacaagctgacaataccaagttcttggaacatagagaaggtccgtgttacaggcaatgt

SEQ ID NO: 38502 - DNA, 351 bp, Setaria italica
  Peptide Sequence Number=SeqID_104476
taaggttaagttaccgtaaggtaaaggaggaagtggagaagctcagggagaggctggcattggcgaaggagaaggtggcagaagcgctggccgaaggcgggcagtcctgggtggcgtttgaagagttcttgaacgatttgaagctggccaagtgatcgagcacaggaggtgagcatcatggttgatcctggaagctgacatgttctaaggtttgcgtcaatgcccatccgaagtctgaactctttcaatgagacagcatggcttggatttgtgagaatttgacagcctccttaagcttaagcattgcattcaggaatgatatgtagtacctgtgcttaaacccctgaggat

SEQ ID NO: 38503 - DNA, 558 bp, Setaria italica
  Peptide Sequence Number=SeqID_104477
aacaccgtatatgaagccatcttgaaaaaatacaccccaatgaaggccgcaaaacagatagttacataagctatcttcagatgagcactgatcaagatactgaagatgccattgtatattcattctttctcttcggtagtattctgattcctgtttccgcctagccttttgcaagccatgtgtcagcacttcatatgtacccgagcaagcaggtattccagtagttctcatttgtgcgaatagatcaagagcaccatcaacttggccagcttgaaaataggcattgataagggctgtgtaggaaactacattcttgtctgcagtcaacaatctaaaaatatgagctgcgtatgcagattgcccagcatagcctaatctgagtattaaaatagctgatagatatgtcccaagattgtaaccagatttaatcaatccttcaacaatctctacatggtcaacacatcaacaatggttcatttgatttagttgtacctaagtaagtagaacaatatgcagatctaccaagttcacaccctactcttaaactataacgcataa

SEQ ID NO: 38504 - DNA, 433 bp, Setaria italica
  Peptide Sequence Number=SeqID_104478
taacttagtacggtacggtaaggtacggtaaggtacggttagtaactttagtcggggacgcggggacaagaagaccaagcgcgggaagcgatcaagggctcctacggcaacgcgcggcccaagcgggagaagaagatcgagcgcatcaaggaccgcatcgaggtgccccgctccacaccctggcccctccccttcaagctcatctgagagggggactcctccccccatccccctcgggtcgcgagggtactagggtttactgcgacagttactgcttctccgtttccaattagctgtgcgcctgcacgggcgtgtgtttttacttggttgtttctcaaattacgtggtgtcagatatgtactgtcgaactgctgtgattcaactttggctaatgcaatccttatggatgaattgaaatatgtttatcttccac

SEQ ID NO: 38505 - DNA, 240 bp, Setaria italica
  Peptide Sequence Number=SeqID_104479
atcgcggggctgcaagcttggcaggcagaggaacatgatgagaccgggatgtccttctggttatgcagatgcagcgcgacacggcgacaccttgctgtgcactccacatgagcaaacaaccccaaaggccagaggcagccgcccagtgtcctgcagtccagcccaacgaacccgtggaatcccgaagcgttttgtaccgttgctacagcggctgtttgtttgcatctctattggcaaaag

SEQ ID NO: 38506 - DNA, 831 bp, Setaria italica
  misc_feature (722)..(722): n is a, c, g, or t
  misc_feature (761)..(831): n is a, c, g, or t
  Peptide Sequence Number=SeqID_104480
agaacgagcgcaggactgtgcagctgtccctgtgcgcgccggcgctaccgtggcgcatccggcccagcagatgccggaggtgatggtggcacccatgaccatcttctacggggggcaggtgatcagggtggacaacgtccccgcagacaaggggatggcgctggtgcagatggcgaagtcggtgaacgcccgccgccgccggagaaggtggtggtggtggacgtgcccgatgaggagcccgaggtcgtcgctgagccatcggcggctatcactgccatccaggctaggaggctatcactgcagaggttcctcaggaagaggaaggaaagaaacgaccctgactacaacgacgatgagttgccgcccaagaagataggcggcggcggcggcgagccctgggaggacgacgtgcctgatgcctcgtggctcagcctctaataaagatcctgcagcgagcatgaggagagacaacattgatgccaaggggaaagagtgaatccagtgcaaagatgttgtctctgtctgagaattcttaggagctccgagggattcttagactagttatccgcccatccaagggtttgtatcctggcacatctaatgttctggaacaaccagaccctatctttttcgtcagtcgatgctttcgtgatgaaattaatgtaaagggacatcttggttatcgagaataaagcacaattatcagttgtgaaaagtaaccnaaaaactaaaagagactgccaaggcacacagggataggnnnnnnnnnnnnnnnnnnnnnnnnnnnnnnnnnnnnnnnnnnnnnnnnnnnnnnnnnnnnnnnnnnnnnnn

SEQ ID NO: 38507 - DNA, 404 bp, Setaria italica
  Peptide Sequence Number=SeqID_104481
ataccaagccctcactgtttctactcttgttgatactatttcacaaccaaagcacttcatacaaatgattcttgaatcatgaattcatgcatgcatatgaaactaagtaggtgaataatacaaagtatatagagaaactgcagaaaattggtgctggtttcgaggacttcgatttctattagcaaatcaatgtttatcagcaacagtgggcatatgggtccaaatatgttcattaacaatgcatgattattgctcataaatgattcaaataattaagctaactgctctacatattgcaaaagtaaaccaatcatcagaaattatcattaagtaaaaaaactaacctttattttgcttcagtgtgacttttattttctttttttacgggacttagcctgatcatc

SEQ ID NO: 38508 - DNA, 318 bp, Setaria italica
  Peptide Sequence Number=SeqID_104482
cggcggcacggtggcgcccccctgcagcatcatcgatggcagcatcgcgccccccacggccccgccgccgctcgccttggccttctgcacgaggctggcgaccagcgcggcggtgtccgggagcgagagccagtgcgcgaagaggtggtcgaggacgccgcgcagcgcgggcgcccccggcgccggcacctccggcggcagctgcaggaggtccacctgcagcggcagcgcgctcacctgcgccgccgcgctcagatccgccggcgccggtgccggttcctccaccatcgcgtctccggagcgctcccgcttccgctt

SEQ ID NO: 38509 - DNA, 683 bp, Setaria italica
  Peptide Sequence Number=SeqID_104483
gactcagtgtgagtagtggctccatgctgcaagagagatgctagagtgaacctcccatttgtgaattggagattctaggttgtacattgatataaaacgatgaataaagataacttctcttatcagagtaagccacatatcgcgccttgttgagctagtcatctcggggaattccaaaaccagaggttctgatagtgactcaaacacaatggctttgtcaaacaaaggcacgccaaaagggcctgttgaagccgtgttaatttggtgttgaattccagtgtctgaaagatcagccttaatagctgattcatatgaaaattttccagaagcctcaaaatatagtgccttgtttgtcagagtcactcgacctggccaactactggttccaatgtgcctcactacccgttgtgttcctgctgtcccctccatgtgcaaaatgaattcatcttcagcaaattcaattccagttggagttggcaaattttgcaagaacttgaatgacttatccatttctttcaggaatttgtcataagcaggataatgcagcctgttagctgtggtagcagtgagagcttcaaaagtgaatcgagcattgaccacgtcacaagccaaaggaatacagaaccaaaccacacgtaatagacttacttactaccaaacaagttaggactacttacgttaca

SEQ ID NO: 38510 - DNA, 329 bp, Setaria italica
  Peptide Sequence Number=SeqID_104484
gtattcgttacgtagtcgcggtcgacagcctcgccgatcttccatcgtgcatgcgctcgcggcgcggggaaggcctcttcgtcgccactcccagcgacgtcgtccgtacgtggtctgttcaggagttcatgccaagcacactaacacagttgccaagttctaatatcaccaaggtggtcttcataaagtgcagcggacggcatctcactaaggacctggacgtcattaccttgctgacaagctgcatattcatttgcatgccgtgatttgtttcttctaaatggactatcgtcttggatatgtgacaaacaatccaattgccgttctgg

SEQ ID NO: 38511 - DNA, 893 bp, Setaria italica
  Peptide Sequence Number=SeqID_104485
agtttgtttttcctttattcattggacatgttgggtctatctggaatgatccacaggttcttaacgagttcactcacggcaagcaagactccgtgagtaaatcggatttccagcgcgtgctgtccgatatacttcttggaatggcggctgggcttcagagagaccccatcatgatcctcagaataaatggggaagacctgaatgaatttcttgacagttcaaggtatgaacctgaagcagcggccatgttttcacaagtaaatcccggaaacaatgcgtcgttgcgccagtgcttgttggctgctcttcgacacctgacggtagaccacggcatgccacctgcttctgactcttgggttgtggaaaatatcatagagcctgcaatgcaaaagcttacctatgatcagctggatcagcctgtttcccgagaagcatttttccaagaattcaaaaagttcctgagcatcgtcactcagcgactgcaacagcaccctgtgattgtcgcacatacggagaacaccttcgacgggaatggtatcaggaggctgctgtcgaacaagttcgaattcgacaagctgttggattcggtttggagagatgtgccgaaagaacacaaagataaaacatcgaaagagtacctccgagttgcgcttgatagaattgctgactcggcaagcctaccaccttacggagctgttgatcaggtggatgctgtggtgaacgaagcattcaagatggctaaagccgatgatgggaaggtggtggacgaagcagagttcaagaagcttctgactgagatcctaggagcgatcatgctgcaactggacggcaacccaatctctgtatcgaccaacaccgtcgtccacgaaccgatgtccgcctccctccccccc

SEQ ID NO: 38512 - DNA, 379 bp, Setaria italica
  misc_feature (379)..(379): n is a, c, g, or t
  Peptide Sequence Number=SeqID_104486
taaaagaaaaataaaccaaataaaggaacggaacgaaacggaacgtaaagggtagggaaggactaccaatagactagacggacgaacggtatgggaggcgctggttgctgcggcgacggtgggagggacggcgggcagcagcacaacggtggtgtccatctgcgtgttcacgggggtgctgtgcctgtgcctcgtcgccggccacctcctcgaagagaacaagtgggtcaacgagtccatcaccgccctcatcatcggatgcctcattggagcgattatttttctgctcacgaaagggaagcactcgcacatcatgcggttcgatgagcagctcttcttcatctacgtgcttccgccgataatcttcaatgccggtttn

SEQ ID NO: 38513 - DNA, 294 bp, Setaria italica
  Peptide Sequence Number=SeqID_104487
ggtggccggcgacgacgagatgctgcggaccggcttccacaacggcaccccgctggaggccggcaagatcgccgactctcagcccgtcgacctcttcgcccccgccccctcgcagcagcagcagcagcagcaggaagacgacgatggccgtgggagcagcagggtcatcgcggagtcggagcccgtggacctggccacgagcgcccgggcgtggcggaggccgccaacaacggcaacaaccctgctccgccgccgtcgcaggggcggcagggggatgggccgccggtggacgtc

SEQ ID NO: 38514 - DNA, 606 bp, Setaria italica
  Peptide Sequence Number=SeqID_104488
tttgttttcttttagtttcttacctcatttcctccttgcaaaacagtggagatggctaggccggctcttgcgttcttgtgctgctacctgctgctggcgtcagtcgcggctgcacgcggtctcggcgacggcgagcctctcggccgccggaagaatgcagcgcgccgtctccgcgggggcgagcccctcggcgcccggaagaaccccgccgacccacacacctcacccgggactccgaactgctcgccggcgccgccacagagtggtggtggagggtatatcccgccatcgccatcctccggcgtgtccccgaccacgccaggtggcggtggcggctactacccgccctcgccgtccgtcggcacctcaccgaccacgccgaccacgcctggtggcggaggcggagggtactacaacaacccgccgtcgccggacatcggcacctctccgaccacaccgacaacacctggtggcggcggtgcgggtacaatgctcccccgtcgccgtccagcgacacatccccgagcacgcccggcagtggtggcgggtacggtgctcccccgtcaccgtgcagcggcacctccccaagcacgcctggtggcggtg

SEQ ID NO: 38515 - DNA, 297 bp, Setaria italica
  Peptide Sequence Number=SeqID_104489
acggggtaagaaccaacaaagggggtcgttcgtgacgccggacttgagagatcatgctccggagaagcctccttgcatcaggcacccttgacgcccgcacaaaggctcgacgctcgaactgcgctccaatttcacggtacacttcttgggcaagcgtactcttaccaacaccagcaggtccaagaatggatgctactttcagccgccctctgtcctcatcgacgttactgaagagcggcttgagccacttgacgagttcgccctctgtcctcatcgacgtttacttgtaagtagtct

SEQ ID NO: 38516 - DNA, 816 bp, Setaria italica
  Peptide Sequence Number=SeqID_104490
ttttttttttttttttagttgctaatatgaccgatgcattatgagaatcatcttgcatcctgtacatgggtatgatcaaatccttgaggacaaccagacatctttattcccaaagccgggttcaataatttctaagaaaatcgccagaacgcatgcatctcgttccccttattattcggctatcacaattcacacaacggcaacatttattcattcgatcaagctaagcaccgcatcacagagcatgcactgcattactgcggcagtagtctaaccgctcgttgttccttcggcgccgagcgcgtagcagaagggcctgccgtggatggtcaccaggttgcactccgcctccgacacgagcgtcgcggcgaggtcgagctgcgcggcccaggagcacgacggcgacgccaccacgccgccgccggctggcatgccgtccatcatgattctcagcgcgccgcaccggcagtagggcacgatgtccttcagctccctgcagcacctcgccctgatcgccggcagggggacgaaggggccgcggccggggccgcaggtccggcggacaaggtatgtgcggcagctttggagcgggttgagagggatgaccagcccgggctcgcaccagttcgtgctgtcggaggaggcggcgagggcggagagaagaacggcggccgagaggaggatgacatagctggaggagctaatagacgccattgttgctagcttcaacttcttggcgcagggatggagcagcatagctagatgataaggactgtaaaggtaggagcaagctggcaattgacatactaattattt

SEQ ID NO: 38517 - DNA, 874 bp, Setaria italica
  Peptide Sequence Number=SeqID_104491
cgaactgcaccgagaagtacccgtaaacgtaattacctaacgatcccaactcaagactcccctcggctgaggcaggtgaggagggctgacaggtatttgatactgagggatttccttgaccattgtgaggaagtaccatccctgacgatgatggtggccttgtctgtctgccattctcaacagaaccacttccaactgcctgtttggttccaccgtcgactgttgctacgtgctccttgaactcaacaaaatcttcacttggaactgagctcttacttgaataaccattctgttgcgaactggtctgcttcttgggcgattgacttgtttctctttgagctgtggtgtgctcagtttgtgaactggaatatccttgctcagctgaatagtactgacgaccaggtaccctctgtctttgctttctttctcgcatgatttctctttcaagcgccatccggtcctggtatgaatagtaattcactttcggaatgtacgtgccagttccccgtgacttagtagagacacaaaaccaagaagcaggatagttatctaaattagctaaaggagatgaggacaatgctgatccgttggagcacaatggcaaattctgctgccaacccacatccacttgggcctcctcggcatgtggttgctgagaatcatctcctgtgctatgagagcaataaactggagataatttccttctctcgccatcaatagatgaagctaatgataggctagtaccagtatttgactttgacttgaagatcattgtcggaatcttgaaagatcctcatctagcacaccagccaaacatgcttcttcaacagcctgcaggagttcatcaaacaggactccaggtgtactgaacttt

SEQ ID NO: 38518 - DNA, 718 bp, Setaria italica
  Peptide Sequence Number=SeqID_104492
gacagctcggcagcaagcttactgcattcagattgtgcctgcattgatttcttggacatactcgccatgtcttactaaagagaatagaagcatgtaatgtcaagaggctgcactgcaatcatcacaagagctaaacgccaagcaatcactagacccatgatgtacgcggttagaactgcagaaaatgtctgtctctagtgacattcgatcacccaccagtgacctcacaatgttggcatcgttggtaagctgtgagcatatggaaccactagagttctcatcgcggtcaaaccacccgatctcgaaagtgagaaatttagagagcatttgttccctgatcctctttgtgagatattcccccatggcagcaaagttgtaatgttgcccaatactgataaggaatgtcagcaccgcaaggccgacagagacaagtgcataggtccttgtttccttcttgatctcttgatgatctgttgagaagtagatcgagatcacgctacccatggcataggcaaacacaggctgtatgcttccagacacaattgcactaaagattcccataagtgcctgcttcatttctggtgcattaagcataagtagcctcctccttgatggcacgggaagctttggattctctgtgttaccataagctttacatcacccactgaacgtgttgagctcgacctacttgctgcagtgaaacccctgctcatgcttt

SEQ ID NO: 38519 - DNA, 527 bp, Setaria italica
  misc_feature (473)..(473): n is a, c, g, or t
  Peptide Sequence Number=SeqID_104493
caactgcacggcgcttatcctccggaacctgccggctgaactacgccgccgtggccagctccatccccgtgtgccgcgccatggccgaggaatacgagaagcccgacgccgccaacaagctggcccccagcgaccacttcgagtgctctcgccggctgaggaggaacaccgataaatgcctggtccgcatattcagagacgatgagttgcgggagctgttgttcagggatgtcggtgaggctggcctgcgggtcgtcctcgtgcaagccatgcaggaagagatgctcggcgtcgtgaacgacgatgacggatccttattcgctgtagctaagctagctagtactaccttgtaattagttccaatgttagctatataggagagctccatctctttatagcatgcatatatatgattgaccgatatcgagtaataataatcaacagtcaactagatataccaccaataaaaaaanaaaactaaaaagaagctagccaaacggacgaccaaccaagggggaaggttaagg

SEQ ID NO: 38520 - DNA, 812 bp, Setaria italica
  misc_feature (778)..(812): n is a, c, g, or t
  Peptide Sequence Number=SeqID_104494
ggttatcgatggcggcagcagcagcagcagcgcctacgctcgccgtcgtgctctgcgcggcggcggccttcttcgccaccgcccacgcaaggactgctgatggagacttgatcgctaagacttgcgccaacgcgacaagccacggccggtcattgtggcccttcgaattcgaagagttctgcaagtcgaggttgcgcatggacaagcgaagcgcggcggccaagcaccctcgtgacctcgccctcatcgccatggacctcacccagcgcgccgtggccgacgcggacgccaaggtcgacggcctgctccgctccggcgccggccaccacgacgactgcacggtgcgtgccctccggcactgccggctggactacgccgccgtggccagctccatccccgtgtgccgcgcgatggccgaggactacgagaagcccggcgcggccaacaagctggcccccagcgactacttcgagtgctctcgccggctgtggagggacaccggtaaatgcttggtccgcatagtcggagacggtgaggtgtgggagccgttgtccagggaggtcggtgaggctaggctgcggaccgacctcgtggaagccatgctagaagaaatgctcggcgtcgtgaacagacccagcactgtaattaattccaatgctagctatgagagctacatctctctatagcatgcttatatgtgattgaccgatatcgagtaataataataatcaacagtcaactagatgccaaaataaatgtcgtcatctattatcgtttnnnnnnnnnnnnnnnnnnnnnnnnnnnnnnnnnnn

SEQ ID NO: 38521 - DNA, 478 bp, Setaria italica
  misc_feature (1)..(4): n is a, c, g, or t
  Peptide Sequence Number=SeqID_104495
nnnnttttttttttttttttttagtttaacttgaatagctgaaaagttcagagatgatgcctagcataacattctgaaaattgaatagcttacaaagatcaaagatcacgcatagcatgacattcataatattcaatagctgacaacaagaacaaaattcaaaggagtacaaaggaacgacacgattatcccaccccattacattttacgcacataccacataatacttaataactgaagctgcacggcagaagttgtgaaagaataaagctgcatatagaacagaaccaaagacatgcgagtgtgcatttcattggcaaactgatattgttcatttatcaggttgccatcaccatcggcctcctgtggccttgcagcagctgccgcagctgctgatacccgctgcggtaatgttcaatggagaagcacaactgcctgatggcctcccgctttccctctgcgctctcggatatcacaa

SEQ ID NO: 38522 - DNA, 152 bp, Setaria italica
  Peptide Sequence Number=SeqID_104496
ccacaaatttaacctcttgtgtgcctgttgatcctgttgaatgtttagcatgtcaaaatattatcatcgaagtctttggttgtagactcactaacagcagaagcttggggtaattccttgctcatcaaatacttccgcttttgaaggctcag

SEQ ID NO: 38523 - DNA, 358 bp, Setaria italica
  misc_feature (341)..(341): n is a, c, g, or t
  misc_feature (347)..(358): n is a, c, g, or t
  Peptide Sequence Number=SeqID_104497
gggcagcagcggcggcagcgggcgcccgtccaccgcgcagaggctccaccactcgggcggcgccgagaacagcaggtcgtccccgcgctcccccgtggcccggggcgcggcgccggggaggggaggggggggctccggctcgcggaacaacaccacgttccggagcctcgagcgcctctccatcagcacgagccggaggaagtgaacgaaccggtcagccgaggaatttcgatatttgacatcgaatccgcagccctcacttattttgaccctcaattcacgtacctttcaaaaataatataatcctccgactgctaattcttttgattcaagaaatttcnctccannnnnnnnnnnn

SEQ ID NO: 38524 - DNA, 1000 bp, Setaria italica
  Peptide Sequence Number=SeqID_104498
gtccactctggagatggagcttgccgtggagcgcgcgaggagcggcgccgccggagccggcacggccgtgccatccaagccgccccagaaggccttcgtggtgatcggcatcaacacggccttctccagcaggaagcggcgtgactccctccgcgaaacctgggtccccagaggggagaagctgaggaagctggagacggagaagggggtcgtgatccggttcgtgatcgggcacagcggcgcgccgggcggcggggcgctggaccgggcgctggacgcggaggaggcccgagaccccggggacttcctgcggctggaccacgccgagggctaccacgagctgtcctccaagaccaggatctacttcaccaccgccgtcgccacctgggacgccgacttctacgtcaaggtcgacgacgacgtccacctcaacctcgggatgctgtcgagcaggctggcgaagcacaggacgcggccgagggtgtacgtcggctgcatgaagtccgggcctgttctctcgcagaaaggagtgaagtaccacgagccagagtactggaagttcggggacgagggcaacaagtacttccgccacgccaccggccagatctacgccatctccaaggatcttgccgcctacatctccatcaaccagccgatcctgcacaggttcgcgaacgaggacgtgtcgctcggcgcgtggctcctcgggctggaggtcgagcacgtcgacgaccgcagcctctgctgcgccacgccgccagactgcgagtggaagaagcaggctgggaacgtgtgcgcggcgtccttcgactggtcgtgcagcggcatctgcaagtcggtggacaggatgagggccatccacagcgcctgcggcgagggcgacggtgccgtctggagcgccgccgccatctgatctccgacgatcgatccaccacatacatgatgagcgccagctttctttttgaaagtgtttcttttgtttatttccatctagaatttt

SEQ ID NO: 38525 - DNA, 898 bp, Setaria italica
  misc_feature (851)..(898): n is a, c, g, or t
  Peptide Sequence Number=SeqID_104499
tttgactggctctccgtacatcgtgatgattcactccgacggcgaaatggctgccatgcacggctgcagggacagaagacttctacgtcaaggtcgacgacgacgtccacctcaacctcgggatgctgtcgagcaggctggcgaagcacaggacgcggccgagggtgtacgtcggctgcatgaagtccgggcctgttctctcgcaaaaaggagtgaagtaccacgagccagagtactggaagttcggggacgagggcaacaagtacttccgccacgccaccggccagatctacgccatctccaaggatcttgccgcctacatctccatcaaccagccgatcctgcacaggttcgcgaacgaggacgtctcgctcggcgcgtggctgatcgggctcgaggtggagcacgtcgacgaccggagcatgtgctgcgccacgcctccagattgcgagtggaagaagcgggccgggaacgtgtgcgtggcgtccttcgactggtcgtgcagtggcgtctgcaagtcggtggacaggatgcggcacatccacaaggcctgcggcgaaggcgaaggggccgtctggaacgtcgccatatgatgattggccttcacagctctcatcaaaatcgtcgttgtttgtgtggatggatcttcacttgcttggcgtccaatttgggccactatttagcatgaaacattctgcactgagatctcttctgcatttggcaagtatggccgtttcatttgagacggctatgctgtgattcgcgtaaaagtgcgtgggttgatgtgtgtacgtgattgctgaaactctgaaacagaaggaaatgggaagaatggtgattggtccataacnnnnnnnnnnnnnnnnnnnnnnnnnnnnnnnnnnnnnnnnnnnnnnnn

SEQ ID NO: 38526 - DNA, 437 bp, Setaria italica
  Peptide Sequence Number=SeqID_104500
tattcttctgtggacctcaggaatgggtttctatgaacaatcttcatgaagtgatgtttgataagtacggcaatttgtggcaccacagcagggtgcgaaaatatctgacatcggaagactatccagggagtgaaactgatggtagaccatggcatggacttgcattgctgctaaggaagtaccctgagcatttcgtgatcaacattaggaatgctggggggctgagcactgagtttgtctctttggtctcactgcaaccttgagaatttccagacacttctccaagggtgtcgtatagcttggagtatacttctttggtctcttttcctgcttttgtaaacagtatacctagttggaaggtaaagagggggtatggtctttaggattcatttttcctttctgttaatgttgtggtcgatacatcggttatgtggagg

SEQ ID NO: 38527 - DNA, 472 bp, Setaria italica
  Peptide Sequence Number=SeqID_104501
taactaactcagtgtgaatactcacaattattaccctccatccctccacaaactagaatggatctttccccaaagtttttcgccttgctcgtcgttatcgtcctccttctcggttccaatgagatgcagggcccagtgcgtgtggcagtggcgaggcagtgccagtcgcagagccaccggtacaagggcccatgtgtgcatgacacaaactgcgcaagcgtttgtcagaccgaaggtttcactcgtggcaagtgtgtaggctttcgtggccgctgcttctgtcttaaggcttgctagctgcctgggcctggcgacctgcatacatgtgctcaatagatcgaaataaaagatgtatgcatcggctaatggcatgagcatatgaataaaataaacatccggataataagttttgaatttgagacaataaaaaaaaatacagatggccaaggtttaaagaaaaaaaaaaaaaaaa

SEQ ID NO: 38528 - DNA, 185 bp, Setaria italica
  Peptide Sequence Number=SeqID_104502
tgtggaagtgatgctatcattgatttcaaggcttttccaattcagaaagtttattgggatgttatctctaaccagaacctaatttgattcaccaatttgatcttagcattgtgtgaagcaattggttcaccatcttcatcaactttcgtgatgatgatacgaccccttaagtttcttcttcttgt

SEQ ID NO: 38529 - DNA, 260 bp, Setaria italica
  Peptide Sequence Number=SeqID_104503
cgacgacggcgacgccgccgcgccgcgcaggagcgcgcgcaaggaccgccgccgcgcggtgcgcatcgcgtgggagaagctggtccggtggtcccgcgcggtgcgcatcgcgtgggagaagcgggaccaccggaccaggcgtaagctggtggttctcgggggagggtcgttcgggacggccatggcggcgcacgtggcggccaagaaggccgacctcgaggtgtccatgctggtcagggacgatttcgtctgccggtcca

SEQ ID NO: 38530 - DNA, 154 bp, Setaria italica
  Peptide Sequence Number=SeqID_104504
atggacggttcttgctcgtcgttcagcaggcagcatcaaattagtagccgtgaattacgtgcatgaacttgaatccttggtgattagttagtttgtacagtaagtgatggacattttccctggaaatctccatgggtctgcagtgaccaaccgg

SEQ ID NO: 38531 - DNA, 738 bp, Setaria italica
  Peptide Sequence Number=SeqID_104505
tgagccaaagcaccaatcattctaactcagattgcaagccaaatttcaagaacaacagagaagatcctgctgaggttaccaccttacagaagcacccaagaagcttcacacaccaaccagacagcttctagccttacatccatgagcatatgagagagactagaaactactaagaacatgaaaatatgaatagagcagcagcaaaaagatggatcataaaatatttctgtccacaacaaagaccaaatatgtcatctatgatcaacattaggcacttttttttatttagaatacctttcgctagaaaccagagttcttcatgcacttgacactcccgcacttggtccctcccccgtagagatcactctcagtgctggagtgcagaagctcatgtagggaacgacaccgtagatgccttcgcgcctgcacaccctcttcattcggccagactttagatcaacactgaataacccatcaaacctcattatgaaaaggacatcaaggccatgtgcatagccagcaagatgatatgacatcaagatgtcatcatcagggatgatcttctccagctcaatgactctggtttgcgcccatacccaatgctcgttaggacgaccagccaccctcgaccacaagcagagtcttgaatgctccacttattgtccacatcccaacccaccgttctctgtagctgtgagcataacactcttacctaataaagaaacgaaagaaaggaaa

SEQ ID NO: 38532 - DNA, 191 bp, Setaria italica
  Peptide Sequence Number=SeqID_104506
ctcgtcgacaaggaggatcttcttgcaggcctcatagcacatgaaggagattcctgcagccggcatgagcttgaggcctgcaagaagatcctcgtcgacaaggaggacgaagaggaggatggcgaagctggcgatggggacgaggacaagaaggccgcttgatcaagtggatggcaatggcattggagacc

SEQ ID NO: 38533 - DNA, 728 bp, Setaria italica
  Peptide Sequence Number=SeqID_104507
agacgaccgaacgtacggcgacggacggcggacgctgctcatcgggtcggcggcgggcgccattgcgagcacggccacgttcccgctggaggtggcgcgcaagcagatgcaggtgggcgccgtcggcgggaggcaggtctaccggaacgtcctgcacgccatgtactgcatcctcaagaaggagggtgccgctggcctgtaccgcggcctgggtccgagctgcatcaagctcatgccggctgcaggaatctccttcatgtgctatgaggcctgcaagaagatcctcgtcgacaaggaggacgaagaggaggatggcgaagctggcgatggggacgaggacaagaaggccgcttgatcaagtggatggcaatggcattggagaccaagatcttgcgaagcctggaacgagaaaagaatggagaatagtacatttggtgtgttcaggtcgtatgtttgtatttcatcgagtactatgtttggagttaagagtttgcgttttcatgttccatatttgtattatttgtactttatttgcctatttggagttcattagctgtcatgtttgcatgtttgtgtttgcactatactacctgtcgtgtcaagtttgtgttagtactacatttgaatatttggagtccaagttgttgcgtttagtaaacaattgcattcagcaagtgatgcgttcaatttggttccaaatattcaaatgtagtactaacacaaacttg

SEQ ID NO: 38534 - DNA, 236 bp, Setaria italica
  Peptide Sequence Number=SeqID_104508
agtaggcatacaatatcctgcagtctcaagattgtgcacaagcttctcaggaagaccacaggaagagaaacacataattggatcaggaacagcatcacccttgacacaaatgtcaagcttactccttagtgcactgatccgcctgtcagccaaagtaggtatatctggaaaattagtgtccttaatacagaagctctcatcgcccaggggaaggttcacacgctttgctgctttta

SEQ ID NO: 38535 - DNA, 375 bp, Setaria italica
  Peptide Sequence Number=SeqID_104509
tcgttgggtctttgctttgcccccgtagggggatcatctcggcgcacccgtgctgccggaacgcgcacggcacggacaggccggcgaggacgcgctccatggcgcggcagcgggtggccgtctccggctcgcggcacatcaggcactcggactcgtcatccagcgccacgtccgtgcagcaatctgaacatgagatgtggcctttggtgcactgaaaaaggggcgtggtcaatggaccggaacaacacagcactgcagcaggtcggcatcgagggtgacagtgatcttctccgctcggtgttggctcgtcgcagctgcagtctcagcttgcccccaggtgcaaacacggccggacccttcctcccgcaccctgtt

SEQ ID NO: 38536 - DNA, 794 bp, Setaria italica
  Peptide Sequence Number=SeqID_104510
gatttcagtttttggttaagttgaatatattgagccacacatgttatgaaaatatgtacagattcactgatcaatcatatgaagggtgagtgcatagaaagacatgcatgtttctggttaacaaagccattcccaaaggcccaaactaaacaagcaacaacaaacttgccctctgtagctgtatcctgctctcagtgctcagctttcactttgacatctccattaggcaaactgctctgggactgagccaaccgctttgcctcagcagcagaagtagcacgtatctccctgtattgttctacatcctcggggaaagcttgttcaagctcttcaaggagatgcttccgtaggctcttgaaagcgtcagtcttgcccttggtgatctggttcttggcgatgcagctattgagcacgtcccttgtaaactcgtcaggattcttcccgtcgtcaatcaaattgacgacctccatgggcacctggatgttgcacccctccgcgagcttctgcatcgtgtcaagctccgccacgagcgcgttcaggcgctggagaagggggagctgggaggcggagttgaaggaggagacggtgaggttgagctggtggagcaggcccagcgtcttctggatcgagctcgtcacctgcgccaggttctgcttcgacgcgtcctcgggccgctccccgccggcggtccccgacgcttggacgccgttccctgccgccgcggcagccgcggaagggttcggggcggcgttgtccatggcgtagtcggaggaaaggggaaggactgggtcact

SEQ ID NO: 38537 - DNA, 849 bp, Setaria italica
  Peptide Sequence Number=SeqID_104511
ctttgaacaaacacaactcgcgagcatgtgcagcagctcattggtgcaccagttgagcgcttagttttcttattctgcgctgtcccacgccataaactcattcatgaagaactccatttccgatacaccgatgcagagctgacagatcacctagctgcctctgatctgtccatcaagaccgcaagggagactggaacgtttgacacatctgaggcatggcgcaagaagctctgctccctacttccaccaaaaggcatcgaagcgagtcacttcaaaactggtgagaccatatcactttcgcgcaggatcatagcactctttatcttgatgactatcgccgacatctgcgaccagtacattgactaccaagacaagctctatgctaacgagaatggtcggctggagttccgcggtgacaactggggtgctttatggccaggaacttgcaagcctggtctatggatgaatgcagcatcaaggctagcagttctgtacaacctcatccttagagaggaagagctttacatgcaagagcggaacaaaatgggagagactatccgccttgaccgagatgaagaaatcaagctagtcatcccaccagttttcaactactgcaccaaggtgctggatcccaatgaacaaatagctgcaagggacctttattgggaagccatatgcagtgatgacagaaaggatagggactgggagaaagtggagaaggtcctcttggagagtatcaagaagaacccatttgtgggagaacctcacctggctcttacacaagtgtatctcaatatggagaggtatgaagaggcaaagaaagaggcagaggagggactcaagttgtta

SEQ ID NO: 38538 - DNA, 618 bp, Setaria italica
  Peptide Sequence Number=SeqID_104512
ccagtagtcgctactggcgccttttttgtccagcatgattgctagaggtcttgacgagaagacagcgccgacagctgtccctgcggcgcccggtatcggccgcctatcgccgaaaagaacgtgtgcaatttccgccacgctcaacccgaggaaactatccttgtagagacaggggtagagtcggatccccgactacattatctgctcctttggaggattttaattgttgaggaggtacccgaagtcgacgccggtcgtcttggagctactatgtctatgtttcaagacgtcatccgttcggtggaagttcccgccgctgcatcgggttcaggaagtgctgctttagcaacatccactggcagatcgctaaccgtagtgggtgttgaaaaaaccaaagaggcgactgctccaggtgccactttgggtacgactcctcatcttgcggagagtactcaaagaccagtgctcagcccgccatctgacttggagttctagagggccgtcgatgttttccggagcttccaggaacgaagtcatcaactggagtaggaatgtgcccgactgacggaagctctgagggttcacgaagttggagcgaagtttttttgctgtggaacg

SEQ ID NO: 38539 - DNA, 117 bp, Setaria italica
  Peptide Sequence Number=SeqID_104513
aaaacttccaattcttacagctaattaacagtccaaaacaccactcacactagactctagagatggctgacccagaatattttagtagtatttggatcctaaccagaagctagctag

SEQ ID NO: 38540 - DNA, 285 bp, Setaria italica
  Peptide Sequence Number=SeqID_104514
tgattttgataagaatatatcagcagagcttcctgatgaaaagaaacatctagtcctccattgacttgtctgcacacacatgatgcatggcccttgtagaactctcaacctgcattgtgcatgcatggtggatggccagtgtcgtttcaagtatccacgctagtttgtgatgccactcaacaaggaaggatgcatatcctatttatagaaggcgtcacgatctagcgtggatacttgaaacgacactggccatccaccatgcatgcacaatgcaggttgagagtt

SEQ ID NO: 38541 - DNA, 844 bp, Setaria italica
  Peptide Sequence Number=SeqID_104515
ggatgacgtgctcgtgcagctcgcccaacaagtcccggaggaactgtgggctatgaagctgggcttgaggttgcttcaagaaagggccagacctgattcattttggtggccatatattgccaatttgccagagacatttaccgttccaatcttctttcctggggatgacataaagaatttgcagtatgcccctctcctccaccaggtcaataaaagatgctgttttcttcttgagtttgagaaaaaggtgcaatggatgcttgacactctgcccttggaacatcatcctttttatggacaagatgtaaattcatcttcccttggatgggctatgtcagcttcctcttcccgtgcattccgtttgcacggtgaaatcccaatgctgttgcctcttattgatatgtgcaaccatagttttgacccaaatgctaggattgtccaggaaggaaatgtaaacagctcagacatgtcagttaaggttgttgctgagacgaagattgagaaaaatgctgcaataacactgaattatggttgccatcccaatgatttctttcttcttgattatggatttgtgatagcaccgaacccttacgatctagtggaactgagctacgatggagccctttttgatgctgctagcatggcagcaggagtctcatctcccaacttttcagcaccagccaagtggcaacaagatatcttatcacagctaaacctacatggagagggtgcaattttgaaggtaagcttaggaggcccggacatagttgatggacgtttgctagctgctttacgggtgcttcttgcagccgatccagaggctgtgcacaagcatgacctcaaa

SEQ ID NO: 38542 - DNA, 692 bp, Setaria italica
  Peptide Sequence Number=SeqID_104516
cagaatggtaactgattgtctgataggcaaaattaaagacctaagcggtggatttctgtggagatagcatcttgattttccgcaacaagatatcttatcacagctaaacctacatggagagggtgcaattttgaaggtaagcttaggaggcccggacatagttgatggacgtttgctagctgctttacgggtgcttcttgcagccgatccagaggctgtgcacaagcatgacctcaaaactatgatgtcccttgacgcacaagctcctttaggccctactgttgaagcctcagctctccgaacagttcttgcgctatgtgcaattgctctccaacacttccacacaaagataatggaagacgaggccattctaaaaggggaaccgcctcttaccactgaactggccgtccagtttagattgcagaagaagttcctgatagttgacgtgatgcagaatatcagccggaaaatcaagatgctatctccacagaaatccaccgcttaggtctttaattttgccatcagacaatcagttaccattctgtaccacagtcatactacttccaatgcctgacattggaaagttacatctccatcatccaacggatgtgcctttgtcttgcagttgattactttcctgtactgattgctgtgggtgataataaagccccaattttgactactaaaaaaaa

SEQ ID NO: 38543 - DNA, 260 bp, Setaria italica
  Peptide Sequence Number=SeqID_104517
gggtttgaacctagactcgtgatatcatgtaagattgtgtattatgcgtgggatgtattgcttgagcctcttgggctgattatatagaagtacatggcttggagggcaagtagcctctcctagagataaggaaggttatcccgggtttacgatcaatcctaaactaaccatatccggagttgcctaatatactctaacactacaaaatttaaaataagcgctattattttaagataatgttgatgatattatttcattga

SEQ ID NO: 38544 - DNA, 1195 bp, Setaria italica
  Peptide Sequence Number=SeqID_104518
ccgtcgtggcggtcgtcacgctgctcagcggcgtgcgcgcgcacgacgacagcggagactactcgtacgagtggtcaccgccgtcgaacgcgtcgtgggccgacagccactgcatggccttctcgaggtactcatcgctcggcgccggcgccttcctgctgctgtcgcggccggcgtgcccgtgcccgtggcttgagtggcctctcttgccgcctgggagcagcttcttgatgttgcccaggaacttgagcttgcgcggcccggccttcttccctggcgccgccgccgcgctaccggcggcggcagaggcggccatcgtcttctccgacctagcataagggctccgctcgggctcgtagtagttgcgcgcgggcgaccgctcgtggccatcgccatcgactgactcgtgcagcggggagaagagggcggggtcgaagccttcgaggccggggtggccgtaccggagcatcagctgcttggccctctcgctggagcggaagctcatgctcttgctcagctccagggccgacaggtctccggcgccggcgttgtcatcgtggtggtggtcctgttgctcggtagtggggtggccgtcatggtcgcggagctcgtggcggaggcaggcgttgacccacttgaggtagacgagctcctcgacgtgcgcgcagtggtcgttgtgaagctgctcgatctgcctggtcagcctctcgttgctctccctcaggtacctcgcctcctcagccatgtcctcctcaagaactggatcaacagaggacgcagcctgttgtgcatcctgcagcctgagggcaagctccaagttctcctcctccagcgcggcgttcgccttccgcagctccgcaatctctgcagccagcgcaccagccgtctcctcgccgcccctctccaggtccgccaccttcgcccggagcacagccgcctcgcgccgcgcctcctcctgctcggcctgcacccgcgccttgatcgcgcgcagcttctccttggcgcgcgccagctcagcgcgggcggtgtcgagctcctccacctgtgctctgagcctcccgttctcatcctgcagcgtggagaccttgagctgcaggcgccgctcctccacggcggcggcggcgacgcggccctcgagctcccgcagggtggccacctgcgccctgaggccttcgagctcctgcagccggagcta

SEQ ID NO: 38545 - DNA, 605 bp, Setaria italica
  Peptide Sequence Number=SeqID_104519
tgttctttcttaaccttaaagctactcaccaaattcttctttatttagacaatagtctttggaggctttagaagtgtagtaagaatgtctcggtggagccacagaagagttccttctgttattccagagaacattgccattctagacttcaaggaggaggaagaaagagaaaataaccccgcaggtgagaaaaagtcatcgaaagaggatacacaatctgtgagcaatgaaatcaagttccaaagcccaaaggaattgagcaatgataaaaaggtgaacaataagagtggcttgggggatggtaaggacggactaaaggacttgcttgggcaagtgaaaaccgataaagataattaaggaggaaaacaatgtgctctctctgcttcttgtaataaactaaataaggctgtgtttgtgtgtgcatgcacacatatgtgcgcactcatgtttggtacgtcagctgaataatgtctgtaccaccatcgcaattgtgctatatgtcccgctatttatcaatgtgtattgtcatcattgtgccatcaggcctcgttcaactattaaggttttgtttatgaatttatctaactatgtacctaaaaaaaaaa

SEQ ID NO: 38546 - DNA, 401 bp, Setaria italica
  Peptide Sequence Number=SeqID_104520
cacatacagcccattcatgttttcctaggatttgcaaatcattgcgtgccttgagaatagatcgggcacattcttctaaaagtctttgtcaaaatgctcgcagcaaagccaatctttcatgtaatcagttattaggaactcgattaactgaatcatgatgaatatattgccatggatatcagggaaagcatcatcaaaaggatcaaccagaagtaacctttctgatgcattcgagatcttttgagaaactgcaaggattatccgctgaccaataaactcctcattccctaacttacggaacaagtgctgcacagagaactgggcatctgagcagtcaactgatcctgaatctgaagtaccagcatttcaggaacagtgcacatcctttcatcaaacgagac

SEQ ID NO: 38547 - DNA, 637 bp, Setaria italica
  misc_feature (9)..(9): n is a, c, g, or t
  misc_feature (590)..(637): n is a, c, g, or t
  Peptide Sequence Number=SeqID_104521
cggcgtggnggaccccgtgagccgcggcgcggcggaggtgaaggcggagccggtggacgcgccgcccgaccaccaccaccagcagctggagttcaaggatcacgcgacggagccgccgcaggcgtggcccatctaccggcccaggcccgtgtaccacccgctccgagcctgcaacgggtcggcgggcagcgccgggagcgaccacgacgggtccaactccaggtgacgcgacgcggcctcgtcgccatcgctcgctctcagtaaattacaaatgctgccaagtactgtgatggatacaacagcaggtagaagtaaacacaaggaggagagctctaatcagctggagattttattgaccccatgtaaaactcaagtgcttctgtagcagtaacaacctcttgctagttctcttcatactactgtagcacatcctctgtctatagcagagagagccataaaactactagcttaccatgtgaattactccctccgtccatctagcgtttttcacacgatcaatgaacatgtaaaacgactgcatgtgttcatgcaacagtattattcaaatgtgcaatgatccattagaaatnnnnnnnnnnnnnnnnnnnnnnnnnnnnnnnnnnnnnnnnnnnnnnnn

SEQ ID NO: 38548 - DNA, 717 bp, Setaria italica
  Peptide Sequence Number=SeqID_104522
caagcaaaaggatagactcatttgaggctgaggttgccacactaagcaaagttcggcacaggaacattgtaaagcttgcctgtagcatcacaaacacagtctgcaggttgcttgtatacgagtacatgccaaatggtagcctgggggatatgcttcacagtgcaaaacgcagcatcttggattggccgatgaggtataagattgctgttaacgctgctgaaggactctcctacttgcaccatgactgcgagcccccaattgtccatcgagatgtgaagtcaaacaacatcttgcttgatgcggagtatggtgccaaggttgcagattttggtgttgcaaagactattggggatggtccggccaccatgtcagtcatcgcaggatcgtgtgggtacatcgcacctgagtatgcttacagtctccatgtgactgaaaagagtgacatatatagctttggtgtggtgattttggagcttgtcaccggtatgaagccgatggcaccagagattggcgagatggaccttgtgacgtgggtgtctgccaatattgcgcagaacgggctggagtctgtgctcgatcacactctctctgaggctgagcagttcaaggatgagatgtgcaaggttctcaagattgcactactctgcgtcttgaacattccaaaaagccgtccaccaatgagggccgtggtgaagatgctgctggaggtcaaggaag

SEQ ID NO: 38549 - DNA, 899 bp, Setaria italica
  Peptide Sequence Number=SeqID_104523
gcaggacaaccggttcactggtgctctgcctgccaagctgggtacactgaccaatctgcaagagttcaaggcttcaaacaattgcttctccgggccactgccgccctcgctcgccaacctttccttacttgacaatcttgatctgagccacaattctttctctggagagatcccaagggattttggtaagttgaaagcaattgtcacagctgtacctttcggataaccacctcagtggggactcccttcagagcttggggacattattgggatgaatacacttgatttgtcgaacaatgagctttccggtcagctgcctgtgcagctgcagaatctcaagctgactcatttcaacatatcctataacaagctctcagggactatacccgttctcttcaatggattagagtaccaagaaagcttcttgggcaaccctggcctgtgccatgggttctgtcagagcaatggggatcccgatgccaaaggacacaacactatcaaattgattgtctacatcttcattgctgctgcgataatcctactcattggccttgcttggttcggttacaagtgcaggttgcacaagatcaatgcttctgaattggatgatggaaagtccagctgggtgctcacatcctaccacagggtggatttcagtgagagggacattgtgaatagccttgacgagagcaatgtgattggccaaggtggtgcaggcaaggtgtacaaggctgttgtcaggcctgagggcgaagccatggctgtcaagaaactctggcctctcggtgtggcaagcaaaaggatagactcatttgaggctgaggttgccacactaagcaaagttcggcacaggaacattgtaaagcttgcctgcagactgtgtttgtgatgctacaggc

SEQ ID NO: 38550 - DNA, 357 bp, Setaria italica
  Peptide Sequence Number=SeqID_104524
tatccaagggaaatgaattgcatcatttgccatgctttgaagcttcccctagaaaatatctgagatccaatttacatgacaaagaaatctagagttacttgatggataaaatgtgcacgtcgacttagaattctagtgtcaggatagaatgcagttcttaatgtacattccaagctagcacatgactaggtgaggcaattgttgtattcatggtgatgaaagaaaaatgccattacaagacattactgtttcatacatcaagccttcccaaaaaacaattctgaggtacgttgcttaagcaaactgcaaacgcctacttgccacaaagtatatccacaactagcaatgcaaaagtgt

SEQ ID NO: 38551 - DNA, 318 bp, Setaria italica
  Peptide Sequence Number=SeqID_104525
tccagctgcttcatgtattgctttgctaattgcgtgcatggaagaagcagggagagttgataggaattgagcttgaattttggtgcggagggacttggattttggtgctagcttttggagaaaggagcagcggaggcgatttggattttccaaaggccaacacacacagcgctgggctgcttctccgccgagggctcgcggccttcgcagcgggcgaagcggtccttgatgcgcaaccgtggcgcgccagccgccagggacctttgccggcgacagcacaacggaggagaggagcggagcttctgaagataaggtagg

SEQ ID NO: 38552 - DNA, 580 bp, Setaria italica
  misc_feature (546)..(546): n is a, c, g, or t
  Peptide Sequence Number=SeqID_104526
tggttcctctggaccattggtaagagtcaagagcacacgctggctaaccaaacgaacaaacaaacaaacaaaggaatacaaattatcttcttattgattgtccaaagtttatcccactccatcagatttagattctttgatgcaccctgctcgagtataaattgtgtcaatgcttcaatcttcaagccacgacgtacaatgccttgtatagtagggaagcgtggatcagtccagccatctaccttcttgttttgtacaaacccgagaagcttgcgcttgctgagaagggtgtaaaccatattcaacctgctgaactcaaagatctctacccttcgcaaacccatatcttgaagtatacgatagtactgtgcattacgatcatggtattcacttgagcgaagggcatgagtcaccccttccaatgcatcaacaaacgggcaagcaaaatcatacgttgggtagaccttatattttgaaccaacacgatgatgagggacagtgttgcaacggtaatagacaggatcccggagtgacttgttaggggtnacggtcatgcccatatcttgaagtatacgatagt

SEQ ID NO: 38553 - DNA, 703 bp, Setaria italica
  Peptide Sequence Number=SeqID_104527
aagacgaccctcttcttgtacttgcacttttccgggccgggctttcacacgagcggcagggtgataatgagatggcaatcaagctcctgcagagaatagcagagctcaaggaaccagaaaagcccatcaacaaaacgtgctacttccaagggatggttattttgggaagcatattatccagagaaggccggaactctgaggctgccaaatatttgcagatggctatcgcttatgatccttctgtagaaagacttcttaaggaatgcgaggaaggaatggatgatcaaccaaagtcagaggagaaatgacatggtggacccgaaaagatcatagtaacagagagagcatactgctttcatttttggacattaacacatggtttatttggcatgaaattctgaaacgtcagccagcaaatcctagaccatacttagccatagaagaaatatgaaaccagtgggtggcaatggcatgattggattgcacgcctttgaagtctgcagatacctcacataaatctgatgtccatttcacaccacccagtgtgcttgagcccagacgacgttattacttctgtagtcacttgtgtccttgtgtagaatatagtcgcttcaaattatgtaaattaaaatgcagcaggaatttacacctgatctcatattactgaacatttttgcgtttgattcgtattctaaaaaaaaaa

SEQ ID NO: 38554 - DNA, 638 bp, Setaria italica
  misc_feature (1)..(45): n is a, c, g, or t
  Peptide Sequence Number=SeqID_104528
nnnnnnnnnnnnnnnnnnnnnnnnnnnnnnnnnnnnnnnnnnnnnttttttttttttttttcatcggagacagtcgcacaagcgacacaaacatttttatttgacatcatatatagcgcgtagagatagacacgcgtgtacaaccgtacccaatctctatatctatactacgggacgttacggcttacaagttgctgcacaagaacagtttggcagttgccacacgtagacttcgcatgcgtgcaggaacttgttgggcccggacgggagctagtatacatagatatcacgtagtacgtggcatgcatggatgcacgcgcacggcgcacgtactccatatacgttcaacttcaattggccgggcagatgaagccggcgacgcggtccttgtggcagtagttgaggaggagggtgaggtcgacggggatatcgagcacgataccaaggacgttggcccggacggcgaggcagaggcagacggcggcgtcgaggtcggcgagcccctgcagcagcgggcagcactgctcgtcgtccggcacgccgatattgagcctcagcagctgcagcacgtccgcgcacacctccagcttcagcgtgtcgatcgggcagctgctgctggagttgccgccgccaccgcc

SEQ ID NO: 38555 - DNA, 296 bp, Setaria italica
  Peptide Sequence Number=SeqID_104529
gttcaaggtgcagacggacgacggcaaggccgtcatggcgtacaacgttgcgccggcgaactggcagttcggctgcacctaccaggcctcggtcaacttctactagagagtgataagatgatgatgataggcgcggcacatgcatttgcgaactacttgggccagctctatggttgtaaaaagaggccttaaagactcgactcaatgggccatgttaagtaacagcccatgagctggggagaaaattattaaatagtgcatataccatcttcgaacaaaaaaaacaaaacaaaaaa

SEQ ID NO: 38556 - DNA, 807 bp, Setaria italica
  Peptide Sequence Number=SeqID_104530
aataaataatgtgcatttccgttagtactggttcaatgtagtacccacggttccaagtaactaggtaagctagcaaataaatgttgaccacggtcagctggatatttacagtaagtagaccagtggcaacattaaaacaagcttgacatacatgagactacacatatgtctcttcaattttttcacttggaagttgaaactggcatggatggatgcgttctggcgctgagaagaaaaaccagggtgtgccaccttttcggatgcacatccatcttcttggataagttaacagctaatataatctaaaaggaaacaaccaaataacttcaggtaatgttttcaaccttcccgtcctatgtgatgtacgtcagctttctagcacttataccacaatatcgaaagtgctgcattcttcacactgcatgtagagtgcagtcaggccaaacatagtctgtaaacagaacttgggcactgatttgcatcctctgtcaaagtgctctgtatgtgcattagccaatcgctctcgtaagaactccagcgttatcttatcttctccaaggtcaagccgtagatcacaaagagtacagtatatgaggttatgtgtatcccgtagctctcctttttggcatactgggcaccagatcttagcattttcggcaccctggcatagattatagcatccattaagtctccgagcaatcaaaggtgaaaacagaacacagatgactcatttataaatgggaaactgaataaatctggttgccgttgtcatataaccagatgcgctgcttatgtgatttcaaatta

SEQ ID NO: 38557 - DNA, 543 bp, Setaria italica
  Peptide Sequence Number=SeqID_104531
gggacaaaccctacttccagtcagggaaaccagattgttgccagctcaagggacataccgtctgaaacagttgttccttttagggcaggaagtggccaactatatccttcagggcctagcattatttggagaagtgctcccgtcaacctgggccagcaaacagttttgtcaaataatacgatgaacctggaccagcaagcagtttttcaaataatacgatgaacctgggccagcaagcagttttgtcaaatactacgatgccttacggctcaactagtggtgctgcttggcggccactccagcttaggaacagtgcccttgtcaacatgagccaacagagacagtatgtacacatgatgatgcaatacagcatgatgagaggtgccgtaccctatcatctgaggcaagaagcagcagcagcagcggcggcggcctcatcaacttaacaacttcaacccggcaacagcagtggccaagcaatattctggacacaagtagagtggtgatgggttaccctgcttgctggctccactcaagaccaag

SEQ ID NO: 38558 - DNA, 156 bp, Setaria italica
  misc_feature (135)..(135): n is a, c, g, or t
  misc_feature (145)..(145): n is a, c, g, or t
  Peptide Sequence Number=SeqID_104532
caagaaaataatcaatgaatgaagtacccatcagagaactgtacttgagaacagttataactcaagctagcggcattctgtagtatctggtgaatatggaggcattggaaacttgttcatttccccttccttgtntctctgaganaaggggacggt

SEQ ID NO: 38559 - DNA, 567 bp, Setaria italica
  Peptide Sequence Number=SeqID_104533
ctatgcataaagcaggttccgatacacctcctaggaagcacaagcttgcttctgagcccagtttggagagagtggatgctgtgttacacaactctgggttagtgagtgctaacaaagtggtcaatgagatgcccctagagctacaggcagcagcatctcaacctccaaaggcaaagcgggccagggtatcccccagggaaatgctcattgaacttgaggagggcagaggatgatagtagctcaatcagcgaattgccaatggccaaagtgacctcagatcctgagaataagcctaaacttatattggataagtattctactgattctgaaatggtggatggcgaggatggttcctgtttctttatgggtgaggcagtgcctcacgaggaggctaggcacaggtggcctaaccgctacgggagcgatcattgccttctgaagaaggataagtggagaaatacccaaacgttttccaatgctggcaaagctgtcttcgatgtcaaatgtcactatttgcgagctagtgtatgtggttttccttccggacccttaataaatgcacaatcc

SEQ ID NO: 38560 - DNA, 1013 bp, Setaria italica
  Peptide Sequence Number=SeqID_104534
tgcaacaggaaaacagataactatcaaagaaataatatgaataaacaggaagaaactaatttctcctttatgtgccataatacgatcttgcaattagtttacccatgcatctgtgtgctatgtaaggagttgggtagcatgtgccacttggggggtgacttgcaggtcctcatatgaaacttttatcttatgtttagcaaacgttacgaccttatatagtttgcaccatgctgaatttgtaagagttgacattatttaagtaaccatttggcttgtggcttctttgtttgaaggataagtggagaaatacccaaacgttttccaagtgagcaaaatgcattaacttttatgctcaatatgtacatctactattgaatacttgaagttactcacgataaaagttctatatttacagtgctggcaaagctgtcttcgatgtcaaatgtcactatttgcgagctagtgtatgtggatctactttatgtattggggattgtgcatttattaagggtccggaaggaaaaccacattatattggcaggttattagagttcttcgaaacgagtgcaggtcaatattacttcagtgtgcagtggtttttcagagctgaagacacggtcatggaagaccaagcacaggctcatgacccaaggagactcttttactcagacctgaaggacgacaatttactagactgcattgtttctaaagtgaccatcgtgcaagtttctcctagtgtaaatgaaaagtctcaatcaattccttctttccactactactatgacatgaagtattctctggactatagtacattctctaacatggaaatgggagatgcaaatgaaacattacagtcacatcacactagtggcaacgacaatgtgaaaaggattgattccactgaaaagcagaaatctcccgcaccagagatgagggagctctccctgttagatctgtactgtggctgtgggggagtgtcaactggacttcttggcacttttgttctttggggt

SEQ ID NO: 38561 - DNA, 971 bp, Setaria italica
  Peptide Sequence Number=SeqID_104535
gaatcatttcaagagcatggaaatttgaatgttggttacacaggaaattttatggtagttgtactactgttcttagtgtctccaattctccattgccatatgaacaatccaggataccaaatttagtggtagctatgatggcaattgaaccaatattgaatgcaacttgactttttgagcatcatgcattgaaatctacgtagtttccacaaaagtagatgaattttaatatcgcatgaaaaaaaaatcaactttatgcagatccaagaaaaaataccacttctgggggatgctcttgttattgctgggacagtttgttatgcatttagcaatgttggagaggttagttatggattatatgtctgctgctatcagcaatatttaaccatatttctaagaagcactttgtattccttgtatgcacaggaatactgcatcaaaaagaaagaccagcaagttgaagttgtagcgatgcttggattctttgggttgctagttagtacagttcaggtgtatcccctccgttgattacttgttacagccagtggagcaaactggcatgatccattggcaaagccatctgcagatttgctctcattcttacatagttaaattctcggcacaaatgtttctggaataaatatggtaaatttattattctagaaaaatcatgtcacctttaacctgataaatcttagatatatatttgaaaagaagagcctagaagtcattacctgatctctaacaatggtaagaaaatacattttaccatgaaactcttgtatctgtcagtctgccacacacctgactgaattgattaactagaagctcactccagctttggtcttctttgttctccatttccagataggtctgtttgcagtatacgcattggcattttcagtgttctacacagttactccctatgttcttaaggtgttttccatatgttggaaatgtcgaatgttttt

SEQ ID NO: 38562 - DNA, 379 bp, Setaria italica
  Peptide Sequence Number=SeqID_104536
aagtacctacaacaatgacgctcgacaagtacaccgtggagggcattgactttgtggaggacggcaagatgatccccgaggagaggctcgcctgcgacctcgatgccatcatgtcgctgctaaaggactgaacgccattggcgtgtcagttgcttctaacaaagatgcagggcaagtggaattctgaactttggaccgccgcaccgattgtgcatgagtttgactggaatagcaagttcatttcttctttttcttagaaagagacctgattttgcctgatgatcttaagatatttgatgtttcctgcaccatgttatcttgccaatgaattctactgtcgttcttgttctagaaatgaaatgcccaatagttcttgacc

SEQ ID NO: 38563 - DNA, 1411 bp, Setaria italica
  Peptide Sequence Number=SeqID_104537
ggtaaaatttaagtaaagaagaagttgtgtgagactgaacttgatatagtatctcagtgcataaatccaaagtccccaaaaaacaagcagtatttcgaaaacgtcgcccttaaaatcaatgtgaaggttggagggtgcaatacactgcttgagatgcctaaaggaataccttttgtcccggatgcaccgacaatcatttttggtgctgatgtgacccatcctgtagcaggagaagactcatcagcatctattgcagctgtggtggcatccatggactggcctgaaataacaacctataaagctctggtctctgcccaagagcataggcaggaaattatacagaatctcttctggaccactacagatccagagaaaggcaccgcagtaaatggtggaatgataagggagttgctgttatcattctataaaaagactggccaaaagcctaaacggattatattttacagggatggagtaagtgaagggcagttcagccatgttttgctctatgaaatggatgcaatcaggaaggcttgtgcttctatggaacaagggtatctacccccagtgacatttgtagtagtacaaaaaaggcaccacacaaggctcttccctgatcatagaaggcgtgatctcacagatagaagtggaaacattcttcctggaactgtggttgatactgacgtttgtcatcccagtgagtttgatttctacctttgtagccatgcaggaattcagggaacaagcaggccaacacattatcatgtcctgtgcgacgagaaccatttctcggctgatgcgctgcagatgctcactaacaacctgtgttacacatatgcatgctgcacgcgctctatctcagttgttccaccggcctactacgcccacctggcggcttcccgcgcaaggtactacgacgagcaagcagagggcgccgatggagcctctgtcgccagtggcggtccagctgcgttccgccagctaccgcaggtcaaggacaaagtgaaggaagtgatgttcttctgctgatgtacctgcgcgtgctgccggtagctgttgtggtgcatgtccggcttcaggcagcctcgatctgcaacaacaggccgtgttgatgtatgaagttgttagctgttgatgtaactgttaggatgcggtaaacagaggttggcagtttccgtactgcccagagatctgctgatgttttgtgccgtgacagtttgagataactttgcacaaggctcaatgagccaaacaggagggcatagcaggagaaatttcgagtcctgtgatgtgatgcccaagggaggcgattggtggaactcacttaccgaagtaggggaaaagaaaaaatacaagaataagaaaattaggaagaataatagaaagaaaaaaaagttaaaacgaaaaaaaa

SEQ ID NO: 38564 - DNA, 417 bp, Setaria italica
  misc_feature (384)..(417): n is a, c, g, or t
  Peptide Sequence Number=SeqID_104538
tacactcaaacaatttccatccatttcgacagatctagaacaacaggatggaagcaaagttatcatcaaatgtctgcaagatcctcatggttgcagtaaccatggttgctctcttgtctcccaccggggagtctgtgaaatatgggatgtgccagacgcggtgcctggagatccagcccaactgcgatgcgtggtgcaagaggattggctaccccaatggcggcgagtgtgtcgagccgcacaacattgactgttgctgctgggagataccaccatctgcgaaatcaaatggaaccgccacattgttgcaaccattgcatatgtgattgtgttggctaccaaaatattgaaataaaatgagcattaatcactactagaaaaagnnnnnnnnnnnnnnnnnnnnnnnnnnnnnnnnnn

SEQ ID NO: 38565 - DNA, 819 bp, Setaria italica
  Peptide Sequence Number=SeqID_104539
gcgccgagcagtagagcgccgccgaggagagcaacagctagaagctaggaaagcgagaaggcgaggtcgagaagatgagccggctggacacccggacgctcaaggacgagctgacgaacatggacaggcggccgctgctggacctgggccacccgctcctcaaccgcgtcgccgacagcttcatccgagccgccggggtcggggcggcaagggccgtctccagggaggcctacttcgtcaccgtcgaaggtctctcgggggactcggccgggctcgaccccaacggcggcaagaggagccatttctccagcatcaggggcgacgatagccagaagtcgctcgacgcggtggtaaaaacggctggcaaggaggccttccagtgggggctggcagctggagtctactctgggctgacgtacggcctgagggaggccaggggttgccatgactggaagaacagcgccatcgcaggtgcaatcgctggtgcggccgtggcgctgaccggggacgctggcggccactccgacaagcttgtccatttcgccatcaccggcgccgcgctgtccagcgccgccagcctgctctccggcgtattctgagcctgctaggggcggctccggacacgggttggttgtccggttaggttctcgagggttttagcataaaaagttgcattgcagctcaccgacgtccatcaaaatgtgtaatcgtagatccgtgtcagcttcctgcagcaagtctggtactctgcagttccaatgtaatggttgccccgctttatgtgtttccaaggcattctaaagttaaactttaatttta

SEQ ID NO: 38566 - DNA, 203 bp, Setaria italica
  misc_feature (166)..(166): n is a, c, g, or t
  misc_feature (170)..(170): n is a, c, g, or t
  misc_feature (187)..(203): n is a, c, g, or t
  Peptide Sequence Number=SeqID_104540
ttgaagaacaggcatactgcttgtgcagatgccttagggcaggtagtagtatacatacatatacacattgttcatcaaaggatgtgatactggtagttaaccacaaacagttcatacaaattctttcattctttacatgaataaaaaccattagtgaaaacaaaanaaanaaactaaaagaagactnnnnnnnnnnnnnnnnn

SEQ ID NO: 38567 - DNA, 1263 bp, Setaria italica
  Peptide Sequence Number=SeqID_104541
ttgggccttcgtctccacatcaccaatccggggaagggaagggagtgatgggggagtgcgaggacgccgaggagtacaggtgctgggaggagctgttgccggacgcgctgggcctcatcttccgcaaccttccgctccaggaggtgctcaccgtcgtgccgcgggtgtgcaagtcctggggtcgggtggtcgccggcccctactgctggcaggagatcgacatcgaggagtggagccagcagcagagcaaaccggagcagatcggccgcatggtcgagatgctcgtcggccgcagcggcggctcgtgccgccgcatcagcgtctccgggcttccctgcgacccgctcctctcgttcataggagaccgcgcgcgagctcttcgggccctggagattccacggagcgagatcagcgactccatcgtggagaccgtggcgccgcggctctccaacgtcaccttcctggacatcagcagctgcaccaagatcggcgcccgcgccctggaggcgttcggcaagcactgcaagtccctggtggggctccggcgcgtgatgcacccgatcgacctggtggacaaggagtgccagcacgacgaggcccacgccatcgcccgcagcatgcccaagctccggcacctggagatggggtacatgctgatccggacggaggcggtggcggagatcctggggcagtgccgcgacctcaagttcctggacctgcgcgggtgctgggccgtggacgacaagctcctgcgggagcgccacccggggctccgcgtcctgggcccgcgcgtcgaggactgctacgagaacacctactgggaggagtgctccgactactcggacgacgactcctccatctactcgtgggagttcatggacgacgtcgacggctactacgccgtcggcagcgacgacgaggccatctgggacgacggccaggggctcgagaacctcgaggtcaggttctacggcggcgggttcagcgagagcttggccggcttcgactggccaccgtcgccgtgagatagatggcagcatatgcagttcttcttgcttctactgtatgtgtgcgtgtgtgcgtgtgctgttcctgagcttgcagctatgttgttgctgtactgtgtctgcgacaccactcgatctccccctctagcttgcagatatgtgttaagtggactgctgctaatagtacaatctagatgatgtaaactctggtgtttacatggagcaaatcaacatgcatcggtgagatttcaccggc

SEQ ID NO: 38568 - DNA, 639 bp, Setaria italica
  Peptide Sequence Number=SeqID_104542
gaaaacatagtagagaggttgccaaaacctcattcattccttgtacatatcttatacccggattaatcgaaaaaagatggtaagtatacgcctcagtgactcctggttagacaaggaatctgaagagtccccgttgaaaaaattccatctcaggatgagtacgcttaacatctctatcaatctgctctatgatttcagattcctggaagtattgattccaaacactagttttcccaaggcttaaaggatgctcatctcgaacaatctcggcccttggcagcacaccagttccttcagcattatggtcctcccttttggaaacagtcatttcctccattcttcgagtaacttctgaaggattaaccagaagctcatctttgaaagcactgtactgggaacgctttttctccagttcataaggccatagagcatgatcagtgggcaagtatcccaagagaagcttccagacgactggccgcaacccggcggcgtcggggacgccctggcacgcgagcctccgcagctccgccagatccaccaccttcctctccagcgcgactttgaactccgcgacgaggtgggcccgcgacgggccggccgcgcccgcgccttcgccgtcgccgtcgtcgtctgagccgg

SEQ ID NO: 38569 - DNA, 582 bp, Setaria italica
  Peptide Sequence Number=SeqID_104543
gagcggccctcgcagcttgttagcgatgtgcagcaggtggtcgatgtttgtgggcgggtagctctggaggagcttgaggtttgcggtgaaatcgcccgccaggagccgcctccggacgaggatcagcatcgcacagcagatccgcaacaaggtagcctgaggcccctcggggtcacccagtatagtgtcccacaggtggaggcaatcacggaacttgaactcctgtgttaacagcaatgtgatccatctgaatgcatagaactgaggattaaccttggttacgacctctaaatgccgccagagctcctcatcgtgccttttcagaagctgtgacagtctagtgattgtggagcgtataccaaccacgctgttgtcaagttgcttgcagaagttatctcggaacccgctaagcagctcaacaaaacagaaaaacgcatctgcctctgctgaagcagcatggccttcatctggatcattcttgaaaacatagtagagaggtgccaaaacctcattcattccttgtacatatcttatatttgtctagtaagtttattcttcggttaacccgttctttaagttctt

SEQ ID NO: 38570 - DNA, 469 bp, Setaria italica
  Peptide Sequence Number=SeqID_104544
gactcagtgtgagtagtgctccacaaggtacctagcagtcttctgggccagcagctgcagcacagggaaaaggaaggagtgccatatcagcttaaccagtttcgaccttcaagtactcagaaagatcatctagtgtttcagaaacagaatttttgtcatctacaccagacaacatcccagatcatgaatatcagccaaccggtctcaatgtccaaatacaaagatcacagccttaaatttcctggttccaaaggaaacgaaggactcctgattcccaccaccaaaaatatacatgggtcacaaatgtttatcagtgcaagcagtaagtacgaaatgtttcagagcgagacaaatcacacatcatcaatacaggcacttgatagctatacatcatcgaaggtaagaagaagggagaaggcactaccgtaagcatgttagaagagtaaagcttgaacagcaattagaaatt

SEQ ID NO: 38571 - DNA, 857 bp, Setaria italica
  Peptide Sequence Number=SeqID_104545
cataatggacacgatcaggccggatgacgttgggctttgggacgagatcagcttcttcaacgagatgaacacccatcgtcatcaaaaccctcctatcattacctgcaaaaccattcaccaatgcaacaattttacgattgcggtattctttcttcccttaagatcggttatgcccctccatgatcatccggggatgacagtgttcagcaagctcctcatcgggtctgcacgcctcgaggcatacgattgggtccgtccccgcatcttaacaactttgggaccacatatgcttgtggagaaggttcgagatcgcaatgtcacggcggcgtccgacacctgggtgctattcccagatggtggtggaaacttgcatcggttcacggctacgggggaggagcattgtgcgctcctcgatgtcctcacaccaccatatgcaccggcagagcagcgggcctgcacctactatcaggagtcctcccacgagcgcagtgttatgagaggtggacggatgagccggctggtgtggctgaaggaggttccggtgcctaggaacctaaggatcgtcaatttgcggttccaaggctcgcaaatcttgtagggtcacagattgtccggcagattcaatttctttcttgccttgccgatggctacaatcgaattgcatctacctggataagaatataatctagtagttggaatgacaaacgatgatgacctgtcatgccaatgttacatgatagtctcttagagtgcttcattgcttatcatgtgtaactttgttttagcatgcatcaggttatgtattacgtttttgagctatggtgtatgcttgtgttgatacaagggccacttggtgt

SEQ ID NO: 38572 - DNA, 477 bp, Setaria italica
  Peptide Sequence Number=SeqID_104546
ctgtgttccacataaatggcagctgcatcgccatcctaatctgttgcaggtgcatcatctggcacattgcaccacagtggcactgtggtgacatcattccttgcatcatagactgcatgcaacactgttgctgcagcatggccaatggtgattgctgcatcaacattgctagcaagggtgagcctcctatggtgaatgctcgttgcatcatgcaagattgcatgcatgggaccatggaacccattcccataatcggtgagaatgagcttaccatggtgaatggttgttgcatcatgcatgattgcatgcatgggtccatcatgcctattcccatcattagtgggaagttttgcgggcatgtggctgtagtagtagcaactgcagaaagagcaaggagcacaaccagagcaatgcgtgatgccatggtattcgggtactatcacaataaaaatggaggtgttagtgagatggtacccg

SEQ ID NO: 38573 - DNA, 396 bp, Setaria italica
  Peptide Sequence Number=SeqID_104547
tcggtcggacaaggccaacggcggccgtggtctgcggctgcgggagcatctcggcttgcaatgccaacggcacgtgcactccccggcacggcaagactcccaaaggcatcttcaacgcctcatccgccgccgcggcgtggcggccgccgccggtgctgcaatggcagcggctcgtcctgctacctgctctcctcgctgttcttctgggccagtaatttctccacgttttgtttgctgtacagaagccagggagcagcttagtccacattagtctctgtatgatacggttgcatacaaagtaaacacacagtgatggtgaaagatgcgcttggcaattgcacattagtctctgtatgatacgatgcatttagcaattgatttgatttgaaactcttc

SEQ ID NO: 38574 - DNA, 641 bp, Setaria italica
  misc_feature (588)..(641): n is a, c, g, or t
  Peptide Sequence Number=SeqID_104548
ttcttatttccttattccgtcgtcgggggggcgaggagggggagggagcgagccatggtggtcagcacgttcactggccccgggattgggatcgggttcggcgtcggctgcgggttcggcgtcgggtggggattcggaggaatgcctcttaacatgttcggcttgggcatcggtgggggctgcggagttggtcttgggctaggatggggctttggcaatgcttatggttgtcagtatcgatcttcaagagtccagttccagggcattgaatttcagaagaaggcagaaggagatgaagcatcaaaagttgttccaccggagattgctgaaaagtctcgtccttgtggctagtatacccaccaccatataatttgcacagctatgttctatgtgtcctctgaattgcagtttaattagatacctgtgtgttctttgatagcaatgttatgctacactcattttcatttctgttgtaaccagaatgatgttaatggatggaaattaaactaggaaggaatgaccctagtactaggactacatgctattcatttccttttcatggtcaaattgcttttgtgagttgaactnnnnnnnnnnnnnnnnnnnnnnnnnnnnnnnnnnnnnnnnnnnnnnnnnnnnnn

SEQ ID NO: 38575 - DNA, 441 bp, Setaria italica
  Peptide Sequence Number=SeqID_104549
ttttcacagcatgcgtgtctgcttatttctacatctgcagtgtatgaagctcctggtacacaagcaaagcagactaactaatactacttgctagtaatttgctagatgataactcaagttaccggtggtaagtactaactagctagctaaatgattgtcagagtggggctgagaaaaccatcaaccatcagctctcaatcttccgcccagcaggttgccgtcttcccaatcttgtggagagccttgacgacttcctccgatgtaacgtttcctgtcacggtgaccttgtttatctccgtctcgagctgatagctctccatatcgtcgatcgtttttatggccttcttaatcgccttgatgcacctttcacagtgcattccaaccttcagctccacaacagccatggtttccagagagttgctgtgcacaaactcctcaaaa

SEQ ID NO: 38576 - DNA, 419 bp, Setaria italica
  Peptide Sequence Number=SeqID_104550
cacaagcccaggtatgccatctcgttggcacccaaacttgggatgcctctcatcgtgaagaaactaaacgaatgaggcaaggaaggatgcgagcagcacgtaattgttgtattgtatgaataaatgaacaccaatctactaacttcatttcaaattgtaggtcgttcaaacttttccagatacataatttttgttaggcatatagatatatattatgtctagatacataataaaatctatgtatttagaaaaactaaaacgacctacaattggaaatgaagggagtagcatattggtagtataacccttcatccaacccttttataaaattcaataatgagttagcagggcggcccccgcaatcacaccgagtattaagaatatatcgccatcttcccttttattattacctacctaaa

SEQ ID NO: 38577 - DNA, 345 bp, Setaria italica
  misc_feature (10)..(10): n is a, c, g, or t
  Peptide Sequence Number=SeqID_104551
gcatcggcanctttctgcaagcaatcattgacgaacgagcagaactctgatgaataagcatcttgtggtggagttggtgatggatcatccagtatctgcagcatgagattggctgggccttcatttacatcatatgggaattttccagtagcacattccaatattgttagtccaagactccaaatatcagcagcataagaatagttctcaatacgaattctctcaggtgacatatatgtgactgtgcattaagcaacactagaagaacatagtgatgactttcaccaagtagtagcatacctaaacaccaattattgtatagttataagtaaaaaaccaaaaaaa

SEQ ID NO: 38578 - DNA, 628 bp, Setaria italica
  Peptide Sequence Number=SeqID_104552
cgccggccgtcgctcgctccgtgctggcttcgcgctctccagcctgccacacctcccaatcgaatccacatttcctagtgtaggcagattgttatgagcttcatttgtaattttgttccttgcttctagatctcatgagcaagatgcatcgttagccatattagaaagcaacttccagctcttgcatacttgaagttaggtcctgcagcatgagattggctgggccttcatttacgtcatatgggaatttccagtagcacattccaatattgttagtccaagactccaaatatcagcagcataagaatagttctcattacgaattctctcaggtgacatatatgtgaccgtgccatagccattgtgttgtccaaaccagcactcacaccaaagtctgtaatcttcgcctcacccttaagatttaccagcaaatttgctggctttatatctctatgcactagatgccttacttcatgcaagtatcgcagaccaagcaatactttctgtagcatatgtgaaagaactagttctggtatagatttcttgacccttataacatctgccaaggaaccaccatccatgtattcaagagcaatgcttatttctccagaatcaggcatgtaaaatg

SEQ ID NO: 38579 - DNA, 616 bp, Setaria italica
  Peptide Sequence Number=SeqID_104553
taccgtttccattcctagctccgccactgctaggaggctatctcagccataactgtagctctatctctgctatacatagaggagaaaaacagaataggttgcaagtcatccggcagtgccaaaaccactgtgtcctagtgttatcgtgtgagttactgggcagaccttacagcagcaagggctgtcaccagttaattataaggaaaaagaaaagaatcgtaaaaaaactaacataaaccaggggacttgtacaaatgggtcatttctcccataccagcatatcttacatcccaaacatcaatcaagaataattgtaggtctttagtaaaaaacaaactgactaggcaaccaataaccgactcacctgcagcatgagattggctgggccttcatttacatcatatgggaattttccagtagcacattccaatattgttagtccaagactccaaatatcagcagcataagaatagttctcaatacgaattctctcaggtgacatatatgtgactgtgcctacaaaggtagcgcactggaacatatttatttagcaggaaaatatatttctgattcaatctatacaatttcattgtttctaattacttatttcttagtt

SEQ ID NO: 38580 - DNA, 1393 bp, Setaria italica
  Peptide Sequence Number=SeqID_104554
tgaggttcaaaaccaagagttccaaaacgtttttttacgtaaaagccatgacacatgaacttctgagagtgatcttacaagttatatatattcattcaggattggatgatgtacagatcttgctttgatatgtaatagcatgacattaaattccctggttgcatgataaactgctctctgaactggcctacacgtttgcttggaatgtcaatagagagctcatccaagctgggcatcccttcagcttttaccccgtcaccacatacaagaacctggtttcctacaataaatgatccggatacacgaattgcaactccactgtcaccgtttgcacggcaatgtagcttctccacgacatggacaattttctctcgaggcctgtcaccctttagcttcttccttatatttgacaaactatcaaaaatgtcattttggccaacatacaccttccctgagaaactgaaagtagattgttccatgtagaatgtcttcatatgatgccaaatcccatcagatccattaaacaggaggtagtaatgtatagcaagcatctcagctatttgctttaatctttctgttggatcaacaacacttttgacatatgctgccaagtccacatcggttttcaggtacctcttgatgaatgggtgtgacaaaagctgctcacatgtgggccttgcatcggcatctttctgcaagcaatcattgacgaacgagcagaactctgatgaataagcatcttgtggtggagttggtgatggatcatccagtatctgcagcatgagattggctgggccttcatttacatcatatgggaattttccagtagcacattccaatattgttagtccaagactccaaatatcagcagcataagaatagttctcaatacgaattctctcaggtgacatatatgtgactgtgcctacaaaggtagcgcacatagccattgtgttgtccaaaccagcactcacaccaaagtctgtaatcttcgcctcacccttaagatttaccagcaaatttgctggctttatatctctatgcactagatgccttacttcatgcaagtatcgcagaccaagcaatactttctgtagcatatgtgaaagaactggttctggtatagatttcttgacccttataacatctgccaaggaaccaccatccatgtattcaagagcaatgcttatttctccagaatcaggcatgtaaaatgctccctggaactcaactaaaccaggataacaacacggttcacataatgttctcatctcattcagaatttgttgcctcttctccttctcgaatatgtttatcttcttcaaggccaaaattcgatgaactggaataaatatagctctctccacaacactacttgcaccattaccaattg

SEQ ID NO: 38581 - DNA, 245 bp, Setaria italica
  Peptide Sequence Number=SeqID_104555
ttccaagaacaacaccaattcagatgtggccaagcctgctgctgctacacgtcctcagccgcaacaacaaagtggaatgctgcactttgacgaggatggcagtgcaggaatgggcgctcaggcgaacctgggagatgctcgcttggagagactagtgttcaagcacaggaatgcttctcccaggttttccaccgaatccgtgcagtcatctttcctggagaggacgcttgaaattcgggacaggt

SEQ ID NO: 38582 - DNA, 604 bp, Setaria italica
  misc_feature (1)..(1): n is a, c, g, or t
  Peptide Sequence Number=SeqID_104556
ntgtgggacaatgccaggtttgtgttcttggagatgtttggcactgttgtttcttgtctagttgtaaggcaggcagtgtagtctgtatgagctcggacaccagaggataaggagttggttagtgtccgtccgttattgctgatgtggcatcctgtcttccctctgatgaagaacggatgtaaccaaaaggagttgtgcacggcttagagtgcagcttgaaaggagacagacttccaaggctaaaactgcaggcccaatgattgagaagcataacaagatcgctggtgggccaaactcgtaagagcaaggctaataatttagcctgctgttggctaaatacaagtgccatgtcatatatagccaataattcagccacctcatataatggcttggctactaggttggctaaaaggatggttgcactatagatgaaagtatttaatgtttgcatgtgcacatcatcagctgtggttagatctttgtggccattcttcaatacaaataagctcatgcatccatccactacacattgaaatggaatgcaactgcatataacgattcagatatctatttcatacatgatgattcttttttttaaaaaata

SEQ ID NO: 38583 - DNA, 205 bp, Setaria italica
  Peptide Sequence Number=SeqID_104557
tcaaagctctgcttctccctctgacccactcgtcgttccgagctcctgttgccttcctcttacgggagcagacacgagagtgatcagggttcagggcaggggcctgctgcttcgtgccttcgttccaaacctctgcgggccgtgtagccatggaccggggccggcgtcctgcacctgtgcgcctccgccgcgctgctcgtcgtcg

SEQ ID NO: 38584 - DNA, 367 bp, Setaria italica
  misc_feature (329)..(329): n is a, c, g, or t
  Peptide Sequence Number=SeqID_104558
attgacagttttgagagctcatgctcatgtactgtggtcaaggaggaatacgactgagaattgcgtcaaaattcagcaaagttgttcaagcccgttggatcactgtgtcgcactgcaatctggaatagaatgtacaatatgcatgctcaaagttcattcaagtcttacccaagaaaaggtgaagagatgaagcagagattgttaactgtgccattggtgttatggagtatcatcgtttggagcttttgcatttaccgagataaatctcgtttgtacaaaaccacagtaaatatcgaagttcatcgatatttaccgaaagaaaaaaaaanaaaaaactaaaaaagagaactagaccaaaggcaacaac

SEQ ID NO: 38585 - DNA, 264 bp, Setaria italica
  Peptide Sequence Number=SeqID_104559
cgggccggcgtcccgccgccgccgcaggtcgcgcggtggggcgacgagtccgccaagatcgcggtcgtctgcacggccatcaccgacctcatcaagtgagtggtgccagcggccagcctgccaggtgacgcatttgctggctgcgtagcgtcgcgatccgccggcgtgagtgttctgatgcgctggttacaccccccggagtaacgcggtcgtacgtgatgtggcagttacccgagctcgttgtcgctagaaattgtgatggaa

SEQ ID NO: 38586 - DNA, 495 bp, Setaria italica
  Peptide Sequence Number=SeqID_104560
agacgacaacgtacttacctcatggagtcgccgcgcgccgaggggcgctacctgtgcgccgccggcggccaccggatggccgaggtcgcgcggctcctcgcctcgcgctaccctcctttcaaaccctcggagaggttgagcagagatttcgacgcctcgtcctcgtccgtggtctcgtccaagaggctgacggacctgggtttcaggttcgagcatggcgtcgcggacatcgtgaaggactgtgttgcgcagtgtcttgaccatggattcctggagcatcctggtacctgaaggagaacttgcaggttggttggttttactgttttagcaaataggaatactgtgtcgcttggagaagccagagccaggatggatggttgggctggggcatggggtgctacttgggcctaaaggcacttcttttgtgagtgcgggcttgttatagcccaagtaacatgtcaaatatgtttgaagagcgtgaatttcccccccgag

SEQ ID NO: 38587 - DNA, 552 bp, Setaria italica
  Peptide Sequence Number=SeqID_104561
ataaaggtagtagctgtagggcgtgacactatacatgaactattaatgggcacaattcgtgaagtgaaatttagtaacaaggattgcaaacttgattgcaaagatcttcactggtccacttgtaaaatcaagaaggttgggattggtggaccccttattgattttgatgggagttttgttggcatgaacttttatgatgaaagcagtgcaactcctttccttccaaggagcaaggtcgtccatgctttaagaagtgcgtataattcaatattaccgtcagaaaggggatgcaatcctagggccataaatgttgtcagcagaggcaggaagacacaggtttcaaaaaaaagaggcaggaagacaaacgagtagtatttgttcatttttctatgtttgtggcttaaactactttattcaacaactaacctacattgcagggaaatattttggatgataggtggccagtgtccaagccatactggtcccatggtgcccttgatgtggatatgtatgatgtccctaagcacactggaaggacttttctatagacct

SEQ ID NO: 38588 - DNA, 1581 bp, Setaria italica
  Peptide Sequence Number=SeqID_104562
caaactccagacgctattgcattcaagtggcagtgatggcccaaagcgctcattccaaaaggcataagccgtggcctaaaaaatgtggaaattcatgcgagcagggctgcgttggctgattttgaaaagaaattatgtgatattgaggagcaacgatttggcacattacccgatcgagaaatttcaagcattccctttgaagagaaaccatttggtgataaaattgcacgtgaccatgaaatttgtcgattcagtattgtctcaattgccttgtttgatggtgattgttttggtgaaaacatgttgttttgtatgctctgggatagctctaccacgtgggactgctcgactagacctaacaagatttgtcacttcagcatatttggtcagagtattcaatgagagaaggaatagagatgataaattgagggttcaagtccgccttcctgatggtacaactaccgatggtcttttgggactatatgatcacgatattgctattgtcacatccatcagccacctagatgtctgtcctgtagatctcaatattgatgactgtcctgatggtcttcatcatgcacgagctgttgggcgtgcctttgagtcaggccgtttgatggccatgcctgtctctctgttagaccgcattgtcgtttccgataggcttttcgtttcagataagttttttattcagatagtcaaggtcaaggttatacggaggtatgttgttgatttactttaattttggcatgacggaaagcctgaaacaaatattagcattatggtgtatctgtggtctaatgtatcactacatgcatccaggtaaaatgtatttttccttcataaactgtaccactttgcttttgttctaggctgcgcttggagggacacttgtaggacatgactggatatttgatgggatggtcattgatcttgttgagtatggtggagcagcctgtatcatagaacgggaatttctttgtacacgcttggagctacttctggcatgcaagtatgtctttggaagttccagtatttgtgagctatatcttcccagttagctactttatattttattacccttttctagtgttataagtgttggagcctttgtgggtgttcactccataatctgccggttggaagcaaattgatcttgctaccatctggtggagacctacatcagtgttgtctcctgttgctaatttagtgctcgtccttaatttttaagctagttttgtgtctgaatgcaaaagagctgaaacattcattcagatgatatggacaatgctatagttgtggcatatgaatctgctcacgcttgcgatgtctttcgcttaatatgtatgtgtctgttagcctttttttctataccttgattcctttcatgtgttggtatactcttattgctgttggttagtgccattgttttattcacgagaacaactctaatgttatctgttgcagtcttgttccactccgctcacgtgattattcactgccttcaggtgtatcaagcataatcccttcaggattcatgaaaactatttaccgattaagatcttttggttatccaatgcc

SEQ ID NO: 38589 - DNA, 745 bp, Setaria italica
  Peptide Sequence Number=SeqID_104563
tgggcggttgcttaatcaattcgaagaacgttttggtgaattacgtgcttggaaatggtatccttttggtgctccacaccaaattttggagcgtgtctgggatcaacttgaaggaggagttgtggcaaatatatcccgtcgtgttgtcgcactagcttctttcaatgggtatgtgaggtcttttgcttgcacagggttacttataaagtggtgcagaagcagagccacacacactgttgtcctgacttctgccagtttggttagaagtcatcttaatgaagacgacattgatgagaatttgagggttggtgctcctatcactttggtgtttaagttatatatatggtggttagctgagctcactatcattgtagattgaggtgtttctcccaccgaattagcgttgtgatgggacattggaattgtataacttgcactgcaatattgctattgtcagcatcaagaagggttttaactctattcatccagaagacatatttaataaaggaaagcaaaagttatctataaaggtagtagctgtagggcgtgacactatacatgaactattaatgggcacaattcgtgaagtgaaatttagtaacaaggattgcaaacttgattgcaaagatcttcactggtccacttgtaaaatcaagaaggtgagtgttgaatttctttcactttggtttcaggctagcctatttattaagttgttgcattatattctgagttctctgtttaatca

SEQ ID NO: 38590 - DNA, 1315 bp, Setaria italica
  Peptide Sequence Number=SeqID_104564
cggaattctttgtacacgcttggagctacttctggcatgcaatcctaaaaaactaccgctcacgtgattattcactgccttcaggtgtatcaagcataatcccttcaggattcatgaaaactatttaccgattaagatcttttggttatcctgtgcggttgcttaatcaattcgaagaacgttttggtgaattacgtgcttggaaatggtatccttttggtgctccacaccaaattttggagcgtgtctgggatcaacttgaaggaggagttgtggcaaatatatcccgtcgtgttgtcgcactagcttctttcaatgggtatgtgaggtcttttgcttgcacagggttacttataaagtggtgcagaagcagagccacacacactgttgtcctgacttctgccagtttggttagaagtcatcttaatgaagacgacattgatgagaatttgaggattgaggtgtttctcccaccgaattagcgttgtgatgggacattggaattgtataacttgcactgcaatattgctattgtcagcatcaagaagggttttaactctattcatccagaagacatatttaataaaggaaagcaaaagttatctataaaggtagtagctgtagggcgtgacactatacatgaactattaatgggcacaattcgtgaagtgaaatttagtaacaaggattgcaaacttgattgcaaagatcttcactggtccacttgtaaaatcaagaaggttgggattggtggaccccttattgattttgatgggagttttgttggcatgaacttttatgatgaaagcagtgcaactcctttccttccaaggagcaaggtcgtccatgctttaagaagtgcgtataattcaatattaccgtcagaaaggggatgcaatcctagggccataaatgttgtcagcagaggcaggaagacacaggtttcaaaaaaaagaggcagatattttggatgataggtggccagtgtccaagccatactggtcccatggtgcccttgatgtggatatgtatgatgtccctaagcacactggaaggacttttctatagaccttgttcttctattaacgcattaagttatattagtattatggtgcacttgatgtggatttgtatgatgtacctaagcttactgggaagactatcaatcggatgtaatgtaagtgtggaactatcagtgctatctttgccctttcgactaaaacatatgcaagttgtactggttaccacagtagtccattactattgcaaattgcctatttgctgtaaatgtttgacttgaaactaaaaaaaaaaa

SEQ ID NO: 38591 - DNA, 431 bp, Setaria italica
  Peptide Sequence Number=SeqID_104565
tcagcccaaatcacccatcctctgcaagccctccattgaagccatgaaagctgcaattcaaattgcaaatgttgatcctaagaaggatcaacattttgacgacagcactcggaacatagcttcaggaaaggctgcaggcttccatactgtggttgttggcaggtggacacttgttcctggggctgaccatgctctggagagcattcataacatcaaggaagctttgcccgatatatgggatggtcaagatcggtctgaatctgatgttgttcttacttccagctctgttgaaactgcggtggttgcttgaatgcgtcaccatgtgggttatccatcctgtaatgccatgtgtgaactacttggtgtgtattttggatagtggatgcagagcattccagctcatgtgtgaagttctttttgtagaaatggca

SEQ ID NO: 38592 - DNA, 321 bp, Setaria italica
  Peptide Sequence Number=SeqID_104566
gcccggcgtacaacctcgcgatgaaggagatggcggcgacgctggcgaacctggtgcacgggttcacttggcggctgccggacggggtggcgcccaaggacgtgagcatggaagaatgcttcgggctgaccgcgagccggaaggtgccgctcgtcgccgtcgccgaggctgccggcgcacctgtacgccgccgccgactaatcgtccagttgaaatttgaagatatctccttgtagtgataagaacatcaagatttagtttcttcggtaaaagaaaacaggaagtgtgataataggcgaatatgagtagaaaggtattgcg

SEQ ID NO: 38593 - DNA, 519 bp, Setaria italica
  Peptide Sequence Number=SeqID_104567
catagttcagctcagctcaccttaattcgaaggacaggcagagggaccaggtagatcgagcgagcgatcgatggcggcgggctacaaagcggcgggcaaggcggtcgccgtcgtccttgccatggccgcgctcctcgccgccgcggcgagggcggcagacgacgacgacgaccatccgtggaagtgcttccggtcgtgcacgaaggcttgccaccaccacgacgccgttgccgccaacaaggaatgcaacgtctccgcggtcgtctccggcgagtgcaagggcggtgccacgacgacgactgcttcgaggacgtgccgaccatgggctacccgcagtgcgtctacaccgcctgcctctcctacccgcggcatagaagagagaaaagggcgtgcttgaagaagtgctgcgagaagtgcttccgccacagcccgcctgcgcctggtccctctcccaccccggagccgccatctccgactccgcctagtcccaccccggagccgccatctcccactccgcct

SEQ ID NO: 38594 - DNA, 1191 bp, Setaria italica
  Peptide Sequence Number=SeqID_104568
gggcgaacctcggcaaggcctgctgcggatccgagcgggtcgggttggggcgtgtggctgcgctgcgtcggcgattctcccggcgaaccaacgacgccagccacacccgagcgagcggggcagagagggagcgcgtggacgcggcgcccacctcagcctgagggatcgaaggggggccttcccgtccgcgtggcggcgcctctcgttttcggctccctgaggagggatttcttttcgtttcgtgcggcgagttcttggccgttttggcagtttacccggtttcttcttcttggggattttagtctgtcccccaccagattggcttgcgtttcggttggtttaggtgaagcctactgtaaacagcaggacgccgtgagcgtgagggatggagcactgctatttgaggcagcccctctcaagggctgaagctatgcccgagaggaggtccaggttctggccgatggattcgccgccgacgccccgtgcagaggtcatctgcccccagcctcgccgcgccacccgcattccgtacgctgtggaaaccgtgaacagagccagccccaaggcgaacggtgcattcccattgtacagatcagactccacttctgatgtacttgatcttatcctcagtaagaatgacccagatggatattcgagcagccaggtgggctttttatgtggctcgcctccagtacgcactaacaaccctgtcatccatgatccactgtttggtgaaagagtaccatccttttctcctttaggaagctcctttggcaaaacgctagcaggaagagttgaagtaggttctccatcttgcggcgttagcagcagcccaaaagtaagaatagaaggttttgcttgtgggaactcggagacccactatgcagttacctttgtctgagcattttgttgttctgtttctgtttccgccctttgctcctcggtaatcactatggcggtgcaggatataagtagtacctttaagctagcctgattagaggtactacttatatcctgcaccgccatagtgattaccgcatttgaagctgcacaatcgcagtgagctgtaagatgtatataaacgaggtgcccgcatatgtaaccatatgatgtatgtgtctagtaagcgtagctggagttccagtgtttgatggatgatgagtctgtgaatagatcggtttttgcatttag

SEQ ID NO: 38595 - DNA, 998 bp, Setaria italica
  Peptide Sequence Number=SeqID_104569
atgaattcatatacttgttgccgcctattacacgaacaagctttggtccttctggtgtttacattacccatcccagtccttctcaggattaggatgtactacaagacagagaatttgattttcgaaatgtgtaggacactatttggtcaatccagggcacctgccttcctgtaggactcaacgctgtccttgagggtctcctccagcggcttgcatttccagcccagcgcctgcaacttcttggaattaaatgaaggctcatcgctcacagggacgaagttggtggcatatctgtatgctgggtaccagctcttgagtagctttatgacctcggacacatgctttgggtgcgaattgcagatgtacctcccagacgcctcctgtgtctcatacaccagaagaagagcatcagcgacatcgcgaacatccacaaagttcctgagcttcattttcaccaaacgatctcctgtcaggaaatcaactaggaccgcgctgcttgcgttcaatgtggattgcagcaagggcccgatcaccagggatgggcagagtgtcaccacatctagtccggttctcttggcgtagttgaatgcttccagctctgccagtgtcttggaaaggcaataccagttctggcacagtaaagattgcaagaaaacacaatcaggatgggtgaaaactaagactccaccgggtcagaattatatgagttttgacaaacaacaaaatcaggtagaatggtgcagcacaatactgaataagcacttgggtcaactgccaaaatccagcctaataaagcacaacattccaaccgctatctgctatagttgcgagatcagtggtggatctagaattttaccatagggtatgcctgaaaaaaaattattcaattcgataaattcatttacaattcgataaattcaaagattaagctagaaacaataacaaatcacaatataaatagttcaaaatataagcataaaataaacttacaataaact

SEQ ID NO: 38596 - DNA, 1147 bp, Setaria italica
  Peptide Sequence Number=SeqID_104570
tggtaatgaaaatactcagaatatcctcaaaatgattggatcaagtaattgagtagggctccctaatccatgccatgccattattatcagaacctgaagcccaagcacaagaagtgtccacatcctatcgaagcttctgaagagatgccaaaaggaacggacctcaacaaaattagtctttcccaaccactgttcagaactgggactcgtagtttgctgttgtctttgttcagctgcttctgaattaagacagttttctgttgatgaggactcatgaggcacttggggattttgctgctcagtttgctgaggtttgtcaacagacactagcggaacacagctagcacaattttcaaagccatgcggcacccttgataatgttgacccacaaagaatctgagagttatcagattcacttgatatgaaaaagaaatcattgttagggcgcatgggccaaccaagcttaaagcaatcagtagaccagaagaattcattgaggtcatcatagtttctccatgttgagtgatcagctgctccatccttgttcttttgtgcttccttaaatacaacgttgtatattggcctcactacatcgttaagaaatgattcatcatctcctccatatgcaggtcgaactttttccccagtaattaagcttacagctccagagagcactccatatagctcatatgacatatgatgaaaaatgaagcataagcattctggcatcagtcgtaagtttgacgcttctccccatatcaggaggtaaagagctatgtatagaagtttatgttgctgaatttcctgcttcacagagggcaaccatatgttgctttttcgccccaaaaacttgcaccaggtcagatagttctcaaatgtttttgccaacaattcatctactgctctgtcatctagcagttgagcagaggatgacttgggattcaatcgagcatgcatatttgcaagcaatagaattagatgctccctttggttggccacatttcctgtctggaatccaaaccaactttgcagccatctaaaaatatctgtatgagttttgtcatctttgatgttggctgatggaagactgcgaacattaaacaccgcagagaccgcaactttgatctcagggagaagcataattggt

SEQ ID NO: 38597 - DNA, 118 bp, Setaria italica
  Peptide Sequence Number=SeqID_104571
catcgacaacggcacaggtgaatgaatctttctcgaccagaaagagctgttgagtagtgcaaactggatagcacagtacaatgcaggcatcatggctgatcttgatttttatttgtga

SEQ ID NO: 38598 - DNA, 1299 bp, Setaria italica
  Peptide Sequence Number=SeqID_104572
aaattctttgttctgcatcatcgctagtacatggaagctcaaatccgtcgatgccagctctgggagtggcgtcacgccgtcgagatagcgcacgacctgccccatggcaggtcttgcatcggcaaacgggtgtgagcaaagaagccctagtttcagcaccaatgccgcttcctcgacgtcgtactcaccatggagcctcccgtctactgtctccatgagtgacccattgcgccagtgctggagcacccaatcgaccagcacaacatggccgccgccactttgcccgttctccttgatgggtttctgcccacaggtgagctccaggaggaatacgccgaaggcgaacacgtcagttagaggggaggctttgcctgtgcgcatgagctccggggataggtatcccatggtgccgaccacatgtgtggtttgggagtccttgccatggtcatacagcctcgccagcccaaagtcaccaagctgcccgttcatgtctctgtcaagcagtacgttgcttgctttgacatctctgtggacaaccactttctcccacctctcgtgcaggtagaccaatcctgctgcaacaccttttatgatgtgaagtctttgtgcccaggtcagctttgacttatccccgtcgtccgtatacagatatttgtcaaggctaccatttggcatatagtcataaaccaagagaagttcacctttccgccggcaataaccaagtaattgtactagattgcggtgccggatgcggccgatactggttatctcggcaacaaactccttcattccttgccttgattcatgggacactctcttcacggcaacctccatcctagacgtccgaagaattcctttgtaaaccctaccaaaacctccttcaccgagaagatgtttatccttgaatccatcggttgcacggtaaagatccttgtacgagaaccggtgcggcccaaactcaacctcccaatcctcacgtagctcagcgtacctaaatctcctccggacaactagaacaacgatactgcccaaacaaagcacaaatgttgcggtaacaattggtagaacgatttccaaaaaccttggaacgcggtttcggaccagcacgaggtaggttcggcagcttggcgatgtcgatggcaggagcttgtctgttcaatccgaagctccagccaagaacacagtgccgcgaattcacacgaccagttgccgccgagaagccgagatacattggtcagtgagcacccggttgaggaggtcgtagatggttgagagcagtggcttggagtggtctggtca

SEQ ID NO: 38599 - DNA, 393 bp, Setaria italica
  Peptide Sequence Number=SeqID_104573
aagcattactgacaaagctcaaaagtcaaatgcaagctgctgggtacatgccagacacacaatatgctctctatgatcttgaggaagaagagaaagaatcagaggtgtttcaacacagtgaaaagcttgccttggcttttggattgatctgtataccgcctggtgtacctataaggatcatgaagaatttgcgaatttgtgtagattgtcaccgagcttttaaattcatatctggtattgttggtagggagataattgtgcgagacaacaataggtttcatcacttcaaaaagttataagtgctcatgcaaggattattgggtgaaaagtttttatccacaggatctactgaggcatgcttctttgggcatctctagaaccacttctacaaat

SEQ ID NO: 38600 - DNA, 580 bp, Setaria italica
  misc_feature (1)..(25): n is a, c, g, or t
  Peptide Sequence Number=SeqID_104574
nnnnnnnnnnnnnnnnnnnnnnnnnattgctgcaaaactgtcatcacatatcatggaagaacttgtaggtcttgacatcaattgcgatcgatctgaccgcgccgatgcatgcaagtgctcctatgatggagaacaagatggcggcagcagagctgagcgccttcacagcataccgcaatcctaggttatcaggcagcttactagtcttcataagtgccaatgttggcagcacaaagtccagaggggtgaacccaactgctccacagattgatacaaagtccccaaagaatggcattgctgcggagacgagggtgatcgctgccatgtatgcagaagtgtacatcagccgccacaggcaggatctgcagctcctgttcttcgcccgaacccgctcttcaaagtgcgcaaacgttggcctgaaagcaacctgcaatctgaatgactgcaaaaaggtttgccattacaattgcccatcttggagcagtcagggaggacaggatgtaggactggacttgagaaccgaatgcccagtagccactgaatgccagggtccagtaggacacgacgatgatcgtgtacg

SEQ ID NO: 38601 - DNA, 747 bp, Setaria italica
  misc_feature (691)..(691): n is a, c, g, or t
  misc_feature (700)..(747): n is a, c, g, or t
  Peptide Sequence Number=SeqID_104575
aatctcccatcagcgccggtgatcactagtgaagtgagaacctcctcctcggtcgtcgtccacacaaaactagccctaggccctagcagctttagatcaccatgccgaccccggcgacccgcaagtcccttgacgagcagcgtgccctagccaagcaatgctcgcgagaggcggcactcgcaggcgctaaggctgcagctatagcgaccgtcgccactgccatccccaccctggcgagcgtgaggatgtcgcgatgggcgaaggccaacatcaaccctgctggccaggccctcatcatctccactgtggctggcatggcgtatttcatcgccgccgacaagaaggtgctctcactggcgaggcagcactcctacgagaacgcaccggagcacctcagggacacctcctaccggggcaccggtcgtcaccacccgtccttcttcaggccatgatcgaagaagaagctacctcttgagcagtgcgtagttctcaaccgtcgatgttgcgttggatgtctaataaataatttaccatatgctatacttgtcagccagtactagtctatactatctactagctagtactacacctgtacacatcgatgtgcttggagaaactataatatatgtgtgtggtgctcaagtttatcgtaattgttatgaacttattccatcaaaaagtgacttatttnttaaaaaannnnnnnnnnnnnnnnnnnnnnnnnnnnnnnnnnnnnnnnnnnnnnnn

SEQ ID NO: 38602 - DNA, 222 bp, Setaria italica
  Peptide Sequence Number=SeqID_104576
agccggtaatccgtttcgtgaatgaatgacgtggctcaatgctgacaagtttcttctgcgatacagccttcttcacggaaattggggaatgattcggcttcttgcgatacacagccaaacaagtattttcattcctggtcttccttttcttcttgacaggtgaaacacaaagctccttgtcaccttgttgaggcacagtgatttgcctccctattgcatcat

SEQ ID NO: 38603 - DNA, 450 bp, Setaria italica
  Peptide Sequence Number=SeqID_104577
cgccatttctctggaacaccttctttgccttctgatttgaaccattcacctctcttccatcttcattcacctctcatccatcttccatggcaatagacttaaacacactaccagaggaggaaggacacaaggtgcctgatctcaacaagagtcctgatgaacatgaagagaatcacgatcccttgcaagatgtagtagctgcaaatgaagttgggggagctgatcactttggtctctactcttggatgatgccatacatgacttcaacatgtacacagatgatgtcgacatcatatttgatgaagaggagttgtccaactcggatgacgaagatgattagcaaaccccacaagaacaaccatcaaatatgatcagaaatttgacacaaagacaaaggcaagacatatatcaagatttacttcggttaagcactaatggcacattacatag

SEQ ID NO: 38604 - DNA, 802 bp, Setaria italica
  Peptide Sequence Number=SeqID_104578
tttacgtttaccgttacttaatggtattcgtagcaacacgagccggcaggtcaccttctgccagcgccgcaacgggctcctcaagaaggcgtacgagctctccgtcctctgcgacgccgaggtggcgctcatcgtgttctccagccgcggccgcctctacgagtactccaacaacagcgtgaaggctactattgagaggtacaagaaggcacatgccgttggatcatcatctgggcccccactcttagagctcaatgcccagcaatactaccagcaagaatctgcaaaactgcgcaaccagatccagatgctgcagaacactaacaggcacttggttggtgattcggtggaaaacttgtcactcaaggagctgaagcagcttgagagccgccttgagaaaggcatttcgaagatcagggcgaggaagagtgagctgctgtctgcggagatcaattacatggtgaaaagggagactgagcttcagaatgaccatatgaacctcaggaacaagattgaggagggggagcagcagctgcagcaggtgaccgtggcccggtccgctgccgccgccgccgccagtgtggagctgaacccattcctgcagatggacaccaagtgcttcttccccgctggccccttcgcggcgctggacatgaagtgcttcttccccggcggattgcagatgctggaggcacaccgccagatgctcaccaccgagctcaaccttggctaccagctggcgccggcgccgagcgacgacgccgtcataatccgcatcagttgttctaacctgcacgatcga

SEQ ID NO: 38605 - DNA, 499 bp, Setaria italica
  Peptide Sequence Number=SeqID_104579
ccgctcgcgcgtgaatcctcccttcccgaatggccaaacccctgctactacccctgaccgacgaatcgatcctcttcccctgacggcagccgggcactcgcgcctcctcccgccgccgccagaatccttctctcgttggtgcgctcatcgccacatccgctcgactgctccaccggactgctgccggagtgggggatccgcccgtactttgattggtttcttcatttctcgtgccttcttcatcctggataaatcatgaagtccattggcttcattggatcgagagcattgtctattcttggggttggtgcttctggccttttaagcttcgctacgatagcatctgcatcagatgaagcggagcatgggttggaagccccaaactatccctggccacatgctggcattcttagctcttatgatcatgcatcaataaggcgtggacatcaagtttatcaacaagtatgtgcctcctgtcactcaatgtctttgatttcat

SEQ ID NO: 38606 - DNA, 1396 bp, Setaria italica
  Peptide Sequence Number=SeqID_104580
taacaaacacacaaagcccatcacacaccccccgcatcctcccctcccctcgcccattccttccgcctccctccccgcgccgccgctcgccggagcccgcgtctccgcccgcgacgcaccgcgccgcgccctgtagaatcctggatggctgccacaaggggcattaaccagcttctgaggagaactctccacaaccagtcatctggttcatcgctgctttcttcacttcggggaaagcatgaagagtcctctgctggactgagagcattggctcttcttggagttggtgcctctggtctattgagttttgctacaatagcatctgcggatgaagctgagcatggcttggcagccccagattatccctggccacatgctggcatcatgagctcttatgatcatgcatcaattcggcgtggacatcaagtttacacacaagtttgtgcctcttgtcactccatgtccttgatttcgtaccgtgatttggttggggtggcctatactgaagaggaaacaaaggcaatggctgctgagattgaggtagttgatggtcctaatgatgagggtgaaatgttcacccgccctggtaagctgagtgaccgcttcccacagccctatgcaaatgagcaagcagcccgatttgcaaatggtggtgcataccccccggacctcagtcttatcacaaaggcaaggcacaatggtcagaactacgtttttgctcttcttactggttatcgtgacccacctgctggcgttcagatccgtgagggtctgcattacaatccctacttccctggtggtgccatagccatgcccaagatgcttaatgatggagctgttgagtacgaggatggtactcctgcaactgaagcccagatgggtaaggatgtcgtatcattcctttcgtgggcagctgagcctgagatggaagagagaaagctgatgggagtgaagtggatcttcctactgtcactagctcttctccaagctgcctactaccggcgcatgaagtggtcagtcttgaagtcgcgcaagctggtcctggatgttgtcaactgaggactgccgtttccttttttaaattttaaatatgtcgagcctttaacggggagcattcaaaataatggatttgtgatgtacaattttgccactggggctaggttccatgcctagaaatttattttgtcttctttactctgctgcaaaagcattttctccaagggagcacttcgtttcacggttttttgtctgtcaccacctcaaatgttaccagcaatcttctaacttaacagctgatgggagttgataaattcttatgctatgaaatattgaactgttcggttcataggttctttattctatgaaatacggaactgctcgttttgacctaaaaaaa

SEQ ID NO: 38607 - DNA, 1320 bp, Setaria italica
  Peptide Sequence Number=SeqID_104581
gcagatgcagcggaggcggcggcgtcggtgccggcgccgttcccgggggaggtggctgccgcggctgccgactcgttcctccccgtcgccgcacttcagcacttcattgacgccatccatacctttaccgggctgaactggtgggcgtgcattgtgttgacaactttgattatccggaccgcgacagtcccgatgcttgtgagccaattgaaggccatgacgaagttaaatgcaataaagccagagatggaagccattaaagatcagacggataccatggatctaaaatcagcagaggagggaaaagctaaaatgcaggcactattcaagaagcatggtgttagtccatttgctccaatgaaaggacttctgatccaagggccaatattcatgagttttttcttcgctatatcaaacatggttgagaaggtcccttcattgaaaggaggtggaacattgtggtttactgatctgacgacgccagattctctttacctccttcctgtgctaacgggactgaccgcattggctacagtggagtttaacttgcaacaaggaatggagggaagtcctatgaccggtaaaatgaagaacgttgctagaggaatggcttttatggcagtcccatttacaatgaattttgccaagggaattttctgttactggatcacatcaaacatattctcccttgcatacggtgttgttatccgacggccagctgtgaagaagttgttcaatcttcctgatttgccagcgcagccctcgccagcaacacaaatgccaaccttcaattttttcggcggatcacgtgcagcagagtcaccagtagcaatagcaggagcccagcgatctcctctggaacagcctgatgctgctgctcttggatataaggtcaaaaatcttgaaaagaaagtgaaatccaggggcaaaaggaaacacaggtgaatcgtgggcatatgtgcaccagatatggttccaaaggtcagattttgcattaggaggctttctttcttcgtcgcttgaggctgttgttgttttcatttttgggttgaaataagccagagtaattttgacacacagagttgaacatacacaggtgtattccagtaatttactataggtggcattgttgctcatctcccaagggtgagaagactatatatgttaattcagggacaagcagtaccaaaaaccttgaggctccatttgacaatggtagcaactggctagtagctagtctcaaactctcaagtgacactatttcattgatcacatgcaatatggttctagatattttacctttaaaaaaaaaaaaaaatg

SEQ ID NO: 38608 - DNA, 529 bp, Setaria italica
  Peptide Sequence Number=SeqID_104582
cctgtagatagtatcccctttattattttctatgtcaacgtcaaccactactatagtgctccctagtgctgggaaaaggacagctagacactctagactatgatcagaatgccttgctgaaacttatgtgtaatcaaaaacgacgaggccacgagggagcatgtgatgtgaacgctcagttcccaaactggaaaatgtagtgaatgctcagttcttcagtttggtatatcagccggaggagcatgttctccaggaaagcgtagagcagagcaagtgatctctctggctggaatgtagggaccgtatggccagctgcccttactgacgccagcgtgaagcctccttggtactgctgaacaaagcctccaacctcgccgttaggggcgtaccaagggcgccactttttcgtgacagctagattgagatccttgacagagtaccgcgtcacagtaagtgagcatatggaatcgaagtcaccactaaaaatccatactcttagcccaatatcgaccagatatctgaacggtta

SEQ ID NO: 38609 - DNA, 470 bp, Setaria italica
  Peptide Sequence Number=SeqID_104583
ggagttctcgcaggcgttgcccgagggtgcgggtggcagcacctgggcgcgtacgtcaacctcggctcgttctacctgctggggatcccggtggcgatcctcctcggcttcgtgctgcgcatgggagccagagggctctggctgggcatcgtctgcgggtctctaatgcagatcgcgctcatgggcgccatcaccttcttcatcgactggcccaagatggctgaggacgctagggagagggtgttcaacgagaagcaggcggagcatgggtcgatgctgtagctctgctccgattatgcaggtcgtcaggcatttgttatgtcttagcacgatctttgctgagttcatgcctcgtttttctacgatccgtacgtgtcctaaagcaaaaccaaaaaaaagatcctcgctttggtttgagcccgggcccgtttgacagagtttctgattcacgtgactccctgacaaaggat

SEQ ID NO: 38610 - DNA, 535 bp, Setaria italica
  Peptide Sequence Number=SeqID_104584
acgtgttcgacggcatctgggtgccggatgagaggtaccccttgtacaacagctcccggtgcccgtttgcagagagggggttcaattgcctggccaatgggaggaaggataccgagttccttaagtggaggtggaagcctaggggatgcaatttaccgcggttcagtgcccgggctgtgctggagtggctgagagggaagagggtcgtgtttgtgggggattccatgagccgaacgcagtgggagtccttcatttgcatgctcatgactgggggtggatgatccgaagacggtttatgaggttaatggcaaccaaatctcaaagacaatccgatttttaggagtgaggtttgagtcgttcaaccttagtgtggacgttcttcccggtctgtgtccttgtgcagcagattcccgcgctgcggcacgggcgcagaagggtccgtgccatcctcaagcttgataagttggatgacttaagtcagaaatgggctgattcagatgtgcttattttcaactcagggcattggttggacttg

SEQ ID NO: 38611 - DNA, 572 bp, Setaria italica
  Peptide Sequence Number=SeqID_104585
cggcgccgctgctgggatgctccacctgacggggaaaaacggcgctgataggagacgaagtggaacgctggactcatcgctcgtgtctccgaaccaaacgtgagatgaggtgggatcgtcccgttccgtcccaccgaccaaacgcaccctaaggttcacccttaattgcgttgatgttttagcaccctgtttttgtacaactgctgccttctgatgtcccatttgcggtactgagcttaatgagaaccttctgttgttcttttcaagttgtttttcttcacaaatttggaacaggtggcattgcatgtccttacacatgaattagatcagacattaattgtggacaaggtgcaattcagttcttttattgtccctataatacgttgacattatttttctttcagtgaagtgcctaattttagttagtcttgtgaattggggtctagatttgtgcgtcacaatttgttgagtgcatttgcatctttttcacgtcacacttcatcaagttagtgttgaattaaaattaccatggggatgataatactaaactgacacctgagttgcatatctgc

SEQ ID NO: 38612 - DNA, 548 bp, Setaria italica
  Peptide Sequence Number=SeqID_104586
tttttcagaattatctatttgtccatttgttcactggctatcttactcgtattctattttattgcccctagtagatgtagttgtgtttaaacacgaacaaagaggtgttgtttactgattagtagtaataatcaagtcttacattccttgcggaaaggtcaactttttgtcatgttttctgtaccttcttctcaacgtttctgtcaaagctcttggatctgttgtaatgcccattggctgacatgtatacattgatttgtagcaagtaagggttcttggataagcatgccatactagttgccatagtagaaaagttcccatttcatttggatttagaggtagtccttctatcctgtttggaagaaaactctctttggcttttcgctagaactttagaagttaaactgaagggacgatgggcttttctaaatactgcttctgatttcagacagaattgtaagttgaagttacgatttcatgttacagaatttggcgtttttttccttgtatgtgactgtagcatgtgcaataactgatccatctgtttc

SEQ ID NO: 38613 - DNA, 315 bp, Setaria italica
  Peptide Sequence Number=SeqID_104587
gcagttagcagatcactacaggtaaaataatgaatgtttgcatagacaccactcgttcacttttaaattgcatgtacaccattgaaaaacagagatagcataattgccaccgttttgctgacctggcacttgagaaggccactgacttaagacggggtactaaccgtccaaatttgacaaaaagacaacactgcatgttgatagtgaaactgtcatcactgcccttctctaacactgctggtctctcggctttgatgccatcatgccaactcgacttttttagtggaatacacaaattaggggctgggaatcagt

SEQ ID NO: 38614 - DNA, 2067 bp, Setaria italica
  Peptide Sequence Number=SeqID_104588
agggtgagccagtctctgcataggacgaatattggtggggagacggcctggcggggagggaatgagaccttgcgcttgcgcctgcgtcggtcttggggtggctgcaggacgcatttctggagccatgcgttgagggcctcgacatacgactgatgagcagtgacccagttcctgaagctggaggaaaagctgtccatctcgttccacagattcatcgccgcctggcggtggtgctcgccttgctgcgccgaggttgagcttttcacatggtatgccagtgtgattgtgatgaactgtttgtggtgacattccaacatagatttccacattctgattagcccttgaatcagctcaacgagctgtggctccagttcttcatcccttatcttctcaattcttttggagattgcatcaacagcttgaattgcaacagataccctggaatggagatcctttacaacagctctagtcttatcaatcagctgcgcgtttaggtctcgtgcaaattggcgccggaggaggttacatttctcatcataggtctttctcacattttcacttgccttgatttcatcatatagttttctctcccatgcatgtagcctgtccaatgtagaagagtggcttccagataccatggcaaattcctcaacaaaatcactattactgtcatccacgtcgtctttaattatcgatgtcatgagtgcactcttagatgatgacgatagagatgagacagaacgcttccatgtgacaacctttgagacatgctgtgcagtttcctggttgagaatgatatcacgattgcagcagactcgaagtgctgacaaaaatggggcagttggtagcttgcctggagaacctggtattttaggacatatgtccagtctgatcttcttggtctcgagcattctggaaacctcattccctgcttcagctgcacaattaaaccgagtttcaatgtccttcatgcttgccacaaaatcttttgctcgatgagtgatgaactctgaaggatcttctgtctctgcacacaattctttttccatttcgctttcctccacctttgcagcaatctgctgagaggaagtagcttgggatgaagcatccacaggttgcctttgtttactgatcccactttgttttggctctctttcctgcttaggcactgcattaccatcaggaagttctgtatgccttctttcagacacgactgcttcttcttcttcttctttcagcggcactacttcagcttcccttgactctctcaaacccttcaatctactgaagttcaaggttagcccattctcattgttggaggatgagctaccagcagcatcaatgggatcaaagaagtcccatgaagtacataattctggaggtaatggtggcgggggcggcacaaaagctgaaactggggattcttgcccaacaaattcagcagcagatggatcaatcatgaatgtcaaaggtgtggttcctgacgctttcatgcaatggattcttgttgagggcggagtagtcaatggacttgctcgatgcatcggagaggcaacattctctactgcatgcgaaggcgagggagatgccatagaagaatgcgacggtgacttatccacttccgaaatagagagtgatgattctggtgagatctcagactcagcataccgccgcagtgctgtcccaacagtacggagggattgagtatatgataagtgcgctgctgacagtgcatctcttgagtcaatggctcgcctgatatggcgcatccgatccttgcacagaaccagggcatcctctccagtggctttggagggagaagaacccatgagtcccacagaactgcaaaccccctactgcaatatattagagaccagtagactcatcaaaatccaactactgctaacagcttccaccaattaaaaatcttgcttgtgatcagcagtggtttttgctcccagatccgagaaagaagaaatcccttgcggcggcggtggcactgcagccggcagcggggacgcggcaatgcggccgccgcggctcaatcccgtgcggcgggtggctcac

SEQ ID NO: 38615 - DNA, 735 bp, Setaria italica
  Peptide Sequence Number=SeqID_104589
caagtctcgactgcagcccttcagctgccggtacacttccgctctttgcctcctcctgctcattgttctccagcatcccgcactcctgtgactcacttttgggcttgctctggtcatcctggtggtcaaatgagtcacggaggagctgcatcacatctttgatggacttgcatagctcttcggcggggagtgactccgtcagggtgagccagtctctgcataggacgaatattggtggggagacggcctggcggggagggaatgagaccttgcgcttgcgcctgcgtcggtcttggggtggctgcaggacgcatttctggagccatgcgttgagggcctcgacatacgactgatgagcagtgacccagttcctgaagctggaggaaaagctgtccatctcgttccacagattcatcgccgcctggcggtggtgctcgccttgctgcgccgaggttgagcttttcacatggtatgccagtgtgattgtgatgaactgtttgtggtgacattccaacatagatttccacattctgattagcctgtatgaggtaaattcagtgttaatagacaagatatatgagcatggtgttgtaaaatcaacagagtccaagatagattttgatcagactgaaagtataattgtgctgtcagacatcagaatgtttagcaaaacaaggggacttctgagagcaagtcgttaattttaatcttctgattctcagtaaaaaaaaaaaa

SEQ ID NO: 38616 - DNA, 392 bp, Setaria italica
  Peptide Sequence Number=SeqID_104590
agaaagcaagagagggtaaagatacaaataaacactatgaaggtcagcaatggtggcggcagctcgctatatgtgattgtcatatggctcgctgttctgttcggatgcctagcatcgtctgcgcaatgtcgttctcagctgctcaacaaggctgtgcgcacaaggggagtttttctagctggtactgcaggcaacacaagcgcctaccactccgagatcgaatgcccaagcgtcgtcgtagacgatgatgagagcaagctgaaactgatattttgcactgtgaaatgctactgccatggcgtccatggcgatgccatctgctattgctgccagaagcctcctggagcagtatgccatgaaacgttggccgactgccaggccgattgccccat

SEQ ID NO: 38617 - DNA, 475 bp, Setaria italica
  Peptide Sequence Number=SeqID_104591
cccatttatgtttaacaaggtgaggcttttggatagtttagaagagtacacctccacaagacaacaaaagaagaggaaagcgccggttaagggaacagaagaaactgcaggaacagtttggaacgaagccaagccctatccgtcctcttcctgcaaggaagcctcttgggcagagctctaacgtcaatattgctgttggaactccgacaagccgccatgttactacaccgatgtctcggaagggagggctgtcatctggaaaggtgaaggaagctaccaagacaactttgggaccagcaaactttgttgcccttcggaaggattgcacagaaaattcttcattttgagtgtaatcaccacctgtgtagattagctgcttgctaatgccttaaaagttgtttgaccccagtatctgacgctcactttcagactttaagttctatcctcgataatacgattctctctcctttgagaa

SEQ ID NO: 38618 - DNA, 461 bp, Setaria italica
  Peptide Sequence Number=SeqID_104592
ccttttcttttctcccagctggaataattaataacgcgatgctaatctttcattttttcaactttatcgtctgaatttcctttactaggctctctgcttggacattgcgcaagcttagagaagaccaggacgccaaggcaagaacgaacgagagcatcttcagagcagaggaggcggcggcaccaatggacggcggctccccgcggccgccccgccgtccggagcggcacggcagcttcaactacgacatcgagaacacggacgcggcgtggcgcggcgcgcacacggcctcggaggcgctgctgcggtacgacgacgacggcccgcgggagccgctgctgcggaagcgcaccaggaacactacctcccagatcgccatcgtcggcgccaacgtctgccccatcgagagcctcgactacgaaattgtaggaaaatgaccttatcaagcaagattggcgata

SEQ ID NO: 38619 - DNA, 459 bp, Setaria italica
  Peptide Sequence Number=SeqID_104593
ggaaaggtctgaagattgaggaccttgatttcacagatgaggaaatggatatgtatgttgatctccatccaattacaaatacctcaccatacaccgtggttgagaccatgtcccttgcaaaggctgcggtccttttccgggcactaggattgaggcacctgttggttgtgccaaagaccccagggagaccaccaattgttggaatcctcacaaggcacgattcgatgccggagcacattcacgggctattcccgaatctccacaagtcacactgaggaaagaattcagtacatgttttgttgctatttgtttcctggtagcttagctgtacgcagagaaagctgccttgtgcaatatttgctgattgactaagtcatgtgtgtgttgggtgttctatctatccatctatctatgtgtcatgctccttagacgctctccagatactctttagattccttt

SEQ ID NO: 38620 - DNA, 458 bp, Setaria italica
  Peptide Sequence Number=SeqID_104594
gtacatgtgcatgggctaacaaaactacatacacaatcattggtacgggtcgtccatggccatttgtttattcattcttttgggagtgagtgcccagaaagatggtgagtagataatatcaaactgagccatgatttcaacctggactacaagattgtgtttgagatactaccaagagagaaaagcattgcaaacaagagaacaaaagtgatcagcatgctgggtgttagaaaaagtgagaacccatcagcaggcagcagcaatagcaacaagctctgataaaagtcatgtattggaccagcagcatgcagcttgatgatgctgcagctggttaaaagtgacaacaacaaaagtagggctagaaaagctagctgctggtgtgaaatctcgcttcagtccttttcgatctaccttgatatttgatttttctcatctgtttccctttggtggtcatgcgc

SEQ ID NO: 38621 - DNA, 816 bp, Setaria italica
  misc_feature (787)..(787): n is a, c, g, or t
  Peptide Sequence Number=SeqID_104595
gacgacgaagaggagacacaggcggaggaagaggaggcgcctttgcaggttgcctccggcaagaggaaggaggccgtggcttcgtctccgggcaagctcttgaagaagctcaagctgtgggcatggggaggtagtagttgctcaaatgcagtaccggaatcggaagccgataccacagatgaaggcgaagctgaagatccgtggccggcgtgggaggaagatgaagatgcgcttgcaattatacctggagggtatgacctgcaagatgctctggaggaaacagaaaccaagcagggagttggtgagcatgaccagcctgaggataaaatgggaggtgagccggagagatttgaacatgaacctgaaaacccggttgcccttgctgttgtgactccaggcaatgatctgccaccgaacgatgatggcgtggaagcaagtagaggtgtagtccctgaacctgaagcaagggaagaaagcaaaatgactgagatagccggaaatgggtcactccggaagaaggggatgatttacaagatggttttcaaggcgctcaaggagaaagagaggcaggcaactcttgccagtgcctcgcagccgaacctcaggtgctggctgcacgcgcctctgcctgaagatcgagccggtggccgtggaggagggtcctgatgatgtcaagggcgcaccgcaacagtggtaatgttgctcagttgatggaaaactatttggatggtaatcgtcctggactgttgaaaaggactgcttagcaactgggaaacatgatgccgtnaactgttgttcgaaagttgctggaacaaa

SEQ ID NO: 38622 - DNA, 496 bp, Setaria italica
  Peptide Sequence Number=SeqID_104596
accgaggccgaggcgcgcctccaggcctacgccggcgggcgcgaccaccgcgacatcgcgcctccgtcgcggtggtcgctgaagtggactgctgactccgcactcaccgacgacgacgaagaggagacacaggcggaggaagaggaggcgcctttgcaggttgcctccggcaagaggaaggaggccgtggcttcgtctccgggcaagctcttgaagaagctcaagctgtgggcatggggaggtagtagttgctcaaatgcagtaccggaatctgaagccgataccacagatgaaggcgaagctgaagatccgtggccggcgtgggaggaagatgaagatgcgcttgcaattatacctggagggtatgacctgcaagatgctctggaggaaacagaaaccaagcagggagttggcaatgatctgccaccgaacgatgatggcgtggaagcaagtagaggtgtagtccctgaacctgaagcaagggaagaaagcaaaa

SEQ ID NO: 38623 - DNA, 508 bp, Setaria italica
  Peptide Sequence Number=SeqID_104597
gcggtgttattaatatcttttagaggcgtatggcgtgccaagcttactgctggttaccataaaacttgcaagcacaatgcaatatacaaacgtacagcgacgcaggaaataggaaatacattagagatcagagagaggggaagacacttagacacatagctggtactagagtacacagatgcataatcactccagctaggagctacgcacacgtacggtgcatatcaccaatcatggtcccgattatttaatttaagatcgcctgtatcagttgcagttggcgacgccgtcgacgaggccgaggttgatgatgccccaggcggtgcgcggccactcccggcgcttggccttgtccctcatcagcctgccccacgacacccacccctcccatgacatgcgcttgtcccagctgctcccccactccagcagcagccgcaccccgcgcgccgccgccgccgccgcctcctcgtacctgccgcccccctcgttgaggagcacctgcgccagc

SEQ ID NO: 38624 - DNA, 614 bp, Setaria italica
  Peptide Sequence Number=SeqID_104598
aatgcaacggacttgaggaacatagccaatggaggattcaactatgtgaaatcaaatgatcaaagcatagagttttacaagttttggtattcttctcgatatagatatcctgggtatcatgatcaggacgtatttaattttataaagcatgatccttacactacagatattggtctgacaattaagttcttaagtacttcatactttggtggcatttgtgagccaagcaaagatttaaacaaggtttgcaccatgcatgcaaactgttgtattggactgcagagcaaaattcatgacctaagaatcatgatggaagactggaggaactatatgtcgatgccaccaagcttaaaaagttttggagcattgtcatggagggtaccacaaaattgcagtctctcattactaagcccatgaggcatgcttgtggagtcgaaacagttcattactgcaaaacatgtcaacatttgagtgtatgcttttggaaggatatacttcaaaggagcctgaacagggctaaacaatgaggaacgccaaaagagattagtaatctacactgcttcaaacattcgtgaagaaaggaaagtctggtgcacttaattaattagttacta

SEQ ID NO: 38625 - DNA, 218 bp, Setaria italica
  Peptide Sequence Number=SeqID_104599
tgaaacgttgcttgttacttattgaatatcctttgtggctgtttggtttgtgatgatgagcagatagccttaggtgcatagatgttactgttagtggttaaaaatcgtctgaatttggtggtacttggcctagtacctccatcttcagtcgatttgagccaatggtaatttcaatccaaacaatagactgtaataagtaggtaaaaaaaaaaaaaaaa

SEQ ID NO: 38626 - DNA, 246 bp, Setaria italica
  Peptide Sequence Number=SeqID_104600
actgcagtgtgacagtctctggttctatagcaagaatgggtgcccatggcgccagccccctcgctccgccgccgccgctttcgatagacactcgccaccgagctggggcattcggagacgctgacgacgacggcggcgagcccctgagccctaccgcacgcatgttccacgacttctacatcgtcgccgtcgtcggcctcggcgcgcccatcgactttgagcccgcccgcgccggcctcgaggtca

SEQ ID NO: 38627 - DNA, 844 bp, Setaria italica
  Peptide Sequence Number=SeqID_104601
tttttttgtagtaaacacatctaggccccatataaattggaaaaagtacaaagatagctcgcgtctctactctctagaaaggttgtgctctgaaatcatctcctagactaagctacagaaaattgcgctataatcatctacaaaggtctctcccatacaccatgaaccagattcttttatgtagtagtgtacaaataagcacagattagatttgctcaagcaagggatttttgcatcaagactaggttctcaaacatcaccgaggggcacgactgatccatcattaacttcttctcttcatctgataaaatggtgaacccgagcttctcagaccatattggtgccatttcagggtcaacaggtgccgtaagaaggtttactttccaggctctcaaatgctcctcgatagactttaggagaagtataaagtagcccttctttctgcactcactgcgagtagcaataaggaccagctctgcaacttgttccatgcgcactttcaaaattgcagcagacacaacatgtgtacttgcagttaacactgcacaatacattcctcgaaaatccgtctctccttctacattcttggcataaaccatatccgagaagacaccactgtgctcagcagtttccgcaaatgcatctttgaggatatcaatgacctgaggcatgtagagctcactacttgcattcattccacttaaaagccgccaacaaatattggatcttatccgtctgaggaaggcaatctcttcacacttttccagtccttcatctagatggtcacgaagcaatcgacatttttcgcagcacaggaagcaaatcgcgtatattctttcaatta

SEQ ID NO: 38628 - DNA, 1001 bp, Setaria italica
  misc_feature (50)..(50): n is a, c, g, or t
  Peptide Sequence Number=SeqID_104602
aggtaccagagacctggaggaagcgcgcttactaggatttgtcaggttcnggttgcagccactcgcaagatcaatgtggatgtgcccaatggtagctctttactatatgaaatgccggggaaggaatcagcaattctggggagcaggaagctgatgcacactgatggacaaggttctttgatcgagctgccaccatcacttcctccgatgaaaggtttcttgacgcaccaaatccatggaagctttgcaccgtgacccaagtggaggagatgaagatcttggcaagaatgatgcctgtccttcttgctggcataatctttaacacagcagaagcattcttcccgctgttcattgaacaaggagaggtcatggacaaccagatagataatttctctatacccccagcctctgtgacaaccttcaactgcctctgcattctcatcttggcaccagcgtacaacaaggttctcatgcctatggtgagcaagatcactggtacgaagcgaggactgtcagacctgcaacgcatcggtgtcggtatgtttttcgcaatgctatcaatggtatcagctgcaatagttgagatggtgcgtcttgacattgcaatgaagacaggcctagtgcaccagagtgctgcggttcccatgaatatcctgtggcaggcaccacaatacttcttagtaggtgtcgcaaaggtgttcagcgtggtcggtttcatcgaatttgcatatgagcagtcaccagatgccatgagaagcttgtgccaggcttgctctctcataatggtcacgcttgggagctaccttgtttctgttatgttaatgtttatcaattcaataacagagggaagagggagccatggttggatcccagtgaacctgaatgaagggcgtcttgatcagttattctggttgatggcaggattgcagctgctgaaccttcttgcatttgcgtattgtgccatgaggtacaagcgcaaacttgctacataagtttctcct

SEQ ID NO: 38629 - DNA, 491 bp, Setaria italica
  Peptide Sequence Number=SeqID_104603
ctgccatattttaaaattttaacacgctgtgtcagctgcttagatgctaacaaggtcttataagtgacaccatatgcatgactagcaatttctacgaaaaatgtatttgtctcaaataaatagcatttttatgttgaatttagtatatgaacaacttttaaatttttatgttgttaatctaaataattcttcatgtagtgctgcgcaaagctaaaactgctgcacattttagaagagggacactggagcatagatctttagatcaataacttatattctgtgtccgagggagtagcaaaactttccctcttctaaacaagtgcctatcaacaactagcattctgtacacagcttatttatttgactgcatctcttttatataattcaatgatgtcaaaattatggttaagtttttgaataaaaaatcttatgaacgcacatgagctttaattttcatgttatataagtgcctatcatatatattcccagtt

SEQ ID NO: 38630 - DNA, 459 bp, Setaria italica
  Peptide Sequence Number=SeqID_104604
tacgttagaagaagaacaaccaagcctcgactcgctcgcaaaatcaccgggatgctgctggagctggacagctctgaggtggtgacgctgctttgctcgtcggagatgctgtcgaccaaagtcgacgagtgcatgcagctgctccatgcaacaaatcccaaggccgaggatcaggagccgctacacccgggcttcatgctggactccgctggtgtaaacgccaattgaagcttggcagctcttgtctgttagggatggtaactaggtggtgtagctgctgcgttttcgcgtggtttaatttgcggatcagttttaccggttggatttgttgaggtgctgtttgctacagaactcagtagtaataagaactagattcagctagaaccgttatctggacgtgctatgaatcttactcggctagaaccttttcgaatcttagggaataaattgtttgtgttg

SEQ ID NO: 38631 - DNA, 1903 bp, Setaria italica
  Peptide Sequence Number=SeqID_104605
aagggaagaaaggggggggaggatcacctgttcgacgccttcagcaagatcggcaccgtcacgtccgtgcgtgtctgccgcgacaacgccaccagcagatcgcttagatatggatacgtgaactacttctctcgggctgacgctgtgactgctcttgaaaaattgaaccatagcttggttttggataagccgataagggtgatgtggtcgaaccgggatccagatgctaggagaagtggtgtcggtaacatatttgttaagaaccttaatgattttgtggacaatgccaggcttcaagaattgttctctaagtttggagatgttttatcatgtaaagttgccaaaaatgaagatgggactactagaggctatgggttcgttcaatttgcctcacaagaatcagcagatgcagcaattgagaacctccatggctctcttttcaatgacaggaaattgcatgttgctacttttgtcaagaaaagtgaacgatctgcaaataatgatgataaatttactaacctatatatgaagcatctggatgatgacataacagaggaacttgtaaaattgaagttctctcagtttggtccgatagttagtgtgaaaattatgaggagacctgatgggtcatctctgggatttgggtttgtcagcttccaaaaccctgaaagtgccattaaagcacaagagaccatgcatgggatgccaattggatcaaaagctttgtatgtggcaagagctcaaaagaaggaggaaaggaaacaatatttgcagcgcttacatgaggagaaaagaaatgaaataataaataagagcaatgaatcaaatgtttatataaaaaacattcatgatgaagtcgatgatgaagctcttcgcgcacgttttgatgaatttggtaacatcacatctgcgaaggttatgcgtgatgataagggcattagtagaggcttcgggtttgtatgttttagtacacctgaggaagcaaagggtgccgtaagcagcatgcgtggtgtcatgttttatggaaaccattatatgttgctattttcaaaggaaagaggagaggcgagccaaactgcagcaacactttgctcagcttgctacaatggttggacctgcaaactctatgattcccactggatatccacacgtatactttgcccatccaaatacacatctccctcaaggtcctccaagacatggatttgtgtatccacccatggggctcagtcatgaatggaggccaaatatgtttccttcaccacctaatatcccacaaatacattcacccatgatgccaaattcgccaaggcattatagaagcaacaggggaaggatgggtggaaatatgatgcctcttccccataccgttcatgctgtaaactatgtcgcacatgcgccaccagctaaagatttcatgtctatgccccgacagagattcagccatccaaagtacttctccaatgatgttatggccaacggtttggccattcatcacggtgaccctgttttgtcggagaatgattcttccagcacctatctggcttctgctccacccggggaacagaagaagttgctcgggaacaggctctttccgctcgttgagagacaccagcctcgactcgctcgcaaaatcaccgggatgctgctggagctggacagctctgaggtggtgacgctgctttgctcgtcggagatgctgtcgaccaaagtcgacgagtgcatgcagctgctccatgcaacaaatcccaaggccgaggatcaggagccgctacacccgggcttcatgctggactccgctggtgtaaacgccaattgaagcttggcagctcctgctttgttctgattggtgggcaaatttaggtttaaactttaaggtttaggtttagtttaagttacttta

SEQ ID NO: 38632 - DNA, 1100 bp, Setaria italica
  Peptide Sequence Number=SeqID_104606
gctagctgccaaccctagaagatctttgggccttggtacggcaagttggcaatcctcaggtccttaggctgggggacctcccgcagccatgctagctgtcgtcgcctctgcgcctccgttaacccactgctcacagcacctgtcgataaccaaagcaaacaccaaatgacatgagctcacctcagtcttgtagcttcttcctgattcatgcatggagctagcgagtacttacaggggtcgagttcgtcgtagggcaagtcctcgtagtaagtgcaggacctctgctccgccggcgcgtagggcggcgtgaggacgtcgaggaatgcgcagtgcccgtctaccacgaaccggtgcatgttcccgccggtgtccggaaatagcacccaggcgtcggacgccgccgtgacgttgtggtccagcaccttctctgcaagcatcgccgccggcgagccctggccggaaacgcggggacgcaaccagtcgtaggcctcgacgtgcgtcgacccgatgagaaccttgctgaacaccgtcatgcccgggtggtcgtggaggggcatgaccgctcgctgtggcaggaagaagaccgcgatcgtaaaattgctgcagctgtaaatggttttgcatgtgatgattggtggggtttggcgagcagcagcgttcatcctgtggaagtagtcgagatcgtccatgagcccgacgtcatgcggtccaatcctccctgaaaacacaagcaaataacaacatggtactgtttctcagatccaaacatgaggtctaaaacatacatgtctcagtcaataacaacatgcaactgtttcttagattcaggagctcgcgaaatcgtacgaccatgcgtgctcgcgttcaacgaaacggtacggcacgaacccattaatctgcagataaaggggacgatgatggacgagggtggtgtgggggtgcccttgaacacgtcgcggcacgcatccaggaggcgctggagaggcggcatggacaacagcatgctgcaccggcattgcggaacgatcgcagccgctgtcgcatccgctcccgtcgtcgtcctccgggtcgccggatcggcgtcccgcttcctctccctc

SEQ ID NO: 38633 - DNA, 1404 bp, Setaria italica
  Peptide Sequence Number=SeqID_104607
gcatggtatgaagctacgaataaaatagctatagtacaatgacaaccacaattacaaagtctacttcataagattgcaccgtcgtcgtcgtatatcactgccaatttcttatctaacaggacattggacaagcacgattcggatctatcaacaccgctaagagagttaaaccgagctagaaatttgccaaacgggatctgctagctgccaaccctagaagatctttgggccttggtacggcaagttggcaatcctcaggtccttaggctgggggacctcccgcagccatgctagctgtcgtcgcctctgcgcctccgttaacccactgctcacagcacaggggtcgagttcgtcgtagggcaagtcctcgtagtaagtgcaggacctctgctccgccggcgcgtagggcggcgtgaggacgtcgaggaatgcgcagtgcccgtctaccacgaaccggtgcatgttcccgccggtgtccggaaatagcacccaggcgtcggacgccgccgtgacgttgtggtccagcaccttctctgcaagcatcgccgccggcgagccctggccggaaacgcggggacgcaaccagtcgtaggcctcgacgtgcgtcgacccgatgagaaccttgctgaacaccgtcatgcccgggtggtcgtggaggggcatgaccgctcgctgtggcaggaagaagaccgcgatcgtaaaattgctgcagctgtaaatggttttgcatgtgatgattggtggggtttggcgagcagcagcgttcatcctgtggaagtagtcgagatcgtccatgagcccgacgtcatgcggtccaatcctccccattaatctgcagataaaggggacgatgatggacgagggtggtgtgggggtgcccttgaacacgtcgcggcacgcatccaggaggcgctggagaggcggcatggacaacagcatgctgcaccggcattgcggaacgatcgcagccgctgtcgcatccgctcccgtcgtcgtcctccgggtcgccggatcggcgtcccgcttcctctccctgcccagcgacagcccctccgccaccaccctttgcctcttcttcctccccacccccacggcctcgtcccccgactcctcctccctccgcctcttcgccgcgctagcttccgcctcctcatgccggagctcatctttcccggcgtccgtaggctcgtccactggctccttctttactactcctccagccctcagcaacggtgtcccctgagctgccgcatcgacagcctccttctttactcctccagccacgttgcttccctccatagccagggacctcgcggtacacaaccagcagcaacagcacaacaccacacttgaagaagatcgcctcacctctacgagagaacagacagcaagcagagaaagaag

SEQ ID NO: 38634 - DNA, 563 bp, Setaria italica
  Peptide Sequence Number=SeqID_104608
tgaagtctggcaatgacttcaatgcgacggagggcttctactactatgctgggtttggatttcgcaacaagaggcactataggagcagcgtcgatgattatgtacctataaaacaacaagaagaggaggattccatcaaaaagaacatgctttgtatctcagtcagactgaagttaagggtcatgaagatgagaccaaccagactacagctttcggtgatgacattatggggatcgcagatattgatgaggatagtagcgattatggctataatgggatcagtactgctagtagcagcatagctggagctagcaatggtggcagcaagaggaagatccggaggaagaagcaggggaggaagcctataaaggcccgatcgctcatgtcattgatgtgagtacctaagggctcttacatccttggtgtagaagaaaagctagctagctttgcttagcttaattgttccgttgctgttttgttgttaacttgttgcactatttgactttcaagaattacttttttacttaattagacttaggtactttagtaattaggtttaacta

SEQ ID NO: 38635 - DNA, 442 bp, Setaria italica
  Peptide Sequence Number=SeqID_104609
gctgttccctctgcagcccaccttcctgctgccggccgacaaggggcgcgccgccggcggtggtgcgtccatggcgccggcgccgtcgacggcgtccgcttcgttctcgggggagtccgagagcctggaggagagcccggactcgtacagcgaggcgctcgcggtgccgttctatgacttcttcggcctccagtccggaggccgctgatctgggagagagagtgatcatcggacctgagacccaggggatgtcgcggtgatcccgttgcttttcattaaggttttttttacagcatgtgcttcatcaagttgaggcccctctgctgtggtgaaccagaacagcgtgttttgttaaagttttcgttgcaagttaatcgtgcgtatgtagcctccgatgaactggaatgcggtgttacagtgttctctcgttgagctccgtttc

SEQ ID NO: 38636 - DNA, 381 bp, Setaria italica
  Peptide Sequence Number=SeqID_104610
cggggtggatatgtgagagatttggctgagaatattgtgaagttggctaaggatgggttgcaaaggagagggcacatggaagttggtttcttgaatgaagttgatgagattgttgggacaggagtgacacaagcagagaagcttgcaaatttgtacatggcaaagtggcagcacaatgttgatccagtttttcgtgagttcatctattgatctgctgagggctgtggcattatagggtcaacagggatccgtggttttccagaaatggtgtagttccttttggtctgatttatttttcatttagaacatggatcttgcatactataatgtatattattactgcatggtttttcactcaaaggtacttcagtgtccatatat

SEQ ID NO: 38637 - DNA, 430 bp, Setaria italica
  Peptide Sequence Number=SeqID_104611
tttttttttttttttttagtttagttacaagcagcacattacacgattaattccttcgatcatgcacactacgtacaacgctagctacgagtacaggcacgcacgagagctaatatcatcacacggctggtggatccagatgacacttgtgcacgcacatacatggtcctattttcattatgccaactgctactgatgacgattcagaaccttaggttcagcttggcactactactagtagatttcaacatacacgactaggtagttggtactagcagattacatatcacgcggacgatatacataaacacgtacgtactacatacatacgtagcagggatggcaggtccgtccgtctcgtcgtcatctttcatggctggctggcggattgcagctagcagcttgcgtcccggtgaggtcgctcgcttca

SEQ ID NO: 38638 - DNA, 302 bp, Setaria italica
  Peptide Sequence Number=SeqID_104612
agttagactagaattaatgacaagcactactgcagtactacgcaccaacttacctaggctagatctccgaagtgtacataaacgggtgtatagtagtatcacgtttcagttcaattttccgtgtagaactgctcagatactattggttcatatatttcatatttgtatcagtagcaaaggtcaaatatgtgcgtagtactgcagtagtgcttgtataatgtgagcgattaatacgttgctgatatgcaaatgcggatgaagaaaatgcttgtaaacattcttgcctaagcaatacgaacaac

SEQ ID NO: 38639 - DNA, 249 bp, Setaria italica
  Peptide Sequence Number=SeqID_104613
agacagcagagaaggcgagacacacatgcagagaaggcgagacacagcgaaaaaagatcaaaggtctgcgacctttctgtccatatcactcacctcctcctccgcgtcgtcagtcaaggtgatggtccggcaatgctgatggagtccaaaactgaaggtacatatcacagtaatcatgctttgatcgactttattttctagaggatgtatctcttgttttgctgagactcgacgagcacacggaggagt

SEQ ID NO: 38640 - DNA, 410 bp, Setaria italica
  Peptide Sequence Number=SeqID_104614
taaaagtaagactagtttactacccaattcaccatgtgattggtagttgtaccacggcacagaaggatgccatcctagagcactgcgaagagtacatcaagctgccttactatcctgttataattccatcctacattggtgtctgttgcgacaaggtgagagatgtgccagggagggacatggaatgcatcgttagtctactcacacatgcagagaaggcgagacacagcgaaaaaaagatcaaaggtctgcgacctttctgtccatatcactcacctcctcctccgcgtcgtcagtcaaggtgatggtccggcaatgctgatggagtccaaaaacagagatacatcctctagaaaataaagtcgatcaaagcatgattactgtgatatgtaccttcagttcagaaaagt

SEQ ID NO: 38641 - DNA, 560 bp, Setaria italica
  misc_feature (1)..(53): n is a, c, g, or t
  Peptide Sequence Number=SeqID_104615
nnnnnnnnnnnnnnnnnnnnnnnnnnnnnnnnnnnnnnnnnnnnnnnnnnnnntttttttttttttttttaatttgaggctgcaaacattcatttaatacttttctgaactgaaggtacatatcacagtaatcatgctttgatcgactttattttctagaggatgtatctcttgttttggactccatcagcattgccggaccatcaccttgactgacgacgcggaggaggaggtgagtgatatggacagaaaggtcgcagacctttgatctttttttcgctgtgtctcgccttctctgcatgtgtgagtagactaacgatgcattccatgtccctccctggcacatctctcaccttgtcgcaacagacaccaatgtaggatggaattataacaggatagtaaggcagcttgatgtactcttcgcagtgctctaggatggcatccttctgtgccgtggtacaactaccaatcacatggtgaattgggagaaacagcaatacaaccaggaggggagctattttcccacgcatcctttaggtcttttttgtttttcttttttt

SEQ ID NO: 38642 - DNA, 350 bp, Setaria italica
  misc_feature (238)..(238): n is a, c, g, or t
  Peptide Sequence Number=SeqID_104616
ataatcttccctttcctcatttttccacttctcttccttttccttcctcctgtactccatctccatttccctctgcttcatatccatttccctctgcttcatctccatctccctctgcttcagctttaactccatctccctctgcttcagctttattgcctcagagtcctcagagctgtcagctttcattgtgtgcacaaggtctttgaatatgtttaggaactgatttttccccttntttggcggactacatgcagtgtcttttgtgctagaactcctctttcgactgctactactcagtgggctagcgtagtcttcagttccatcttctggtaacataacatcatctt

SEQ ID NO: 38643 - DNA, 403 bp, Setaria italica
  Peptide Sequence Number=SeqID_104617
gggggacggccgcgccagtgcccggcgacggcatgacagacgcggcgagtggctggacggagtcttgcttcggagctgacgacatggaaatcggagattcggaacggcgaggttggacggatacgctgctttcggtgaagcttcggctgttgctaggccgtcgtgctgatgtgactccatgggctaggaagtctgcacttcagtacttgaagggcgatggtgcagactgtagagtgagaatttgggagataaggttcaaactttgacatacaagatcaagtactcaaacttgaaatttcgcatacaagatctagtaccaaaccatgttatttacatacatgatcaagtactttttcaattttgtcgaagtttgaacctcatagctgtttattgaagtttcatt

SEQ ID NO: 38644 - DNA, 288 bp, Setaria italica
  Peptide Sequence Number=SeqID_104618
ggcgctagagaagaagatcaggaagaacgatgaaggttcagatagaacaaagttctgggttgttacaatgatgcgccattcttcgccacgctcacctgttatcctgagcagagcaactcacgcacgcaacaccttacatgggccggctccactctgggccagagacacgcacgttcggaatggtgggccaagaggaacggtgaggcccagcttcctttgccgtctcccttgctgcttgcttgacagaaggtgcactgacactccccccccttctagttagctaacctt

SEQ ID NO: 38645 - DNA, 1046 bp, Setaria italica
  Peptide Sequence Number=SeqID_104619
agtcgagctgttgtataatagagttgaaatttgaacaatattttggagaaatcattaatagggtgatcatatggattggaatgatggctataccaccattgtttgcaagttgtttgctgaacaagttagaaaaggaaatcgaccaaacactcatttgaacaatgtgggatattccgaggtgaaagaaaggttttttcagagtaccggtatcatgttgaaaaaaaagtcaacttaagaacaagtgggataagggtagaggtgatttgtctgcatggaaaaaattaatgagaaagcaaactggtactggttggaactgggagaagggaactatcaatatggacgccgagtggtggaaaaaacaaaaagacattcctggcgtggggaaatttaagaataggcctctccaaaacgaagatgagttgaaggtgatgtttggaaacatcattaatgaagagcaagatcattggaatcctatgagttccaacccatcatacccccaagccaagaagcacccaatcctatgagttccaacttcattgatgccgaggatgggttagagatgggtggtaacaatgatttagacaatggcgatgaggtccaggaggtttctccttccgttgccaatgctaagaaaaaagtacatgtgatccttgataaacctaacaagaaatctaaggcaagcacagcattagttatacaagaacacatctccaagatatcagataatgcttcctcttttgtggcaagcaggcaagctgggatcactattgaacaagtaatggaccatgttgccgcatgtggggctgcgtgtggcagtgatgagcattttgtggcaactgagctttttgtcaagaaagagcaaagggaaatgttcatgactattcccaccaatgaggctaggtttagttggcttaagaggaagtacgatatgatgtttgcaaagtgatggccgagtgatttgccatctttttttagacatgtcatttttattcatctatgtcatatggacaaatttttgatgtttaatttgttgttattttttattc

SEQ ID NO: 38646 - DNA, 392 bp, Setaria italica
  Peptide Sequence Number=SeqID_104620
catggaacatgaattgcttagtgggtctgacaatgacagtgatggggaacttcatccgttgattgagcaagaccataatcgtcgacttcaagataaaacagatgagaagtttgaagcttttccagaagaggatttagcctgtgatgccatcattgataagagtgtaaaaaggaaaagaccagagtttgtacggataataagcaagcaaaatggtgggaatatttctttcaatttgggttcggagaagcctgcggaagcacattcagaatctgagggtatcaactgttggtgtaggtgcaatgggttatatcggtaacaaggcaagtgccaaatttgatcttcccttatattatgcgtacatcttgatatttcagtgacaactggattatact

SEQ ID NO: 38647 - DNA, 669 bp, Setaria italica
  misc_feature (660)..(660): n is a, c, g, or t
  Peptide Sequence Number=SeqID_104621
ataatttggtgctgaagacaatcgtccagttgcagtctgggagcacatcatccgtgaaactttgaataagaatggttcagataaatcgaggtttaagtgtcatagtgatccttcttcaccatcaaggtttaatccatcagatgttgctctttccatggaacatgaattgcttagtgggtctgacaatgacagtgatggggaacttcatccgttgattgagcaagaccataatcgtcgacttcaagataaaacagatgagaagtttgaagcttttccagaagaggatttagcctgtgatgccatcattgataagagtgtaaaaaggaaaagaccagagtttgtacggataataagcaagcaaatggtgggaatatttctttcaatttgggttcggagaagcctgcggaagcacattcagaatctgagggtatcaactgttggtgtaggtgcaatgggttatatcggtaacaagggatcaatatcagtcagcatgtctatacatcagactcctttctgctttgtttgttgccacctggctgctggtgaaaaagatggagatgacctaaaaaggattcaaatgtcgaagaaataattcgaagaacagtgtttaatccagtccatactgtagcatgcctatgagaatacatgaccatgaaaggnttatatggt

SEQ ID NO: 38648 - DNA, 566 bp, Setaria italica
  Peptide Sequence Number=SeqID_104622
ccgccaagctcgtcatcaagggcgtcatcgcgcgcggcaccttcggcaccgtccaccgcgtaacgaacgacggccaggacgtcgccgtaaaattgcttgactggggcgaggatggtcataggtcagaacaagaaattgctgcgttgagatcagcatttgcacaagaggttgctgtctggcacaagcttgatcatccaaatgttaccaagtttattggggctataatgggtgcaagagatttaaatgtacagacggaacatggacatcttggcatgcctagtaacatttgctgtgttgttgttgagtaccttgccggaggtgcactgaaaaattttctgataaagaacaggagaaggaagcttgcctttaaagttgttgtccaaatagctcttgaccttgccaggggattatgctacctccactcaaagaagatagtgcatcgtgacgtcaagactgaaaacatgcttctggacaaaacgagaactgtgaagattgctgattttggcgttgctcgagttgaggcttcaaaatcctggtgatatgaccggcgaaaacagggacgcttg

SEQ ID NO: 38649 - DNA, 617 bp, Setaria italica
  Peptide Sequence Number=SeqID_104623
ccgtcgttgaaagtctcggccttccgcatcgcccccgccgggacggcggccgcgggatcgatctccccgctgcccacgccgccggacgggcggcgccccgggcgggtgtcccaggtgtcggacttcttgaggtgccgagccagcggcgggccccgcccctccgtgatggccttccatgtgctctccagcgtctcctccttccgcggccgcgccacccgcagtgccctgctcccttcggggcttggcttggccgccttccggctgaacctcgccgacaccagaggcttctccctggagttggtcaggtccgcgaacggcacctcgctctccgcatccgcctccacctccggctccgcgcccctccggcgcggcgtccacgtcgaccttgaaatcgagaattcctcatcctcctccaccggtaccggcgccggcgccaccgtcgcagcgttcatctccaccacgggctcctccacagcagcgacctccgcggccggcgcagctggcacgggcatcgccaagaccggcacaggcacctgcagcgcaaccggcggctggatctcatcctgctccacctcatcctccgccactactcctccacctccggcagcggcggcggc

SEQ ID NO: 38650 - DNA, 401 bp, Setaria italica
  Peptide Sequence Number=SeqID_104624
aattttgaatcaatatatggagtttgcattccaggatcaagaacaagccctcgagaaactctttgatacaaatttgggaagggcaaaactgcacgcaaaagaggcaaataatatcttactgaatttgcttaatacactaggtggactctattgctgaattttaatgttgtgtccatttcctcagcctgaagtatcaggaagatggaagaggtgccccaagcatattcaatacacgagggatattttaacattaacagagtatcacttgaatgtaacatccaaaggttacagggtgttcctttatagtggcgatcattcattgctagttcctttttctgcaactatggagtggctgaagaaattaaactacaaagaaactgagaaatggcacccttggtttg

SEQ ID NO: 38651 - DNA, 792 bp, Setaria italica
  Peptide Sequence Number=SeqID_104625
ctcaccagcaggtgtgggctactcttacgctgagaatgacgatgactacataacaaatgataccagcagagttgcggacttatatgactttctgtcaaagtggttcgctgaatatactgagtttatgtcaaatcctttctacgtagctggatgttcttacagtggagtgatagtacctgtacttgcacaggaaattctaaagagaaatgaagagccatatcgaatgaagataaacttcaaggggtattcattgtgcaatccagctgttgatgtagacatagagaacaatgcacatgttccatatgcatttcgagtgggtttgatttcagaagaattgtttcagagcttggttactacttgtactggaaggtattggaataactctaatccatcatgccaagagaacatggagcaattttatatgcaaatcaaaggcattaacatggagcatattctgtgcccaccatgtcgatacaagatggggataactaaagaattcatggaatatgattatggtcaaatgtttaagcggatttcgaaatcctccagtcatggtttagagtgccatgatcaagaacaagccctcgagaaactctttgatacaaatttgggaagggcaaaactgcacgcaaaagagcctgaagtatcaggaagatggaagaggtgccccaagcatattcaatacacgagggatattttaacattaacagagtatcacttgaatgtaacatccaaaggttacagggtgttcctttatagtggcgatcattcattgctagttccttttcagcc

SEQ ID NO: 38652 - DNA, 459 bp, Setaria italica
  Peptide Sequence Number=SeqID_104626
ccttactcatggactaagatggctagcctccttttggttgactcaccaggcaggtgtgggctactcttacgctgagaatgacgatgactacataacaaatgataccagcagagttgcggacttatatgactttctgtcaaaggggtattcattgtgcaatccagctgttgatgtagacatagagaacaatgcacatgttccatatgcatttcgagtgggtttgatttcagaagaattgtttcaggatcaagaacaagccctcgagaaactctttgatacaaatttgggaagggcaaaactgcacgcaaaagagcctgaagtatcaggaagatggaagaggtgccccaagcatattcaatacacgagggatattttaacattaacagagtatcacttgaatgtaaacataccaaaggttacagggtgttcctttatagtggcgatcattcattgctagtt

SEQ ID NO: 38653 - DNA, 977 bp, Setaria italica
  Peptide Sequence Number=SeqID_104627
gacgatgactacatacaaatgataccagcagagttgcggacttatatgactttctgtcaaagtggttcgctgaatatactgagtttatgtcaaatcctttctacgtagctggatgttcttacagtggagtgatagtacctgtacttgcacaggaaattctaaaggagaaatgaagagccatatcgaatgaagataaacttcaaggggtattcattgtgcaatccagctgttgatgtagacatagagaacaatgcacatgttccatatgcatttcgagtgggtttgatttcagaagaattgtttcagcaaatcaaaggcattaacatggagcatattctgtgcccaccatgtcgatacaagatggggataactaaagaattcatggaatatgattatggtcaaatgtttaagcggatttcgaaatcctccagtcatggtttagagtgccatgatcaagaacaagccctcgagaaactctttgatacaaatttgggaagggcaaaactgcacgcaaaagagcctgaagtatcaggaagatggaagaggtgccccaagcatattcaatacacgagggatattttaacattaacagagtatcacttgaatgtaacatccaaaggttacagggtgttcctttatagtggcgatcattcattgctagttcctttttctgcaactatggagtggctgaagaaattaaactacaaagaaactgagaaatggcacccttggtttgtggagaatcagattgctgggtattcaattaggtatgggagcaatatattgtttgcaacaataaagggggctggtcatgttccatcggactatttgccatttgaagcatttgttgcctatcaaaggtggatagatggggctgctttttgtataaaagatttgctgccagatgaattaaccttcatagtgtcatgcacagcactgtttattccaaggctactaacattggccaggatccaagc

SEQ ID NO: 38654 - DNA, 1492 bp, Setaria italica
  Peptide Sequence Number=SeqID_104628
tagtacgtttctccctttcggtcccttgggcccgctttatgtcttcggcattccccttccctctaccatcgtcacagagcctgccacagggagctcgatcgtcccgctcctgatccctccaaagatcgcggcctagccgccatgtctcgccgaagagtccttgaccccgtcgaagccggcgcgctgctgctgatggcggcgttcttgctgctgtgcttgcgcgtgtctccagggcgcgcggcgccggccggtgcggaggtcactgagttcccggggttccatggcgtgctcccctccaagcactacgccgggtatataacagttgggcatgaacaacaaaatagacatctatattactatcttgccacttccgaaaggaaccctactttagatcctgtggtcatatggataaatggtggtccagcgtgttcagggtttagtgcgtttcaccattctatcggaccattcaaaattgagtactcccaggttcatgtcaaagacgacccacgagctactaagaatccttactcatggactaagatggctagcctccttttggttgactcaccagcaggtgtgggctactcttacgctgagaatgacgatgactacataacaaatgataccagcagagttgcggacttatatgactttctgtcaaagtggttcgctgaatatactgagtttatgtcaaatcctttctacgtagctggatgttcttacagtggagtgatagtacctgtacttgcacaggaaattctaaagagaaatgaagagccatatcgaatgaagataaacttcaaggggtattcattgtgcaatccagctgttgatgtagacatagagaacaatgcacatgttccatatgcatttcgagtgggtttgatttcagaagaattgtttcaggatcaagaacaagccctcgagaaactctttgatacaaatttgggaagggcaaaactgcacgcaaaagagcctgaagtatcaggaagatggaagaggtgccccaagcatattcaatacacgagggatattttaacattaacagagtatcacttgaatgtaacatccaaaggttacagggtgttcctttatagtggcgatcattcattgctagttcctttttctgcaactatggagtggctgaagaaattaaactacaaagaaactgagaaatggcacccttggtttgtggagaatcagattgctgggtattcaattaggtatgggagcaatatattgtttgcaacaataaagggggctggtcatgttccatcggactatttgccatttgaagcatttgttgcctatcaaaggtggatagatggggctgcttctttgtgataacttgactcctctgtatcgctccataataattctgagttcagtgccaaggattgtgacagcatctctgcttggatcctggccaactgttagtagccttggaataaacagtgctgtgcatgacactatgaaggttaattcatctggc

SEQ ID NO: 38655 - DNA, 1007 bp, Setaria italica
  Peptide Sequence Number=SeqID_104629
agtagcaagaacggaatcgagcctccgtcatgttgcggaccgagcaattgagctcggtgcacgtgacgtgattgttctaccaggcgatgtcgcaaaccctgatgattgcaagagatttgtccagactgcgatcagtcactacgatcgattggaccatcttgtgtgcaacgctggcatcgcaagcgtaggagcgtttcaggagattccagatgtgaccaactacagttctcagcttgatgtgaacttctggggttcagttcagacaacctttgctgcactcccgtatctgaaaaggagccgaggaagaatcgttgtcaccgcttctgcaacagcatggaatcctgttccaagaatgagcttctataatgctgccaatgctgcgctggtgaacttctttgagacgctgcgaaccgagcttggaagcgaaattgggatcacaatagtaacccctggatggatcgagtctgaaatgtcaaaagggaaatacctgaaggagcatggagagatggaggttgatcaagaaatgcgtgatgctcaaattggtttgtttccagtggagtacgcgaagaactgcgccagggccatggtgcaagcagcttgccaaggtgagcgctatctcacagtgccggcatggttcagggcaatgtacctgtggagggtgtttgcgccggaggtcgtcgaggtctgctaccgcctcctgtacatgcacggccatggcgcgagccaaaccgacgccccgagcaagacgatggctcaggcaggtgggaagcagctgctgtacccaacctcgctgcgttctgacgacgtcaagagcgactgaggtcgtgtgcgcaccaagtgcaccttgcttgtcggcctttggacaccaacttcaacttggtacacttgataggtcccatggaatgagtgtggtacggaaatctggtcgaaactgttgtgaccatgttaatatgctgtgtatcttaccatgaataagtcatgctcgatctggtagggctacttggtta

SEQ ID NO: 38656 - DNA, 641 bp, Setaria italica
  Peptide Sequence Number=SeqID_104630
caagctcatgatttctgccggatcatctcagtctccttttgctaaattcatttggcgaaataaggcgcctccacgcattcagtttttcggatggctgctaatgcaacggaggattcagtgccgagcaaatcttgcaagaaagaataccttggatgatccttcttgtgagctgtgtggacaatacgaagactgtgaccatatcatctttcaatgccgcttcgcctcccatgtctgggactcactcggattcaacacagacggtgccaatgttacccagctgatggctattgccggtccgacaacactgcctgcccgccaattctcaggattcatattgctaatctgctggatgctctggaagcagcgaaatgacttggtgtttcaacgctccgcccgtcccactctagattttcgcaactatgcagagatgaagctcgcctctggagccagagatttagaaccgaagataaaacaatccctgaagcctggtgcctcctctttaattcaatgtagatcgcagattgtaaacaatatgtttttctcccttgctgaactcctaagttgtaagactttggcctacagaaggcctaatgaatgaatgaattcaggtggggatctcccccacggtgacctttcacaaa

SEQ ID NO: 38657 - DNA, 780 bp, Setaria italica
  Peptide Sequence Number=SeqID_104631
tccccgcggcgcgcgcccattgatctcgtcaccgtgctggacgtgagccagggcatgatgggggagaagctgcagattctcaagcgcgggatgcgcctcgtcgtggcctctcttggccccgccgaccgcctctccatcgtggcattctccggcgccgccaagcgcctgctgccgctgcgccggatgacgaggcagggccagcggtcggcgcgccagatcctcgaccgcctcgtcgtctgcgctgccgccgcgaccacccaggggcaagagcaggggccggggcagcagcagagcgcttgcgtcggcgacgcgctgcgcaaggccaccaaggtgctcgaggaccggcgcgaccgcaacccggtggccaccgtgatgctgctctccgacacccagcagcagcagcagcagcgggatcagtcgacgacgaggaagcagtttgggcggccagccatggctgctccggcgacgcggttcacgcacgtggagatccccatcggcgacgcgcctcccctcgtccggcccgaggaggagaaggaagagcccccggtggaacacgcgttcgccaggtgccttggtgggctggtgagcgtggtgatgcaggatgtgcagctggagctggtgttcctggcgggggagatcacggcggtgtactcgtgtggccccgggcagcaggcggtggcgctggccggcggaggcagcggcggcgccggggtgagcgtgcggctgggcgagatgtacgcggaggaggagcgggagctgctggtggagctgcgtgcgccg

SEQ ID NO: 38658 - DNA, 491 bp, Setaria italica
  Peptide Sequence Number=SeqID_104632
aaccctaggtcatcagcctatatagggggcagggatactccttggggtaacgcacatcgacccttcgcatcccgtaccagcaatacaatccaccagaacacaggatgtagggtattactctccgaaggtccgagcctgtctaaacgttgcgcccttgtgttaccattcgagttcttagtcttacgatctctccatcctacaaatctaccacctggtggactgctggtcactaaatctgacagttggtaaagtctgaatcttgatatgcgtgtgcgccttgtaaatagaaatggagggagtactttagtgttggtgctagtgctttgtatgagatggtccatgtgcttggattttgctctgactcgaatatccttgcttaaaactgaactaattgcagggtgccaagttacctttcgggaggcaagctgtctctcaacaacaaagatcgtgaggatggatataagctaatatgcaaggttcgcaaaaggcca

SEQ ID NO: 38659 - DNA, 1067 bp, Setaria italica
  Peptide Sequence Number=SeqID_104633
tccttcaatccagcatggattcgcgtccacctttgctcactgctgctggcacctactcgtcgttggcatgcggtcaactagccattaacgtgcccatggaggaggcgggcatgcggcgccctcgtatcccactctcgccgtcaaataggtcggtgccatgctacgctccagagataaaggccttcagggagttcactcatcgccgtgtcggtctcattcgcgccctcaccgaagatgtggaggaattctttcgtaagtgtgcctcaggtatgcgttctctgtacctgtatggcaactacaatgacgcgatttggtgggaggtgcggcagccggggcctgaggaactgctgcttggaatcaacctagcgaggggtaatatgagtcgtatcaagtggatgcaacacattgccatgctttgcgacgcatggctcatcaacatcgctttctcaagcgcccaaaatatgacagctgaacaacgggagcgcttgttccatcggatcaacagcctgcaaacagtgcatacagcattccttgctagtgacacctatcgccgcctatgtcgtgaagaagagaaggtgtctaggccagctgctgaacagaacgaccagactgagggtgagggtacagatgagatcatctgcatacgctgtaatggccgctaccgtgcaaacgcattctggatctgctgtgatgtttgcaagcagtggtaccacggcaaatgtgtgaagatcagggccaagcaagcagatcagatgaagaagtatgagtgccctgagtgcctcagtgagaagagcgggcattcttaagatgagttattacccaatgctatctgatctgttctacagatgctagacatgccctgtggtccaaggccgtcgtctccaacttgctactgctggttgttccttaaatcattgcgatcccttatggcgcttttgactgttctggccttaaatctggactttgttgctgtgttctctttgtagtatgtactggtgattcggtgagtcgtgatcctggatgctcatttcgttccaaaaataattctcaactagttttgtttaaaa

SEQ ID NO: 38660 - DNA, 324 bp, Setaria italica
  Peptide Sequence Number=SeqID_104634
cgccgcaccgccgcctcatcgtcgccgggaacccccgctgcccccgccaatcttgcgcatagagatccgtccgttgacgcggctccggcacgtgccaaaattccagcggagacctgtggggaatctcccggtctccccctccaccgcctcgggcctaggcctcgcccttcacgctgcccctcgagaattttaatctgctcaatccaatccggcctggcgattctaaagttcgcgaattccgattgggggcctgagggcgccgcggcctagggtttgtaagctggtggtgccgtcccggggccgggaggcagtggtggacagcgg

SEQ ID NO: 38661 - DNA, 1049 bp, Setaria italica
  Peptide Sequence Number=SeqID_104635
aaatgttgttcgtgttgacaatttacacagacatgcttttacttgaatccatcttgaagacgatatgagggcagagttggagatagcagacatccgacggtccgacctcaccaacatgcagaaaaaaaaaatacaaactgtaagtggaattatatctgttggtgagaaaaattgtaaaagatacctgttggtgagaaacatctcttggtctcttggctacccggaaaagggcaacataaaaaagactcgaaatgaacctcaaagcacaaatagttcatgataccctgcggttaatttattttaggaaaaaaattgaaatcacgagttagatcagcaagataaatggagataagacggttctcacaaacatattaaggtcaagaatattgtccagagcctgagaaattaataaaattaagtatgcactaagttaaaagtaaaaggggaacaaaaaagattggtatcgatggggatgatttcatgcacaagcgagcaagggagcacccttcagtccaaccacaaacagcgtagagcttgattttagctcccgcgccatccactcagctgccaagacattgcccgtcgatgggtcttggcaagtgaatggatgagtcggcagctaatgaaaccctacggccatttcagagtggactgaagagagctctcttccagagaagccataaactctcaaagcacaaaccagacgaacagcaccaaagcacaataggaaatattaggccatgcatctgcatattttgatccagtactgtgtatcctctagctatatatctagagaacacactaggaacatccagatcattgcaaggtgaacacaagattaaggcggcagtaacttaagatcttataggcgtttgaaagaaagaaaaaatacaagatcttatacaaatcaagaacaaacaacggtggggaaaggttgatatgagaagctgccaccgggaagatgagataggagtattctatccgactatcctcttgcgtttagtgtattctggggctaagctttgcttgcagttgggaggagcaatgct

SEQ ID NO: 38662 - DNA, 507 bp, Setaria italica
  Peptide Sequence Number=SeqID_104636
ttattgtggcctggctgatagttttgttggagtaatgctgacagtatattagaagcgatgtgttttcactggaaatggaaatttgtttctataatcctagtttgtttttgtaacaagtttgggggttatcattttttaagaggtgtggcttatgtgtcttactaggtgtttctgtttacagagtttataggtttctttgtcttgagtaaaagccacagcgcttcttgtgcttgtttgttcattttatgtctcacaggattagatttaatcgcatgtaacattgtactcaatcactactgttttttgttgcctcttttgaactttgttgtccaaatgtatatttgtaggtttgtcctcacctgttctgtcatttttagttaaatacttcaatataaagtatgttatgcattttggagaactggagttcctgttgtgttaataaaataatagtcagttaattttttgttggatgggtaataaggattttggtatcaaaatgccaaaact

SEQ ID NO: 38663 - DNA, 1051 bp, Setaria italica
  misc_feature (1026)..(1051): n is a, c, g, or t
  Peptide Sequence Number=SeqID_104637
acgcggcgggggaggcggtggcgacggcaacggcaaggacgggcaggcgttgggaagcgacaaggtcctgccgttcgagttcagggcgcttgaggtgtgcctcgagttcgcgtgcaagtcgcttgaacaagagacttgcacattggagaaggaggcgtacccggctttagacgagctcagctccaatgtcagcactctcaaccttgagcgcgtgaggcaaataaagagccgattggttgttatttcagggagagttcagaaggtcagggatgaactagaacacttgctagacgacgacattgacatggccgccatgcacctgtccgagaagctcgcctaccaagccgctgatagccagtcatcgagattcgccgccgacaacgaaccgagcgaattcgatgaagagagggacggagaagtcgaggaagagggaggatcatccgagggcggcggctacggcaacgggacctccgccgccgccggcttcacgcccaagatcgacgagctggagatcctcctggagtcctacttcgtgcagaccgatggcaccctcaacaagctcaacaccctgcgcgagtacgtggacgacacggaggactacatcaacatcatgctggacgagaagcagaaccagctgctacagatggggatcatgctgtcgacaggcacgctggtggtcagcgccgccatcgccgtcaccggcgtcttcggcatgaacatcaccatcccgctctacgataagggcgtcggggccttctggcaggtcaccggcggcatcgtcggcgccaccgccgccatctacctcgtcgcgctgctctgctacaggaggagcggcatactgcagtgacaccggagtgtggacccggcttggacgttagtatatgacacaagaagatacacgtcatcttccggtgtcaaataacaaattttctcttcttgctaaccttcatgatgacgctgttacatcaatcttaagttaaattatctggagaacgtgctaaaaggtcgaaaatttgcgagaccctnnnnnnnnnnnnnnnnnnnnnnnnnn

SEQ ID NO: 38664 - DNA, 1071 bp, Setaria italica
  Peptide Sequence Number=SeqID_104638
ctgaagaacacaaggacccaagcaacttggagaatttgcgagtcaaatcaagcagcaggtaatttccatgtgctctattgtttcttcagattcacaaaggtaaccaaggcaacatggaacatcagcctggccactataaagaagatttaaccatgagtagcgaagcttgtcttcacagtagtcaagtaagggcacgaagaacttaaacatccattcttcccgtagcttacgagggcaatgcttgacaaaaggaataatgataagatcgattagtctggtcaaatgccagaattccattgatctcacattttccataatagcagcactaattgatgaactgtctaacagctcagagaatgccccatcaatgcatgcacataaacctaagaagttgtacccactctctcgaatttgctgtagccatttgcctaattcattctcttctcgacatttcaattctgctcccagattgctaaaatcctgctcacagctattcatccttttagcttctctaagttcttttcgcaaaaaaaactcagcttcatccgtccacagtgcatgaacaaatcgaagtagctttaggagtggaggaatgaccaagggaacaagcgtaatcaaagtcgagtagcttatttggcctttttcatgcaagtacccttccctgcattttttgagctcctgctcaaagaattttacaattttcaggacagccttcctaaacatattgtcacagcatagcagctctaggcaagctttccactgtgggtgggtccaaacatctttcaaagaactaagtaacggggcaagtttatcttcgtcaaaccctggacaggttgctgcaaaaataatgattctgaaagagtggtatgctctgcaaggagctgatgtaatttcccctcaccaataaccgactttcttcattgacaagctcatttgactcttttgaataatcagcaccattgttgtccctctcacaggtgttactcccacaatccgcatcggtgtcaaatatatggatgtccaatagcaagacctagtagaaatactactaagttcaaactagacaaagga

SEQ ID NO: 38665 - DNA, 614 bp, Setaria italica
  Peptide Sequence Number=SeqID_104639
catgttgacttattatctctattttggctcaaaacaatctagtggtgtccgtctccattagctgggccactggagtaaactgatattttttctctgttgccccaggtgtttatactgaagagtcttccactgcgatttttagcaacacgcttggcatttaacaatactccaaacgaattctttgattgggtgcaagtaagcctccagtgattgctttaaactttaaaaggaaaccaaacgaaaaggaaatcatgttcttgttgttttttttccttcaacggccatcttgttcaagttgtttcctctaccttctgaaattatacaatgtaccttactataaagttgttatctctgatgctgcaagataatcagtgtctttgtataagtacttatacagtatttgtgtttctgttgatgggggctaacataataatccaaacttttgtgattcatgcaacaatatataattctgtattctttcacgagcatatataattctgtattgaaacaaaatatttatctgccactccaactttccttttctcatgtctgaaatccttatttcaacagtgacaaaaagtatcgccatgatttaattcaaattaaactttgca

SEQ ID NO: 38666 - DNA, 898 bp, Setaria italica
  Peptide Sequence Number=SeqID_104640
ggagcgcatccgcgacggcgccgccacgggctttctgtggcgtctcaaccgggcctatcttcagaccggtttctcggttagtccgatacagagcagctgtgtgaggccgctcaagcagcaacaggacgctgatccaatcgtgctgctgcatggcttcgacagttcttgtctagagtggagatacacgtacccgctgcttgaggaggctggacacgaggcttgggctgtggacatccttggttggggcttctctgatttagcgacacggccaccatgtgatgttgcgtccaagcgggagcatctttaccagttctggaaatcctacatcaaaaggccgatggtgttagtcgggcccagccttggtgctgctgttgccattgatttttcaatcaactatccggaagcggtctcaaaaatgatcttcattggtgcaagtgtatactctgagggcccaaaagatatgactaggatgcctaagtttgtttcatatgctggggtgtttatactgaagagtcttccactgcgatttttagcaacacgcttggcatttaacaatactccaaacgaattctttgattgggtgcaaattggccgtctacattgcctacttccttggtgggaggattctacagtagattttatgattagagggggttataatgtcataaagcaaataaaacaggtgaagcataaatgcctgatcatgtggggagaggatgacgggataataagcagcaaactagcatatagattgcatcaggaactcccagatgcaattctgaggcaggtacggcagtgtggccatattcctcatgtcgaaaagccaagggaagctgcaaaacttgttcttgaattccttgaaagagataaagcggaaaacacagatcgggcttcttca

SEQ ID NO: 38667 - DNA, 889 bp, Setaria italica
  Peptide Sequence Number=SeqID_104641
ctcactggaacaacaacgatgagcaaatactatgacctttctgaaatcaaagccacgcatgaaattctacagtagattttatgattagattaggttttaatgtcataaagctaattaaacaggtgaagcataaatgcctgatcatgtggggagaggatgacgggataataagcagcaaactagcatatagattgcatcaggaactcccagatgcaattctgaggcaggtacggcagtgtggccatattcctcatgtcgaaaagccaagggaagctgcaaaacttgttcttgaattccttgaaagagataaagcggaaaacacagatcgggcttcttcagtaacaccagtgcttacgaatagctgaacagatctgccttcaggctagggctgcgtaaagtgaaatgcacccatggatgatggacataactgctacgctcaatgcggtttcagtaatggctgctcaacttgtcgaagtttcgccgtatggtcatggactgggttgtgtgcgtcggtgaaaagtccagtggatgagctggtaccaaagctttctctgtggagctggaacaagtgacactagaagatgcagcggagatgaagagccaggcgtccatgttggttggtcagctgctccgtcgttttaggttgttggtcagctaacactagcaatataatagggcaatgcaagatattttaacacgggaataaagctagcgacagtattatattgatgtaacatgtagtggattcgtgttgatggaagctgttttcgttcgtttgctgtacgtgttctatgggaagacagtagactatcctgttccttgcttttaaaaaaaaaaaaaaaaaaaaaaaaaaaaaaaaaactaaactcacactagaagtacggaagaa

SEQ ID NO: 38668 - DNA, 1104 bp, Setaria italica
  Peptide Sequence Number=SeqID_104642
gctcactccgcgctcccctgctccgcaccgcactctacaccgacacgcgaccgcactgcctttaactacgcccgacaccacccccagctagctctcagctcaccaccatccccaggacaccaccaccagcagctacaagggagaggggcagaacagaggagagaagcagcaggggagcgcagcaatctcgctcttgcgatggcgtccatcatcgtgcaggcggtggtgatcctcttggacgtcatcgccttcggcctgggcgtcgccgccgagcagcgccggagccgggccaccgtcacccccggacgccgccaaggagtacgacttctgcgtctacgactccgacatcgccacgggatacggcgtcggcgcgctgctcctgctcgccgccgcccaggtcgtgctcatgaccgccagccgctgcttctgctgcggccgcggcctcaagcccgggggatcccgcgcctgcgccctcatcctcttcctcttcacatgggtaaccttcctcattgcggaggcgtgcttgctggcgggatcagtccgcaatgcgtaccacactcggtacaggggtatcttctatggcgagtccctctcctgtgagacggtgcgcaagggtgtctttgccgctggtgcggccttcaccttcttcacagccatcttgggcgaggtctactacctcagctactcaaagtcgcgcgatgccgctggtggcgcaccctacggtggctccagcattggcatgggcccttacaactaaaagagctcgctgaagaccggctgcggtattttcagctcgtttcatggtggaggaatgcagtgttcttgttaacattaccttagtagttacggtgtaattggttattggattcgcagtttctttgctaggttcttgtatgaggtttctcggttgggctgtatactatttggattattgggttggattctggacatggaatacatgtatcgtagttgctgttcatatgtatgtactttcatctcatggctgttttaatgtttccggctgtaggatgtttaatgttcccccattgcgagaaaaaaatcgttctctgatgaggagagactacgagacgtaaaaaaaaaaat

SEQ ID NO: 38669 - DNA, 845 bp, Setaria italica
  Peptide Sequence Number=SeqID_104643
tttgctcacttgctgctgcatcatgataaatcgaagctgcaaccctattagcagatctggagtatggcgcaacggatacctcttgcaaggtttgacgctgagttggctcatttgcacctacaggctgaaaattatgtgtattctgcatgctttgagtaccagaatcttggacatgcttgggtatgccagttgtttccttactccccacagctgcctcaagattgttactaatttgatcatttacgttgaaaatctgtccattgtgtgaagaaacatctagaattgcatatgcctcttgagaagatgactgaccttgcagactaagagctggaacatggacacctgcctgaggaacaaaatactcacctagccgttttggatgcgccaaaaatttatattgatgcatttggctgttcctagtagcaaaattagtagcatgcatcccattttgtatacccaaaacttgtgaactgtggcccttgtcaatgttgatgccattttcacttattcggctaggaattaagagcggtggcggttgtaaaccaaaatcttgtaaaggaaacacgtagtgttgacttctttgagcagaatttaggttccctctgtcatatccggacaaaacatgagcacttgtatgcacaacaacaggtgtggttggttccatctgattattgggagcattgtgatgaggataccagctatgaccatttgtatgcacagaaatagcaacaggtacacgatgttccctttcagtttccaaagcactgtcatggagatatctgcaatttaaaccatgacgacagtgaccttgcacatagaatttacaggcaatttctttgctttcc

SEQ ID NO: 38670 - DNA, 464 bp, Setaria italica
  misc_feature (373)..(373): n is a, c, g, or t
  misc_feature (378)..(378): n is a, c, g, or t
  misc_feature (381)..(381): n is a, c, g, or t
  Peptide Sequence Number=SeqID_104644
cgtcggtggcgatggaggcccttaaggaggctctggcggaggccgtgaagctaccagttctgaatggcacggaccttggctacgagctctgcttccagctgccgaaaggcatgactgtggaggcggtgcaagcgccgccgctggtgtaccacttcgacggtggtgccgccatggtgcttccgcgagagaacttcttcgtcgaggcgagcccgggggagatgtgcctagtcatcagctcgggtggtgcccgaggggctatcatcggcaactaccagcaacagaatatgcacgtcctcttcgacgtgcagaaccacaagttctccttttcgcccacacaatgtgatcagatttgagccgtgaaatatgaaccccncttgntgngtgcatagtgcagaaataagcagacaaaatacaagctattagagatggctcgtgcattccgaagtcgaagccagtgcaaaggt

SEQ ID NO: 38671 - DNA, 754 bp, Setaria italica
  Peptide Sequence Number=SeqID_104645
catgctctggtataactctaccacctggaagcgctatactagagctaacaagatttgtcacttcagcatgtttggttagggaattcaatgacaaaagaaatagaaatgatgacttgaggattcaagtgcgccttcctgataacacaactactgatggattcttgggactatatgataaagatattgctattgttacatccatcgactacctagaggacgatcctgtagatctcgatcttcaggaatcacctgactgccctgatggtcatgtactagctgctgggcgtgccttcaattcaggcagtttaatggccatgcgtgggtctctgtctaatgaatcccccaacatcttcctttctgatagtcaaggtttaacagaggctgcacttggagggccaattgtaggaaatgacaagaggtttcatgggatgattgttgatctttgtcatcatggtagtgagaataagaaatgtgccaagttcctatcaccgaaatcacttcgtgagcgcttggagttgtttcagatactaaatcctagagaactccacttccgtaattattcattgcctgaaggtgtatcaagcgtagtcccttcaggattcatgaaactatttaccggttaaatcctttggctatccaatgccaccaccacttgtgcttgaattcaatggggaagttagacttacaatacaaatttagaaagaaccgaatttaggtagaaattaacttagacttaggaactagaagaactaga

SEQ ID NO: 38672 - DNA, 638 bp, Setaria italica
  Peptide Sequence Number=SeqID_104646
ttttttttttccgtagagtaaaggagctggactttcttcatagttatgaaagagctgagttcaagtggcaccttgaagaacataatatggacattgtattaaccgaatgacaaagtcatggttccatttctcatcccattgggatggacaaagataccatggaaacatacaacaggaataagcaggctcaacttatgttacaactaacactacaggtcaaaacttcctcctaatccgagttctgtttctcctcaatgcttgatttgctgaggataaacacaccaagaatgatcacgaccggcgcctgcaaaccacttagaaggcaggggctcatgaaacaggaaataccctgcaagccccgatgagatgaagttcgcagcaaagtttgtgactgttgcctggagggacgacaaagctttgaggctgttgacataacacccccacattgtgacgttgaaaagtatcaccatgccatatttgatcagcagagtagcgaagaacttggcggagatggcggcgagcgcggcgttgaagcccgccgcgagggcccacccgtagccgccgccgttcgccatccctccacctcaccggggatccgctcctcctctgaatctccctctttgttaatttctttcttt

SEQ ID NO: 38673 - DNA, 518 bp, Setaria italica
  Peptide Sequence Number=SeqID_104647
agcagcctctacatctgaagaagttagcatacaagtagtagaaattacaaatgatgaacagattcatgaaactgagcctatttcttgcgagaaggttaaaatatgtgaagccaacgctacttcggaagcagaagttccggttggattgccatttgtcacgcctcagaagaagaaactaacggaggtgaattcagcagaaccattcaagacaggaagcaaggcgagcgagaaaggggagaattctggctcaattactggcaataccgtttcaagctctatcaagtctgccccaaatgactctcgtaagaattcaaaatgtgcagcaagtgattctgctcaggtctctggtagttcgaggaagcgggcaaagaaagggtggactacgctgaaacagatagctgagaaggatgagctcgagaggagggagaagatgagtaactttgtgatcccattcttcatgcagtaagcgggatgttacaatttttgcccacaatataatcgtttcatcattggtgtat

SEQ ID NO: 38674 - DNA, 139 bp, Setaria italica
  Peptide Sequence Number=SeqID_104648
tacgaatgttcgatcaacacataattgacaagatacgttaattatgtgttggaagaacattgatcgaacattcgtacaacacataattgacaagatacgttaattatgtgttggaagaacattgatcgaacattcgtac

SEQ ID NO: 38675 - DNA, 298 bp, Setaria italica
  misc_feature (287)..(287): n is a, c, g, or t
  Peptide Sequence Number=SeqID_104649
cgctgcctagccctctgcctccacgcgtggctcggcagccggcggcaccagaccaaatgttgctacatgcttgacgccaccacaccatgggtactagggggtggagcatatatttggattacaaagaaatattgagttagagacaacctgcattatcccgcatatgggattcccgatccacacacacattaatgattaaaactccagtaacaaatcatagaaattcacagattttttatccaattaaaattaatggcatagaaacatcttgaaatcacaaaaaaacngcaagatccca

SEQ ID NO: 38676 - DNA, 254 bp, Setaria italica
  Peptide Sequence Number=SeqID_104650
gttgacatgacacctgaagctgaaggactggcgcagaggatgatgaagaaaggggtgcagttgaccccgcttgctggcagttcaatggtgagggagctctgtgtgaggaagaggtcgctggatgcttgccactggttgagaatgatggaggagagtggcgtgctgtgtgactctgacgtgtacggaactctgttgcttggtctgtgtgaggaagggcatgtccatgaggcaatacaagacaattaggggaagga

SEQ ID NO: 38677 - DNA, 228 bp, Setaria italica
  Peptide Sequence Number=SeqID_104651
ttcttgacgcagtacttcaaagcaaaacttgacgggaaaatcaccttgaaaattcaagctgtagtagtaaccatctaccgatggagggaggtgcaccctctttcatgctgtgtcctacagaagatattccttgtcatatctgttggtgaaaagaaacctgtattatgatgacgacttttaccaaatagtttgtgtcttgaactatatattaggtatattttgttctac

SEQ ID NO: 38678 - DNA, 448 bp, Setaria italica
  Peptide Sequence Number=SeqID_104652
caccaacctcggggggagccctccctgagctagtgctctacctactagaccttggtatggatcatgaggagatcaagaatatcgtgcgcaagttcccagcatttgcatattacaatgtggaacgcaagataaaacccctggtggagcttttgctagaccttggtgtgccaaggtctagcataccgggaatcataaagaagaggcctcagctctgtgggatcagcatgtcagataatcttaaaccgatgatggtttatttggaaaacattggtgtcaacagagctcaatggagcaaggttattacccggttccctgctgttctcacgtatagcaggaacaaggtggagacaactgtgagcttccttactgagctaggagtttccaagaaatactcagccgtgggcctgacattgtcatcgacactgtagctcatgatatgagggcatcg

SEQ ID NO: 38679 - DNA, 1452 bp, Setaria italica
  Peptide Sequence Number=SeqID_104653
caacaagtcagatggtttcattgagcacctggtgtcaaagctccagattgcttacagatctcgatatgctgaaggaagagagctgagcacacctgagatcagagatgccctccttccatatctagaagctcttgatagagaacatggcgatagtttggtcgaggtggtggagaacttcgctgatcctttttctatggaaagggaagccttgtcttcttctatggtacttacacccacgagctcaaataaacagaaggcagttgctagaataagcacaccaacctcggggggagccctccctgagctagtgctctacctactagaccttggtatggatcatgaggagatcaagaatatcgtgcgcaagttcccagcatttgcatattacaatgtggaacgcaagataaaacccctggtggagcttttgctagaccttggtgtgccaaggtctagcataccgggaatcataaagaagaggcctcagctctgtgggatcagcatgtcagataatcttaaaccgatgatggtttatttaaaggaaaaaacaaaattaaaggtaagtaacacattgttgtcaactgagctcaatggagcaaggttattacccggttccctgctgttctcacgtatagcaggaacaaggtggagacaactgtgagcttccttactgagctaggagtttccaagaaaaacattggcaagatcctgacacgatgccctcatatcatgagctacagtgtcgatgacaatctcaggcctactgctgagtatttccggtcgattggtgcagatgctgcatctcttattcagaagagcccacaggcttttggtctgaatgtcgaggcaaagctgaagccaatcacggaattcttccttgagagggagttcagcatagaggaaattggcattatggcgaacagatttggaattattcacacattaagcttggagcaaaacttactcccaaaatatgagttcttcctaacgatggagtacccgaggagtgagctcgtgaaatttccacaatactttggatacagcttggagcaacggataaagccacgatatgctcagatgactggttctggggtgaggttgatcttgaaccagatgctgtcagtctcagacaccaggtttgaggaaattctagaaaagaagaagactagagtttgaaaagccgataatttcatatgagcacaattttagatctcattcgataactatcgccactgcagcatgttttattggatgagcgtggcattagtttttcagggaagtagcttctttgtgtggtcttgatggatgctcaaaatttgaaattgaaattttttatgtatgactgtagtctgtagggtgatttaggatcctagtttgcaagggagtgaactaagaaatgccagttgcggtcgttatgattcaattcaatcagactaattgatgctacaaaagtta

SEQ ID NO: 38680 - DNA, 1135 bp, Setaria italica
  misc_feature (1048)..(1135): n is a, c, g, or t
  Peptide Sequence Number=SeqID_104654
cgccggcggcgtccgcaccgaccgcgtcgcgcgcgcgcccgacgcgccctcgggacacgccgtcgtcatgctcatgcccgacggccagaactccatcatcatcgtcggcggcgccaacatggagggctgggcggcggggatcggcgcggaggacctggaattgatccaaaaggcaggcgtgctgctgctgcagagggagatacccgattgggtcaacgtgcaggctgcgcaggctgcaaaaagtgccggtgtgcctgttatcatggatgctggtggaatggatgctcctgtccctggagaactactcagactcgtcgacatttttagtccaaatgaaacagaattagcacgtttgactggtctacctactgaatcatttgaacagatcaaccaagctgcaggacaatgccacaaaatgggcgtgaaagaagtactagtaaagcttggatcacaaggatctgctttgtttgttgagggggaggagccaatcagacagccgattattcctgccacagaagttattgataccacgggggctggtgacactttcacctcagcttttgctgtagctctggttgaggggaagcctaagaaggagtgcatgagatttgctgctgctgctgcctctttgtgtgttcgagtgaagggggctatacccagcatgcctgacagaaaatcagtgatgaagctgctggaatctgtgcaagttgagtaaccgcagaatgcgttgatcgttcaaagccgacctcattcatcggcgataatggcccttctccagtacgcggaattcgtgggatccatgaagcgtctcgccgccccttcacgtgcgtgctccccgaataatgctaatgtgatctccaaacggaaacgcatttcccggtgccgcccctaggagtaaacaaaacttggccacacgaccgtttccaatacatcctcctggtttcgtgaacgcaatgaacagtttcacactgcctttccccgggagcttgtctcggatggtgacgctgttatttactctggcccaagtcaatgcgtgatctctaacccnnnnnnnnnnnnnnnnnnnnnnnnnnnnnnnnnnnnnnnnnnnnnnnnnnnnnnnnnnnnnnnnnnnnnnnnnnnnnnnnnnnnnnnn

SEQ ID NO: 38681 - DNA, 472 bp, Setaria italica
  Peptide Sequence Number=SeqID_104655
ccaaacttgaagtggaagagttccttaaaacaaacgggccgataacaggcatgttcagagggagaaaacttcataagaagaggatagctggtctggatggtcatggtcgagctggttcaacagctaaatcaactagaggaagaaaggctgccaactatcctacaggaaattttccagttgacccaaatcattcaatcaagccaactttgcctcatggttttctgtaggttctgaatgatgtcaactttctggagggaaataaaagcatatagtcatgtactgtgctgtaaactgtgtacattgccatgacttctggaagaacaagcccataaagtgcatcaaaccatatgatgcttttttatggagaacaatatgtttgctagtttggtacccttaaactggatgtaataatgcattgctactttgttttatttcattgatgttatgtcattttagtaagaagtaagaacta

SEQ ID NO: 38682 - DNA, 1044 bp, Setaria italica
  misc_feature (1016)..(1044): n is a, c, g, or t
  Peptide Sequence Number=SeqID_104656
ttgttattttcttatttcttatgtccgtttagactagtttggagtagtacgagtattgtacttcctattccccgtccttccttgtctagttgtattccgttgtcgtaaggtaggtaagtattacaagacagacagcttaaggcatttgctcatttggttgctaggcccgaagtctaacacctctactaggtcatggattcatcatccgtagagtggagtgactttgagatgactccatccccgcctcctgcagtgatccgtgcggaggatgaagatatcatctctgctccgccaaaaccactgaatattgatgatccaaagttgaagggtcaggagccaccagatgcggttcctttgagtgtggttctcagtccttatggaggaaaagaacctatcccctttgacaagaataagcttggacatttaagagatcaatctgttcctgtcaaagaacaacccatctgttgttttcctcaatcgctgaagtcacttgaatcttacaaggaagaggactggacagctttcctccacacaagagttgttgatgggcacaaggactggacctacgaacacagggtgtaccaaaggaaattccgttccaaacttgaagtggaagagttccttaaaacaaacgggccgataacaggcatgttcagagggagaaaacttcataagaagaggatagctggtctggatggtcatggtcgagctggttcaacaactaaatcaactagaggaagaaaggctgccaactatcctacaggaaattttccagttgacccaaatcattcaatcaagccaactttgcctcatggttttctgtaggttctgaatgatgtcaactttctggagggaaataaaagcatatagtcatgtactgtgctgtaaactgtgtacattgccatgacttctggaagaacaagcccataaagtgcatcaaaccatatgatgcttttttatggagaacaatatgtaataatgcaataatgcattgctactttgttttttctttactnnnnnnnnnnnnnnnnnnnnnnnnnnnnn

SEQ ID NO: 38683 - DNA, 1063 bp, Setaria italica
  Peptide Sequence Number=SeqID_104657
gctttaaacatcatcttgctggaattcctgggcaagttgaatcttgcaagaaggtgcctgctgatgtgaaacgtcagataatacagcaaattgatgagaagtggaaaagtgaagagagaaggtatgaaattagagagatccgcgtttcaagtatcgaagattcttcgcatgatattttatcaactgagggagctctgaaagccaatttagaccatctaggaagcgaagaacagggtactttcctccgcaagctgctgcaggttcagagcctagcagcggtgcatttatggcttcagaagacatggttcaacatggcatggatggtgcagaagctccaaatgatctgctacacgaagcaaaaattgctatggctagatggtggtacgacgcaaatgtacccttcagtgcggctaaatctcctttctatcagcctatgctagaagccatagtatctgctgggctgagcttcaagggaccatcttatcatgacctacgtaagccactattgcaacatattgctgaagacattcatgaatatcttaatgatcttaagagagaatggagtgttcgtggttgctcaattattgctgacagacaaaaggacaatggagagggttccataatcaattttcttgtatactgtccatgtggtactatgtttttgaagtccatagatacctcaacagagagggaagatttacttgagatatttgatcaggttattagagaagttggacctaaaaacatcgttcagtttattactgatatagatccaagatataaggcttctgttaaggttcttgaggaaagatatggcacgtttgtttggtctccatgtgcggcacattgcattgatttaatgttggagaattttgcagatcctagatattttcctaagatagatgaaactttaggtaaagccagaaagataacaaagtttatatacaatcatgcttgggctttgtctttaatgaggacagaattcacaaatggtagagatctgtgtcgtccttccatctcgagatttgctactcactttcttagtctccaatgcattgttaaa

SEQ ID NO: 38684 - DNA, 438 bp, Setaria italica
  misc_feature (419)..(438): n is a, c, g, or t
  Peptide Sequence Number=SeqID_104658
tcgcctgcacatgcaactccacctgctcctgtgccggcctcgtcgcctgcacaagcacccacaccgccagccattgcgccggcgactccacctacgcccaggcgccaccccgcgccaccacaagaggcggacacccctgcggattcgccggacgccgacagccagccgcctgcagatcagaagaacaacggagctagggacacggtgtcttggagtcttggcatggtggtggccgccgcggtgccggtgatcgtgctcctgctgcagtgaagggttcatgctggttagaatgatttcgatttggtgttcccgtgaccaatcatcttgattacaggttagcatggaaacagtgtttatgggcatgtattggtcaaaataatatgatcctgattaatttgttgtccttgtctttaaaaaannnnnnnnnnnnnnnnnnnn

SEQ ID NO: 38685 - DNA, 1274 bp, Setaria italica
  Peptide Sequence Number=SeqID_104659
cgcgccgcggcggagatcaacaacccgcaccaccatcaccgtccttgccgtcgacaacgacgtgatgtcgcagctcaaggcgcagcagcgtccagccgagagacctcgagcgcgtgatctacctccactgcctcctggactacttcgatgccaccaagctcggtagcatccggggtggtttcgtccaggccactagcctctaccaggcaaccggcaaggcgcagggaggagaaggaatggtgaacgtcaccatgttccgcggcgggcgtgtcgcgttcgctctgtccggcacctcgaacgtgccgccggccgcgttctaccagaaatccatcaaggaagagccctaccaaatcgccgtcctgcaggtgagcgccccgatctggtctccagcgccggtggccggggcgcaggcgcccgctccagagccgccggcgccgggattggcggatctcctgtccaagaacgggtgcgggggcttcgccagcctccttgccgcgacggccgacgctgcggcgaaattcgagcgcagcgccggcggcggcggcgggctcaccgtcttctgcccggacgacaaggcggtgacggccttcgacgccaccttcaagaacctcagcgccgacggccagctcgcggtcctgctgtaccacggcgtggcggcgcactactccgcgcagtctctcaagacgatcaatggggatgtgaacacacttgccactgacggatccaagggctacaagtacaacctcaccgtccgtgctgacggcgacacggtggaactgtcgtcggcgtcccagagcgcggccaaggtgaccaagacggtggtcgacaaggggcccctcgcagtctatctcatcgacgccgtgttgctgccaagtgagctcttcaacgccagccatggccgcactgcgcccgctcctgcgccggcctcgtcacctgcccatgcgccgccacctgctcctgcgccggcctcatcgcctgcacatgcaactccacctgctcctgtgccggcctcgtcgcctgcacaagcacccacaccgccagccattgcgccggcgactccacctacgcccaggcgccaccccgcgccaccacaagaggcggacacccctgcggattcgccggacgccgacagccagccgcctgcagatcagaagaacaacggagctagggacacggtgtcttggagtcttggcatggtggtggccgccgcggtgccggtgtattcgttgtcttaccttaagaaactaaaaagaaaaaacaaaaaagtaaaaaag

SEQ ID NO: 38686 - DNA, 640 bp, Setaria italica
  Peptide Sequence Number=SeqID_104660
actcagtgtgagtagttggaatttgttattctcagtatcttcgcagctatgagttgtcattcttatcatatacattgaataaggttgcaaaagataagtttcggcttcgttactctttattgcaacaccggacatctgggtcaaccaaattatgggagtagtttgggtgaatttgagttgcaggatttacacacgctgcgaaatatttctcgaatgagcctgctagctctccaacaagtgcttaactagtaggcgctccgtggtggaggtggcagcggcggcgagggtggctctggaacaacgtaacctgcgcagttgaaccccacgggcaatggattctcacatttccttgtgacctgaacccacttctcgattttgattcgcgccttctcggcagttgtaagtttgttgcagatgccctggacgtctgctttcctcactttgtcacagcagggagacgagcgttgaggcatcagctcacctgttttctcgatgtacatcatgcatttgtgcaacactttcgctttcaggtccagaacctggtatgcctgtgccggggaaggagagatggcgaggacgaccaggaggcacaacacccctagtgccttagcactagtcatctttcttttgattggtccgt

SEQ ID NO: 38687 - DNA, 460 bp, Setaria italica
  Peptide Sequence Number=SeqID_104661
gtttaatcatctgacttgttcaattcacagagaggagacattcagctattccaaacaggagcaatatgcaccatgttggcacaaaagagcccagtgtccattcagctcatagggaggagtcacgtattgagccaatcaataagactattgcaaagtctagtgcgaggaaactaattgccaacttgtcctgaatctacaggtgtgcaaaaagtcgacaagagcctcccatacatgtaagctctgcctctcgggcacaagtttgtccttccagttattcagttcattcacaaggacagcaacctgtagaggacattgtaagtcatggacagcagataaatggatattgggctgtatcaagtaccatccagcatgaaacaatagaggcccaaatcaagtcaattgtgttgaacaggcccaaggtgagtatcacagcaaggcaactggatggaatctgaagagg

SEQ ID NO: 38688 - DNA, 585 bp, Setaria italica
  Peptide Sequence Number=SeqID_104662
gaaatcatattacggaatgcacatacgcttctcaattgccattctcacattctctggtagaatacccctcagtgcaacaggcagcaattgtgtcatcaggatgtggcagtcacgagccttttagatttatgaatttcttctctgtaaaaatttattattccctgtatattcgaggagtagcttgatgggaccttgatactattcaagcactcaaacttgatttccttcgcttccttgctgagagtgtaactggtaggatgcaagtaatgtttatcatctctacatgccacaatttatttagctcaagcagaagctatctttatgtaccacaatttatttagctcatatttgcaaatgactaaactatgaacaaattctatatttttcccacaatttacttagctcaaacataacatataaataattttccattgtaggttattctaaaaataactaattacgtacctctattcatcatattatctctgtgtaccataatttatctcgcttacatttgccataatttatttagctcatatttgaaaagtactaaactatgaaattatttctctaacctcatatcaa

SEQ ID NO: 38689 - DNA, 707 bp, Setaria italica
  Peptide Sequence Number=SeqID_104663
tccttccgtagcatgatacagggactccaatcaaactcaggttatcaataaagttaacacaaaactcaatgacctcctttattcgatatccctttgcgatacttccttctagacgggcacgattatgaacatatttctttagaactgccataaacctctcgaaaggaaacatattgtgtagaaatataggaccgagaacaaaaatctcttcaacaatgtggactagaaggtgggtcatgatagtaaataaggaaggtggaaaaaaccatctcaaagttgacaaggcattgcaccacatcattctacagctttagtagattgtttggatggattgccttttgagaaatcatattacggaatgcacatagcttctcaattgccattctcacattctctggtagaatacccctcagtgcaacaggcagcaattgtgtcatcaggatgtggcagtcacgagcctttagatttatgaatttcttctctgtaaaatttattattcccctgtatattcgaggagtagcttgatgggaccttgatactattcaagcactcaaacttgatttccttcgcttccttgctgagagtgtaacctttgaaaacatcaagcaacaaggtacactccacgccatccatcatgcacctcgacgcgctctccattactataacctaagtactaaactaattagtaacttaaactaattaagtaa

SEQ ID NO: 38690 - DNA, 498 bp, Setaria italica
  Peptide Sequence Number=SeqID_104664
tgaagcaattggttcaccatcttcatcaactttcgtgatgatgatacgaccctctaagttcttcttcttcttgcctcgtttctgtttagccctgctgctcgatccagatggctcgccttgttgtccatcattgccttcctcggcaattggttgcttctcattgccatcaccagacatgttgaggtagatatcagtctggctgtgatcgacctcttcgtttggttgatcgttcgtgccaccttcagcaatcaacttcattaggtattcctcgtccaatcaagcctgctcgtccttggatcgtgccattgtaacctttgaaaacatcaagcaacaaggtacactccacgccatccatcatgcacctcgacgcgctctccattactataaccaagcaacatgactacatgaggcgtcaagcttgaattctctggatccgattgaagctacaatggtggagagtccgcagcggagaagcttcgacctttggagcaatagcta

SEQ ID NO: 38691 - DNA, 397 bp, Setaria italica
  Peptide Sequence Number=SeqID_104665
tcttgtcatcccgtatacgcttgatgtgccaagtggcaagagacgagttgtcaggggaaggcggataccaagcacactccacgatacggtcatcaagctgctcaccagattgtttccatttttcccactcttcatcatccatatccaagtaatcaaaaggaacatgtgtatcaccgctttcatgctgccaaagctggaaagttggcttagcgcggaagtcgggcgtggcaccactcgcatccgccttcaagtcaggagggaatcgaagctggagctgaaaatcgatcgtattttcttgcggaggcttccattttaaaatctttgtgttggaaccatacacatacttgctgtctaaacctgtaaaaatgaggccatcattaccatgcaagagttgcgg

SEQ ID NO: 38692 - DNA, 226 bp, Setaria italica
  Peptide Sequence Number=SeqID_104666
aatgaaagtaaaggatattcacttgcacaatatacactaaaacaaccactgcaaagtattagagtatattgggatatcagctgaatcttatttcaatatttacgagtacctaaactgacagaggcacagagcacgtgatttgagggcattgagataccagttaaatcatgtttctgttttcatgagtacaactaattacttttgaatcccggaacatgtctttgtt

SEQ ID NO: 38693 - DNA, 474 bp, Setaria italica
  Peptide Sequence Number=SeqID_104667
tttttttttagagcagaaattaaaaagcatatcttttatttaatttgcatccgatggatggatgctttacacgtcttattgctaacggcagcagcatattggatgatagtcttgtttgcagtagccaccgaaatggaagccatgtgtgctacacgtatggccacagtcgcgatcgttacagtgttccagagaatagggtgtgaagcagtttattctaccctgaggagattgtggaggcggtgaccgacgtggacggcaccaccagccaatgcattcagtttcgatggattgcgaggtagatgtcatggtcgcaagaactaggaacaaggacaccgtcaagtagacaagcctcttcctactcatcttgacgagtgccatgatgagggaacaaagttctaacgctcttgtgaggagaagaggatgatcaaggcttgcatgtgtgtgtcgcaactcacgagtatgtttcaaagtgtc

SEQ ID NO: 38694 - DNA, 265 bp, Setaria italica
  misc_feature (239)..(265): n is a, c, g, or t
  Peptide Sequence Number=SeqID_104668
agagctttgttcatctccagatgatagaattgtggtgaatgcaaaagcaggtgcagtggctgtcctggatgtttcatgctagattcacgggctctgagtgttgtagcatgattcgttgataccaattttgtaactcaaggcgcatattaaggcattagctgcaggcttgcaacaaagttgaacattgttccgaggatatggttgaggtttgttgcaagcctgcagctaatgcctttggnnnnnnnnnnnnnnnnnnnnnnnnnnn

SEQ ID NO: 38695 - DNA, 886 bp, Setaria italica
  misc_feature (861)..(886): n is a, c, g, or t
  Peptide Sequence Number=SeqID_104669
ctcatcatcatcgcatcgatgatactgtccgttgagctcccatttgctctcatcccactcttaagtcagcagtagtagcaacaagatagggtgaaatagaactccatctatattattgggttctcgtggatcctgggatttattattattgggataaacatctacttcctcagctcaaaactagttggctggatcctccacaacaaacttccgatttacactaacgtgcttatcggcatcatcatgttccctctcatgctgctctacatttctgccgtgatctacctgacgttcaggaaggacactgtcaagtttgcgtctcgcggtgagctgcaggccattgaaactgacaaatcaaaggttgccaatgatagcagcaatgaggaaaacaaggaggatcttgtttagtcccagtttacaggcatgcttcggtaaatgcttgtatgtgacgtttgcgaggaccatacggattacgaagaaacagaaatgacttgtacttcagcagcacgtttagaatagaatcaagtcatcaatcaagtctggaggttgattcaacggtcctagagaagctgatgactaatattcgaagaaactatgttgctgctaattgatattcataccgcacacttggagagaatgatagcaagacaactggcattgatacttagaagctctaggaattgttcaaagccaattagtgagaacgagcatgaaggagttagatctctgagttgttcatgatacaaatttctaccgaagcattagttttgaaactctttaatctagactagaatcacttgtatgccgttttaattctgacttattaatgatcagaatatgctatgcttagaaggatgcagnnnnnnnnnnnnnnnnnnnnnnnnnn

SEQ ID NO: 38696 - DNA, 380 bp, Setaria italica
  Peptide Sequence Number=SeqID_104670
ccctttgatcggctttgggttttgcaaaagcaaaagcaggttggaaagcccaaccaaaaggcacccttaatccagttgcaaaactcgaatataccaatcatggtaaacctcaatgcagctttgaatttgatgtttatatcaattggaactcatgaaacctatctcaaataaccagttttatgaaactcaaaatctcagcacctatctcaaatggttggatgggcctggaagatagaattacagggcttcagacggagagggatggggcggcagatggccaggctgccattttgaaaagagtacgaagcttcagtcacaaatattccctccctgacgaatactttaacctaagtttgttaaattaatttaattcttagtaa

SEQ ID NO: 38697 - DNA, 337 bp, Setaria italica
  Peptide Sequence Number=SeqID_104671
caaagccagccttatggacaagaacgtggatactctctagtatgttgaggattaccaaggttgacttatagctgaaagcacagagactaaggtttggttgctctggtgacattccatcatagtagcatcatgcgaaacatgtcccaagccttaccatgctgctcaatcagaacatacccagaaatcatcactgtccaagaaactgtgttgcgttctggcatttgttcaaacagattccttgcatccaccatctgccggctatggcagtacccagtaagcattgcattccacgacgagacatccctgcacggcattgcatcgaacagccttcgcgcaa

SEQ ID NO: 38698 - DNA, 670 bp, Setaria italica
  Peptide Sequence Number=SeqID_104672
cgtgtgcctgtgttaatgagctagctgtatgagtgttcttggccgctttgtgcagctgagtcacagcatagtgcatgtgtggttgtgatgtgtaaaatcagcgtaatgtcgtgttaaagtgtggtgaattttagtgcaaaaaaggtcgctggtgtgcagtgccacaaaattgtgtgcgttccttatcaatgagaactttcttggagatcgtgctaaacattgtgcgagtgggtgtgtgatccagggaggtgctagaggctaacataaattaactgaatgtttttctgggaaaacaaattaagacaatttaggcatagaacaattgaccgattcaaaaaacaaatgtacaagaagtaatactccctccattctcttttgatagtactatttcctcttggcacaatgaccaaggaaaacaatcctacctatcatgctacttatcaaccatttaatcatgccattaactagtcctcgtaaacaagcgattcattaaggcctagatttcttgatgcccatgtagccaatctcggttggaagaattaagagtcacacatcggacccaagacaaccattaagtggatgcatagttggactgaaataagactatcaaaagagaatttttcagatttggaaatatgcctatcaaaagcgaacggagggagtacgtaac

SEQ ID NO: 38699 - DNA, 460 bp, Setaria italica
  misc_feature (323)..(323): n is a, c, g, or t
  Peptide Sequence Number=SeqID_104673
actacatatctatctacagtttgctttgtgagcataatgattgctgcccatacacaatctcagtcattagatacggcaactgagggctgagattggccatgccagctcagccccaggtgacatggcttattcccagacatcaagtggcgatctaattgctgagatttccatctttttttttataaagcgtatttcgattttaagtcaaacgccataagttttggccaacagttaagtcaaattatatgcttgtctagtatcaatagatccatatttcaaaagtgctcttataaggtgttgattcaatagcagttgacaaaatntagtgcaagagaaattaaaggtcaaactaatatgcccacaataatggaccgagggagtaccgctgtattgctttctgcaacagtgagatctgaatacttggatcaatctcggtagcactataggcctagtctaatat

SEQ ID NO: 38700 - DNA, 695 bp, Setaria italica
  Peptide Sequence Number=SeqID_104674
tggccttgagaatgcaaaatactcgaggccagagcagccaaaaactatcagcaatggtaaatcctgtgtctcctagtcccaagcaaatgcgtgctccgcatccaagtggggatcctgtgtgtacgaaggcaggaccttcttctaagagtttgtgcacaccagagagtggaaagttgtgtagtagaaacattaatttgaccccaagaagtgctggagctcctggattgcaagctcctattgtggagcctgcattgctaagcccaacatctgtgcttagtgaaaggcccattgaagtttatcctgatacaagaactgctgctcctgttgtgcaagaaccaagtgtaaagcctgtattgccgagcacaatacctgtgcacaatgaatcttccacggagtgcgacaatattcctccaatacacagccctcaatacatagctcctgcgcaacacggtgcattgttgcaagaaagaaactcaggggcatcaattaactgtagcagatcttcaggtacaccagtaattttacatacgaagctgcacaagaagcatgatcaaccagaagccctctggaagtaagcagtaggcttcttgtgcgtttctttctttgtatgcgtgcatgtatggatggaatcactcttatttttgggatgttaataaaggatttttctcagcttcctcctgaggataggcaaaaaa

SEQ ID NO: 38701 - DNA, 502 bp, Setaria italica
  Peptide Sequence Number=SeqID_104675
agtaaacctactaatttaaacttaaactccagcataagttctcagttcggcttcaacttgagtaagcaaggttcaagtcatcggatcggaacgtctcccagggcctcgagggcctgcacggcgctctccacttccacagcaaggtgcggcctgcggcggaggtgaggtccaccggcttgctgcagtgtagatctgacggccgcgcggcagagcgagtccaggaggcggcggcgcggcagagcgagacgtggaggcgattctgggggagacactaggaaaccctagcctccatgcaatttgggagagagccggcagcaggaagaggaggaggggcgacggaggaggtggaactaggaggtggaggaaggggccatggcccggaggcggcggcgcggcgcccggagatggaggcgattcgagaggggaggcggcgcggcgtctgggatggagccgagtcgggaggggaggcggcgcggcgtcggggatggaggcggcgcggcgg

SEQ ID NO: 38702 - DNA, 246 bp, Setaria italica
  Peptide Sequence Number=SeqID_104676
aattctgtctcttcctcatcatcactatctatgttcttcggagttatccggttttggtaacacctccttctaagaagaaaacaattaaaataatagctcacgagttctttccttcccttaaattgaaaaataagtgcagacggttccagaaatccctgcccaatgatggagcactacgttgtgctacagccttgaaacttgcctcctcttcatctgtccaagaaagtgcaatctcctccccactag

SEQ ID NO: 38703 - DNA, 561 bp, Setaria italica
  Peptide Sequence Number=SeqID_104677
agcatgagaagcactgaagtcaattaacaaacaactccgaaagcagattacaggtaccattcatacatagcctggtggcaatgcaagtaccaggtacgaaattaaacaacaagtgaggctcactgaaacctcagaaaccacatccaccgaccaccaaattcgccaagatcaggctcctgaactcaagacagacaccaacacaacagacagtaacacaaggattgccactcactcactgctctgctccagcgacggtcctaggagctgagccgtcgtccgcgtgccgtcggtcagcaggaccgcctgctccttggtctcatcggttctccacaccctgaagtcctcaccagcgacgaaaccagggtcgatgctccatcgccacagcatcaccatcgggtatggcccgtgcaagtctccctggggatcctcatagtgccacatgttcagagtgtccatggagagcctgggcataggcctgcgcgcgtccacatcgtcgtctccgtgtgctcttgcggtggcatctccggtgtagaaacccgcaaagggataaatctcgaagtg

SEQ ID NO: 38704 - DNA, 298 bp, Setaria italica
  Peptide Sequence Number=SeqID_104678
aaactaccctttgttacaccgcattgcaacagggtagcgaagtagatcaacaatgcattgcatatcaatcttggtgcccttcttacagatgaagagaagcagcgtcacgacgcaagcaagataatgaatctcccaaatcactgctaggaagatacaccacctctctgtgacgtttgaggcccagatgatggaataaacaggcgcctggaaaaaaaagttgtatgatcatgagatatgaaatatgtactttttctatggaaaaaaagttactgataaagctttattctgttgttttttt

SEQ ID NO: 38705 - DNA, 883 bp, Setaria italica
  Peptide Sequence Number=SeqID_104679
aaagaaagtttaagaattacttagccacagttcttcaccctggcgattaccacctgctagattattagcaataagatgttgccttctggaaaagtagctgttctccttctggtagtatgcatggtttcaccagaacaagtgaccagtaaaaagccaatatgcacaaaggttcaaagggaaaagatcctggagaagtgtggctctttcatacagccaggacatcccactcatcttgtgtcccgggacagtcaatgttgtgcagctgtgagaggtgtgcgggacatggagtgcttcaccttgctccttacagaaaaagaaaagacaaagtacagcgtagaaaagatccgcgcgcttcgagggctctgcgaatctgatcctcctcccagtcataaggtgactggaacttgtaccaatgagcagaaggagtccgtcctaaatgattgtgaaaaattcatcaagcatggaaatgaacgccggaaaccaatcccagtcatgggacaaccctgttgcaatgcggtgaacaaggtagcgaagaagggcaccaagattgatatgcaatgcattgttgatctacttacagatgaagagaagcagcgtcacgacgcaagcaagataatgaatctcccaaatcactgctaggaagatacaccacctctctgtgacgtttgaggcccagatgatggaataaacaggcgcctggaaaaaaaagttgtatgatcatgagatatgaaatatgtactttttcttatggaaaaaagttactgataaagctttattctgttgttttttcgttattgcttattccaccttcttcttggatgcaacatctgtggttgtgaccaatatttttacaaaatattataacatacaaatagaaaaagtt

SEQ ID NO: 38706 - DNA, 417 bp, Setaria italica
  misc_feature (417)..(417): n is a, c, g, or t
  Peptide Sequence Number=SeqID_104680
tctattcgacttttgtttataccgtcaaattagattgtttgtttagtttggagttgtacaatccgaataatcaggaaagcagcgttatacgcggcgagttgactgaaaattctgctaactacatatgcaggtggtgacacaaatggataatacctagtaggtcactttgtgtggagtggtgacacaaattctgataacttggttattttggatacttcactcgtgcggagtgggagccttcccgcctgatctcagcatctgtctgagcaggactccatcgactccatataggcgcccctggtgcctgtaactttgctttcttcttatcaatatatgccggcaagttgtccgggtcttttgaaaacaagaaaaaaaaaaaaaaaaaaaaactaaaaaaagagaactagaccaaaggcn

SEQ ID NO: 38707 - DNA, 491 bp, Setaria italica
  Peptide Sequence Number=SeqID_104681
aagaaatgagcatcgaattgcaatgtgcataggccatccattgggaacaagcacaggaaaataggttcagatgcattacagcaggtaatagatagcattgccatgcggatacatagtaatttaggtagcctctcacgacaaaacataataaaactatagatactaattttggtagcatgcagttgatccagcaatcagcaatgtgcaatcagttcatccagagcacaacaacaacaaaatagcttgactgccaacctaatcatctgcaaaggtaacttgcttgaaaatgcataattcttagacatgtcccaggaagtagctaattacttagaagcaccaaacttctgccatatatgctcaactaaatcagattgaagttgtctacgagtagttcgatcacgaataaatagtatttctttctatcacttcttccatctctggattaggtcctttgagagattgtagcttcttgtacagttgatgtgcttggt

SEQ ID NO: 38708 - DNA, 312 bp, Setaria italica
  Peptide Sequence Number=SeqID_104682
cctcagatgatgacgacatggatggagaagtagaaatactgggatttaagctgcctactgaagagaaagtgaggaaaagaaaggaatccaaccgagaatcagccaggcgctcaagatatagaaaggcagctcacttgaaggagatggaggaccaggttgcacagttaaaagttgaaaactcttctttgctgaggcgccttgctactctgaaccagaagtatactgatgctaccgttgacaatagggtgctgaaagcaaacatggagaccctaagagctaaggtgaagagggctgtgatgaactcatcgtccc

SEQ ID NO: 38709 - DNA, 1631 bp, Setaria italica
  misc_feature (1621)..(1631): n is a, c, g, or t
  Peptide Sequence Number=SeqID_104683
caaactcaggccactaaggtccatccctagccttgcaactattgtttaccctctccaaagccaattagatgtagtatttgtttcctctttcaattttgtagcattccatcgacatggatgatcatgccgtctcaatggaggagatcatccctgacccgttttgggaggatctgccaccaccaccggagccgcctctggtgagtagtgatggtctcatagatggagttgttactgatggaggtggggagggtaccaacgcaatggaccagaaccagagcccctcggagtggagcttcgagaggttgctagaagaggagcttctgactgacgcaacaccattggagaacttcagtggctcagctcctcatgctgacacagtggttgaggaggtggaccatgcaacgatggcgcctgcggcggtgagcacggtaggcgatcccatggagtacaacaccatcctgaagaggaagttggatgaggacctcgccaccgtcgccatgtggagggcttccagtgttgtgcatccagaacattctcaaggctcaaacaattacattggaggtaacataaatttcgtgcagaacatgcggtccattagtgaaggtccaataaatcgcgctcgaaatgcatatattcgcgcaaggcttgctacttcctcttcctcaagggatccttcaccctcagatgatgacgacatggatggagaagtagaaatactgggatttaagctgcctactgaagagaaagtgaggaaaagaaaggaatccaaccgagaatcagccaggcgctcaagatatagaaaggcagctcacttgaaggagatggaggaccaggttgcacagttaaaagttgaaaactcttctttgctgaggcgccttgctactctgaaccagaagtatactgatgctaccgttgacaatagggtgctgaaagcaaacatggagaccctaagagctaaggtgaagatggctgaggacgcactgaagagggttacagggacgatgagttcatcacagccctccaggccttctcctccggtgccagccaatgctgacgcttcaggccctatccttgacaacatcattgactacctgatgaactcaacagatgccacgactgacaacaattttgagccgaggacggcgacgaccccgtcgttctcacaacaagctgagaagccggcggcggccagcacgaacagcgccatgataaaccggatcgctgcgcatcacgcggtggccgtcgagcttctccacaagaggctgggtgccatgccgacggcctcctctggggttgcaccaccgccggaacctgcgccgccgtcggatgtgctggttgagtccactgacatgggtgtgcattaggcattactatacctctattgggaatacctgaagtaagctgaacaatgttgtgccgtcgtcgtcgtcgtcgtggtgtggactcgtgcgttttatgcataacaccttctgaataattttggatgagatcatcaacattggaataagttggtaacaccttctaaataaggcacagggttgcctccttcgacgttcaagtgattgaaataaagagtatacattctgattgctcctaaaaaaaaaaaaaaaaaaaaaaaaannnnnnnnnnn

SEQ ID NO: 38710 - DNA, 566 bp, Setaria italica
  Peptide Sequence Number=SeqID_104684
taacctaaattgtaggttgtctaaactttaagttgtcctaaattgtaccaaaattagcatatgacaaacttagaaaccctgctcgagcaggtaatcaccgagcctctccaccaccatattgcattgccctggagtcattggctcatcatagataccaataatcaaggccaaggtggtcttcttgacagtgatgcctccagtgcccttctttcctcggatgacagcaccaggttcaccttggatcaccatgtattttgtgcctccaaggaaaagaccagttggtgcaagagtaccaggttcgtcaaagtccttcatgatggcaacaatctcctcaggcttgtactgggggaaggtcggggactgcgcccagacgctgccgtcgtggccgatgatggcggcggcggtgaggtgctggccgtcgatctcgcacagcaggtggtcgtcgacgtacgcctgccacgacatcttgctccgcgctctctcctcctgctcctgctccggcgacgacttcgctttcgtcttgtctttcgtcttgtcttcgggttctttgttcttttggttttctt

SEQ ID NO: 38711 - DNA, 523 bp, Setaria italica
  Peptide Sequence Number=SeqID_104685
tgtacctagggtaaattgttactatttacttctagttgtaaactagtctagcttgtagtttgatatgacgcgaggccaaacataaaccccaattcaaatccttttcccaacattgttaccaaccaacaaacccaagctaattattcactgcatgcatataatgcgatatgccaagtagatgcgcaagcccacagattactgaaccaaatgaggtgcaaacttaagtgccaaatgaccaaaatagcatatgacaaacttagaaaccctgctcgagcaggtaatcaccgagcctctccaccaccatattgcattgccctggagtcattggctcatcatagataccaataatcaaggccaaggtggtcttcttgacagtgatgcctccagtgcccttctttcctcggatgacagcaccaggttcaccttggatcaccatgtattttgtgcctccaaggaaaagaccagttggtgcaaagaagtaaccaaggttacgtacaaaagtaccttacaatagaataggaca

SEQ ID NO: 38712 - DNA, 666 bp, Setaria italica
  Peptide Sequence Number=SeqID_104686
caaatatcttgaagaagtctcttcctgcaatatttttgttgtgaaagacaatgttatttctactcctgcaattaaaggaacaatactgcctggaataaccaggaaaaagtataattgaagttgctcagagcaaaggcttcaaggttgaggagcgcctagtctcagtagatgaattgcttaacgctgatgaagttttctgcacgggaactgctgttgtggtgtcacctgtggggagcattacatatctggggaaaagggtagaatatggcaaccaaggagtcggtgtcgtatctcagcagctatacaagtctcttacaagcctccagatgggtcttgtggaggacttcatggattggaccgtgcaactgaattagtagcgggtcatagatattgcctgcggggatctccagatcattacagctagatgttgtgataatttacttgttagtttttgcagagcgctcctgaattgggttcctgttgtagattacagacacagtgcgtatgtattgtatttgttttccttgctttcctcgtggtatgagcacagagcagtaagatcatgtactgcttactagccctgagctcctgaccacaagaacactgatcactcgtgttgccttcttatcttttgcttcaaagtataaaataaaatcgttgccttgc

SEQ ID NO: 38713 - DNA, 1838 bp, Setaria italica
  Peptide Sequence Number=SeqID_104687
gttcgttggacgtcgtctccttcctcccctcgccccccttccgctgccgtcccagccgccgccgccgcggcgaaaccctagaccccactgagaaagcccacgcgggtcgcactgcggtagcttctctgtagatggagtacggcgtcgcctctcacggcgccctcctcgccgcagcgcctctcgcgggccggcggctgcgcctacccctctcgccgtcaccaccaccgccgtccatccagattcagaatcgtctttattccatatcgtcactcccactgaaggctaggccagtgagaagatgcggagcttctctagcaagtaactattcgcaaacatctgaaatagttgatttggactgggagaaccttggttttgggattgtccaaactgactatatgtatgttgcaaaatgtgggacggacgggaactttgccgagggtgaaatggtgccatttggacccatatcactgaacccatcttctggagtcctaaattatggacagggattgtttgagggcctaaaagcatataggaaacctgatgggtccatcttattatttcgcccggaggaaaatgctttgaggatgcaaactggtgccgagaggatgtgcatgcctgcaccttctgtcgagcaatttgttgatgctgtaaagcaaaccgttctagcaaataagagatgggtgcctcctactggtaaaggttctttgtatattagacccctgcttatgggaagtggggctgttcttggtcttgcacctgctcctgagtatacattcattatatttgtctctcctgttggcaactactttaaggaaggtttagcaccgataaatttgatagttgaagacaagttccatcgtgccactcctggtggaactggtggtgtgaagactattggaaattatgcttcggtgttgatggcacagaaaattgcaaaggagaaaggttattctgatgttctctacttggatgctgttcacaaaaaatatcttgaagaagtttcctcatgtaatatttttgttgtcaagggcaatgttatttctactccagcaataaaaggaacaatattacctggcatcacaaggaaaagtataatagatgttgctgtgagcaagggcttccaggttgaggagcggcttgtgtcagtggatgaattgcttgatgctgatgaaatcttctgcacgggaactgctgttgtagtgtctcctgttgggagtataacttatcaagggaaaagggtggaatatgggcaccaaggtgttggcgtagtgtctcagcagctgtatacttcgctgacgagtctccagatgggtcaaacagaggactggatggggtggactatgcaactgaattagcataagaccatcaccatattatagaacctgtgttcctcgcaaagatgggttcgcaagatctccatctagatgatatggtcgtgtagttctgtaaccttcagttttgtagcatctatcggagtgcgggctcctgctgtatattccgtaggtgttggcgcatggcgtcagtttatttaaactataattgcgtacccttgagttctgtttttggactagcattgcagtggcataaaaagaattatgtactgtgtagtagcatttgacattcaaaaagtcatagcgccccacttttagcaaaactgtgtataccattccattgagaactggaagcagacattgtcctcaactggaacgattgtgactactgcctagaagtcttgagcaaatttagcccaacaaaagtttgagcagacattgtcctcgttgttagtttcttgttaacctttctagtttttgttctaatttttctttgtttgttcctta

SEQ ID NO: 38714 - DNA, 131 bp, Setaria italica
  Peptide Sequence Number=SeqID_104688
ttataatcagaacttgactatctttatctcatgcatgccagatcagatattttcagaagtagtagcactcatggttgccatcagcaacggcaaagaaatcaaaattcaagaatgcgtatagtatatcagtt

SEQ ID NO: 38715 - DNA, 1059 bp, Setaria italica
  Peptide Sequence Number=SeqID_104689
gtctctccggtcatcgcttaggacgccagaggaaagaacaaatgctattggagatgtcataaaaaccttggagaattgattccaggtattcggaatgagctctacccagtaacatcatcttatggcatgcctgtgtacttctctctggaacgtgctgctgctccctactttggtataaaggcttacggagttcatatgaatggatatgttgagaaagatggtcagaaatttctttggattggtaagagaagtgatgtgaagcaaacatatccgggaatgcttgatcatcttgttgctggtggcctgccatatggaatctcatgcaaagagaacatcatcaaggaatgtgaagaggaagctggaattccaagatccgtatcaaccaatgctacttctgttggagcgatttcttacatggatattgaaggctttagatacaaaagggatgtcctcttctgctatgacctcaaacttcttgcagattttgttcctaataatgaagatggagaggttgatagcttcatgacatcattaatttcttttttataaaacacagcatgctaattttctgtattcacattgatataaattgctatctgctgcacacatttttttcagatggagaggttgatagcttcaggctaatccctgtgccacatgctgcaaacattatccggaggacagaatttttcaagccaaattgcaaccttgtgatcatcgacttcctcttccgtcatgggtacataaacccagattctcgcggctacctaaatctgttgcaaagcttgaggagcggtgattgttcttagctgccgtttgctgttaaattttttttgttgacaattcacttttatgaaatagaaaaatcatggagtaggctggaaagatagctgatcattgatcaaaactatttatgggacttaattgtcaaatctcactatgaacagagcattatcttcagagttctgttgattagaattagcaacggattagtttgatttaaggggacaaaataaggaagaaatggtactgaatatggaactcttgttattcaaaaaa

SEQ ID NO: 38716 - DNA, 604 bp, Setaria italica
  Peptide Sequence Number=SeqID_104690
acatgtaacagaaatgccagaagcattcagatatgatgcgactaccaatcactactttaccaattcaaaaggcagcgccctggctaatcaatggtatgaagagccctgcattccttagaatctcttcatttcttcagtcaatttgtacagtgaaacatcaatgtatttgagtatgcctttgtagttacataatatctttattgctctatcatgagagcagcattcgaaggaagcagaaggatgtatttcgaattggtggatagagaattgtgaagtatgaacttcagaagttgccttcactgcacattgcagattttatgtaaccatcatcttggtaaccattgagatgatcctctgtcgaggtgaagatgaaccagctaggcatgagtgcagcttcactatgtacaatgttttgaaggtcttcaccttatccttcagcatccagaaaggccatatatgcccacaaacagttttaagaatcaattcagtcatcatgtactgcttctgagtcctctgttctctttgcacattttcatcctcggctctttttctcctaggtcaccacatccaactgcgatcttccaatagaatacaagaaaattaa

SEQ ID NO: 38717 - DNA, 1747 bp, Setaria italica
  misc_feature (13)..(13): n is a, c, g, or t
  Peptide Sequence Number=SeqID_104691
ccttcagcatccngaaaggccatatatgcccacaaacagttttaagaatcaattcagtcatcatgtactgcttctgagtcctctgttctctttgcacattttcatcctcggctctttttctcctaggtcaccacatccaactgcgatcttccaatgatcagaattgatggctccatgggggaatgtttagcgttcaggtatttatttagaatactgttgaaagagaactaaatcatgggaccaaaatgccccattgaaaataagctcttaggaacaatgctgtcacttggagtaagacaagtaaggcaacacagctctatcctccatcaaaagagttgttgtcctgccagtttacaccctcatgacatatgctgtaacacaactgcaaggcttcattccacttattcactttgactagaccctttataaggcaaacaaagacacttagctctggcacaacaccttttctcgccatttcactatataattcaaatgcttcttcaagatgagatgccaaacaaagtgcccggattaatgaagcatacgcaaccttgctggttatgtttagtgatggtgagacttctatcatctctttatgcaactccaaggctttctccagtctgccagccttagagaaattatcaatgagcaacccataaactggagctattggcaccgtgccatgtgactccatctcctccaacaatccaagagaagcaatgaacttcttgctaaaaaccttgaaccgcatagctgtatccttgcaaatattttggccagtaagtttgcttcatttcagtgagcagtgaatgggccttgtccaaaagaccagcaccacagcaatggtttatcagtactctgtaggtaacatagttaggagcacacccttttgtgctcatttgtgtaaaaagctgaaggcctatttcaactttaccagattttcctaatccatctattagtgcagtgtaagttacaacatttgggctgcatcccttcttttccatcattgacagcagctttaaggccttttcactttcacctattctacaaagtccatcgatcatagctgtgtaagtgacaacattaggagtgcaagaaccctccaacatctgagagagaactttcatggctagatcaagccttttgcccttaaacattgcatcaattaaggaggtgtatgtatgcacggtaggcaagtaaccacacttagtcatcctcagaaatacctcctgagcattatcaatctttccaactttgcaaaatccatcaatcaaagcatcatatataatgtgatttggctcgcacccagtcaatgacatagcatctagcaattcatgagcatcgaccactttgtgcgccttacacaaaccatctattagtgcaccatatgtaacaacatttggagcaacggcatctgtgtgcttgccttcaaagtaaaattcagattctacactgccagaagttcctatcaatttggcatagacttcacaagccttttttatttcacctgccttacagaggccatcaattagagcgctgtaggtgatcgcattgggaggacagccagcatcaaccattctgtgaaagaagtcactagcttgagatagctgctttgctttcaggtaagcatgaagcagtgcagtgtatgttactacatttggggagcagcccacactcatcatctcatcataccagctttgtgcttgttcaatgagaccagccttacaaaagctatcaatctaaattt

SEQ ID NO: 38718 - DNA, 1043 bp, Setaria italica
  Peptide Sequence Number=SeqID_104692
ccgcctcttgctgctcctcggcgcggtcctcgggaacgccggccccggccggggcggcggggcggaggcgtcagatcgggcggagcccgacccgtactcgatcctgatgtggcacgactactcgccgccgtcgcccccgcctccgcccccggccccggtggcgccggtggcgacctgcgcgaaagacctccatgggaagggggacttccgcacgcgatgcgaggtctccgaggaggtcaagctgggcggcgacgtctacatcacggggaacggcagcctcgtgctcctctccggcgcctccctgacctgcgagaaggccgggtgcgtcatatctgccaatctctccggcgaggtgcgactcagccgcggcgtgcgcgtcagagctgggagggtctcgttggtcgccaccaacatcacggtcgccgacactgtcgttgtgaacaccaccgcgctcgccggtgatccgcccgaccggaccagtggcgtccccacggggacgcacggtgacggtggcgggcacggcggccgtggcgccagctgcttcgtcaaggatgggcagacgcaggaggattcatggggcgggcgatgcctatgcttggtcagaccttgaacacccgtgtagctttggcagcaaagggggctcgaccagtgttgagaaggattatggcggtgctggtggtggcatcgtgtggttgtttgctgagaacctgatcatgaatggcacagtgctcgccgacggcggtgatagcagtgagaagggcggaggaggttctgggggcagcatctatattaaggctgcgacgatgcatggtggtggcaagatcagtgcttctgggggtaatggtttggctgggggaggtggagggcgagtttcgattaacgtttttagtagacatgatgacacccagatttttgttcatgggggaaggagttcaggctgtccggataatgcaggagctgccggaactctttatgaagcagtaccaaagagtcttattgttagcaacaataatttgagtacacagacagacacttctttacta

SEQ ID NO: 38719 - DNA, 495 bp, Setaria italica
  Peptide Sequence Number=SeqID_104693
actgaaggccatttatcaattgaagagtcaagctcttgcagcaagaatgagactaattcatcatgttcattgacagacaagctctgttctagcaatcttgtcgtgaattcaaaggaagcaccttgttgttctagtgagaacttcatgttctcagcaagcagaaaagagaatgaaaatgctgaaggtacactcctggaaatgcaattaggagcattaggaggatgccctaagcaacaagatcttgaggaagtagcaaatcatgggctagtgcttggtagagaatgtgagatgcgaccggtcaatgcttctaccatcagtaaagggagtgatgtgggaactagtgatcgtggtatggtatttgctaatctattacagagtgaacatgagaatctgcatacacacagggtgaattctgcgatgaagtcgacaaaatcctaacaacctacctggtaacattgaaagcacactagcaatgaagagcaaggttgaaacatt

SEQ ID NO: 38720 - DNA, 547 bp, Setaria italica
  Peptide Sequence Number=SeqID_104694
atctgctatcaagttgctaagtcaaggcgataagcttttccattatgacaatttaaaccatgagatccagatgagggtggagtttgtaatgaactgtatactgacttgatcgattttgtggtacacacacacatagataacttctaaacataatctgggtctaagttgcagatgcttcttttatttgaccttgtgattaggactaggactctgcagagtcttgaaatcctgcttataaggttgctgctattttattttgaatccaatgtgcacaataattgtgctgtcaaactaaatttgttatacgtgttcagctgcagaggtttgcagcacccagatgaggcatatgactgagagatggttcctgacaactgcatcacagtttatctctttattcaagtagattatttttagaagtagaaatagatagggatttgcattttctagagatctagtttatctgcatcaaggtgtctatggccacgctacaagtatctgaagtttgcaggataaatgcttatgtcagtctcatgctcatgatctgaag

SEQ ID NO: 38721 - DNA, 696 bp, Setaria italica
  misc_feature (669)..(696): n is a, c, g, or t
  Peptide Sequence Number=SeqID_104695
aactattagaacagtaaaattctttaagtatacaagtaattatagtagaaaatttgacattgtcctctctacttttatcttggtaaagcgtctgctaatttatcagtgtttttgaggtactaatccggtgaggattcaatttttatatggtccttctcaatgtttgcttttagttggatatggtgtcatctgcaagcaactttccagttcccaggtaatttctgcattttcttcagttacgattagaactaggactttgcagagtcttgaaatcctgcttataaggttgctgctatttattttgaatccaatgtgcacaataattgtgctgccaaactaaatttgttatacctgttccctttctttatttcagatgaagaggtttgcggcacccagttgaggcatatgaatgagagatggttcctgacaattgcatcacagttcatctttctttcttcaagtagattacttttagaagtagaaatatactaggatttgcattttctagagatctatagtttatctacatcaagatgtctacggccatactacaagtttctgaagtttgcagataaatgcttatgtcagtctcatgctcatgatctgaagaacttttgtgcagcaacagaactgaatgaactcatgttacattttaaacttttaaaaaannnnnnnnnnnnnnnnnnnnnnnnnnnn

SEQ ID NO: 38722 - DNA, 1231 bp, Setaria italica
  Peptide Sequence Number=SeqID_104696
gccctccttcgccgagctctccaaggagttctccatcacccccaaccgacacatcctacggcatccttgtcaaagcctactgcatgaaccgcgacgatgctaaggcgaagcaaaccttggatcaaatgcgtgagcaaggtatctcgccgaccaccaaaatctacaccccattgatcgattcaatgtataagcagaagaagacagaggaggctgagctcttgtggaaggaaatggtagagagtggatgcaaacctgatgtggcggtgtataatgtgaaggtcatgtattacggactgtatgggaagctggaagaggttatggaggtgatggaggagatggaggcggatggagtgaagccggacatcatcacctacaatttcctcatgtctagctattgcagaaatggaaaatttgtggatgccaaggctgtgtatcattcactagctgagaagaggttctccccaaatgctgctacatacaagtatatgttggcagggctgtgtgccaatggcgactttgatgctgggttgggcatcttcaaggaaagcttgaagaggaacaaggtaccagatttttttacaatgaaagggttcgttgagggattggtaaagggagggatggtggctgaggccaagaaggttattgcagatatgcataagaagttccgagtgtctgggtggaagaagcttgagaaggagcttgggttggacttagatagcggggacacttcttgttcaaaaggtacatctggaaaaattgttgctgaagcaaagtctgttgctgcggatgcagaggcacttgagcttgaaggatctgctgccgaggaaactgctgtatcagaagaatccagtgatgatgaggtgcctgtgcctggggaaattccacgaggtcccacctaagtgggtattaccatgttcttcaagtttaatgtgtttaggatttgtgtatcactgtttaatttgtggttaaaaacaaattgaatagtagttcatgtcaggaatgtctgaaatcatttggtgacagatttgacaaaacctgaatcactgaataagatttggcattgctgttgccttcttgacattcctgaaagcttatgacaggttttaaaagctttcagtgtgagtatattgctcggtggatttggaatgttgtgttgagtctgtctagcccataagcttccagactcatgcagctggtaaatttttatatcctacttatccaaggaaaaaaa

SEQ ID NO: 38723 - DNA, 503 bp, Setaria italica
  Peptide Sequence Number=SeqID_104697
acgcgggccacaagaccgcgcaggccggacatgccatccagagcagggcgcaggaggccggcgccggaggaggcggcgccagcaccggcggcgcgggcggcggcagggcgtcgtcgtaagcgagctatggtgctagtactacgtgcgtggatgcagcagagggtcgtggaatgctgcgttgttcagtacgtcgtgtgcccgggatttgctcgcctccccgaccgagtgtgttggtagcctgcgtgtggtgtgttcgtacgtgctgtgtgccggtgcgcgtctgtgttcctcatcgctccagttcggagctgtgaataagtagctaggggaataagtgaagtgtctggggagaacgtctgagctagaccgctagcgctagtgtggctgggcgctgggctggatatatatgttgtgcatcagcggtgtcatgtgtcatcttctgttacggaaagcattggtgaatatatgtctctttgactaaaagaaaaaaaaaaaaaaaaact

SEQ ID NO: 38724 - DNA, 495 bp, Setaria italica
  misc_feature (489)..(495): n is a, c, g, or t
  Peptide Sequence Number=SeqID_104698
ttccttgcaagctctcttccctgcaaaggtccttgattccaaccggcagcagcagcaatggcggatcgcgggcggcggcagggcgtcgtcgtaagcgagctatggtgctagtactacgtgcgtggatgcagcagagggtcgtggaatgctgcgttgttcagtacgtcgtgtgcccgggatttgctcgcctccccgaccgagtgtgttggtagcctgcgtgtggtgtgttcgtacgtgctgtgtgccggtgcgcgtctgtgttcctcatcgctccagttcggagctgtgaataagtagctaggggaataagtgaagtgtctggggagaacgtctgagctagaccgctagcgctagtgtggctgggcgctgggctggatatatatgttgtgcatcagcggtgtcatgtgtcatcttctgttacggaaagcattggtgaatatatgtctctttgctgaataaaaaaaaactactcacactgagtcggagaannnnnnn

SEQ ID NO: 38725 - DNA, 351 bp, Setaria italica
  misc_feature (1)..(19): n is a, c, g, or t
  Peptide Sequence Number=SeqID_104699
nnnnnnnnnnnnnnnnnnntttttttagtgtgagtaataaattgatggcagcaacacgatcataaacagatctttacatttataaactggagcgcatgttatactattccagcacgattgcacgaagggaaataatgtacaataggggagtatgctctgtgctaattgatgattaagtcgatagcaggcagtcccacgagcagctcatcctgcagagatgatgattaagttgatagcacgcattcatgtcgaggcccaatgcagaatttgatcaaactccctttgtgctacactggtcagatcttgtgttagactcatcagtatccgaagatcaatttttgccctttcttt

SEQ ID NO: 38726 - DNA, 465 bp, Setaria italica
  misc_feature (421)..(465): n is a, c, g, or t
  Peptide Sequence Number=SeqID_104700
agaaggccctggcgaggtccggcgcgcgcctcgctgcgggcgcgagggtgttcgcgtgcaccgtggggaagaaggcgaccgagcggcgttctacgtggaggagcccgcggacgtggtcggcctgctccgcgccctggcacgctgctactcctactagctcggccgaatcgccggctggctggcggcgctaaagctgccagccgcggcggccggtggggatctcctggatccagccgatcggaccgtccaatatcgatctcgatcgagaaattaagaacagttgttagtcgattgttattaccggtgtgtgcaagaacaatactccatgaacgaactacctagtggtgtggagctatatatacatatcatcaaaatcaaaaatatatataatatatataatatatgtttgtttggaactttnnnnnnnnnnnnnnnnnnnnnnnnnnnnnnnnnnnnnnnnnnnnn

SEQ ID NO: 38727 - DNA, 578 bp, Setaria italica
  Peptide Sequence Number=SeqID_104701
taaagcgctcggatggttcatcgccctcctccgcctcctgccctgcctcgcccatcccgtctccgcccactccgcgtacgcggtcgccggcgacctcatctgcttcctgcagacctgcgcgattcttgagacggtccatgccgcgatcggattggtgcccactgcgccgcttcttactgtcttgcaatggggagggaggactcactttgttctcgctgttgtccgacaaatcccccaggttcagagcagtccctctgttttcataacgtttatggcttggagcatagctgaggtcatccgctattcccactatgctctgactaccttaaaagtttgtccgtcttgggtgacttatctcaggtacacagctttcatccctctgtatccaatcggggtcggacccggtgaaatgtggactatgtaccaagctctcccatttgtgaagaagaggaacctctactcaggtttcttcgagaagttctccatgagctatcattcatttctagtggtgtgctggtgtgctatccattgctgtggctgaagctgtacttgcatgtgttcaagcaacgcaagtcaaa

SEQ ID NO: 38728 - DNA, 1016 bp, Setaria italica
  Peptide Sequence Number=SeqID_104702
ccgacccggagcacgaaccaacccggaccggaccgctcctcggcggtatcgaaaccacagccacacagcgacacgggcagccggcgctcggcgtccggcggcacaccgcggcaggccggcagccatggctcgcccttcgaagctctacctcgtctgctacaactccctccaagcgctcggatggttcatcgccctcctccgcctcctgccctgcctcgcccatcccgtctccgcccactccgcgtacgcggtcgccggcgacctcatctgcttcctgcagacctgcgcgattcttgagacggtccatgccgcgatcggattggtgcccactgcgccgcttcttactgtcttgcaatggggagggaggactcactttgttctcgctgttgtccgacaaatcccccagttcacatttggcaactgcaggttcagagcagtccctctgttttcataacgtttatggcttggagcatagctgaggtcatccgctattcccactatgctctgactaccttaaaagtttgtccgtcttgggtgacttatctcaggtacacagctttcatccctctgtatccaatcggggtcggacccggtgaaatgtggactatgtaccaagctctcccatttgtgaagaagaggaacctctactcaggtttcttcgagaagttctccatgagctatcattcatttctagtgggtgtgctggtgtgctatccattgctgtggctgaagctgtacttgcatgtgttcaagcaacgcaagtcaaagctgggaaaggggagcaggaagaaacgagcctgagaaaattgaccagctcagctcagatgtaatttgtcacccgcatgtgggtgttaacgggtcattgtgcattgttttgaaacaaaatcactgtgaattgttaaggaatcttgcagatgatgcaatggtgaaggctttggtggattgatcagcaactgagtataatactagcagattactgggttcaatgtttgtttacaaaaaaaaaaatagaagaa

SEQ ID NO: 38729 - DNA, 505 bp, Setaria italica
  Peptide Sequence Number=SeqID_104703
ggggttgggacgaggaggatggcaacccgtatctgccagtcaagtggccctgggagtatccgttacatacttgccctgaaggacaaaattttacactggaggaagctaaaaaaatagttgaatctacctgggaaaggaatggtgacctgctctcagaatggtgtgacctgtttaacaacaacacgactcctttgcctgcgttgcctctacgtgttcttccaagggtaaccaaagactgtgtttctggagatgactgctaccatgtgcagtattggacgggagatactgatgaaactgcactagatcatccgtatttcataccctgtgagatgatgcaagtgttctcccttggattatcaagccctcttgctcgtcctattaatatttatgggctatttttctgttcgtgatgcctgggaaccactccgcaactatctttttaatcgctcaagaaatgatccagccatgatttctcagggttgcttctgagactgccaaggcacac

SEQ ID NO: 38730 - DNA, 745 bp, Setaria italica
  Peptide Sequence Number=SeqID_104704
gcaagaaagtatttaccaaactgaaaattgctccatcacagcatcctgtcgcaggtcatcatttccagattttgcaagttggcggtatttgttaccatctgagccaaaacattctataactttgggagcattaattccattcattatcataatagagtcagccaacccactaaaatgtggaaaggaacctacttcatactgacaactagggtcaactggaactgtagcagtcacaacgggaacaagttcaagctgagaaatgctccggacctccctgggcagcggaattcttttgttagtgtcctccttcttggtctccagttcagccaacttaatgtagatctcaaccatttgtttcatctgacaaatcaaagctccatgacaggaagatagctcctttaacagattttcagcagcaagcttcttttccatatctacaacaaaagaacttctactcctttgcttgtctttaacacgatcaccatttgccagagccaaaagctgaaatattgtatgatatgggtgatcgagagccattttcttcaaaagtgaagctaatgcaatctcttttgttgttttcatcattgctttcacaacttgatcccttgagaaaagactaaaccacagtgagaccagccggaaaaccacttgtaggtcatatttgccaccaacaacaagggaacgttggtacccttgaagtgctagatttaagaaattgtcccggtcatcctgaatcttctgtgct

SEQ ID NO: 38731 - DNA, 488 bp, Setaria italica
  Peptide Sequence Number=SeqID_104705
cacagatttgagaaacatgtatatagtatcctgtgggttttcagggccaatgccgcctgcaattggcaagctcacaaatttgagaacatgtatatcgagcattctgggtttcaggttcaatgccggctccaattggcaacctcactaacttggaagccatggaaattagtggtgagatttctgggttgatacctaatgcaattgggcagctcaataagttgagatggttagttcttcaagattgcaatttttccggaagcataccaagctcaatagtaatttgacccagctatcaatgctggatctttctttaattctctcaacgtggagattccaccatctattttcagtcttcctatattaactcaccttgatctctctttcaacaagctttctggccctttacaaggctttgacaaggcaggcccacagttgaagaccgtgcgcttcaggaacaatgaattgtcaggtttttattcccaaagtcc

SEQ ID NO: 38732 - DNA, 797 bp, Setaria italica
  Peptide Sequence Number=SeqID_104706
ggagatgaccacgcacaaggagatgcgggtgccgctcaacgcgtacatgctgcacaacctggcgcacgtcgagctcaacgccatcgacctcgcgtgggacaccgtcgtgcggttcgcgccgctcagggacacgctgggagacggcttcttcgcggatttcgctcgtgtggcagacgacgagagccgccactttcggtggtactcgcagcgcctagctgagcttgggttcagttatggtgatatgccagttcacaatcttctttggagtgaatgtgcaaagtcgtcaagtgatgtttctgcacgattggcagtgattcctttggttcaggaagctagaggccttgatgctggaccaagattagtccaaaggttatttggttttggggatcatcgatcagcggatgactcagtgtgagtagcagaggaagagcttgcacatgtttctgtaggtttgtattggtttctgaaagtatgccaaatgatgggtcgtgatcctggtgatacttttaaagacttaataaaggagtatggtgttgtattgaagggtccatttaaccatccggctcgtgatgaagctggtatacctcgagagtggtatgatgagaagtttaaacaggaatctgcacaaaaacttgaagaggtgcatgatagactagcttgtattgttgagatggagaaagagaatgcaagtttgaatggttaagttctacttgatgtacatgagagactggagctttacaatcaggaattcatgatcagtgtagtcagtccaacaaggatgtgtcatggaagattgg

SEQ ID NO: 38733 - DNA, 433 bp, Setaria italica
  Peptide Sequence Number=SeqID_104707
caagtttgtgaagctgtcagacttgagtgccattgaatggagtgcattcttgaaaagttccaggagttgctcccaagcatgttccatgacaggaagcaaacttcagcctgcggcccatggttgacgcagaggctgggcacctcttgccagttttgatgacaacagaggtatgctttgaaggtaacgtaggccatacctggggtatgcaccagccagtgtgtttgatcatggtgtcagctacgggtcgtctagtaccggcctactggtaggtgtattgagaataaggccgtgtcagatatttttgtttccagcagaatactgtggcgtctgtgcataggtttaacttatgggtggttcattgttatttctgtatgtgtgtccggtgatattggacatgatatgtgttgttatgaggggagtgtgaatggcacaa

SEQ ID NO: 38734 - DNA, 501 bp, Setaria italica
  Peptide Sequence Number=SeqID_104708
ctgaagacctccaaacagaaagtaaataaaagacggcctgcttttgcactctgccgaggccaagatatcattgccactattcaatgccaccaatctctcatcgtatcactttcttccgttttacttcttaagatcttgaccgagaatgacgaaactccagctgattgtgcaactgctattgttaacaaagatttgtcggtgtaccttcagcttcaaggaactctaaatccagaagctgagcatgaaaagctaagaaagatgacagttgaaattcaaaagcgacaacttgctctgactcagaagatggatgcttttggttatcgcgagaaggctcctcaaagtgtacaggaagagggcatgagaaagctcactgctttcttggaacaactgatcgtcataagtgaagcttgagaagaaattgatgccaaaacgcaatgattgactctgatgatcactgtctaataaagataatcataattttgatattatttttcatcttgt

SEQ ID NO: 38735 - DNA, 805 bp, Setaria italica
  Peptide Sequence Number=SeqID_104709
cactgctagctgctgcagctctcaagcaagctagctctgctagctagggtttacgccgatcggggtccgggggctggcggccgggggcgggcaatcgagttcggcggcggcgagatctgcttgctggtggtcgccggcatagaggaagttccagttgatttgcggggattgctgcccatttcttgagatccctggcgggatattgttcagctggtctccagtggtgcgatggcgacgagagccgtcgcgctaagacgatgataagcggcgccggcaaccagcaggcggcggcggacgaggagctagcccggaagaacgccgccgtggcgacgtcgcggcaatggtcggcgcagacggagtcgcgcatcgtgcgcgtctcccgcgtcttcggcggcaaggaccgccacagcaaggtgaagaccgtcaaggggctccgcgaccgccgggtgcggctctccgtgccgacggcgatccagctctacgacctgcaggaccgcctcggccttaaccagcccagcaaggtcgtcgactggctcctcaacgcagcgcgccacgagatcgacaagctgccaccgctccagttcccgccgcaggaccaccacctcatggtggggcacctggcgccgcccatgccgctggtgcacgaggagaagttcgtcggccaccacatcgccacggccgcggcgctcgcgagcgacggcggggccaaggtcggccagggcggcgacgtcgacatggactggggcggagccgccagccaccacatggggaggttccccgcggcggctaccaccggttcatgggg

SEQ ID NO: 38736 - DNA, 1141 bp, Setaria italica
  Peptide Sequence Number=SeqID_104710
ggaaccggaactggaggtggctgaggaaggagagtgtgtatccgtactgctgggagcggcgcgcctgctcgcagacgatgaggttggcggcggagcccaggagggacaggttgccggccaccgtgctggtccaggcgaggaggagccacgcgttggtctcggcggcgggggagatggccgcggcggaggccgccacccgggcgccgagcagcagaactgtgggtacattcgacgcgacgttggagaggaggaggatgacgagcgcgaggatgacggtgccggtgggcgtgtcgatccgcgcgtagggctccatcatctcccagaatgcgctggggatgcccgtcttgttgaagccgtccacggtgatgaacatcccgcagaagaagagcagcagaggatacgacaccttctccaggcagggccgcgcgtccttgaagtcgagcacgatgagcgccagcgccgcggtgatggcgctccacgacatgttgagccccagcagcagcgccaccagcatgcccgccgtgatcacgtacacgcacgccttccacaacctgctctgccactcctcgtcgtcctcttcgtccccgttatccttatcctccggcgactgcgactgccactgctccttatgatcatcctgcttgccgcgcctctggtggatgccgttgccgttggccacagctccggccggctgcttgatgacggtggcatcgtcctccgccggctgcttgatgacgggctcctcctccgccggctgcttgaccggcttattaagcagcagcaggtgcgacatggtggcgggtgtgaaccggtgcgacgtcacgtcctcctcctccaccacctcggtgggcacgaagcagttggcgacggccacctcctcgggcgcgggcttgctgccgccgtcgagctggccccagtagaggcagagcaggatggcggcgttgatggcggagcccaggagcgtggcggggaggatccccaggacgaagcgcccgaaggggatgcggctctgcaccgcgatcaccaggttctgcgggttgccgatgggcgtggcggcggagccgatgttggcgctggacgccagcgccagcaggaacggccgtggcggcaggttgttctgccgcgcgatcttgaggatgaa

SEQ ID NO: 38737 - DNA, 1064 bp, Setaria italica
  misc_feature (1)..(42): n is a, c, g, or t
  Peptide Sequence Number=SeqID_104711
nnnnnnnnnnnnnnnnnnnnnnnnnnnnnnnnnnnnnnnnnnagtatgaaatggcatttagcaaaatggagcctagcattagaagctttcacaaaattacaaaaaccggtgccaccagaaaaatgtgagctagcaactgtggtcatactttgttctaacagataatgctcagctacatcagttttggagcttcagcctactgcacgaagatctttttgagcctcagcctttcgtgggaagatcttttctaaaggatgtctcagtaaatcataatataagccctcatagtatctcatatccatccaaagcagctcaagatcacttttccatctgccagctgctactccaacaacctcttcaaaagaatcttgccaagctaagccactccgttgtgagatttcccaataatccataattccttgaaccacaagagatttgggaaagccatgtcctctaaaaactaaattttcaaacctccctacaagttctagaaaattgtcctcccaaatcatattactgttactgacattgaagaaaccttcatgcttgagctctttcattaattcttcaagacaaactttcatcttctcatttgttagggtgcgtctcaaacattcagaataagtgtctatttgacggtgcctcttcacaatcagagctctttccttcaaagaatctttaatgagctccatgttcaacccagcaaactgactcttcgcaatgtgtttatcaaatattttcttagcgatgccatcctgtaaaggaccaaattcagtgatatcatcatccaatttgcctgaagccaaatatttgtcaaattcttcatgcatcctgacttgttctttagcagtaaaatacccggcttcttccttctttctatagatgtaagaacacacataaggctgcaaatgatccatgatatcttgtggatccaagtcaagtggcctgtagcatttgttgttttctgctaaaaccaactgacgagctatcctcataagcgtttccttctgatcctctcgtattaaagggtgaaactgaggttcccagaaaagtatattgaattg

SEQ ID NO: 38738 - DNA, 1309 bp, Setaria italica
  Peptide Sequence Number=SeqID_104712
tctattctattcctaattttgtccttgtaagtcctaaattattttgttctaaatttctttttcttcatgcatcctgacttgttctttcgcagtaaaatacccggcttcttccttctttctatagatgtaagaacacacataaggctgcaaatgatccatgatatcttgtggatccaagtcaagtggcctgtagcatttgttgttttctgctaaaaccaactgacgagctatcctcataagcgtttccttctgatcctctcgtattaaagggtgaaactgaggttcccagaaaagtaatattgaattgaaaaacatagcaactgcatcttccatgtccaatccaaaatgatttagatttatgacgaagtttttccttaggtgatccataacacttctccagctatcagagatctgaatgtaaggtttcaaatcaattagtttacaaagccatttgatcatttgatcaacgcgttgttcaagatatgctgccggcattttccgctgtaaaatattagatatcaaaaaaatattacgatccatacagttgttgatggcatgcctgattttaaattccgggctcagtttctcaaaaattctaacacgttcaaaacaatcatcctccaggcagtaatccattgcatcgacttcgtgcagcagatcaatataggtaggaaggtacctttgaaattcttcttcaaactcccaattccacaattcatctggaaagttctctggaataggagaataggccttaaccataagatcgttcttttgctttgcaaaccagtcatcaaactggtatgctccattaccatagtcctgatcttcaccttccaaatcctgacttcgtacacaaagtgtatatatgttttggcacagaatcaaaagatccttgttggccttttgaatcggaggaatcatctggttagataactttgagatggtacgttgaaccatacatggaagaccatcacatagacgccgaattagagcaggaagcatatcatcttcaacaaaccgtctgagctttttattgtttgtagcgactgcaacttggaccaaagcattacaaaagggaacagcatttattgttgcttcgtcatccacccaccatccaaaaaggttcatgcttaaagttttaaaacaatcattaagcaagatatacccaacaatagagcttgacagtgtgcacttcaactcgccagaagtggcaatcatgtcatgcatgggattaagattcacattaaaaagactaccattcagttctgaagaacacaaggacccaagcaacttggagaatttgcgagtc

SEQ ID NO: 38739 - DNA, 478 bp, Setaria italica
  Peptide Sequence Number=SeqID_104713
cttagcctcctagcttgaatcaggttaggtgtcttagagcaaggccagcgtatagtcattccaaaatttttgaagctggacatgtcatctgggtgatagctaagacaaaatgctccagaatataagctaaagcaaaagcaaccttttatccgataaacaattatggttgtcagctttttcctcccatgcatgtggtagtcaagtagtagtgatgagtaaaaaaactactttatttgaagcactaggtgcaaaagcaagcaccactgctaagctagtgcttgctagcaccctgccctccagcatgtggcgcctagaaaaagtggtactgatgctttggagcaccccctcaaactaacgttggagctgctcttaggctgtcgttttactcttcccctctgtttctgtactaaacctggaatttctgtttgctttcagtaatgggaatggggatgcctcgattcgaaaaaagaactttcac

SEQ ID NO: 38740 - DNA, 270 bp, Setaria italica
  Peptide Sequence Number=SeqID_104714
atcaattccgaatagcatctgtcgagataccatactgcgagttcgggactaatctcttatggatggaatgagaagcacggatacttctgttgaacctgaggtcgacgtgcggcctggattgtcaccatcaaggtttgtgaaggttttcattcaggggcgagttattgggaggaagataaacctggccacacaccagaattatgcctcgctgtccttcacactgaaaagactaggcaatgactattccatgccaccatgtgaacttaatga

SEQ ID NO: 38741 - DNA, 498 bp, Setaria italica
  Peptide Sequence Number=SeqID_104715
tccgtcgtcgtcggcggccgcgtctccggggccggcggcggcgggccacggccgtaccggtcgcggttcggcgacacgaccctgacgaaggtgttcgtgggcgggctggcgtgggagacgccctcggaggggctccggcagcacttcgagcggtacggcgacatcctggaggccgtcgtcatcaccgaccgcctcaccggccgctccaagggctacggattcgtgacgttccgggagccggaggcggcgcggcgcgcggtgcaggacccgaacccgacgatcgccgggcggcgcgccaactgcaacattgcctcgctcgggccgccccgccccgcccagcctcgaggcagcagggggccatatccagggccccacttgcaggtcccggcccagggcccgcacttcatccccagggcaccggcctctccccagatgatgccccagcacggcggtggcccggctgcgatctacccgtctcagttcgggtactggtaccca

SEQ ID NO: 38742 - DNA, 620 bp, Setaria italica
  misc_feature (1)..(23): n is a, c, g, or t
  Peptide Sequence Number=SeqID_104716
nnnnnnnnnnnnnnnnnnnnnnngtttctctgcaaacccataattgaccgacaaaccacaggttcgcagcatgtttataacctcagacgacagtacttacttattaaccgttaccaaccacagactcttgcgaaacaaaacacgacagcgtacttaattatgaaacggcacgagtttaaccagactcttgcgaaacaaaatggttcgacggtcgacgaccaaaccgaacttgacacacgaagacgagctcattctctcagaaatcctcgtcggcaggacgcgccagcagcagcaagcagaagctcagctccagcgatttattcggcgagctcgatgatgagcgccggcctcagttggcgatggcgtgcagcatctctcccaccgccagcttgtacctctcttcagccctgaggttccccgggagcatcggtggaggcggggtcgcctcattgatgcgagcttggatggagaagaagctgcgggtctggtcggaggagatggtggcggccatgacgttgatgcggtgcctctccagcacgtgcagcagcctggtcagcatcccggggcgccgcggggtgcacaggttgatgaaggcgtcgctgccggcgatgcacaccacg

SEQ ID NO: 38743 - DNA, 331 bp, Setaria italica
  Peptide Sequence Number=SeqID_104717
gtgctgctgaggtagagctggacggcgtcgtagatctcgttggtgctcatgccgtccatctccgtgacgtcgaagtagcagtagggggagaaggtccgggtgagcctccccagcagtcgcgccaccgccgcccgcagctccgccgggaaaaccgcgtgcagcaacccctgcaggaacgcgaccgcgcccatcagcgacgccagcgccgtccagtactccttcatcttcttcaccgcctccggtcgccctcctctcggttcttgttgctcttgggacgctcgcccggcctttggattggaaggaagcaatgcggcggcctggaggagtcaag

SEQ ID NO: 38744 - DNA, 818 bp, Setaria italica
  Peptide Sequence Number=SeqID_104718
aacttaagaagtgggatgagagcaaatgggagctcaacggacagtatcatcgatgcgatgatgatgagatgaccagcaccgctggacccaccgatgatggcaacgattaagcttggtactatggcaatactacgagtcatcaagttcctcagccactgtttcatcttgatgtccaagaaaccctgcatgatgtattgcccggcgtaagtgccagtgatggttgagcttattccacaagccaggagtgccacaccatacacaactgcaccgttcttgcctagcacattcctgaggaggaaggatgatgagtctaaggtgatgtcactgcattttgcagagtcatccggtgagaggttccttgagttgcagacggttccagagacagagatgatacagatgttgatgagaagtgccacgaacagagctatgccactttcaaaagaaagaacctgcaagcatccttgattcctcttactgatgaggacgtgttccttgacagtaccagggcagagtgcaggaatagattatgcggcatcacaagagccccaagaagggctacagtgtctccagtagcaccagaaccacttaaactcggtacaaatagtccgtggataacctcctctgaaggaggcttcactatgctcatctctatgaagaagcatgctgccatgatgaacaccaatagcgcaactaaaagctccagtttcctaaccccatatttttgcagtccaaggaggagaagtgtgcttgagccggtgatgagaactcccacccatacagggatgtggaacaagaggttgaaagcaaaagctgtccct

SEQ ID NO: 38745 - DNA, 232 bp, Setaria italica
  Peptide Sequence Number=SeqID_104719
attagcttctgcttaagtttgctcggtatgatgtggtgggctcggttgagttaagaggctagagtgagttttgtacattgaacgagggcatttttagtgatttcagctgtcactagacatatatggagttgatcttatgatgaagctagcatgtagctaaggtcttgtgatgactacttgtactttatttgtttgaggaactagctgatggataatggtagctgaagtgttt

SEQ ID NO: 38746 - DNA, 508 bp, Setaria italica
  misc_feature (478)..(508): n is a, c, g, or t
  Peptide Sequence Number=SeqID_104720
ctgcaagcacccttgctcctcccacagaaacagaactggttgtgatactacttccttcctcatggcactcgtcaagcatactaatcccatgactctatgcatggtggctacttcgttggcgcttcttgccatcatgtcttcaaacacccgatcttgcgaagcttggaacggcttcagcggccgggttgggttactgtcactgaacggggacttgccgcaagaatcaccaccaccaccagcatcaagggcaccaccacgggcagaaccgtgctttttgcccactaatccagactattgtacggacccgatctgcgtgcatgtatgcgaggtacatggaattagcaacagccccgcctactgcaggcaagaagcaggctatgacatgtgctgctgcccaaatcctaattgacgccgttgtaatgttcccatcgatctgtgtgatgaaaattcaataaatgttctttatctattattaaannnnnnnnnnnnnnnnnnnnnnnnnnnnnnn

SEQ ID NO: 38747 - DNA, 337 bp, Setaria italica
  Peptide Sequence Number=SeqID_104721
gataataaggagtcatcaaatagagaacatcaataaaagataaaattattaaaagaataaaatggaaagactggtgttgaaaaatgcaataactatagttaaaaaatcactaaaagatctcaactgtaaacatgaactggtagaaaaaagtttatcttgaagattgatatagattatgcagcataaggaacagagagaaaagaaaaatgaacaacgtattaaacgtctttgggatgccagaaaaagtagtaacatatttgcaatgagagtacaataagagaaagaagagaaaaaaagataaataagtagaaaaaaaactcgaagaaataaatgtccg

SEQ ID NO: 38748 - DNA, 414 bp, Setaria italica
  Peptide Sequence Number=SeqID_104722
cttgggttcattgttgacgctttgtttagtggaagtggataccgtgaaagatttttatggttccgctgttctgcatctgccaagagattttggatgtgaaaggttcagaatctgattctgctggttaggcaggaccatagtacatgtggcaggtagttcatgtcttcggaggaatttgccaatcatgggacaaaaggtttgacgcacatttctgtttgtcagggtggttatcttatctgaaagtgtaaaccgaggttaactttgagatgatagaaagaggtgccaacatttcacactgtcatggggtcgctcgctgggttgatactggatagtattgatgtgagaatccgaatgttgatgtgtgtggggattcgagggtagagcactccatgatgctttaaattaaaggtgcgg

SEQ ID NO: 38749 - DNA, 481 bp, Setaria italica
  Peptide Sequence Number=SeqID_104723
ccgttgctctccgggtaggacgggtagcgcagctcgccggcggggcccatgccgacttggatttcgacgatggtgttgccgaggtagtcggcgaagtggtcacggaaggcgcgcatgaagtcggtgtagcactcgacgggcgtgcggcccttgagcacgggcatggcgtcgcatccgagcgagacgtactcgaagttgcggcggccccactggtcggtgtagcagaggtcctggtccttctccatctcctccagcgcccagcgcggcagcgggatgttgacggagtcgccgacgttcccgccgcactggtggaaggacatgacggcctggaccttgagccccgtcttgcgcgccatctccatgagctccgcgtaccccgccgaagttgtacctcccggggccgtcgctctcggcgattccccacccacacgtccaccatgacgccctccacgccggcgctcttgagcgccgcaaggcgtcg

SEQ ID NO: 38750 - DNA, 771 bp, Setaria italica
  misc_feature (1)..(34): n is a, c, g, or t
  Peptide Sequence Number=SeqID_104724
nnnnnnnnnnnnnnnnnnnnnnnnnnnnnnnnnngggtttttccaccaaaatcaccccccaattccacactaaaaggcacacataaagttgcagtatccaatttcagccgtatcaaattactggcactaaaacgaaattccaaacagaacacggtcatccattcaaattataacgtcatcatccacatttatatttcacagccacaagcccttgaacccttttatgacagccgacaacgagcaggtaagcaaaggcgaccgtggcgagactcacgcatcagacctcgtcctcgtgcagcatcatgttggggatgcccttgtcgatggggaagcagcggctggtatcggggcagacgagggagccctcctggacgtggatctcgaggagcgcgtggtggatgcggcggatggcgctgccttcgacgtcggcggcgccctcggcgaagatctcctcctcggggggctgctcctcagggagcagctcggggaggccgagagcgcgggtggcggcgacgagcgcgcgccagtcgatcttcgggaggaggccgcggatgaagtcggcgttgaggtccacctccttggtcacccacttagccgcctccagcttcagcgggtagccggtcgtcgcaccccggacgttcgacgccagcatgttgtgcgtcaggagcctcatctctcgattggatgggatccgagctgctgcttctcctctgccgacggcgtaggtgatctcgcgctgctccggcggcgtgctgcggctgcggagaaaaa

SEQ ID NO: 38751 - DNA, 303 bp, Setaria italica
  Peptide Sequence Number=SeqID_104725
ttggttagcattgggttgttggaagggtgctgcctgtggtgctatagctgtgctcaagctgataggcacttgagatgggggaggggcttcaagtttgagctccacctcttctggatcgacaaattcagcgaccagatagttgcggttgtttgggggccactggaggttgtagatagcattcctcgtagccactgcttcctccactgaagagtaagtaacatagcagtgggtcttgatatgatccatccaaaagctacaaacagatccagttttaccaataagttcttgcacagctttcagagt

SEQ ID NO: 38752 - DNA, 795 bp, Setaria italica
  misc_feature (770)..(770): n is a, c, g, or t
  Peptide Sequence Number=SeqID_104726
tcccgcgcggtggtcctcgcggagcaggcctcctacgccgccttcgtcgccatggggctgctcctcccgctcgcctaccagcggctggcccacaggttcaacgtcgctcatgctgctccgccggcccagcaggcacgcgagcgccgttctgttcctgctcgggttggcctcggtcaggatggccgtcttactcccgggcctctgctggttatcctcttctgttgtatgctcatggcggttcattggcttgtgccggcaaagggttcctgctttgagaaggttagtaccgggctcggtgatcttggaaccatttttgcctcggttacactctgctgggtcattcttccgaacttggccattatcctgctgagggctccggcgaactgagttctgccaagtccatgttactgcaacaacttggcgcatgaataatctaagttctggaacacatgacgcttccttggagtagaagagttcctattcacctggggcaagtgaagtgatgattagtttaactacaaatcgttgcagtaacagggctcgtgtcatgttaccagttgtcatttctgtgatgaaaccattgtgcaagttaataagctgaacgatcagcaaggatatgtctattcctcataaattttctgcacttaaacatctaaaacatatcaattttgaacatgatggctctttagttatcaccattgaacatgatgtgtccaaataacatcgagcactcaaactaatgtatttgtgctaaaaaaaaaaactaaagngactgccaaacggacgaccaaccaa

SEQ ID NO: 38753 - DNA, 1473 bp, Setaria italica
  Peptide Sequence Number=SeqID_104727
agcacgagacgaatctgctcccacagctaccgaattaagaaaaagaaatagtcgactctcagtttcatcaccttcagagtagccatcatcatcatcagatgtttcactaccagagtcgacattctttttctttaatttggataggcttcttttgatttcacggtcaacagcacgagacgaatctgctcccacagctaccgaatttgctccccttgttttgttttgtttctttttgagttttgtgtcagacgaatactgactaatgtccaggctgtcctgggcagctgctccatttctctcagaaatgtaccttgggttccctagtctcttggctagctgtatcaaggagacaacaatttgctttatatctcctgaatcattgccatctttgtatctcaatgcatcttggcacatagaacggatgtcatgcttgatggtatgaaagccatggcgagcataatacccatttttcaacctgacttcgatcttggcaacctttgggatgaaaaattcaaatctgttactcttcatgatttctctcagcctgcttatgataaattcttccatcttcctgtagccgctctcagcctgcctctgcatcaaacgcctcatttgtgcatcccttgacaaaaccgcagaggactttctagcatcaagcagttttgatcgtttatagaaaccttgtccaaatgaaagattagcattctctctatttgaaatatcagcaaaataaccatcaagctcatcagaacggtccagctgattagtaaagttctttgcaacttttgatgggtagttgttcccatcacccatctgcttcatggttttcattttctggtgtgactcctcaggattcaatgaggtcctgatccattttatatgctgaaatttatttttcagatcccctagatgactgcaaccttggatgtgcacataagatatgtgtggaagctgctcaagtactttgccaagggcatatgagctaagattcgaacacccagctaaaataagagtcctaatattttgcttctcataaccagccataatatcataaaacacagaatcagtgcaaagagcgccaacagaagacagatcaatgaatctacacatgtccctgtaatacttagcagcagcattccagctcctacaggtagctgcagaagaaataagtgacttcacatctgccctcataaaatggaagattcttgctagcacccggccatttaggagaccccaacttccattttctgtgctaggattcacagaatcatcatcaacagcagcagatccggcacataactcttcaaaacaaagatcctccttccgactggcaagaatgtcattggacaaatgaatatcttcatcactctgatcaggcagcaactttgccctttttgcagacccaccatcttctggcaggaaattcctagatgctgaattgtgagaaaaatatgcttcaaattccttattggg

SEQ ID NO: 38754 - DNA, 500 bp, Setaria italica
  Peptide Sequence Number=SeqID_104728
gagggttttgtatatatattcaattaaacttgagcaacatcttcactatgcgcccgttgtgtggctgcgctgtccatctagttaagtatgcttgttcggagctactttcccaattcttgatatttgtttcttagtacatacataatcaagtacgtctctgaaggtacgatgtacaatttttggtggttgatgactatggtacgaacaattacagaatacacttggacaacataggacaatagaatctcaaccaacacttttcttatttcttaggatcacatgagtcggcatgcaaactttattataaaagtacaacaaataattgatctagcaaaggccagaaccaatgattggttgctgcaagaaggtagcggcgttcatcgcagcaagtgggttgacacgcagtagctgctgttgttgccagaaggcggcggggttggtgatagctagttggttgaatggaagcagctgttgccggaaggcattcgccgcgtaagtct

SEQ ID NO: 38755 - DNA, 422 bp, Setaria italica
  Peptide Sequence Number=SeqID_104729
ctgctaagatactgtctgcacttgctgctactagcttgaacaatgaagctgctggcttgttgccatatgttgcttcgtgcctctcgatctatctgtttgcatccgagtttatgcgcaattctcttttttacgaggtttggtttagcgttctaggtttcagtagtgcattccgaaagctgaaggatccgtggctgtggatccgactatccgagtggtaagctggtgtcgcaccttaatgttcagcattcttattgagaagcagctgcgaaggctactgtggttattagtgtaatatccctcaaaattgggtgatattaattgtgtcagtttttccaaaaatattaaacttttttgtttgaatgtgtggatcatttaaatgcatggtcaaacttgaggttctaacccttcatttcttttctcaa

SEQ ID NO: 38756 - DNA, 250 bp, Setaria italica
  Peptide Sequence Number=SeqID_104730
ctccctggcgtgggtcgtcaacgccgtcaaggggtgggtagagcgctgcggagccatctgggtgcaagcccaggtaatcgagatcaccaggcgctccagtccgacacagttcctcaccctgcgcgaccccatcgaggagatttcggccagcgccacctgccatcgcagggtcctcgacgccgccggaccaatcgagacgggcatgacggttaccgccctcatccgaccgacagtgtggtcgcgcactggg

SEQ ID NO: 38757 - DNA, 729 bp, Setaria italica
  Peptide Sequence Number=SeqID_104731
tactaagaactatgtagcttccaaaagcagcaccacttgcaatgcttttctgaactctccatctatctggtgacttgttcaattccaccctttccaataacattgcaagggatgtgaagtaattacaagaggcaatcaccaaggccaggatacttgacatgtcgaagttccagaaatgaaatatgatacggacaccaaatagatggactgttgatgaaacggtgtatatctacggtgtagctctttatcatttgacaaatcttcctactgatctgcacagctgaagaaacaggtaccagggcaggcttagtcaaaacaagatcagattcactctttgtgtaatcagctgcatcaacaactgaaattccaatatggctttctcctatggcatcatgatcaagaaattcatacccaaccatggcacaacgataaccgaaatttcttagccttcttactatatcacttttgtcttctgcactaacaaatcaagatagtagaatggtaagcaagaacttcttgtagaaacaaactccgccaggaggacatagaagacaaggatagacctggaaagagatcagagatcccattgatatttaaatggacttctctgttattgcgctctaattcgaacactgaatgggcgggtactacattgatgcctagttttccaagctttccacaaacttgctttgtggttgacaatgggctttctgaagagagaacaacatt

SEQ ID NO: 38758 - DNA, 689 bp, Setaria italica
  Peptide Sequence Number=SeqID_104732
ccgggaaaccatatccctactcaccgggccgtgcaaccctgcaactggatacaaagtcaataggtgcagagccgatggaggtggtctttgacagcggcagcgcctacacctacttacctgaacttgttcattctcaactcgttactgcgctgaaggcctctctcagcaagtcatcagttaaagaggtgcatgaccctgcacaccctgcactgcctctatgctggaaaggatatggcccattcaaatctctggacgacatcaacaaggaattcatgtcaccaatttcttttaactttggccatggggtcacgatgaccatccctcctgaaaattacctcattaccactgaacaagggagcgcgtgcttgggcatccttgggactgcagacatagacttgtacttaattggagcaatcgcaatgcaggatcagttggtgatatacgacaacgagacaaggaagcttggatggacacattcactgtgtgacaggatgcccgagacttagaatatgaccgcttcattgcagtgacacactaagggtgagagagaggtgaaagtatgtaatagtaataacaaaaataagggaatgtaactgaggcacatgagacgtaaggaatttgtatgttcctcttcctcctgatcatggtgaaatgaagttgatattgttcgtattgtttctaaaaaaaaa

SEQ ID NO: 38759 - DNA, 169 bp, Setaria italica
  Peptide Sequence Number=SeqID_104733
tttttttttcttttaagtttctttgttagtctagcagcttctgcagcggcttatgcacaagccgtgccaaagtgaggaaaaggaaacggcttcagtggagaagccagtgaaaagccgtcacacgaaatgaattggggcaacaagccacaaaaagcggcttcttcccgtc

SEQ ID NO: 38760 - DNA, 761 bp, Setaria italica
  Peptide Sequence Number=SeqID_104734
acgcaagctgcaacttcgcatctgaagcatcatcagctccaattgaggctgaactaagtaattaccaggagtatttgaagttaaagacaaggattgagttcctacaaaccactcagagaaatcttcttggtgaggacttgggtccacttagcacaaaggagcttgagcaacttgagaatcaaattgagatctctctcaagcacatcagatcatcaaagaaccagcagatgctcgatcaactctttgagctcaagcgtaaggaacaacaacttcaagattctaacaaggacttaagaaggaagatacaagaaactagcgaggagaatgtgctgcgtctgacctgccaggaccttgggccttgtggatctaggggtcatcctgatgacgctaaccaggaataccttcgccctgctgtttgtgatccttccctgcatatagggtatcaagcttacatcgaccacctgagcaatgaataagttgtttcattagtgcactagcggaagcgtcttctatatattcgatgtaatgctcttgacaaaacttctagctttgagctacaatatatatgtactaaactaagaggtcatgctctagactctcttgagttcaagaagaatgatctgatgatgaatgcattgcatgctaaataattaagcccgatatatatctcattttgaattgattatctaatgaaaagtatgggcatttgtaactttgtgagtacctagcaactaacgtgcaatgaggctatttgattaaaa

SEQ ID NO: 38761 - DNA, 1315 bp, Setaria italica
  Peptide Sequence Number=SeqID_104735
tactcttgttgacataaaatacatcaatgtcatgtccactgttcttactaactgactggtccattttactagttcctgaatcaacatccaaaagctcctggttcttagattcagatatgctttgttcagaagcttcttcaagtttattcttgctccagccaaaatcagtaacctttttatgtaaaggggttactgttggaaagtttgtgctttcctcagaaactaatctgcttgccaaaggtttcactgtggaacccagttcacttgtttggagtgaattacatccaacatggccattcacaaaggacatatgagacaaaccttcacaatcaacaggtgggggatgtgaagcatcaactttctccacatatgtagaaggaaagcgctccatgataagagctggttctggatttgatcctatgcgtgattccataacggaagcaaatccgttcttctgctggtcaggcaaatccattgtttccgcaagagcatcgatccctacagattcagattccaatagctgcaagttttgggaagactgatggagcgaagggtgtgccgaactatcagcaggagaatccccttcatcctttgtattaatacatacatcttttggtacatcagccatttgaattttgtcaacagagctattagctacatcgccagcatctgtcaagtcaaaatgatcatgagatgactgttgtttgttcatgtcatttccagcatcattatgatcacttatagtagaaattgtaggatcatcaccaccacaatcagtgtcccatgcctccatgggaacattaagatcccaatgcagcctagaatcatgagtggcattggcatggttggtttgcacatctgcatcatgtgagcaacctatgattttttctggattgcctgagctatttgccattgcaatacttgaagacttagcatccgaagccatcactattttgtttgcactgttcagtacagaatagtatgaacaattaaccttgggaggtgatgcagattcaacaagattctctgagctagttggtgtggtagcaaataagggcttcatatctggagcagaataagatgagccaagaggcctatcatatatgcaatgtgaagcgccaggaatatttaacttatcctccatgtcatgtagtagactcgattcggtgtcactcctagtattttccagctttctttcttgtaaaggatgagctaactttgagcatgccccatttagtatgtcaccatccatctcactctcacaagcagcagcagctagtattgatataccagaaaaatcatcatcatcaaaagg

SEQ ID NO: 38762 - DNA, 514 bp, Setaria italica
  Peptide Sequence Number=SeqID_104736
gcaatgagcgagaaatctactaagatgctatttatatttagattatgcaaaatgagtgagaacgacacatcaaacttctcttgacttacaatggctgcactaactgggtccattcaggcatccaaccctaactatagtttagcagcggtacaacaatcaggccaattacatttgtgatgacaatgaaaaggtgagatacttatatgacaaagctcatataagttgatactcaaccgatatttagaaaaaaaatgaggaaatgatatttagaaaattaaacatgcaacgttcaactatgaaatgcataaaaaataaatacagataaaaagaaacaagtataagcaggtactcaccgtgaataagtaactgttacctgaaacttcataaacacttatgatagctccactgaaaggtatatcagatgtatgcagatgaactttcaaatttatttcagttgctgattcttgcgagcctcgtttggtgaggccgattgactttaaactgacacaaggat

SEQ ID NO: 38763 - DNA, 405 bp, Setaria italica
  Peptide Sequence Number=SeqID_104737
cgggagtaaacacattcaacacaacacttgatgaacttagaacttttttcataaaggaccctatctttagctcaaccagaagatcataaccagttatttcaggcatacagtaatctgtcaggatctactgcacatcatgttcctatattcaaatgcataaaaactaatatttagtaaaataaccagattagcttaataaagtaagtgcattcttgtgaatagcaattacataccatgtacaaaaatttcaaagcttgcttaggaccttccatcgcagtcactcggatgttacaactccttagaagtcttgatgcaacaagacggtcaacacaagagtcatcaaccaagagaatgtgaggagtggccatgatactcctttccttaacctttcaaccttgatacagg

SEQ ID NO: 38764 - DNA, 694 bp, Setaria italica
  Peptide Sequence Number=SeqID_104738
gactcagtgtgagtagttttatatagaagtttaaacatatcacatggagatgatgacataaaagaggaccataggtggtcatataacagtcttacataagtccaaacggatcgggaaaaaaatgatgatgtaaaggaggactaaacatggtcatatccaaatagcgattactagtaacaagaaatataaccctatagaagagttatattatttccactttattcatcgcccttgtcggtgcatcaaatgtagctcacaaggtgaggcacattgacaactttgattggcttgataatgtagtcctttgcacctccatcaaggcacatttttatccttttggagatgtcctcagtgcatgtaatcacaaccgggagattgtttaagcttgggtatttcttcacctcaacaagaagatcataaccactcatctcaggcatatagtaatttgtcagaatcaactgcacatcatgttccatgtccaggaacttcaaagcttgcttaggaccttccacggcagtcactcggatgttacaactttgtagaagtcttgatgcaacaagacggtcaacacaggagtcatcaaccaagagaatgtgaggagtcaccatgacagtctctgaacaacctccttcctctcaggtcgacctttgaaccccttaggcaggatggttcgtattactactcacactgagtc

SEQ ID NO: 38765 - DNA, 409 bp, Setaria italica
  Peptide Sequence Number=SeqID_104739
taggaaagaaagacaaagaattgtgggcgcgtgctggattcgttggtttagcctctctgttagggatcagattgttttaggagcttttcctgcttttgttcttttagcttcgtcttgtttcgtttgctcttgttttgaactcgaactttgtaatctatctctcttcttaatgaaaacgtgctatgcacgtcttaatatttgaggagttaggaaagaacagctaaggcaataagctctggcatggttattaaggaatcagaaggcaaaagaacaatgcgtatgtttgttgatctcaatacatacagcctactgatctcaaagttcatgtcagctctcttcttcttcttttgctctgtttcgagtaagagtacaaaattcagttagtaattgtgcaaacataaatataatt

SEQ ID NO: 38766 - DNA, 381 bp, Setaria italica
  Peptide Sequence Number=SeqID_104740
cgatggtcatttctgctgcagtcaaaggcaaaaagctgtgctttaaggtattagcttgttaaatttcattaggtacaggatgcatgcaaaacaacctgtcgagaaatagtgtgaagaagtaaaacaaaagacaaccacaatgaaatggatagcaccatacaagaatgagctaatacttcaacagtaaccactacagaaatttagttttcgctgtttctccaactcctaaatggatagcaagaattcagaactcctaaccatcaacatgtaattcctatgtttggttatgcatggagctttggctccctgcttcttctccatggttttgtgaaaaactcttgtgttcttttctacataagcaagagcttattgactagttag

SEQ ID NO: 38767 - DNA, 253 bp, Setaria italica
  Peptide Sequence Number=SeqID_104741
tcttaatctatctagattagttctttttctctaattataaatttaagaagtatttacaagtcactttcactcatgcaattgtttacatttagaatgatattatctatctcttaacagatttatataaagtaattactaagtagttttcaatcctacacttgtttatattttgaatgatattatctggcatgaattatgtggctacatttgataaagtcattgctttatacagcttgcagaatgaggcaaagag

SEQ ID NO: 38768 - DNA, 552 bp, Setaria italica
  Peptide Sequence Number=SeqID_104742
cactgacccctgcattcgacagtgtgcctccaattgtgaggtggagataatcagtccatgactttggcgccagaccatacttaaatgtctcatgcaggacatttatccagagttctcctcctgaggcatcaacatagggtgatgcaccagagtgcacctgcattctggcagtcggagggattccattttgatgacaatccctccagcagcctggcactgccctcggagtgagtgtccatgcccacgggccgccacggtgagcatggagtgctcacccttcaagaaaacatgcctgaccgtaatggcaatgtcatctactgagcctggatgaagcacagcagctggcatgaagctagagaggtttccaaagtccctggcagcggtagacatgtcgcggaagctgaaatggccatcaaggggtagtttacggagggattcaagcacatcttggtcaggcacgtgggcaatgataactccaccaaaagcaaataaaaggaaaagcttcaggtattgcagaactgaaggtttcatggctcctacccacactagtct

SEQ ID NO: 38769 - DNA, 394 bp, Setaria italica
  Peptide Sequence Number=SeqID_104743
aaagcttagattatgcaaatttgattttaaaatcacagtttaactgagtcagggataaaactgataaaaatgcagatttttaaacgttgatggaaacagacaattttgctaattattttctgatcagtttggaattgcatggcaaataaatatcatagtagataaagaagaatattctccaaaaatggtttgactcactgaagcacattttaccaataatatgatattttctccataattatttatgattgagacaaaggaatgtatgcatcctgtaatgttgcaacttgctcacatactgaacagcatgtctcaatttttatttaattttttatccagtgaggtgaaaatggcagaaaaactgtaaatacgaggattaagctgtatgaaattt

SEQ ID NO: 38770 - DNA, 601 bp, Setaria italica
  Peptide Sequence Number=SeqID_104744
agttttgttagttgctcggtgctccccttcttcctcagggaccactattcttatctcttccacttccttgtcgcggatatgccaccgagatattatcgtcgaatcgtatacctctcccaaccaaatcttgcgtcgcatgttcatgccgccgccctacatcccttgtccttatcgccagcccctgaccccggcattgcatcacaggtgtggtgctcgaggtgtggtgctgtgtcgaggtcggcggcgatggagggaagtggcgcagctgacgaactggcggcgtgcggggagcgaggaagacggccattgctgttgctcagggggcggagcagcggagggtggacggggacgtgcccgtgcaggccgcggaggaggtcagggaggcggacgacgctggcacctcgaggaggtgcagtgagcaggagctgaggagcgaggccatggagccgggggagagaggtcggtctgcgccggcgacggcgctgtcaggttggaagaggaggcgggacgaggaaccggaggtcgaagggacgcagcaggcggcggagcaccgacaagaaagacaaccgtagacttagacacctactaccaagactccccc

SEQ ID NO: 38771 - DNA, 808 bp, Setaria italica
  Peptide Sequence Number=SeqID_104745
ccaccgtccttctctccttgcattgcttctcttttagttgagagacccaacctcgtcgccagttttgttagttgctcggtgctccccttcttcctcagggaccactattcttatctcttccacttcccttgtcgcggatatgccaccgagatattatcgtcgaatcgtatacctctcccaaccaaatcttgcggtcgcatgttcatgccgccgccctacatccttgtccttatcgccggtctatgacgccggcattgcatcacaggtaatttataaattatatatgcatggtttgtgatttttttagcagtactcttatttttttacatgggtggtcatgtattccttaccatggcgttagaattaattaccaattattttaccttgcaaccacaccagtttctgatcctagatcattctattatattgtatcctctttttgaaacctactgttgtccatctttattattcccgagaacatttcttttgttcactttaggtctatttaccagttacaagcaatccatagccacatcacagccacaagacgcacaagtattgcactagcagcccgcaggaatagcaggtcagtggtagtgcagcccaggccaacaggcccagcacatccctcctgctgcgtcgcaatgcaacagtacgctgcacgcatctatctattcacgttcttcttcctcctcgcgctgtcctctggctactgcagtgtgccggccagtgcactatgagtatggcagcaaggcacgcaaggctcgtttctttcgcctcccacacccatcctccgatccaccaccag

SEQ ID NO: 38772 - DNA, 500 bp, Setaria italica
  Peptide Sequence Number=SeqID_104746
gcctagcaacgtgctatttgatgacgacatgacggcacatgtagtggactttggaatcgcaaagatgctattgggtgatgacaactccatgatcactacaagcatgcttggaacacttgggtacatggcaccagagtatggatcttatgggaaagcatcacgcaagagcgatgttttcagttatggaatcatgctccttgaagtcttcagcggaaagagacccacagatcccatgttcgtcgcagatttgagcattaggcagtgggttcgtcaagcatttccaattcagcttgcctctgttctggatgaccggctgttgcaaggtgtttcttcctctgccagcaatctgaatgactttcttacggctacatttgagctgggtttgatctgctcaagtgactcacctgaccagaggatgtcaatgagggatgtcactgtggcactcaagaagattaaaaagcattataccgaatcaataatatcagcaaccacgacaagtg

SEQ ID NO: 38773 - DNA, 572 bp, Setaria italica
  Peptide Sequence Number=SeqID_104747
gttgggtttttacagacatcgaccaacacttggatgtttgattgtttgttcaaataacgtaacgttgcaggccaggttagtacatatggatggctgggtgtggatgacgtagttagacgaagaaattagaagggccttgcgccgtcgtagttgcccggcggccagtagctgcacatgatcatggtgtcgccgttgttgcacttgacgcggccgcagccgacggtggtggtgcccttccagacgacggcggtgtagtggccgcacatcttgccggcgtcgcaggagttggatccgtagtggtagctcctcttctcgtcgctccactggtcgacggtggtcttccaggtgatgccgcccgtgccgagcatgaggttctcgccgtagggagacgtcgagtgcaccatcttgcacgggcccttgagcgtcttctccgcgtactgctgcgagaacttggccagcgtcgcgttccacgacagcggcggcacgtgctccttggcccggaacgcgttgtgctccttgaggatgtcgtcgatggccttctggttcaggccgtactccggctcgccggcggg

SEQ ID NO: 38774 - DNA, 854 bp, Setaria italica
  Peptide Sequence Number=SeqID_104748
ttttttttttgggcaaaaataggaatacattcatgagcaatcagagaaacaaaacatggaacgcctccagccgtccgatatttacagtcacttgcggagtcccggaccaagtgtctggtactctggtctatatgtcggataatgcgtacaacagaaacagcagcaaataccttgcggctcttgtaccacaactgcggactggcaaatgcttcaacaattggtggacaggcaggcagacgggttggaaacaatcagatcactgcaaaaacacactctggaaagcagtgactgtccctggtgcttggtcagtataacatgtaaggcttcatcgcagcacgttacagaattggaaagctccgaccatcggatcgtctcatttttccctcagtatatggtacattagctttgtggctcttgcttcgtatgatgagacatgcttgctgtgccatatgatgcaaccattctgttcagttgaataagcgaatttagatggtcttcatttatagataaaggtaatggctccatccgacccatgataccaggcgtttcactcattctgctcaaaatcgtttttatgttgctactcgtgcggagaaagagatctgcgttctccactgtcttgaatgtgtcgatatttgcagcaatctggttaagcaactgattattttcctccaggagacgctgggttgcactgtcgacaacaggagcttctttgggaacctgactttgttggtttggatgttgttgcattgatattgaaaagggggttacagtgtttgtggatgtcatgtgaaaattagccattgggacagatgcacccattttttcctggattggcttcatgtctctaatct

SEQ ID NO: 38775 - DNA, 1025 bp, Setaria italica
  Peptide Sequence Number=SeqID_104749
ttttttttttttaatacaaaacaatgtgtaaagtattcatcttgataatactttatcacgcatatgggttacatatgagtacacgcccaaactgaattgtgtgatgtggtatatggatattgttagacttcacatccacttagatatggagtgtgtttctctcgacgtggacactagtgagtgacgcttcctcgtcagccaccgctcaacaactccatgaaattttgtctgcacacactgcactttgtacatcaagtgccatgtacgaagtaatcttctagacaggaacacaataccatttcgtatagctctcccaacgtagctctcatagatcacacgtaggtatacggcggcctagttcctcacgtacgcatgcaccacgtcagacgagatcctcccgcatcctgcgggcgaagtcgttggcgtgctccctggtgacgcagctggccagcagccgcgttccggcgagcggagcgggcgccctcatgacgatgaccgacgcgatgaggtcgcagttcaccagcgggccggcggacatgggcgcgccgtacccgtagtccacgtcgttgaacccgagcttgctccagtccgacacgtacacggactcgtagttgaaggtcatctggaacgggtcgcgccctccggtgcggtcctccgcccagctcaggcactcctcggccatccgccgcttcgcgtcccgcaccatgccgacgagctcgatcaccgacgatcccgccaccttctccgccggcgccgacaccttcacggggaagatggcgttgccgtagtagcccggctccagcttcagcacgtggcggacgctggcgaagaagcagagcctgacgtcggcgccggcgtcgatggcccgcgtccggcactgccagagcttggcgatgacgatgtcgaaggccgagcagatcttgccgcccgtagacgccgcgtactgcgacttgagctttccgatgtaggcggcggggaagtcgaaggcgatgtattcgagggccagcaccggcagctccgggagc

SEQ ID NO: 38776 - DNA, 427 bp, Setaria italica
  Peptide Sequence Number=SeqID_104750
gtccgaaaaagctccgactcagtgtgagtagtcgcagaaactcatcaacaaattgtaccacagggatagatttataaaacgaagtcgagcatgtgtcaatgttcaacgagaggcccatttgagtggggcgcaagctctggtagtatcctctccaaaactccagccccctcaccaatgttcccagtaccaaactgcttggaaaagaaggatctagaaacagtgacataattgagagaaggagactccctcatgacaacatcaagtgcttggattgcgtcatgtggcgagtccctttgctgaccgttgatgaactgctgcaggtggcacaaatttgcccgtgccgcatatcgaattgtcactgtatactcaatttctcggcgtcccaacttgacaacaaaatccattgatttgaatggcagctcgcctg

SEQ ID NO: 38777 - DNA, 745 bp, Setaria italica
  Peptide Sequence Number=SeqID_104751
agcacagggtgcgcgacctgtgcgcggccctctgggatgccgagcccgcgcgccctgtagagaacgacgtcgtggaggctggggaggccgaggaggacgacgccgacgggggattcactggcgccgatagggaggggtccgcgaggctgcctatggtcaaggaggtgctgggagagtactggaaggtgaacgggcagggcctgtcaggggtgtcgctggagaagggtttagcgctgcttgggtcacaggaggctagtgcggctgaggtcaagtggaggcgacagctcgaggcggatatgcgcatacagatgcgtcggcatgaactgggaaaagaggtctatggcctgctcatcgatgccatcaaaggcctagggccttagcttgggtgctgttggtggagtacatagcgggatacatagttgtggtgttattttgtaggctgatcaatccaacctcttggttgctgacagaaaagacctaacacggtgtgaggtgctgtaggggtttgcacgaatcagtcgtgtcaatttgtctagctgtcgaacaattcaatgattgtctaagtcacttagtattggattctggaggtgttctgtttgctaatctgtctgcaaagaaagcttggtctacgatcagacagctttcagatgaatgctacatttctgtaaatcattcgctaagtattattgcgatgatactgtgtttaagtgtagaatccagtagttcaatttgtcttcttggtaaa

SEQ ID NO: 38778 - DNA, 576 bp, Setaria italica
  Peptide Sequence Number=SeqID_104752
caatcatgagctatctttttagaacagcagttctttgatttccatgccagatgcctagtttgccttgatttgcttgtcaggtttattatgccacttgacttgggagcaaagggtagctgccacattggtggaaacatttcaactaatgctggtggtcttcgtttcatacgctatggttcactccatggaaatgtacttggtcttgaagttgtcctggctgatgggactgtccttgatatgctaactaccttacggaaagacaatactgggaagtgaaggctcgctaggagtggtcactaaaatttcagtacttacacctgcaaagctaccttcaactaatgttgcatttctttcttgcaatgactacacaagctgccaggttcattgtccttgacacattctcttttttctgcaaaaataaaatcatgcatttgtgaagtgcatgtatgaagtcttcaagatagtgatgactgcttaatggctgtgtccccagaaattactgcttgcagctaggaggaacttgggtgagatcttgtctgcatttgaattcatggatcataactgtattgatctggt

SEQ ID NO: 38779 - DNA, 248 bp, Setaria italica
  Peptide Sequence Number=SeqID_104753
tatatcagaagcatctgtgaaagttggggctgtgtacaaatatgacttgtccatacctgtagagaagctctatgatattgttgaagaaatgcgctgccgtcttggtaattactaaattcgatctaccgagaatctatggactttctgttaccttggtatgttggttttgtaggtaataacgcagaggtattgggctatggccaccttggagatgggaatctgcatttgaacatcctatcaagcaaata

SEQ ID NO: 38780 - DNA, 717 bp, Setaria italica
  Peptide Sequence Number=SeqID_104754
cgccaagctcatctgccacccgaagcagttggtggcagtagcactccacggcagtctcacagtcacacgcggccccctccgctccttccctccctctccgccggcgcggcgccaagccccgaggcggaaccggaggacagcatggcgcggcgcgcggcagcggcggcgaggcttctccgccgcctgggcccgctcgccgcagagcccccgacgcgaggcatgcctcatactcaatatgaattcgcaaaccacactatgaattcttgtagaagatttcactggattcccagtttacagtgtccaccgtgtggacctaggactaatgcggaaacatatgaaggccaacgcagtgctaacaaggcttctgaagttcagaagcgcacatttggttctgcagcaacacacattcagaggaatccagcctattcagagctgaactctgatgatgtttcttacttcaagaccatcttgggtaacaatggcgtagttcaggatgaagacaggattgcagttgcaaatgtagactggatgggtaaatacaggggtgcaagtcagctactacttttaccaaaaagcactgtagagacgattggctgtggttccacagggtggcaacacaggccttgttggtggcagtgtgcctgtttatgatgaggtgattatcagcctcgcaggcatggacaaatcatttcctttgataatgtaaatggtattctt

SEQ ID NO: 38781 - DNA, 2093 bp, Setaria italica
  Peptide Sequence Number=SeqID_104755
tcgaattaagatactaaaaaaaagactactgtttaaataaagactgataattagatttctcaaatgatcactgtagaagtcgacaagttctgattaaaatctgatgatagttatgtttttcaggcatgcctcatactcaatatgaattcgcaaaccacactatgaattcttgtagaagatttcactggattcccagtttacagtgtccaccgtgtggacctaggactaatgcggaaacatatgaaggccaacgcagtgctaacaaggcttctgaagttcagaagcgcacatttggttctgcagcaacacacattcagaggaatccagcctattcagagctgaactctgatgatgtttcttacttcaagaccatcttgggtaacaatggcgtagttcaggatgaagacaggattgcagttgcaaatgtagactggatgggtaaatacaggggtgcaagtcagctactacttttaccaaaaagcactgtagaggtttctaagattctttcgtattgcaacaccagacgattggctgtggttccacagggtggcaacacaggccttgttggtggcagtgtgcctgtttatgatgaggtgattatcagcctcgcaggcatggacaaaatcatttcctttgataatgtaaatggtattcttacttgtgaagccggttgtgtgttggaaaatttaagtacctttgtggaaaaggaagggtttattatgccacttgacttgggagcaaagggtagctgccacattggtggaaacatttcaactaatgctggtggtcttcgtttcatacgctatggttcactccatggaaatgtacttggtcttgaagttgtcctggctgatgggactgtccttgatatgctaactaccttacggaaagacaatactgggtacgatctgaagcacttatttattggaagtgaaggctcgctaggagtggtcactaaaatttcagtacttacacctgcaaagctaccttcaactaatgttgcatttctttcttgcaatgactacacaagctgccagaaattactgcttgcagctaggaggaacttgggtgagatcttgtctgcatttgaattcatggatcataactgtattgatctggctatgcgacatttggaaggagttcaaaatcctttacctgcatcgcagtccaaattttatgttctaatcgagacaacagggagtgatgaatcgtatgacaaaacaaaactggaagcttttttgttgagttcaatggaaaatggtctggtagctgatggagttatagcgcaggatatcagccaagcatcaaacttttggcggatccgtgagggtatatcagaagcatctgtgaaagttggggctgtgtacaaatatgacttgtccatacctgtagagaagctctatgatattgttgaagaaatgcgctgccgtcttggtaataacgcagaggtattgggctatggccaccttggagatgggaatctgcatttgaacatcctatcaagcaaatacgacgacaatactcttgcacaaatcgaaccatttgtctatgagtggacttcagcacaaagaggaagcatcagtgcagagcatggtttggggctaatgaaagccgagaagattcactacagtaaagcacctgaagcggtgcaactaatggcctccatcaagaagttgctggactccaattcaatcctgaacccctacaaggttctgccacagtctgtactgtaggctatagctgaagttactcagttgtcctgtagttgaatcatcaaaaaagaagaaagaaaggaatcgagttacttgcaaactgatattttctcacccaacttatgatactaatcgatttatgtaaaaccccactgattccgacacccacaggttaaaaccctgtaggtctgtaactcactcagcttgtggctgagcagagctgcttgagtgagcagagcagaggcaaagtgaatagttgatggtcatcatgggactatgggaggcatgctccgcaacttacactgcgttcagaggcagctgaaataagtctacagaacccatacgccaaggcttctctcttctttcaaaatgacaagtggt

SEQ ID NO: 38782 - DNA, 439 bp, Setaria italica
  Peptide Sequence Number=SeqID_104756
cgagctctgcgccgacccgaagaacgtcgtcttcctcgtcagcggccgcggcaaggatcagctggcggcgtggttcgcttcctgcgagaagctcggcatctgcgcggagcatggctacttcacaaggtggagcaagggcgatccatgggaggtgatgaacaagcaggtggtgcctggcggcactggatctggatggaaggcggtagctgagcgagtgatgaggcagtacatggaggcaaccgctggctcctacatggagacgaaggagatcgcgctggcgtggcactaccagaacgccgacccggtggtgggcccgtgccaggccaaggagctccacgaccacctcgtcggcctgctcgccgacgagccggcgtccgtggccatcggcagccagatcgtggaagtgaaccctcaggcgtgaacaagggcgtggcggtga

SEQ ID NO: 38783 - DNA, 470 bp, Setaria italica
  Peptide Sequence Number=SeqID_104757
tacgacgggaccatggtgcccgagcagcaggacgagaggaagggggcgccggatgctggaattgtccgcctcctcaacgagctctgcgccgacccgaagaacgtcgtcttcctcgtcagcggccgcggcaaggatcagctggcggcgtggttcgcttcctgcgagaagctcggcatctgcgcggagcatggctacttcacaaggtgaaacaacaattcaacaattcactgccttccttcagttattactttttttttgaaaaagctccttcagttattactgatctcggtcaaaggtttgagattattgtgaagaaccgatcaagatttgagattgagatagactgcattgcgacatgtctatataaaatatgcatcaggtggagcaagggcgatccatgggaggtgatgaacaagcaggtggtgcctggcggcactggatctggatggaaggcggtagctgagcgagtg

SEQ ID NO: 38784 - DNA, 354 bp, Setaria italica
  Peptide Sequence Number=SeqID_104758
ttaactgtttgtctcttccattcacattgttcttcttgcaaccgtaatttaaccattaatttgcgtttggttttctctagcttctttatggttgccatttcaagctttctatctcgttaaattttttccgccaggtgccttggacaagatcgacctcacagaaattaccacctgctcctgaccttttctattgtcctattgtcaagtttagttgtgtcctccttttacctaatgcatcacacacttgcatgtgattagcagataattaattacataataattcaacactttagtagatagtgactatacaattccacaattgtacatcacacgcccgagtataaaactaattaa

SEQ ID NO: 38785 - DNA, 231 bp, Setaria italica
  Peptide Sequence Number=SeqID_104759
tagtaattaacaatgatacatatacatgacatattagtcaatctaagtttaaagaaatgccaaatacaagcaggtcagttgcatggttttgcaaagcactatctgtagtcattgtctctttgttagtacagtaacattgcatttctcatgcatctattgttcactgtcactttacctcttgttctaattgagaattttttattaactcttagctattgaagaattgtccat

SEQ ID NO: 38786 - DNA, 260 bp, Setaria italica
  Peptide Sequence Number=SeqID_104760
cgtctttccattcttgagtccaatgaacaaatcagggaattgcagagtagattgtttggtgatggttgtggtatgcagccacgttgcataattatacattgactaggttcgtatgaaggagaatctatttacaaacatctaactgaggatacatttgatgggacgctttaatcataaacatagctcataacatttgaaaattcatttatagtccttgtgcagctgccaggtcttcagccaaatcttcagtttgaaaactc

SEQ ID NO: 38787 - DNA, 1082 bp, Setaria italica
  Peptide Sequence Number=SeqID_104761
cagcaccctctttcccgttctctcatttcgtatcgttcttagacaaaactggaggaagagtttgtcattactgctgtgccttcttccacagcgcactaaaaagtaatggtataagggaattatttctgtgatggttgtttggtgcatccttactctactagtaaaaggtgcctatgatatccgacaggaagtactaattggagtctgcatccaaattgcttgcatgggcctcgtgtcctttaaattgatcgtggttttgaaagtaaaaaggtggggcagtttcaaaacatgctgcttctagtaaagaatttaaaactactttaggtgtggtccacctgtccaggatgggtgctgataaatatatctattggtgaagctgataattgcttgctgtcaagagtagtagttcagatctttcaccacagaaacaatcacaagactatttaaaaaatatatttttgaaagaaagaaatgattaaaaatgttcagcagggggattaaactactgcactcgtgagacatgcaggcaattaaataattggatcaaccaaccaacccgttctgttgggctatgctttgctttcagatctgttccagtagtcaacccatgattattttgtgaaactgttcatgtttcctgccaactaaattcattagcaaataatagttctaatttaatattgccaatgcattatgaagctttgtatgcatacatgctaatgcattatacagtattatcctatagtgcaagcgcagaggtccgtggagactgctacataaattacacgaaaaaataatcaattaatatctaaggaaaattaattgctgcaatgcaagtccaactggccggttgatctgaatacttgtaataaattaacatattaatgagagccgttatacagaccagagtctctaataaagatgccactctgatcccctgtaaaagtttgtgttcatggatgatatccttgagggagtgtattcatagtgaaaagttaagtcagtatcactctaattttgtgcttcgtcagacaaacaattaaagtgtagtgtaactctaaataaatacttaacttaaaaaa

SEQ ID NO: 38788 - DNA, 500 bp, Setaria italica
  Peptide Sequence Number=SeqID_104762
tttgcgaaataaatcaagtttgcttactaagaaacagaaaaatgtgtacttgttaggtcaccttttttgaacgacaaaactaaaagttaaaccaatgggcataatggtaagtttatcatcttatgtcctaacagttatgcttgtctggtgacaactttatgtgaagaaaaggcaaaagaatcacagttgtagattgaaaacttcacccttgtggaacgctaaaaatggaccaatcaatcactcgttttatctagctcaatatgggatattgtagtgaatgatcatgaaataattgagttccttttcgaaataaaaattgaagcaaacaggtaagggcatttttagatcaagtgaatcaatacaaggacatatcggcccataattccatatttctcgagtgacaaccgaattcctgtttatacttgcaagataattacaaagaactgatgatgcagtaaactcattatattctttaagtcgagaaatcagaactaactagg

SEQ ID NO: 38789 - DNA, 300 bp, Setaria italica
  Peptide Sequence Number=SeqID_104763
gacaacacatccaattctaccgccatagctctggtaagatgtattacgttcgtgtgggtggtcgctcttcttggttccttgggaatggtgcattccagggtcacgtcattgccatcgtcgacctagtcaagaccatgttgtacaacccattgacaagcaaggcacaggccatacggcctgcgccataccagccttggctcgatggtgtgttccaagtattgggtgacggtgatgcaggatccatggtggtgaacacctgaacaacctagtactaacctaattaaacttaacgttaactta

SEQ ID NO: 38790 - DNA, 205 bp, Setaria italica
  Peptide Sequence Number=SeqID_104764
taaactgaagcagctgccgccttggatctgagcgcgcacttagcctcgcagtgccgattgccaggccaagacagcagacgagcttcatgtcaggcgcgccaacaacaaatgctcggtgaaggtaggggaggaagtggagctcgggggcacgggggagatcggcaccaactcctccttgcccccgagctccacttcctcccccgtg

SEQ ID NO: 38791 - DNA, 625 bp, Setaria italica
  Peptide Sequence Number=SeqID_104765
acaaaaaagaagtaaaagaacaatgacgttagtaagttgaggcagtatttgctacagtgataccatatgcagaccgcacaaaccgtatagttccagtacactgcatgataatatttatataaaaaaaggaataaaaacttggagctgacactgatttgccagacttacacttgctcataggaccttttttgagaaacctatactgcagctagggccaatacaatcaggtctaacccaccataataacgcatcaagagtacatttatgtagtagatatgtataatgtagtaattgaaatatttcatcttgcataatgtaaccatgagttctttaagagataggtgtagctatgtatgtatttcaggataaactaatctttatatctgttacaacattaactacgtagttcccttgttgaaaaggacaatgtaatcagcattctaattcgtatttaatcagtatgacagatgtgatcagcactattaagtcatcattagatgggaaattacaatctttcatagattgcccttttgtttaatgtcaagctatatcaaatgaaaataaataacaaagaattagctgattgattgagctgcatattcctaggagtgctgccataatttgg

SEQ ID NO: 38792 - DNA, 297 bp, Setaria italica
  Peptide Sequence Number=SeqID_104766
ccattggaggccactccggagatatatttcttctggccacatactgcatgtaacggagctgagatggcattggattgagtgcagaaaagaagttgtaggaacccttaggtgcctcgcgataaataatgtccagagttttatgctcagcgccatgcaatttcttgtagatgagaagacaagataacaggaaagccaataatggccaggtccctctttcacaatggagtaatataatgttcttattgttcccactagataaccagtgctcacagacacgaaggaaatgctgaataagag

SEQ ID NO: 38793 - DNA, 419 bp, Setaria italica
  Peptide Sequence Number=SeqID_104767
ctccaaagatcgattggaaggaagcccatcaggtcgaagtatttacttttaaggagctcgtaaaggccaccaacaactttgctcctgacaaaaagatcggtgaaggcgggttcggctcggtgtacatgggatggcttcctgacggtcgagaggtagccatcaagcggagagagcacggctcagatcaagggatagaagagttccaggcagaggtgaccatcctccactcagttagccacaagcacatcgtccgtctctttggatcctgtgtcccgcagaagttccctgtgaatatctggaaaaagcaggacgagaagcagggagatctgtcggtcgtctatgagtttcttgagaaccgctcgctcgacatccacctgcacggccagccgtcgccgtcgccggtgacggcgtcctggaag

SEQ ID NO: 38794 - DNA, 225 bp, Setaria italica
  Peptide Sequence Number=SeqID_104768
cgtacacgcatgcaccatgcgcaatctcctctctgcagccacagtatggggcgcagattaagctcaagaaactctaatgttttaccataatgaccagcgaaccatgaacttagtttttaggtggtgatcttggaagatgttgtgtatatgcttgtagatttatgattgtaacccaataaaataaaggtaattaaaataaaagttttaataataaaaaaaaaaaaa

SEQ ID NO: 38795 - DNA, 733 bp, Setaria italica
  Peptide Sequence Number=SeqID_104769
tccttgggtcgggactcagcatcatcctcgctccgcggtcccgccccagaaacctcctccccgcggcggtggcgtggttcagcagctccgtggcgagcaggagcgcgaggaggccgagctcccgcgcgagcttgcagcagggcttggtggcgggcgcgacgaggagcagcgtgaacgccgggaccgtggatataagcagcagcggaagcatctcaggaaaaggccagcgccccggccgtaccaatcagcaaaggcggctggctggctggctgctggcggtggtggtgggcgacgacagcgccacccaaatgccccaatgcgcacgacgcggacacgggcacggaggggagactcaggtcactggaatggagagggtaggagcgcgcgggcccgatcggctccggaaagcgggggcagtggcgcgggcggcagccttgcagcggaatgattcctgcttcccccccttcctcctccgccgtgccgcgctgctagatgctgccgcttccccctctgcttttgaggagcctcacccaaaaggcgcgcacagagggcagcactacgacggtcgacgacgggctactgccagtactgcgcctcgcgcctcagcacctgctcttgtaatcctttggacctggacggcaagagcacgcagcgcgctggacgcgcatgtgtgccactgctcagtgccaccggagaggggagctccagctcctctgctgcctttgcccacgcc

SEQ ID NO: 38796 - DNA, 485 bp, Setaria italica
  Peptide Sequence Number=SeqID_104770
gacacctccaccgccgccatcctgccctacttaaaaatggctattttaaaatcaaatatgttttttaagtagccatttttaagtacgctgaacaaggcattcttcttgtgcctgtccctaatagcctgcagatcatcattggaaagctccctgtcccacccttcgtcaaagcaaggtgtttgtgctatggccgcacccttttcgggatcctcatcggcgacataacatgcgcgaggggatgaacatgagcgtgcatggatatgctccgatcctttgcgcagcataaattaaataatgtgcaccagctgcgcagctatctactcgtgcatgctactcgatctatattatatgtgcatgcaagtgtcatctgcatgcgtgctgcgggcgttaagctggagttgaccagctgcttccgtattgtgtgacaaggtttattgttgtatgtgtgctcaaatacaaaaacaaaatatatattgcttactgga

SEQ ID NO: 38797 - DNA, 329 bp, Setaria italica
  Peptide Sequence Number=SeqID_104771
tcccgattgtgcttcgtgactcatgatccatctggaaagtaaattacgtgtaaatgaaagttagcgggaaacacacacacattgttatatcatgaaacagatgctcacgccgagataaccaattctccgatacgtgacccttaagattagtattggattacaccgtgactcatcatacatatctttatttagaaaaggaaagaaattgcgtataaattagcgatatattaagcgacaaatgaacagaagattgggcacattgccatttcggtattttgcaaaaacagaacgccacgccaagtaagccgattgctcaaaggttggccatt

SEQ ID NO: 38798 - DNA, 317 bp, Setaria italica
  Peptide Sequence Number=SeqID_104772
taacaaaatgacaatttgttgcaaccaaattaaaatttacaatgcttaaataaaaccacacaacctaataaaaatctattcttttccacgctttgcaaattgcactcgtccaacatccacaatcttcacttctgtatagtacgtagcaagcttgagcgacgataaatacaccatgatgaatgacttaattcttccgcttgcaagtcacttgtagcatactcgatcgaccgaaactgtagttttgtaggataacctctgaacatgatgtgtaccttaacgtcgtcacgggccatggaacaaggctgcgtagccaccgg

SEQ ID NO: 38799 - DNA, 900 bp, Setaria italica
  Peptide Sequence Number=SeqID_104773
ttttttggtagacgagaaaaaaattgaataacaaccgaaaagaggccgcatgtcctttgtacaaatcaattataatcactaccccaaaacccccacaagctgattcttaaccccctttttactcacagaccatgtagatacaatcatttacagcagaacataagggcagctcacacgaagacgaccaaacgtgccgagtagattggctcgtctagtgacagcatccattaccgtgctttgcatgactttcctgcttctgtttgaggatgttcctcttgacaaccgaagatgacccttcctccaggagactcggcacctcgagaatcttcagtgcaagttcttcaaaacatttctcaacattttctcgtgtttttgcactgcttctcgagaaatagacatccagattcttctgcaaatgcaaggccttcttctcttgtgaccattctttcatcatccttgtcaactttgttcccaacaagcatttttatgcagtctttgttcgttgagtttgcttctatttccttagtccacacatcagccaagtttgagaaactctctctcttcgtgacatcatatactagaataattccctgagcacctctgtagtaagaactagtaattgtcctaaacctctcctggccagcggtatcccatattgtcaactttagtttctttccaccaactgtaaggaacttgattttaaaatccactccgatggtcggggcgatgtcgtcgtcgagctgggaggcggcgacgaagctgacgaggaggctgctcttgccgacgctcgagtccccgatgaggaggatcttgaaggagcactcgtggccgccgccgctgctcccggcccccggcgacccccattacctccccccttcccctcggacttcccgcccgtag

SEQ ID NO: 38800 - DNA, 492 bp, Setaria italica
  Peptide Sequence Number=SeqID_104774
ttctttctgtttgataagactaagtagaatagtaaccagcatgaaactaaaagtcagattgcttctaatgcttcacctaacttaccaacagcccaaacttaactttctatgagtttcaggtaagagatttgatttattgaactgcatgtgtggtgcatgtaagataggtctggatgatcaaagcattcaggataattgtagacagttgagcacacataaggcatcatgccgtcattcattcattgtcaaaaaagacggctgtattcaaatctgataccaaaagagcagaaagaagataaaagtgtccgaagaacatgataattccaatctaacaaagcaaaggggaagacatgggaatcctctcactgatttatagaacataactgaacaagggaataaaatgcttcatggaacataactgaaaaaagggagtaaaaaaatcatagcaagcaagtctactagccaatctaaaaatccagacctcaagttgaa

SEQ ID NO: 38801 - DNA, 1006 bp, Setaria italica
  misc_feature (1)..(66): n is a, c, g, or t
  Peptide Sequence Number=SeqID_104775
nnnnnnnnnnnnnnnnnnnnnnnnnnnnnnnnnnnnnnnnnnnnnnnnnnnnnnnnnnnnnnnnnntttttttttttttaattacaaaaggaacacggagcattctgcattttcttaacatgttccaaacttccgaataacagggtaacctaactgaacatcatctcaacaatgtaactcttttatcagcaaaatcttaccataactagaaacaactcggggggttcattctattaatgcgaacataagcatctacgatcagctagacaccatggaacatgaacagctatagtactagcggaggaagctgctggaggcctcctaagggctgacatggccaaatcagaacgcctaatcttcagttggcacgctcattcattgtcctcctcgtcatcgtcctcattgtcaatccccacccaccgagtaaaagcgaagaggaactccttgaaggtcactgtgccattcttgtcccaatccatttcctcaaatcttttcacgcctatgcgcccagaagagcgctctcctgcagtagtttcatttattgcttgtatcatctcgttcttactgacatacccatctttgttcttgtccaagaagacaaatgactcaaccagtgtctcaaatgttggctcaagactgcctaatcccattctttttcttgcttcagacaccgcaggatcattgagaagataaacaaggcacaggaagacaatgaactcattgaatttcatgcccatgtgttcataaatgtcgcatgcctcaaacagatcttttatttcatcatcagtagattcgatacccaatttctggaaacagtgcttgagttcctgttgatctatttcaccattggaatcttcatcaaattgctgaaagatggtcctgcagtttctcaagctctcgtcaattttaggaaatttcatgatgacactgttgaaagatttcacagaagttcctttcagtgccctctcctgcagttacttaagtaactaaattaaggtaaccttaa

SEQ ID NO: 38802 - DNA, 237 bp, Setaria italica
  Peptide Sequence Number=SeqID_104776
gtttgcatgcatgtctactcccactagtcagtacattgccggttcgaaaatcgatcgccggccttacttgagaattgagattatgtttagctaagctaggtaagggttagtgatacacgaaactagatggcgtaccagattgtacatgcatttaaatcattagccacgtcttgccaaaccgttcgaaaatgcacaacttaaaggcaaattctggccgaactaaccaaagtttaatac

SEQ ID NO: 38803 - DNA, 580 bp, Setaria italica
  misc_feature (509)..(580): n is a, c, g, or t
  Peptide Sequence Number=SeqID_104777
gtcttccagagtgcccaggctctgaagaaagcagtaattgtatcagccaaaggaagtttcacatccattggtgaggcgatttccaaagtgcgtagtctgactcctgataattgggctagtaactgttcagtgtttgtctactagggttcaggtcctgaagggggtgggctttggaacttcagaaaagggtgtgatttttctgttagtgatccttttgcataccactgaagtccaaggtgttatacaaaatacatcatcatccaaactcaatctctctggaagtggttagtgttctgttgcagttccacctagatggcaatgttctagattgtaggcatgcattttatgaatctttgttggtcccactgggattgtcaggtttagtagctgaagttattagtactagctttccatgaatacgaatttgttatccatgtaattgttgtctagactatgactacactatgttatcactgctttggctacttgcggcctgagatttaaaggtnnnnnnnnnnnnnnnnnnnnnnnnnnnnnnnnnnnnnnnnnnnnnnnnnnnnnnnnnnnnnnnnnnnnnnnn

SEQ ID NO: 38804 - DNA, 740 bp, Setaria italica
  Peptide Sequence Number=SeqID_104778
cttcaacctcaaccgttcttgatttctcctgccatgtgtatatagggaacgagacaaactgcgagtagttcttaactaggccttgaattcttgcaggatcagcaaactcgtacttatcatcatctctcaagtaaagagtaatttgtgttccacgtgtcagcattttctcaggattggtttcttccttgataacataagagctgctgtcagcctctgcctcccacacatactgcttatctgcctttggacttttagttgacaccacaaccttttctgcaacaaggaaagccgaatagaatccgacaccaaattgaccaataagtccattatctgcaccaagatctttgttctcctttaaagccttcaaaaattttgaggtgccactttgcgcaatggttccaagacaatctttgagttcatctttagtcattccaatgccagtatctgtgatagtgattgtcccagcatcttggtcgggtttaatccttatctccaactcaccaccatcagccaagaccgagggatcggttacactgaggaacctcagcttatccaatgcgtcactcgcattacttacaagttcacggagaaatacttccttgtggctgtacagactgtgcacaattaagtccatcaagcggctaacctcagcctggtactcgaacttctcgccggccgtctcctcctcagtgggcttctcggcgacggcggcgtcgcaccctacccggacaattccttct

SEQ ID NO: 38805 - DNA, 2601 bp, Setaria italica
  Peptide Sequence Number=SeqID_104779
ttttgtttttttttttttttttgttcgaacgatgataatgtattcgacaaacagaatatagttccctcagacgataaccaaacaatatagttccagtgtttacattccggttttgctagcagtaattactccccaagcagaagattaaacggagtaatacgtttccatctacagttaggcaagaagcaaatgccagggtagtaaatactagttacaaaatatacctcgtcactaacattcttttcctccacaaagcagcagtaaaaatgcaaggcgccagcacaaactctacaacatgtacaacactcaaaattgctcaattcaacggaaacaaactacaaagaccatcaaaaagggagcaaagatcgtgtcagcacaaaattagacgatcatgctgtgctgccatcttcgtggagcaagaacacaacagcagcgaccaacaagaccagaaatgacacaaaaatatatttccggttcagatgtgatggctctatggttcgcactgtctcatgagcatcatctgaggaggagtcatcctctgctggagtgtgcgccttaacttcatccttgtacagaagatctgctggtttctccgcctcagtttgtgatgacgaagaatctggaaatatttcctcagctttttcagtggactgaagttcagtatgtttggctttggcagtagcctttttgctcatttgtgagctaacattaacacgctctttgtacttctgggccaatatcttgttcttctttgttaacgtagcaatctgaagatgaagtcgttctctttccagtgccagttttctgaccaaatcagtaatgattttagttctgataccaatgtccttggcagtggacacctttgcatggttggcttcgcgtagcaagttctctagattttctactcgacctcttacaaatgctagctcttcactaagttctaaatttgtgtctgtcaacagtgtgcacttcgattcagcactcccagctctagattcagcctttgaaactttgcccttcagatcttcgatcatattttccatatcagacatcgttgatttcagcataccctgctgttcaacaatggcatcaactgctgcctttgcatgctccaattgggtatttgactctttaagtttcttctccaaaaggtttgctttatctgacttttcacttttcagagcacttagctcctcattaagctctatattagcttgagttagctgcatacaccttatttcagcattctgtgctctgcattctgctcgagagacatcacctttgagattcttaattgtattttccaatgtgctcaactcggagtgcaatgcatttttctcctcctggcttgtttcttctgattccattgcggattgcagttgggaattggattcgttcaactgtttttctaattcctggagtctatactgcagcgatattacttcagctccagctttgttgctatcttcttccaccttctctgggctattttccagaaaagatagttttgtcaaactttgttctaattttgactttagatcatcttccctacatttttgcgcgcttatatggaactgcatggtattaagcctatttgcaagttcctttgaagttccaaacagtagctcagaagcattttctgcttcaaacattctacctgaaactgtttcagttgattcctccaggaaatatatttccttttcctggtgatggagcttcagcttgagatcttctatgacagattttgaatcggaaagcttcttttcaagatctagctcacttgctatggattgttctaacatatgcaaaacgtttctgtgttgatcttctgtctgcatgccagtttgatatggcagatggccattttcacttccaacaccttcaaccccttccgtctcatgaataaactgtatggctttctcaaactttgcagactcgttcctaatatcagcaattagctcttgcatctgcttcaaggtcatcgtagcagcatccagtttagctttgaccttgcctccagactcttcttcataaaccctatgctctatacctctaatatcagcttgaagagaactaatcaagttgactaactccttgacttctgcatcaagaatgccatacaagatgtccaattcaaaagcactctccgcagtctcggacgaaatagattcatcttcgaatgtaggaggctcaaagtcagtggctcgacgagctatttccatgaccagcatctccaaatttagcaatttctcagaggcgaatgcaaggtcaagctcaactctagtgagaatctctacattgcttgcttcagagttcattgcatctccatacggcggggcgctttcttggaaatcgctgtcgtctctgtagatcaccgtatccatgattctcgtcgtgcctcctagtgggtgatcttcgccggcgaagcgcagatgaagtcgccgccgctcgccgagcgccgcagtcgccggcgatgaactgagacttagccactatggatcggatcgagagagaaaaagcgcaatactgagagagaaaaaggcagggatagtttggggaaaggagaggaagagggtacgggatacctccaggctctaccgc

SEQ ID NO: 38806 - DNA, 761 bp, Setaria italica
  Peptide Sequence Number=SeqID_104780
ttgcaaataaaaggtttaaccattgcatagcttggttctacagatcattccgatacactagtagcaacaaaacaaagtaaataaatgtcgagcatactaatatcccacaacgaaacaaccattttattcatcagcagggaagaaccaagtcagaaactgatgtttgtgctgcagctgtgccatcacagcctctggcagcaatggcgtaatttccccatttgtcatgttgtacacgccagagtcagcaagaggatccacacatggaccaaacatctcgctagatggattgtcaaaagcctgatgcatgaagtagatgctatcctcttgaactccacctgcacattggctggcaagaactgacttggagcattctgaatcaaggaagattacttggccacccaggctctccaccttggtccacttgccagggatagtggcaaggtccgcctcaaagacctcaaatcatacagtcctgtcatgttctccaagacgagctcttggtggaatacggatccacctcctcatcatcaacagcctaccattggattctgcaaggtatcgcatgaccaagtattcaggataagcttctgggaagaatatcctgctgctgcttggcgtagtatatttcctctgctcaggctttcatcagtgcattgcagatgaccatgagcagaaggaatatactacgccaagcagcagcagatatttccttctgctcatggtcatctgcaatgcactgatgaaaatcttcatcaggcttt

SEQ ID NO: 38807 - DNA, 290 bp, Setaria italica
  Peptide Sequence Number=SeqID_104781
cgtcgcggacgccgccgtctccgcggccccggaggcggcggaagccggcgccggggcatccacctcttggctggtcggacactttggcataccaactccatggagaccgtgctcaaggttctgaaagatggtctatcagctctccatgttccttattcatatggttttgcaatcattctcctcactgttcttgtcaaggcagctacattccctcttacaaagaagcaggttgagtctgcactagcaatgaggtcactgcaacctcaagtgaaggcaattcaagaacgata

SEQ ID NO: 38808 - DNA, 429 bp, Setaria italica
  Peptide Sequence Number=SeqID_104782
agatatccatgctttatcctttcatgccccttaaataaatttgcattgcgtcgcagttatagaagaaaataaaacttttcaggtaaaaatataataagtaaaagtatagatgggagcacaccacaatttagaactcagtatttcatccacctatgctagggttgaaatctgctatttccatgtaaaccgatgctcattatttataagaagggtggtgatagtgaacattacagtgttgattatataagaatactatgtacgaataataagtttcctgaaaaatgagaacagatccacaagttctgttcatactggtttccagatgattaagtatttgtaaacctgaactcatctgcaagcataaggctttgtccagcttcaagtgaaccacagataaactgacaagttatagatccaattccacttccc

SEQ ID NO: 38809 - DNA, 637 bp, Setaria italica
  Peptide Sequence Number=SeqID_104783
attggcagactcaactgctgaagtgcgcaaatactgtgacatgaagaactaaagaacaaggttactcacaagctagcttcgtcccaaagctgctaaggcagatggcgaacgcctggaatgctgagagaggccgccaataatccatagtgaagatatcagtatcaaccttaccaaactgcaggagaacggtttcatcatcccccgcactatcaggatgggtcggatcggctgtagccaccagctggaaattcttaactgatgcaactgtcactcgcccatggaagttcaagcaccagcattgcaagtgctcgtgccaccgtggagctttgtttctaaggacagtggtacccgtacgccttagagacttcacctcgagggaattctcccaggtttcttgaactgagggacactccatggtgcaacacatcctcctaggccctctggatttgagcaggttgtatttgtaggaaacctgtccaacgtcaaagttgcctgacaatacttgggggctgattcgcctgcttccaaagcagcgaatagatcgagtgcttgacgcctttgcaccatcatagggtggctggctgtcatatattttgaagtttgttccccaaaaatcagacctcaactttcccacact

SEQ ID NO: 38810 - DNA, 399 bp, Setaria italica
  Peptide Sequence Number=SeqID_104784
ttttttttttactttaagagacaatccatgctcagattctaaaagcaaatgctaccaggtaagtcataaaaaacacaacccaacaatatagggatggatcaacgtttctagttctacatagtagatagtacatactccaggtctcaaccgcacaagcattgtcagacctaagcagtctgcattctgcagacaatctgcaaccacaaagcagctacattgtctcataccgtccgctactctctgctagatatgttctacatgtataagatacaggtgaaagacaattcatggaccaacatcttgctccctgcgttatgacttctccatccttgaaggccaccatcttgcaactttgatctcagccctaaacctagttattagggcgcacatcccatctag

SEQ ID NO: 38811 - DNA, 521 bp, Setaria italica
  misc_feature (483)..(483): n is a, c, g, or t
  Peptide Sequence Number=SeqID_104785
aagactatcttattggatgaaactttggagcatctgtctactggtcatcaagatactgttatgctccctctcatcgatcattgccgcagctgctgtggtgatacttcatctgttctggaatattccactgtggacacaagtaccggggatggagatggtgaacataagaactcttttgatcagaaagatgatgaaactctatgtttggcgactgattctaaagatcatacaagcactgccaacacctccacatctgacggaattcccagttgcacacctactgatgatcaggaatgcagaaaagccgtgctgcttaaagaggagcaataccaaaatttccaaggcaactccaattccttggactcctttgcggtctcatgtgaaggctgtggaagcaagagtggggtatcagttgataggacatctggttgctgatcttctggaatgaacttggagtccagacaagtttcatcaatgaccttnaaatggatctgccgagacttttggacctctggactggg

SEQ ID NO: 38812 - DNA, 290 bp, Setaria italica
  Peptide Sequence Number=SeqID_104786
tttttgaacaacactccatcagctcaaaggatggatgaacaacaatttttgcgtcatacatctagcacgaccttgtgcctctctaaattcacaaaaaacaataatagcgaaatgacaatgatgacaacagtagggacatctcaaacacacgcacgcaggagcgagcacgcccgctcaacagggtaccaacaggaagattagtgccattccctactcctatcttcagactaggcttgtttcggttgttggcaagctgggccaataattcttccttgaatgctcccttcttg

SEQ ID NO: 38813 - DNA, 2217 bp, Setaria italica
  Peptide Sequence Number=SeqID_104787
cagtatccgcccctgctggagagccaattcaagacattgcttggtgacaactattataaccatcaccacttctattttgagcttgaccatgcacagacaagagctttaatttctttgttcaaatcacttgctcctgctaatttcaatcaagttccggctgtttcaagcaaaaggaatcttgcagtatcatcatcaccaactaaaatgaggctaacagctgttcctgacccaaagaaagtcacagcagattctaaggaaaccaatccatttagtgttttatcagatagagcttctccatttatctgggcagatgatgtggacagtgctagtaacacagatgagaagaaatctgaggagctagtttctgattgtgacgatttggatgacaatcttcttcaagaccaatttgttcctcattcaaatccagatgaggtcagtcagaattcctcagacaaaactgttgaccaagtagcggagaaagagtcatccagttgtcaatcctgtgaacggagaaagagtcaccattgatgaatcaatgcttttgagctcactcaatgatcatattggtgctgcggatgttgatgaaatagagagtgaggttcacaatagcccaggatagtcagtctttcaggctgtagcccaacaccacgaaagactgactatcctggaaaagttgaaagaactatcttctctacgacagcaggcagcaatatcttcccagggttgtgctgattctagttcagatcaatgcgtacctgatgaaacacagatcaatgcaaacctttccggtgacccctttgatgttacaatggaggataaaacctcgtctgatgagtgccatggaaatgctgagctgctgcaaatcatcgctgatttaaccaagaggactgaagcattggagaagaagctggttgggtcagaccaagaagtactttcattgagggaagtggttaaagactcaggaagaaaagttcagcaactggaataccttgtagatgagttacaattcaaatttgactcttcgctatctcatcttggaagcatgtgcaatactctagccaagccatcaatattcctgattggtggttataatggtgtgacctggttatcatctcttgattctttttctcctgagaaagacatgctggtgggtctcacaccaatgagttctccacgctcatatgcatctgctgctgcattggatggtcacatatttgcttttggtggtggagatggcatgtcatggtataacacagtggaatgctatagttcaaggaataatgagtggacggaatgcccttccttgaaccggaagaaaggaagtcttgccggaatatgtcttaatgagaaaatatatgctattggtggaggagatggaaatgaaacttattcagaagttgagatgtttgatccgtatcttgggaaatggatatgtagtccatctatgctgctctctagatttgctctggctgcgactgaactgaatggagtcatctatacagctggtggctatgatggaagcatgtacttggaatcagcggaaaggtatgatccaagggagggcttctgggttcggcttccgagtatgagtactaggagaggatgccacgccttaactgtcctgggagacgtcctatatgctatgggagggtatgatggggacaagatggtttctagcattgagatctatgaccctcgtctcaacgcctggaggatgggtgatcccatgaacactccaagaggatatgccgcggccgttaatcttaatgatagcttgttcctaattggtggcatgcagtccaatgtgcagatcctggatactgtggaagtttacaatgcaagctctggctggtcagtccttggttttggttcaattgggaagaggtccttcgcatctgccgttgtcatataattgctagtcaggagtttagggttcatatcatcaaattttgtaacatcgcctccattataaggaatggttggcataacttggagtaaactacccttctgaagcgctctggttatgaacagcgagaatcagcatggtatgagtatggcagaccaagcggtccaaagtttaacctttaaccctcgtttacagactagaaaccatacattcaccgctgcatgtggatgaacctttttgtcggataccaaaccgatggagcacaatgcaaaagaatcttttatgccattattgcttcatctttttttctc

SEQ ID NO: 38814 - DNA, 508 bp, Setaria italica
  Peptide Sequence Number=SeqID_104788
tggcaccctgataagaagcagggtgaagaaatgcaacctcaagatttcaggagattaacgaggcataccaagttctgagtaatcctgcaaaaaggcaagagtacgacaaggcaggcattatatatgttcaagatcagaatgtagtggactacttgaaccggcacaagggtttaatactcacctgcaacggccttggcataaggtactcggtatggtgaacatgttcaggtgcgccacggtctgcatccacctgccgtcttagatgatgtctaattgcaagataagatccagtaaaaaaattatggtacggcagtactatattttggggagctaaagatggacaggttgagttcatcttacaacagtgttgattttatttgttgatcagctgctgttgattgcaagaggcagatatgttcctgtaatcgttgctcccagtatgtaagacactgttctaatctatgtaatgtgagcggcgtctgttcctggagaatcaagaatgtcttgg

SEQ ID NO: 38815 - DNA, 621 bp, Setaria italica
  Peptide Sequence Number=SeqID_104789
gctccacggcgccactgccatctccgggaagggaacccccccttgggaaagcaatcggcgccgcggcagcgggaatcccgcggcggcagagccaggagccaatcccacggcgaggggagggtaggagatgtggtgggaatgggagggcgacggcgaggagacggcgcgggaggaggaggagacccccgtcgacttcgatttcatctccctgctcgccaagcccaaggattactacaagatattggaagttgattacaatgcgtcggaggagacgatcaggtccagctatattcggcttgcgctgaaatggcaccctgataagaagcagggtgaagaaaatgcaacctcaagatttcaggagattaacgaggcataccaagttctgagtaatcctgcaaaaaggcaagagtacgacaaggcaggcattatatatgttcaagatcagaatgtagtggactacttgaaccggcacaagggtttaatactcacctgcaacggccttggcataagaataaaggtaactacggtaataggtagaaacaatagttacaaggtagacgaccaacggtactagacaataccaacctagaccgtacttaagtaattagtaattagttacta

SEQ ID NO: 38816 - DNA, 491 bp, Setaria italica
  Peptide Sequence Number=SeqID_104790
cccccgtcctggctgcccaccatctcgaccctgcccttctccttcagcttgacgctgagcttccgcgcctcggcgatctcctccagcttggacacgatcgccgccgtgctctctctggaggcgaaccgcgcctccgccccgtgctcctcatcgaacatcttggacaggtccagcccgctcgaccgcgagatgatgtcgaaggcgttcatgctcgacggcctcacggcgatggtcggcgacgacacggtcaccttggagcgcttcctctcccgggcgtcctcctcgtcctcttcgtcgcggtggtggtggcacttgcaggcttccttgccgagcagcacggaggtctcgctcgtgacgagaggcttgtcggtgagagggcagggccctttctggagccagggatgggccttgagcttggtcatggtgatcctggtcctggggttgggtcgagcagcctggcgaggagcttgcgcgcgtcgacggagaaccac

SEQ ID NO: 38817 - DNA, 795 bp, Setaria italica
  misc_feature (28)..(28): n is a, c, g, or t
  Peptide Sequence Number=SeqID_104791
cttttacacgaaggagcctgagtaaccnggaaattcaaacaggaccctactgtacttcttcttcctcggaacaacctgtcgattcccatccgctcgccgagccgcacacaggagcaacgaacctcccacctcttccatccaaaacgaaggtcggactccaaacgttggtaagctgcaagatatcctcggtaaaaggccatcagctgtcgcacacatcgatttggcatctccgctcgccttcacttgccccgcaacgcccatgcgcagctccaaaaacgcaggaaaggagacaacaatccaagctccaagatcagagaagaaagagaacatccgagaactcggacgccccagaaactccactccgccacgccgccgacagcgacagccagcagaaggaacaagagccgcggaagatttgccatcgcctcagtcgcttgaccaaaatcggacggaagaagcaacatcaaatccccaacacaaaggggaggtgcactgacctcacaaaagcttccccgtggaagacgcctgaaccgccgtcgacgacggggaagacctttattcgccggcggagcagcttctccatcgccgccgcccccggaaccctagctccgccgtccacgacgacggcgagcaaacctaactacacctagatctataccctacataggctagtatgcacaccagcggtcgattccccgctccccttcttctccggcacccgaacggtcgccggagaaagaggggaggcggcggaatcggccccggaacgggttcgccttcctttccgcccctcta

SEQ ID NO: 38818 - DNA, 530 bp, Setaria italica
  misc_feature (511)..(511): n is a, c, g, or t
  Peptide Sequence Number=SeqID_104792
agaaacttcaattctgctcatgtcaagcttcagtaacttgttccttaagtgtactttccagtagaagcagccatatgcatagctgggccaacgaagcattaggccttctgcaaacggtcgtgcattcaagcttagatcatcccagctttcagatgtaccgacatcccagtggctagagcctgaagagaagacaagtgccaccatttttgtcatgcaacacgccctgccgaggaccctgaatgatgcctcctccttctgttcaactccagacgggacaaggaaggcctcaaaaaattgcacatgttgtttctggacctggacggaggcaagtaactcgtcggttattcgaggcacaagcaggtaccgccgggacacagggtcgcacaccgcgaggtccgggaagacgatgctttcctgcacatcaggactgcagtagaggaggacgcgaccgtcgcggacgtcgcggggatgccagcggcgccctctgccgcgcgggatggtagtcgaaggngaagccggcggcgcgggcg

SEQ ID NO: 38819 - DNA, 414 bp, Setaria italica
  Peptide Sequence Number=SeqID_104793
accatcctcacctctgccgctgcctcccaaaagctaaaggaaaggatagaagcgctctcttggtcaagagaccgccatcagcatgggaaggattgtgcactacatgatggctacttcattcatggttcttgtgatcatttcgaccaagtctccatcctgccaagcatgcttgtggccctggtgtaagccacggccggatccggaaccttgctttcgagttatggagccgcgcgactgtacggacaattattgccatggtgtgtgcgaggtgaaccatgttgtgagcaatcatgcctactgcaagatacctggaaaacgtggtgtacctgtatggcattgctgctgcccgcgttgagtgttgtaatccaccatgcgtgcctggtggaaattaataaattctgctcatcgatcgaa

SEQ ID NO: 38820 - DNA, 423 bp, Setaria italica
  Peptide Sequence Number=SeqID_104794
tactaagtgatataccatcctcacctctgctgcctcccaaaagccgaaggaaaggatagaagctctcttggtcaagaccgccttaagcatgggaaggactgtgcactacttgatggtcacttcattcgtggttcttgcgatgatttcgaccaactctccatcctgccaagcgtgcttcggcccctggtgtaagcgaccgccggtaccttgcttcgcagctacgaatgaggactactgtacgtcggacatctgcccacatgtgtgcgaggtgaaccatgctgtgagcaatcgtgcctactgcaagaaacctggaagacgtgatccagtacctatatggctatgctgctgcccaccaccgcgttgagtgttgtaatccaccatgcgtgcctaattaaataaattgatctgctcatcgatcgatct

SEQ ID NO: 38821 - DNA, 1162 bp, Setaria italica
  Peptide Sequence Number=SeqID_104795
gctggaggaactaagcaaagaacgtacaggaagagtgggagacagcccgttgggaggatgcccgggacaacgatgtgaactgcaccaagtgcaatcaatctctcaataccgttgatagttgcattgataatcattggggtgttcttcattgcctgctctggggtaaatccaagctcaagaagctggatattgtagtcatttcctccaaatccaccaaactgaaacatcgatttcgctaggaattctttgcagttttgtttcgtcccacacaaggaaggaatcaactccatgaaccactggatttgcatgtatagcgagccatgattccacactgggtcttcaattccaagtgattggtagaaggagaagttcatcgcggtaccaccagtgattgccatatttgcgccacgatggaaatctttgcctttggattttgatggtggaagtagtggcagcccaagtgattgtgctggcatgtgtggtaaaagtaaaacatgaagcaaattaacttctacctaaacaaatgaaaatcagcaccctattggttgtgactgcggagttctgatttttttctagaaatgagagaatcttttagttcaattatattactttttcttttagctaatgtcagagtttggggagctcttaatttaaccccattctttgaagctatcataatcctacattaaatatataatttcaattacttcaatgtcacaagtgatgaaatcgaacaactgatttcagtctttcaaattacatattagtataaattacctgcaaaatacatggaaacatttttgatggtggaaggtagtggcagcccaagtgattgtgcaatgaagtcaacgacgacacggccatcgctccaccggcaagacggcctgccgaagtaggtggtaccgtacggaggatgcgtgcaggtgagcacgtcgagctccgtcgcgttcctgctgctgacgacgcagatgttgccggttttcggccaccgagtcaccgaagctgaacatggcattgtatttggtggcctgcaaattgctactggtgcttgcactaacagtgctacagctcccgatcaccgcgaccagcagcaagaaggaggaggaggaggcaacaaggggtgagcaaaaggagctgcgtaggaacctcatgttggcctcac

SEQ ID NO: 38822 - DNA, 698 bp, Setaria italica
  Peptide Sequence Number=SeqID_104796
gggggggtagtagaaagaatattataaggtttactaacgtatatatgatatgtaactctttgtatttgaaataatttatttttatagatattattgatcaaagtagcatatttgaagaatatgacaataatgttctaataaaatgcttatatttgtggaaggagtatttctacaactagactattggagaaatatcctttatatggtatctgttattattgacatgggcaatcttataattaactaggaagctagctgctttgttctctgttgtggacactttactaaccagagtagacagctagtgttagtacgagagaaggaaatgcatgcatgcatgcatgtgtctaccaatgaagtcaacgacgacacggccatcgctccaccggcaagacggcctgccgaagtaggtggtaccgtacggaggatgcgtgcaggtgagcacgtcgagctccgtcgcgttcctgctgctgacgacgcagatgttgccggtttcggccaccgagtcaccgaagctgaacatggcattgtatttggtggcctgcaaattgctactggtgcttgcactaacagtgctacagctcccgatcaccgcgaccagcagcaagaaggaggaggaggaggcaactaaggggttgtagtctaaaaggtagtcttgttcgtttaggttaacctttctttatttgtttttggttctt

SEQ ID NO: 38823 - DNA, 933 bp, Setaria italica
  Peptide Sequence Number=SeqID_104797
gcatggaatacggaattgcatttgaattcaagtttacaagcaatacagcagtttttgcgcagactgctacatcttggtaaatatagtgatgcattgatactcatatatagggttccgactttatcgtttatccacatctgatcaccatgttctttggacccatacatatgatctattctattcagcttagaataggaggggtgcagtatgggccgttgagccaggcgtcggcgatcatcttgttcgccgcctccgttgggtggacgccgtcccagatcaggcgagccgacgggtctcggcaggccgtggtcgcgcccggcatgccgcacctggcgccgacgtcgaagttgtacttccctcctcctgctccacagcaagtctcaaaaggattgctgaatccaaactttcgaggctgctggaccattttgtacacctgggagtagtaatctgcgtacatgatccttgtcgacctgtacttcccttggaggatttgcacttgttttcggagcatcgagttgtggtactctgtcagacggttgtaacttttcaagcagccgtactggtcaaagtcagactcgctggaggaactagcaaagaacgtcaggaagagtgggagacagcccgttgggaggatgcccgggacaacgatgtgaactgcaccaagtgcaatcaatctctcaataccgttgatagttgcattgataatcattggggtgttcttcattgcctgctctgggtaaatccaagctcaagaagctggatattgtagtcaatttcctaccaaatccaccaaactgaaacatcgatttcgctaggaattctttgcagtctagcatgagacaacaagcagcttaattatattgaatagagtgcttgagagctgtccatccggcaaaatcaaacggtggaaacaaagaaagtaccattaagtat

SEQ ID NO: 38824 - DNA, 328 bp, Setaria italica
  Peptide Sequence Number=SeqID_104798
tataatatattggtgcccagggtaggcgagcaagaggataagaagctggtacctgctccatgacccatttccctgttccacacttctggaggatgaagacgacgcttacgtcagcatggatatggcttgtatgcatgcatggcgtctggcgagggaggtttgctcaggagcggaccggattcatctatgatactatgaagggtagtgaacagagagggatggtgcctctagtagccatctacaaagaacttgaagatgcacatgtagacgtagtgcggcatgcgacagcatcgggtcgatcttaatatgaacaaaatttcatttctaa

SEQ ID NO: 38825 - DNA, 446 bp, Setaria italica
  Peptide Sequence Number=SeqID_104799
aaagaacacatatcactaaagtgcatcaaccaaaacacttcagcttccaataaatccgaaaacagagcagccaactaatcatgcagaaaagagcaggcacagggacaatcagaaaggagcagactatcactaaactcgtaaatcctaattcatgtaaaactgaacatatgcttgtgaaattcctgcgaaaatcttacgacaaaattattgtgtccaaaacaggccccaagcaattgacgcccctagtagacttaaattccttggatcatggcaacgccggcagattgtactactcatcagagtatgtatatgaataggaacagaccgcacggcaccgtagggttgtgcagtatgccagaacgccgccgacgcctgtggccgccagcttcttccagtgcgtgctgccgtcggcggggagcccctgctgaaccacacgagtgcgggac

SEQ ID NO: 38826 - DNA, 113 bp, Setaria italica
  Peptide Sequence Number=SeqID_104800
gtgtgagtagtcgcttctgatggcgatcatttgacggtgactaatgcgctggaaattacgtggaagggagttgcgctcgcgctcccccgtgctcgactaatgtaaccacctgt

SEQ ID NO: 38827 - DNA, 283 bp, Setaria italica
  Peptide Sequence Number=SeqID_104801
agggatgatagctcgagcaccacgttcacttgtccctcaggcaccaactatcaggtcgtcttctgtccctcaaacgacatttcagcttcacctccagctacaaatcctcatgcacctactggtactgggtcaacatccttcacaagaagcagagttttcagtgcggttctaggttccataggcagtttgatagtacttgtggtatttatcactttctttgcatataaactaagaaacagcgacaccaggagatgcaggaagaggatgaagagtttggggagct

SEQ ID NO: 38828 - DNA, 356 bp, Setaria italica
  Peptide Sequence Number=SeqID_104802
agtagcagctaataaccgcgacgcaaaagaccaaggtgacctttgatgatgcggagttgacaacattattggcgacagggcgacttgaggaatttgtgtgtccgtcaataccacaaataaaatatatatatctctacgtacggttgtttcttccatccatcatggttgttttgcaaaataattcctcaactttttcgtaatcaacccgcagtctttggaatatgtcttaacgattttgcaaaaagatcccgtcgccgcaatccacctatccttccccttctcctccgcatccaccaccaccgcccggatggcgtcgccgtcgccggagtggccggccaatcgggtccgcaagacgt

SEQ ID NO: 38829 - DNA, 196 bp, Setaria italica
  Peptide Sequence Number=SeqID_104803
cacaccaaccttgtccgcctgctgggctgctgcgtgcaggccgaggagaagatgctcatctacgagtacatgcacaacaggagcctcgacttcttcatcttcgacgacaagaaagggaagatcctgacctgggagcggcggttccgcatcatcgacggcgtcgcgcagggcctgctctacctgcacaacactcgcg

SEQ ID NO: 38830 - DNA, 385 bp, Setaria italica
  misc_feature (377)..(377): n is a, c, g, or t
  Peptide Sequence Number=SeqID_104804
agttcacgctctacgacttctccgagctggccgccgccaccgggggcttctccgacgagaaccggctcggcaaaggcggcttcggacccgtctacaagggcaagctcgcggacggttcggagatcgcggtgaaacggctggcggcgcattccgggcagggcctggaggagttcaagaacgagatccagctgatcgccaagctgcagcacaccaacctggtgcgccttgtcggttgctgcgtccaggacgaggagaagatgctcgtctacgagttcatgccccaaccgcagccctcgactgcttcatcttcggtaccattctcacatttcgttttcagtgatactctgcctctgattctttaataacttaaaaaaacnctgtctct

SEQ ID NO: 38831 - DNA, 462 bp, Setaria italica
  Peptide Sequence Number=SeqID_104805
accatgtccatggagatggagcaggtgctcaagctctggcggatcgaggagagcgactccgagttctcgctctacgacttcgcccagctcgccgccgccaccggcggcttctccgacgagcacaagctcggccagggcggcttcggacccgtttacaagggcgagctgccgggaggtttagagatcgcgatcaagcgcctgtcgtcgtgctcggtgcaggggctggaggagttcaagaacgagatccagctgatcgccaagctgcagcacaccaacctggtgcgccttgtcggttgctgcgtccaggacgaggagaagatgctcgtctacgagttcatgcccaaccgcagcctcgactgcttcatcttcgatcagcagcggggtccattactggattggaagaaacggctacacataattgagggcattgcgcaagggctgctatatttgcacaagcactcg

SEQ ID NO: 38832 - DNA, 329 bp, Setaria italica
  Peptide Sequence Number=SeqID_104806
taggacgattcaccgaagacgttgttgaaggtcaaattcagactgcagattcatgaagggatactttccctgatattctttcgcttaggttctaggacaactgttgttggatattccgtctttcgtggtttcttgcgaagcaatttggttggatgttggtaaagcctgggtggattctgtgttgtacaaactgccaatctctgtaactttgtgctagaattatcaagattcttttaaggtaaaaaaaaaataaatctaatgagagactgacaagccacaccgggaacgttgtgctagaattatcaagattttttttacctaaaaagaat

SEQ ID NO: 38833 - DNA, 584 bp, Setaria italica
  misc_feature (29)..(29): n is a, c, g, or t
  misc_feature (68)..(68): n is a, c, g, or t
  Peptide Sequence Number=SeqID_104807
ttgcgaatgacgcatgtgtccgacctgtntacggcgggctcaaatccaccaaacacctaagtcagtcnccctttacgtgggcccaacaatcacagatttgaagttatgcctcaattggatgtgcaggtcgttcgtatagccattgccattcattaactgtcaataaaaaaggtttttcaacaaaaattctcaaatcttcctaacaatgcttctaccttctaatgtctgtatgtcactactttccttgtgcctacttttacttctaatgatgaaaacaatgtgaagttgttcgtactatttctccacctcaatcttacacatacaatgtacaagactatcatattatcctacttgttcaattcaaaaaatagatattctagaatacaactatttgcagagtaacctgatagttgctgataaatatataactctatcaaagcccacatcttttcaagtaataactgcgtcctatgctattaacatgttcccaatgcaactatgtcttgaaccaaatacccacactatttgttaggctagcttcatccaaacatattgcaaaacaatatggtcacaaatataagctc

SEQ ID NO: 38834 - DNA, 385 bp, Setaria italica
  Peptide Sequence Number=SeqID_104808
atgatttgaagagggatgtggaaaaattcctggcgcagtgcaactaaatttctctcacggctagcagatccttcgtgatatattttgcaggaattcaatctcaaagttgatgtggtggcggtgggttcatttcgacgtaccaggctaattttctctctggggcaatctcgtttaagactgttcttgaatccacgagaggtgatggcgaaactgatgcaccatgcacatacgactgtccttcaatcaaatcttctgaaccatttgaataccgaaacaagaccaaagggaacatggaaaatcattgtaattgtgcaggactgccaacgcggatcctatatagaaatgaaacagaggaattatattgtttcaagaaattcatctatgt

SEQ ID NO: 38835 - DNA, 3449 bp, Setaria italica
  Peptide Sequence Number=SeqID_104809
accagtgcaggtcttgcaaacagaatccgaggctaaacccccagtggaatcatacatgggcaagctttcagcccgcgatcatatactacatgtaaccttatcgaataacatcaaattacattgaatggctagcaaaaactgtgatctcctagaagaaggcatggctatggtaacctggcatatactacatatctctataagaattattcaaaccgctattcattacaactggttcccccacccgatctaatgatttcagggcatggaaattgggtgtgttaatgttgcaagaagaattgcctatgctgttgccatgagaagcgttgccaggatggccagattgacatcaggtatctagcatgcttccatttgtcaagtttggtccacaagcaaaaggtagctcagatggcactagcatcaacagtttccagtgcttctgaattggctggcaccctcagaaagaatatgtgcacccaatgagctgtgcgtccctctgcccctgttcatgttcacatagacaaaacttgggttttcacatttgcgaaactattcttttaggctgacgcagctccttcattattcgtactcggctggtcctcatcctcatttccatttacaagagatgtctcttcatgttcatcagcatcaactgggacagcttcatctgtgttctccatttcattctcttccaatgcctcttgatcaggctctccgttttcctcagctgggtctacagattcatcatcctcaattatctgcatccttttgaaagcctccacaagagtagtatctgacttctcagcatggttcaagtactcgtcagcaggaggatagtggcccctttgagatgcaacatttttttctacagttagcgcaacctgccaatcgtcaaataaatttggatactcagaaggatctgccagagactctgcagctttaggattaactttacagaggtcatttctccaaattgctactatctctgagactttgctaggaagatatgaacgcgccattaatgcagcttcaggtatacgattgctgtctatgagcaactgtatgcaatcttccaatttaccaagcataaaaaggcagaggaaagcaacattgttttttccatgttcttttgataaagaagcaagcttttcgattccttcagcatctccgagagatgagtataataacaacaagccacttaaatccttcgcttgaagaaggcattcttccgccatctctagcttgcctgtagacatggcgagttcgcccaactgcttccatttagattcactttgtgcttctgtggcgatagcctttgcaacatctaattttccaagctgcacagctagatcaaacttgtagtcagcatcagtggctatctcaagagcctcttccaacatacctctagactccaagaaatgagcgacactattatattgtgcctttggtatggatggtaaaatttcatttgcacgttccaaatccccgcgcatcacaagggtcttgtactcaatcaaactgagaagtaatgtgtacccaatgacattaaactccttgtcaattagataaactcgactttggttcgcaagatatcccaacagatacatcgggcgatccaagtgatacattgtggtgacctctccaccaacacaataatttaggcgccaagatgaattgttatatatgaagcagtctccaacccaaatcccagttcgcactctctcattgacctcatgaagcagctcaaaagcatcttcgacgccttcttcatccacaggctttccaccttctagataagaagcaacaacatctctattgtacttgaggatgtagaatgacgtatcacttgctattgcaactaggtcaccgctatcagcccagtaaaggttcttaacagtgacatcaattcgacgtattagtctgcaatcagcccagtcataaaagcaaatgaagtcactagaacacattgccaacaataccccaccaaaaatacgctccgctgaaaatgaagggcggatagttttcttctcctgaaatgatttattgaaaatttttattcttgatgtgctttccctgattgcgtattctccatctgatgaccaaacaaattccaatgcagatccaaatgatctattcctccaagccaatgcagtataaattatgtattcgccatctccacatacgacaacgaatcggccattagggttatgcttcaagctctgcgggtatagatcacagcttcctaactcctttacagccaggggtaatctttctccatctgtgatctcaaagcctgcaccaacagtcttaatatttacagtttgtatttcattatgtttcgcccaaatgattttcccactggtatccatactcgctacaggtacttcacggcccatttttatcataatagttccctcatcatatccaatcaccatccttcttgatcccttcatgtatccaacagcccaaactctctcaaggccatagtttagtgtgttctcaagtctataagtcgtcgaatgccatatacgaactgtgccatcttcagatccagtaatgattataggaagttcaggatggaaacagacagcagagatgttatgtgtatgcccttcaagtgtctgaacacagctctttgtttggtagtcccacacttttgcagtggagtcatcagaaccagtgattaaatagggcctgtcgccaccagtgaagtagtcaacacaattaacacccttttgatgtccatcaagtgtaaagtttggatctggagaacccaaactccatatctttgtagtgcggtcaagagatgcgcttgcaaaggtgttggtatcctttggattgaaagtaacctgcatcacataatgtgaatgtccctcgaagatttgagtgcacatccaccctttatcccagtcccacagttttatcaacatgtcatcagatgatgacagaacatatggtagagttggatggacagcaacacatctgatgtaatcagtatgagcctcaaaaactttaactttgtccatggtattgtagttgtagacacgaatgaacatgtcatctgcaccagctacaacccattgtttccttgaaacaaatttggccgaccgcactggcagttccgaaacttcaaatgatttcaccatagcctgtgcctgataatcccagatgcagacactccccgagtagaggctcgacagaatccatggctccgtggggtgaagatccaccgacttgaccctctcggaccgttgcgcgaacttccgcttgatctccaacctgagcggcatggtggcgacggcgaggacggcgccgggtcgagccgagtgactgggctaaaccctagagatccccagcgccgacggggtggtggggcgcggcgaggagggagcgaatccgatcgcgagctgcggaggcgcggagcgaggagcgagcgagttaacgtaacgtaa

SEQ ID NO: 38836 - DNA, 174 bp, Setaria italica
  Peptide Sequence Number=SeqID_104810
caatgtaccttgtactgctcctagatatcacgtatgcaccttgtggtgagtggtgactttcttttagctacttgcattgatgtccagacattaacccgttatgaattcaaggtgcatacgtgatatctaggagcagtacaaggtacattgtggtgagtggtgactttcttttag

SEQ ID NO: 38837 - DNA, 558 bp, Setaria italica
  Peptide Sequence Number=SeqID_104811
ctatgtgtacacaacagaacagaacattgcatattcagagcagagtcccatgggaatggaactctggatatcagtaggtcctgtcgcgtccgacaagggagaggaggaaggtgcggtagttgccggacgtctcggagtggatggcgtcggggagggagcgcttgtacatcctgtggtactcggccttgatgtactgcatgtccacctccgcccgcgtcaccaccacccggatcagcgccgagtcgctggtgccaagccccttcatcgccttgtggagcaccttggcgaagtacctcgccgggctgtcggcggcgcaccggagcacggtgaggaggccgaacccgaagttccccgacgtctcgcccttcaccgcctgctccagcgaccggtcgtacatgtggtggtacgcccgcgccaccgccgccaggtgcgcccagctccgctcgctgaacacccggatgaaggcgcgctcgtcggtgcccagccgccgctccccggccttgaagagctcccgggcgtccagcgccgccagcgacgggtccaccgccgccgccccct

SEQ ID NO: 38838 - DNA, 459 bp, Setaria italica
  misc_feature (1)..(112): n is a, c, g, or t
  Peptide Sequence Number=SeqID_104812
nnnnnnnnnnnnnnnnnnnnnnnnnnnnnnnnnnnnnnnnnnnnnnnnnnnnnnnnnnnnnnnnnnnnnnnnnnnnnnnnnnnnnnnnnnnnnnnnnnnnnnnnnnnnnnnnttttatttgaaaggcatatgttattgattctgcatctagcaaatggatgcatatacactgcctaatttacacagcagaattcgttctctgaacggcaggtagcatctttcttcgggtagtcaatttttccacactcgttttgggcatccttcttgcacgtacacttctttccgcattccataggaaagcacctaactgatgccggcggtggcggtgggcactggcctttggagcacgagggccccgcttcactggatggaatggtggtggacatcatcgcaagaaccaagaaaacagagatgatcaagcacataatcctggtcgccatgaggaagggaatacctttt

SEQ ID NO: 38839 - DNA, 2047 bp, Setaria italica
  misc_feature (1)..(61): n is a, c, g, or t
  Peptide Sequence Number=SeqID_104813
nnnnnnnnnnnnnnnnnnnnnnnnnnnnnnnnnnnnnnnnnnnnnnnnnnnnnnnnnnnnngtttattgaatcgatgtaaaggcaaagcaaactatgcatagctgaatagctcattacattacacgccacatagtacgagtatctcaatagctcaagtaactgcatagccaaatttcgctcaaattatataggaagaaggggaagggggaaaggagttgcacaaattacatcgacaaatcacattacaccaagatatcgattttaacatcagggaacaaggatcccgcgaggcgcaagctactcgctcaagttgccatcaccatgggcctcttgtggccctgtaggagctgccggagctgctggtacccatggcggtagtgatcaagcgagaagcacagctgcctgatggcctcccgcttcccctctgcgctgtcggatatcagaagcttctgcttctcaacctcttcctccagctcgcacacccgcgcacgcaggtcagacacagtcttccgtgcagcatctgctacttcgagcagcttgacatgctccaggtgcagctgatgcaagtggctgtccatctccttcagcttttcatcacgagtagtgacatcaatcagcagaatggacactttgttttcaactgcagatttctctgaggacagtagctcaagcttcttcttaagatcggcaatggtttcattcagttcagatatttgttcctcactcttgagggaagcttcttccttctcagcatgaagttgtttaagctgttcctctgtggctgtcaacttgcccacgagagaagcaacagagtcatttaagtcactagttgcctgttccagatccttcacacggtcctgaagcagtgctttctcttgcaggcttttccctaagccatctttcaggttcttgattgtagcctgtagctccatgacctcagtccttgaatcctccaactgcctacgaacttgctcaaactccatggcacgttcctcgagtacgcccttctcatttgcatcattttccaatcttgcttgcagatccttgattatttcttgtaacttcattatctctgcagaagattcatctaagctatgagatgcttgttcaagctcctttacctgggcctcaagctgcaatttctctcctgtaacttttgctaggtctccttttagaccctcaatctcattcttgttttccagaactgtagctaccaaatcttccttttcactgctaacttgtttgagactcacctcaagtttttcacattggcagtgcctgttcttctcctcaagtgcctcaatttgttgccttgcttcctgaagctcctcttctagctcgctaacccgtccattcattatataagaaaatccattgccattttcttcacttggttcatcaacctctgaatcggaatctgaagaagaagaagatgatccatcactccccttcttggaaatgtctgagcttccaccagaaccaaggaacacatcaaagccagctgctcttgttttgtgcttctgctttggtgtcttctgttccatgttgggctctggagatggtgaagtagattgtgtctccgaatcagtttcagatataccagagccttgagactgcagcgatgatggaagattcttgcgcaattccccagtcacgttgtcataacgctcagcaagagcacggtacatgcgatagaagttctcgacatgggttacaagcacaggtcgtctctggtaatacatctcagccttctttgcaaaagaatcaccttcatcctctatgagcttcagcatctctttaacttgtttatccatctcttccaaattctcagctagccatttggagttcttggggctaatatggctgtcccaccaccatgaatgggacttcctcgttggcattctttgcatgcgcttcattctcaacaaaaagaaaaactcctctaagtagaccgaggaggactggaggagaggatatcggtcgagcaggtggtcttctcttccccccgcctggaggagaggaagcagaggcgagaggcaccctgtg

SEQ ID NO: 38840 - DNA, 1032 bp, Setaria italica
  Peptide Sequence Number=SeqID_104814
cgcgtcgctggccggcacggtgccagcgcgcgcgctctacatggcggcgctcgaggccaccaagagctcggtcggatccgccgccgtccggctcggcgtctccgagcccgccgcgtcggcggtcgcctcagccgccgcgggcgtctccgccgccgtcgccgcgcaggtcgtgtggacccccgtggacgtcatcagccagcggctgatggtccagacctccgccacctgccgctaccgcggcggcgcggatgccttcaggaagatcctcctcgccgacggcgtccgcgggctgtaccgcgggttcggcctctccatcctgacctacgcgccgtccaacgccgtgtggtggtcgacctacgccatggcgcagcggtgcctctggcgcgtcgtcggcgccgagcgctccgagagctacccgtccctgatggccgtgcagggcgcgagcgccgccgtggccgggggtgcggcggcgctggtgaccatgccgctggacaccgtgaagacgcggctccaggtgatggaggccgacgcggcgcgccccacgctggcgagcaccgtgcgcggcctgctcaaggaaggcgggtgggcggcgtgctaccgcgggcttgggccgaggtgggggtccatgtcgctgtccgcggccaccatggtgaccacctacgagttcctgaagcggctctcggccaaggagggctccctgggctagatcctccgtccctaaccttagcgatgatctttcaagtgatgagccgaccgaatccgtccgtgtccgtccgtcctcgaagcgagatcgatcgatgatccatgaggggtggttgattaggaatcctctcttgtacataagctcaagttatttgccgttcttgtttcttgatccggcgctatagagtaatagagggtgggctgtgggcaggaagaagaactagaaagggttttaggatgcagaaattttgctggcttttgctgtggcgctgcggctgcagatgctgctatgatgatgatgaaaacttctatggaaatggagaatttccc

SEQ ID NO: 38841 - DNA, 357 bp, Setaria italica
  Peptide Sequence Number=SeqID_104815
ccaatcagcgctgcatcgtcagatgtggaccacccagagggcaccagcaacccattttaggcaccggattggtcagcaggagctggctggggcgttgaatttgggagcagcagaggcacgtggctgcgaggcgatgggtgggaggtttgggtgtgtacgtggcggggggagacagcggcggctgatggagctggggacaggtgaatggattgcaaatgtaaagggcaagggctgaaaagtaaaatgaccggtaccttaatttctgctaacatgacagaattggcagcgggtgcggcacgcaagccgagaacaggtgaatggattgtgaatggaaaggacaagggccgaaaagtaaaa

SEQ ID NO: 38842 - DNA, 1925 bp, Setaria italica
  Peptide Sequence Number=SeqID_104816
cagacatcacatcaaaacaatgacatgatcatcaagagcatgcaaatacatggagttttaaacccagtatataaggaatccaagcataaacattgtcagacgaattttttaaatatcaaataacaataaactccaagggtaccatgtaacagccaatggcattattattacaccatatttttccattattattacaccataatctcttgctcttgatacttggtacagaatcagccggtagggatttctttcagaagagatggatgttgactctagccatcagactcatcactcgaagtatcctctaggatttccaagtccgaatcattcatactagactcttggaaatgatagcagctataaatattaaatttcactgaaggatgagcatctgaaatgctggggagttccttgtatacactgcattctggtgagacatttctagagaacttcaaggtcactccttcaagcattgtcgtgcttctgaatatcactttcaacaaatcaacttcatgatcttctccactgaatccctccacttctacttctttaagattggtcaaggtgatactttgacttctccagttcctaggcctgtcacaagggcaacttgcacggcatgttcctctgcgttttctctcctggcgtcgatttaacattatcttaagcctttgtatagaggtacaaaacccaagtacttccaacaccactgctccataaacatgccgtcctgttgtaatatccagctccaaaatagaaaatcttacaggaattcgagatatatccagtccaaagctgcggaatacatttctagcataacgacttctccccatcttcagcaagaggatgttgttgtggggacgttgatgcagcttcaaacatgagctttccccgttgcttgcgagatgcgtacgcccatgaggctctattgtcttcaatttcagggtccacatgcgccataatgcaccaaacgaagacttacaccaccactgccataagagatcatccagcaatggtgctgagaaggacaagctgaacgcatcttcggttccttcgttagaagcaaacctcaacttcttaagcttaggggttgcaatgtcgataacccgaacatccgaaagggtatacacgtctagctcctctagggagtccgagtggacctttatcgagtcaagaggctcacaagaaatcttaagcttgcgcagcttagggcagcggggaagcagatcacaaaggtcaatattgcagaaggtgagggacagggtctcgacctttgtgaaatctcctgtcgggaggagtgcggtctccaatggaggaaaagatagctttattgaggtggcgcgatcaaagatgggcagttcaatgggaactgaagtatctgcatcttcatccataaagaacacggcatgaaggtttgctggttcaacaggtgcagcggcacggagaattgaggagatgcgttctgctgagagcttgtggtggatctggaggtagatgttcagagacgaccccgcagggtggggaacctgaccgagtgctgcaatgagtgggtcgggtgtgatgttgtggaagacaagcttagggaggtgtctccagaggccattccactttctagatagcaggctcatgttggcagcagcccggacgcagtctaggtgagagatgatctttaggcgtaggtcatcaggcaaggcactgatgcggtcttctccactggtgccgcgccgtactcgtgggctccgacggagaagccccgcacggcagcaaggcgaagccaactggttgtatcgacactcctcgcacgcaccaccatccgcatacatctcgtgtatgcacccctaagtctcccagccaccgagctaggcaccgggttgggtgggggagacggtggcgacctgtcagatctgtgatgagatccgtggcca

SEQ ID NO: 38843 - DNA, 746 bp, Setaria italica
  Peptide Sequence Number=SeqID_104817
tttaggtaaccaagagaacacatactttttcttttctttttacaatgacagaacaaaggaggatgttcttgttacattctttacggcatctgttaagaagtttccacacgatttaaatgttcacagtagactatatacgctcttttcaattaaaccctcaattaactataccaaggttcacacttatccaccatataatacacatcaagcaaaacaacaaccggataatagcaaaagctatagttcgtcttgtgcttgaggtttcttcacagcaaggccattttctacccatgcgtcgtaaccaccttcaatgttcttcacattttcaaatccctgctttcataagcgttcacatgtttcagagaagaagaaagtgagcaatgaaaaataattcagatgttttctttgagatttaatacagctttaagaaaaccccgcatatagtgtgaggcaataataatggtaacagcgtgaacgaaacttgtttgcaccctaacattatgtgatgttggacatgtgctacacaagacggctaccatctaaatctccaaaatttcataccactttctattttacgcaataaaattatttagtttattagaactatggatatggtaaaaatagtgtgaacagagggttcaagctatgaattaattattttccaaaataaggagcaactgctgatttgagtgaagggagaaaaccattccaacatacatgacaaaagataagtgaaatagagattg

SEQ ID NO: 38844 - DNA, 529 bp, Setaria italica
  misc_feature (1)..(32): n is a, c, g, or t
  Peptide Sequence Number=SeqID_104818
nnnnnnnnnnnnnnnnnnnnnnnnnnnnnnnnttttttttttaaagtcaaacaggaccagagaacacatactttttctttctttttacaatgacagaacaaaggaggatgttcttgttacattctttacggcatctgttaagaagtttccacacgatttaaatgttcacagtagactatatacgctcttttcaattaaaccctcaattaactataccaaggttcacacttatccaccatataatacacatcaagcaaaacaacaaccggataatagcaaaagctatagttcgtcttgtgcttgaggtttcttcacagcaaggccattttctacccatgcgtcgtaaccaccttcaatgttcttcacattttcaaatccagctgccataagatcaaaacatgctagttcagaccttactccgcttttgcagcccactactatgctgtcctgtttgtcaaatgtgccgcgacctgctcaatgaacttggggttcttctcccgccttgtgaagtgaagaacaggtagggcac

SEQ ID NO: 38845 - DNA, 645 bp, Setaria italica
  Peptide Sequence Number=SeqID_104819
cgggggttccccgtctcggcgcgcggccacggccactccatcagcgggcaggcgcaggtgcccggcggggtggtggtggacatgagccatggccccggcgccgcggcgcgggcattgcccgcctactcggcggcgctgggcgggcactacgtggacgtgtggggcggcgagctgtgggtggacgtgctcaactggacgctctcccacggcgggctcgcgccgcggtcgtggacggactacctctacctgtccgtgggcggcaccctctccaacgccggcatcagcgggcaggccttccaccacggcccccagatcagcaatgtctacgagctcgacgtcgtcacaggcaagggcgaggtggtgacctgctcggagacggagaacccggacctcttcttcggcgcgctcggcggactgggccagttcggcatcatcacgcgggcgcgcatcgccctcgagcgtgctccccaaagggttcggtggatccgggcgctctactccaacttcagcgaattcacggcggaccaggagcgcctcatctccctcggcgccggcgtccgccggttcgactacgtggagggcttcgtcgtcgccgccgagggcctcatcaacaactggcgctcctccttcttcttcgtccgtcta

SEQ ID NO: 38846 - DNA, 431 bp, Setaria italica
  Peptide Sequence Number=SeqID_104820
aaccaaaacaagtagttagaatagaatagaatgtttggtatggcactgctttccccccatcggaagagtttggagtggatatgatctgcacgttgaggcatgttgagtctcggtctgccaacggattgatggcatttgtgcgttcatgctcccctgtgatatcagagcgtaaggctatggtttacttgctcaagtgtaatttggatgtctgtgaagcaattcaaatggcaaaacaggaaggatgtgatgtatcgatctgtgatgacaatggatataaggcagcagcaaaagccgcatatcatcctaatcctgaggcatattgtgagtttgtcgtgcagtccttgcctgcgttgagatctactgttaggtcactgctgcgaccctctcatatgctgaggcatattgagattcttcatctctctacattgcta

SEQ ID NO: 38847 - DNA, 577 bp, Setaria italica
  misc_feature (48)..(48): n is a, c, g, or t
  misc_feature (546)..(546): n is a, c, g, or t
  Peptide Sequence Number=SeqID_104821
aaactgagcttggtgtgataactcagtgttgcgcactaagaatgttangaaaggaggaaacagtttctgaaatcttgccctaaaaatcaatgctaaggttggagggaggaacacagtgcttgaagatgctctgaacaggagaataccacttctgacagatgttcctacaatagtctttggggctgatgtaacctatccacctactggtgtgggcttggctccatctattgcagcggttgttgcatccatggattggccacaagttactaagtacaaatgcctggtatcttcacaagggcatagggtcgaaatcataaatgaccttttcacagaagtgagagatccagtgaagggcattgtcagaggtggaatgattagggatttgcttgtatcattcaaaaaatcaactggccataagccttgcaggataatattctatcgagatggtgttagtgaagggcagttcagccaagtcttgctttatgaaatggatgctattcggaaggcatgtgcaagttggaggagggctatcttccaaaggtcacntttgtgttgtgcaaaagaggcatcatacccg

SEQ ID NO: 38848 - DNA, 332 bp, Setaria italica
  Peptide Sequence Number=SeqID_104822
ttggatttgacgatgtcaatgaatgcccccaccctgtgcacactagcttacgattacctgaggaagaataagggctatgaagacaatatttttgcattcttccaaaatagcggggaccctgaccccctgattgtgaagtttatcgaggaactcgacaagtgtatacttggctacttctccttccattggaactatgcaacttacataattacccaggttctcactgtggaaggtgtgaccaaaagaaggttcaagaacatggtgttagaggccaccagggaacagagatttgagagggtgacaagaagcttgaaggtcacttaggtttttct

SEQ ID NO: 38849 - DNA, 1127 bp, Setaria italica
  misc_feature (1084)..(1127): n is a, c, g, or t
  Peptide Sequence Number=SeqID_104823
taacgaacgtccatcgaattaggtcgcagcgcagccaccctccttccttccctgcctctcctcctacctaactccgtaaacatcagaggagcctgcaacttgcaacagcaatgctcacactcttttaattgcccgcacttccttcctgcctgcacctagctgcatgcctagctccacatacaggactccctgcacaaccacaagctcaaaacccttcctacctccagttagtttcttcgatccacctgtcgtcaccactaatttcccaaggcaaaatgggctcggagacggagacggtcaccgtggaaggcatcccgttcccggcggagatcaccgtcggcaaccctctctccctcctagctaacggcatcacggacatcgagatccacttcctgcagatcaagtacaacgccatcggcatctacctccacaacaaccacgcgctgctccaccacctgcagagctggaagggcaagaccgccgacgagctgctcggagacgacgccttcttccaggccctggtctcggctccagtggagaagctcttcagggtcgtggtgatcaaggaaatcaagggctcgcagtacggcgtgcagctcgagagctccgtccgcgaccgcctcgtcgccgccgacaagtacgacgacgaggaggaggaggtcctcgagaaggtcgccgagttcttccagtccaagtacttcaagccaagctccgtcatcacgttccacttcccggccacacctggagccgcagagatatcgtttgccacggagggcaaggacgaggcgaagatgagggtggacaacgagaacgtggcggcgatgatccagaagtggtacctcggcggcgagtccgcggcgtctccgaccaccgtccagagcctcgccgatcgtttcgcggcgctcctctcggcggctgcgtgattatattgctgcgactgctaattaatttccttccagcggaattgaactcgtcaaattctgtcctatcggtcatctcgtgtgttgcggcaaattgaattgcgaataattaagactggtttctaagcgatctcgaaaaaaaaaaaaaaaaaaaaaaaaaaaannnnnnnnnnnnnnnnnnnnnnnnnnnnnnnnnnnnnnnnnnnn

SEQ ID NO: 38850 - DNA, 624 bp, Setaria italica
  Peptide Sequence Number=SeqID_104824
ttctcacgatcgagcaagaggagacgagaagcatacgagctgatagcaaagctcatgggtgccggcgtgtgggcggccctgcaggtggccgctctcctgccgctgctgctcgcgctgtggtggcacctcgtgtggcgcccgcgcgccgtggcacggtcattcgcgaggcagggtatccggggggcgccctacacgttcctagtcgggtccatgctgaagacaaagcggctggtggtggccggccggactggggcggcccccatggacgccggtaaccacgacatcgtccccgttgtgctccggccgctccatacttggacggctgaatatggtaaattgttttgtcttttcttttttcacgcagacatacaagtatgaacactcgctctctttgtgaatatggtcatgtaaaccatactcctatacaaacgtcctttgggtgttgattgctcagggagaacattcctgttctggttcggaccaatcccgcaatctgctctactgatcttgagctgattaaggagtgctcacagacaggacaggcatgttccagaaggattacttgatccccgttctaaatttctcatcggcaacggggtcatactaacaaatggagacgaatgg

SEQ ID NO: 38851 - DNA, 387 bp, Setaria italica
  Peptide Sequence Number=SeqID_104825
gacgaggtggagagcttacatattaccatgggtgactttgaggaagcagcaaaactggttcaaccatctttgagaagagaaggttttcttctatccctgatgtcacatgggaatactgaactcttctttcatcaattattctcttcattgccagattacctgccttatcgattaaagccttcaagtcagcaccaacaaaacctggtgtggcccttgctatcttgaataagtcaaattggccttcaagtcgaaggttctgtgtaagcatcttcagtatctgtttccgtgcatgttcatctggaataccaagagatatctctcgatcaaaccttccggccttcgcagagcttggtccacagcatcaggcctgtttgtagctccaatgac

SEQ ID NO: 38852 - DNA, 359 bp, Setaria italica
  misc_feature (351)..(351): n is a, c, g, or t
  Peptide Sequence Number=SeqID_104826
gacatctgatcgtccgcagggcgccgccgtgcgcgcgcctgccagcaccctccggcggatgatcagtagctagctagtagtcccagtatagtttgtcgtgtcgatggcgccatgtgtggctggtgactgtttgaggctgcgtgcccgcctgaagtgcgcgcctctgctgccaccactgttaattggcgcagtctgtctaggtgtcgagattgtttctttcaacttctttctacctcctgttaatctctgtctgcagctacctgttcttgtggctgggaatcttgtgctgtgtgtttgtatctactacgtagtaatctaccagtttagcttgcttagtttaaacgtaaaaanaaaaaaaa

SEQ ID NO: 38853 - DNA, 748 bp, Setaria italica
  misc_feature (748)..(748): n is a, c, g, or t
  Peptide Sequence Number=SeqID_104827
aaagcatttggcttggccttgttgccattccttctacatttctactggatgaccttgatgtggaagttataaattggtaacgtggacctgttataaatttggcaatgtggctgacattctgtagcacatccagccatcaacttgtaacagagtgatggctaacgtggatggacatgacaccgttccttgtagcaccagcagacaagtaccagttcaccatcttctgtaatttgtagtacttttgtctggtggctcctcattctggatggaaccaaacaggcacaagttgccagttttattttcccttgggaactgatgttgaggtttagctatttttagcctcgctagtagttcatataaagcattccaacaagtaaatatatcaataaggctgcgtttttttggtatcatatttcttgcgttatcttagtatatctcgcacatctaaccttataaaaaatagtgaatatgatttctgcctttaacatagatgtaattttaatctataaatctgtatattcaagtgtgcaacctttttttttaaaactaagtgtgcaaccttgatatgtcccttttatttatatcctatatatggttggatctcatatagtatttcttgcagagttttcaactaattcagattcacttatatgtctgtcacagtttcattgataatacatgggcgcttacatattttgttccagtgcacataatctgtagaattatgatattttattattcaaaaggn

SEQ ID NO: 38854 - DNA, 415 bp, Setaria italica
  Peptide Sequence Number=SeqID_104828
aatattgtttgctaatgccgaagattcagattaagtggtcactgacatcataagaagaaaaaaaaatacaggatccttcttctataaggataattagagtgtgcagtcattcatggtttaggtatttgggaaacatggggatcaagaattacctcaataaaaatcgtcaacatgcaagatcaactgggtaaaattgaatacaaacggctaagatatgaatcaggtgtaacagcccatgggccgggccacttgggccaaaagtggtgtgcgtgcgtgctagcagtgctagcagcagcacaggctttagtgccatactgctagatatgagtgggttagactaggttaaatagccggtggtagaaaactgtgtaactcagcgaggactagcaacaagaaaagaagataatgttccaag

SEQ ID NO: 38855 - DNA, 447 bp, Setaria italica
  Peptide Sequence Number=SeqID_104829
acgatccagtacctctccccgccgccgggctcctggccgtacccgacgacggtgacgccgtggttcagcttggtcccgcacggcccgttgtacacgcccttcctgtagtgctggaagttgaccccgccggcctccgtggtgatgccgccgttgtcggcgatccaccgcagcgcgcggtagctgatcccgccgtcgcagccgtggtccagcgtgtcgcagtccaccagctcctgctccgacagggacaccagcttccccgtccggatctggtagatgccttccaccgtcgccaccgtcgagaaggcccagcacgaccctgcacgatcgatcgatccggtaaccgactcagagtcagatcgcgggagggcggccggccatggagatcagagcacatgcgagcatgtggttaggagtgacaggcatgcatgcatgtggtgagcaaattaa

SEQ ID NO: 38856 - DNA, 909 bp, Setaria italica
  misc_feature (1)..(5): n is a, c, g, or t
  Peptide Sequence Number=SeqID_104830
nnnnntgatagtgacacaatgcctaccttcatttgcaaatcgttttcacgcacataagttcaaggcttacacgtacgagttcctgcaaattattactaattattttttaaaaaagagtactactggtacacgtaatagcaagaaaaagaattttttttggctcgatcataagttttgactaaaatgaaaggaagatgtacatcgtgtcacatcagcgggtaggacgggcggatggcgatgccgcagagcccctccggcttgccgtcgacgtccttcctcatcctgatgtacccgccgtcgccccaccgctcaccccacgagttcttgacgatccagtacctctccccgccgccgggctcctggccgtacccgacgacggtgacgccgtggttcagcttggtcccgcacggcccgttgtacacgcccttcctgtagtgctggaagttgaccccgccggcctcgatggacacggccacgggctgcgccgccacggcgttcgccagcgacgcctcgctccgggtggcgacccgccggagccccgcgatgctgaccgcgttgtgggagagcttggccgtgtcgcagacgcccgtcgccgccgtgtacgggtagtcggcctccgtggtgatgccgccgttgtcggcgatccaccgcagcgcgcggtagctgatcccgccgtcgcagccgtggtccagcgtgtcgcagtccaccagctcctgctccgacagggacaccagcttccccgtccggatctggtagatgccttccaccgtcgccaccgtcgagaaggcccagcacgacccacatcggccttggttcttgaccggcgtcacggcgccgctggcgcgccaatccacgctcgccggcgcgccggcggacaggttcacgtacgccgtcagctgctgccccgcc

SEQ ID NO: 38857 - DNA, 623 bp, Setaria italica
  Peptide Sequence Number=SeqID_104831
gagtcgccggcgtcccggcggtgcctggtaagcccagatccccctccgctcgctcgccgcctcctcctctcgccgacgcgcggtctggtaacgcgggcgcctgttcgggggcgtgtggagttgggccgctgcaaatcgggctgcggttcggttccgggggaccgcgggtgggggtttggttccggtgaattccgggccgattcggggggcgctcgtcgcggtgggttagctgaggggggttccgttccatttggtgggaaattggggtttctgggtgccggaattcggagggatttcggagaattggctccgcacgggtagcttttttttttgtctctcttctggtttgtaggttgcgtttttttcccccgggggatgattggtttgggcgtggtttagatcgtgatttgagtgggggtgggacgccctgtgacgaattgagctgattgacgtctgctttgctggagaagcgaactgggttgtgttgtgtcgttggattggggtttacttttgatcgaggtgggggaatggggggctacttagctgggactgttctagcggctagcgcactgagccactgctgctccaaagatgggcctccacatggagtgaaccgtggctgt

SEQ ID NO: 38858 - DNA, 466 bp, Setaria italica
  Peptide Sequence Number=SeqID_104832
gcgttcagtagatcccatgctgattatgaatggtgtgaaccaatcaggaggtggtaaggctgaaggtgctagtgtcttgctaaggctgaagctgcagagaagtctgtcctggtcgtcctcatcactggggcacgcaagtcacctcgcaatcatttcctagttgttgccttcttcctatctgttctactgatgaacttaggacaactgatagaccatgtgaataaaaagaagtacctgagctttttaagggctgtgcagtgaatcatgaggctagaaaccagagcagtaaaaaggatgatgtgtgtgatgctgaagtttttgctcaaaattcgtgggtactacagatgattgttgtgcctggacatattaactttggggttaccccagaagtctggcaagatgatatacctctcactgccaatatattatgcatcaacatgcaggggacattccaagtcatagcagt

SEQ ID NO: 38859 - DNA, 610 bp, Setaria italica
  misc_feature (605)..(605): n is a, c, g, or t
  Peptide Sequence Number=SeqID_104833
tggtcgggggcggttgattggccaccgacgtcgagagcgagcggcggatcctgtgcctgccgctgtgcctcaagagcaagcgcaagtactcctgcaccaggtgcctccgccgcctcgtcaccctctacagctagtggccggctagcagcaggagcccgctgattattcacctcgatcgactgctcgctcaatcgtcgtcgtcctgatgcttagtagacaagttaataattagcttcgtgttcttgggtttcttgaggctccggttgaggccgctaagcaatcatcatcaggccttgattcttgatggctgatgtgttctcgtagctctgaaaaggactagtgcgatcggtgcttttattattagacttgtagttggcagtaattggtgaggaccagtaggcagtagcaagcaggggtctcgtcgtatggcgaccggcgccggcagtcagcagcggtggcgactggcgagcatgtgggaagagcacgtgatgccgcgccacaatccctgctgcagaatgtaaattacctcgacctcgtctgctcgtgctacggcatcttgtaaccctcggtaagtttcacaaggttgcagagagtgacttttcggnggaac

SEQ ID NO: 38860 - DNA, 552 bp, Setaria italica
  Peptide Sequence Number=SeqID_104834
ctaaatacatccatagtgaactttttatcaataaaacagtgttttgctgaatgctttccaactacatgagatcatgttgctgccttttggtccattataagtttctacaaagttaatgaatatccaagtttttcattatcttcataaggttcttaagttgtaccttcgattttttttaaagactcaaccaatggacatgagctctttccttattcatgtatagggatatatttgctcattacatttccactgaatccaaagtatttttttatttgattccaaatattttgtcaaagaaatgcctcttctatttttaaaggaaaatatcattatcaacatgtctctgttacactcgctgttgtatcccatcttgacacctcaccttccactcaatcttgaagattttacttttagcagacttaggttccaattctgactagttttcctaaactagtgaaccattgtccacaatattgcaaatttgcaacgaaagttgtcagatagtgttagtcttatgccacacttggtattccaacttattttattgtagta

SEQ ID NO: 38861 - DNA, 466 bp, Setaria italica
  Peptide Sequence Number=SeqID_104835
aaataatcatatgtgataaaagcttgcttggacctgggctacaatctatggctacaaaatggaaatatgatttcacttggcggtaagttgattgagccatcagatcagtcagttgacttctttagcgcagatgtaggattgatgtttataaggagctcagtagagtcgaaaaaagcatggaatgagcatactatatcaagagttaaagcgatgtgtacgtctagtgatttttctgcttccctcgaccagaagaattttgttcctatactgactgaagtgttggcaaacggtgctggtgctaagctaggaaaactgggtgaggagatgagagttatcgaattagggcctaacacctcaaacaaatcaacatcagaaggtcaaagtaatgtgcttttctggtctcacagtatggcttcagattcagttcaaaagcaacttgaaaagatggatttgtggttgattgact

SEQ ID NO: 38862 - DNA, 365 bp, Setaria italica
  Peptide Sequence Number=SeqID_104836
gccaatcccacgggacaccaggcactcccggccacagaacgcgtggccaaccatggcgccagtccatgggctcgacgcgacgggcatcgatcgcggtatgagctagctcaggaggcatcgggatgatccgcgactgagcgaccgccggcggccacgaccacaagccggccgtcaggtggaagacgacatcgcccacctttttgggatcaccagaaaatcttcagctggtggagatcccctggctgttgagaggcttctaggtttcaggggatgtgcgtcctgtcctgtcaggcgatcgtgttcagacgctcctccatcagatatttctctccagattcgtgtgctctcgcgcgcttgttcacccg

SEQ ID NO: 38863 - DNA, 432 bp, Setaria italica
  Peptide Sequence Number=SeqID_104837
aaacccaaacgtgatataaattgtttgagtttggatttaaaagttataaattttttgattgaaaagatatgccgacgattctgtcatcatgacataaaaaatgcttgtacagatgatccaaaagggtaccaattgacatacaagaagtacaatatcacaacaataagatctctcacaaaacctagtagtacataaacatttgaaaaccacaggtggtgtttaacaaaactagaaaatagcatgcaccaataaataaataactaagaagacagaaaatatatgcttgcctgatcttggtaaacagcaagctgaaagccacttcttggacttggccacaggcaccctgggcgaggcttgatttcctcccacttgaaatggtccaaatcaaaaacatgtagatcattgtagtacctcacttccctaagtgtgtca

SEQ ID NO: 38864 - DNA, 1656 bp, Setaria italica
  Peptide Sequence Number=SeqID_104838
ttagtaactcagttttcataatatcaatttttgtctacttgggttcataacgaaaattccctgaacaaacataagtaagacttggagcactcgttcaaaactgccttctgcttaaacactcgtttgagaattaaaaaaaaaactatcttcctgcgctcttctgcttgcctttcttggtgtccctcttggaactagtagacccgctggcctcttcctcagccttctgctcagcctccagcacagccagctcgtcgagtattggtttcagttccttgtatcgagtttcagcgagatcaaaaccatcttttcggagctcctttccagtatgttgagtgtgctcgtaggcagccatttgccagtacatatttgtcctcttgtagaaatctctcaatgattctccaggcactggtgtcctttgagaatcagaaaggccaaggatgaccctgatttgctctatccgagcacgcttctcttttctacgcatggtcttactttcacccttcaggagagacacagcactagacacattcttcacagcatcttcatcagactcttcatcttcatctgtctggctatcacccccctcactatcattttcattatcgtcagcttcatcgtcatcctcctcctcatcatcctcagaaatttctaaccattcagattccgatgccggtatgatacacttccactcatcaagtttgctaaggttaagtgaatatagatcatcaagagtaatttctctatctttcacttccatcattcctccatataagtacagcatatctttccctacagccatgcatgcattgatacgaccattgggtttcaccgcctcaggtggtgcttcttgtgctgttgaatcagagagaacatcagagcttttgcttgacccagctttagtgatgctcagacttttgatcaactgattagaaactccatggacttcaggttgtccttcaatagcttcttctaagtcctccatgacctcatcaccctcattatcaatattagcttctacatcatttgttgactcttttcttttgatatcctttgtcttatttttagcaggcttgtctttcctgagctctagcggataccaacggtggttatccaattggaaaccatacagctcattcataaacatgctcataatgacatcaccttcaacttccatatctaccacaccaccaaaaagaacagcccttttcttgtgcacacacattgaaaacccagctctgggaccaggcggcatcccagccttcttaaccttattccattcccaagtacgaggatcaagagaccacatatctgcatgaactgttcccttttctttgtctgaagaaacttctttgaagtatccaccatatagatatatctgatcttggtaaacagcaagctgaaagccacttcttggacttggccacaggcaccctgggcgaggcttgatttcctcccacttgaaatggtccaaatcaaaaacatgtagatcattgtagtacctcacttccctaagtgtgtcgtaaaaaccaccaaatagcacaatcttgtgcttgtaaagaaccatcctgtgtcctgaacgtgcacttggacagcccttggcaagaatttgctcccattggtttgttttcagatccaacgtccaaaagtccttgtaat

SEQ ID NO: 38865 - DNA, 475 bp, Setaria italica
  Peptide Sequence Number=SeqID_104839
tctttcttctattcttctcaaacgcaacagcctgtttcaactgttcctctctctgtagcgcatattgcaccttattcacatcttcatggcactcgccagaaagtatctgaatcttttccttagcattggctagattctcacaagctctgtcatacatcatcaaagtatccttcagctccttcctcagtgttgctacttcatctacaggttgagactcttcaactgaggttaaggcaacataacgaatttccttgaattggccaatagcatcattatctttgttccattctctccttggtgtctttcgacctaagcttcctaaaaggcctcttctgtggctttctgaacttttaacagcattcgaagaagtgctaagagaactgcagacttgagagcatgagtccgaacttggatttccagcttataattatttttggtcatcagcaagattattcaatgattgtttgtcctgcaa

SEQ ID NO: 38866 - DNA, 337 bp, Setaria italica
  Peptide Sequence Number=SeqID_104840
gagatgaacattcaagcagtgggtttaagcagcggagtccttctaaatcttcctgtttcccaagccgttctgacagttcacagagcaacatcaagtgtcggagagagcagtcttccagtaaatttggaaagattatgaagaaatactcctgcttcagatcattatagtcgggtttgtagcttttgctctcttttttgtacagaatggagcatagggaggtacagtacagttttcgtcttaatcatgtacgcacattatactatgtaccaagtcttctgcaacactggctgattaacgcaacacattagccttagaagctaatatctaatttgaagtg

SEQ ID NO: 38867 - DNA, 1815 bp, Setaria italica
  misc_feature (1)..(86): n is a, c, g, or t
  Peptide Sequence Number=SeqID_104841
nnnnnnnnnnnnnnnnnnnnnnnnnnnnnnnnnnnnnnnnnnnnnnnnnnnnnnnnnnnnnnnnnnnnnnnnnnnnnnnnnnnnnnggttagaagcagctttagatttttttttgttcctgaaactgatcactgaagtagtacaagctgatagcatgttacaaccaggccggaaacaagattttattcactctgagcgctacaccgtggggaggaacaaaaagaagactagagctctctttccaatataaagcatctagttcttttattttggctaattacaaatggttgatgctgatctgccaccccctttctccgtttcatatctcatatttacatcgtggaatcttcctacaaactacaaaaatttggcgattccgttaatcctttcggtggtactggcttcccaccttgtacagaaacctccttctgcaataatgttattgaatcttttctactattacctgaccctttttacaaggaaaaagaggaaccgtttctgaccttttgcacaaaggcagtgcggtcttcctggaaaggcaaaggagagatctccgagccgccggcgcctcccatcaaacaaaatggatagacaggtcagtggcacgatcttccttcggatcattacaccgaaggaggccgtgagtgcatcatcgctcacgaatcggctatccttgtaactgatgttactactgcattgcagaagaagcacctctggctgttcaggagatgcctgcttatgcagccaaagcaggaccggtgatggcatggctggaatgttgcatccgaatcacagctgtagcaaatgcaacaggtgtcatctttttcctcgtcacctgtgtttaggatacgatcttcaccgtccacagccattgtaatgcgtcggaagtaatgagagaactcttcaagctgtgctagctttgcaagggaggcatcccctcggagaacattgctccagttgtagctcagtaggtactgcagcccaaaatggattgttgtgggacaatccatgcttgcaaacactgcaatcacatcatttagctccctatgttctgatgtgctgctgcattccataagattgaggataatgcctacaagaggagccaagatcatagtacgatttgttttctcttgatgctgccctggccgtcttagagtcatgtcaaagaactctgcgttagctgctgatatgatgtggttgagaataaagacaaccaattcagtcaacctccgcaaattcatatctggtcccgcgaggaatgcacaaggaatctctcgggtacagaattccaagatcctcgcaagattacaagatatatcaaaaattacactgcacttcctttgctgcaggtcagcaacctggtgtttatcttgcatctctcggatcgacatggagaactcggtcattgtccaactgagtgtgttgaaaagtcgattgaggaaggaaaagaacagttcttgttcatgaatgcatgtttccctaagtagaacctgaaaagttgcggatgatgaagattcaccattcttagaggaagcaaatcctgagcctttgcagagtcggaaaagtatgttactaacaggaatccatgatctgttgtcaaaagctgataaaagtgaccttggcattctatttatagcctcccgattgttctcaaaaacaagcatgaattctttgtactgtacaaggactgaaattgattgaagaagaagatctttcaagtctggattcactatcctcgtatcgtcaaagtgcttgacaaccagagtgacaaatgaggccagcccttgcttgaggaatactgcaggcgaaacaaaa

SEQ ID NO: 38868 - DNA, 384 bp, Setaria italica
  Peptide Sequence Number=SeqID_104842
ggaacccttgtatagggcccaaatgcattagtctccatcagcttatgtatatcctatatttgtggagttactgtgtgtatattggtgggaagggaagggaaaatggtgtaggatgttggaaatgggcatgctgatgtttgcgacaggtttgcaatgcatctgtgcctgtgggggtgtgtcttgagcacaagggactgctgaatcctggtgcagaataggacctgggatctgaacctgttttgttaaattttcctgaaggaagaacataaagttactaccgaaatacgttaggacgaaaataccgaacttaactaacttaacaaaaaatttaagaaaagaaaataaatttaaggaacaaacaaaactttaactaagtttaaaaaa

SEQ ID NO: 38869 - DNA, 559 bp, Setaria italica
  Peptide Sequence Number=SeqID_104843
ccttcatctacatgggtgaggtggccttctgcagccaggagtgtaggcagcatcagatgaacctggacgagctcaaggagaagaagtgctccactccgaccggcggcgggggcagtggcggtggcggctcagacccgtccggcaaaagcagcaccgtagcggccgcctagcatggccagagaggaaaaatgaagtaaaattttggaacccttgtatagggcccaaatgcattagtctccatcagcttatgtatatcctatatttgtggagttactgtgtgtatattggtgggaagggaaggaaatggtgtagatgttggaaatgggcatgctgatgtttgcgacaggtttgcaatgcatctgtgcctgtgggggtgtgtcttgagcacaagggactgctgaatcctggtgcagaataggacctgggatctgaacctgttttgttaaattttcctgaaggaagaacataagttctccgaatcgttggcgaatccgcttctcttcaaaatttgaagatatttggcacaacttttcttcttataataaaacttagtttaaaa

SEQ ID NO: 38870 - DNA, 597 bp, Setaria italica
  Peptide Sequence Number=SeqID_104844
cgttttttttttttagttttttttttttgttttttttttgttttttttgttttttttttagttttaatcaattgtacaatatatggaatatcttctgttactgaggaaatacaatatattgtaaggcgaccaaaattccacaataatcaaattgatatactagttacatcattttgaaagaatgctacacacattgccagctcttggatcgctgccaaaattggtctgatcaagaacacatccaatgacagatgtccctctagccttctcttccacatccaccattacctgagcatggtagaatccaaatggatgcaaaaatgttgatttcaccacggacgtcaaccaatcaagccaagcatacacatgaagtgttagccatggtgccacaacccaccaataccaccggtcaatctgagtggatcttggccatgcccatctcacttatttccctatgacactatgaacagatacacctgtgagaaacaaaccgatgttctttatcacctgacagcatctgaattgccagccctcatcatctcaagctcctcaacggaggcaccctcctcatccaagaagtccaagcttgatgaccgg

SEQ ID NO: 38871 - DNA, 727 bp, Setaria italica
  Peptide Sequence Number=SeqID_104845
ccgtcccatcccatcttgtctccaaccaaacgcaccttaagtcttcagttgagacacggcatcagtgcctacagcttcagcacaagcccaattggactatgatcgctgaacgatacatctggtagaatgtacgaatcatggaccttgtccacaatagattctgacgcgagaaagtaatccagtctccagcctttgttggaaatgcgctggttttcaccccagaaggtgtaggccacagcatttgggtgctgtttccggaaagtatcaacgaggcctttgcttgtaaggttctcctcaaatgactccctctcttcaattgtgaaacctgcagcctcagtttttgcttgaggattgtgaatgtcaatactttggcgagcacagttgagatcaccagcaacaattactggtttggaacattccagtttctttatgaagtcactaaaacacaaatcccagtcattgaccctgtaattcaatctttttaaaccacgtccagaatttgggatgtaagcattgatcaagtaaaaaccatcaaactccaaagtaataaccctgccttcctgatcatgggcgggtatgccaattccatactggacagagattggttttacccgtgaaatcactgcagttcctgagtaaccgagccttgcgacactgcatgaccaatagctgttatcgaagtcttgtaccaggttcttaaaatggtcaacattgccctccttcaagt

SEQ ID NO: 38872 - DNA, 406 bp, Setaria italica
  Peptide Sequence Number=SeqID_104846
aatttgattgcgccctttacctgtgcttctttcagtaaagattgctattttctaaatacaacaccaatcaacaacaaagagatttgctgtgtctgacaagccaatctataagaagagctagcacaagaacacaagcaaatagaacagtcatatagaaatgggggacatatccagtgaaaatggaatactttttttaaaatggtggaaattcatccaaaagtgcactctaatgtttcaaaaagatttgaacctgggaacatccatggctcatcttgtgatgtactttgtcgcagaagttgatcttcaaattcgttctagattaattcatacaaaaatgacaaattacttatcatgtgccaaatttattttttttctgaaaatacaaagtatggatatagaatttttc

SEQ ID NO: 38873 - DNA, 690 bp, Setaria italica
  misc_feature (663)..(663): n is a, c, g, or t
  Peptide Sequence Number=SeqID_104847
ttttactaaagttctttaaattgaaatccatcatgagattaagcttatatatgagactagacatcatgtgaatgtaaggtaaacattgttcttcaaaaccacaacatagtctgatagaagttgaatcggatcacacacacaactgataacataaaagaagaccacacatggtcatatctaaatagtaatgactagaaaaccctatatggtgttcttgtagtcctttttatttgttgccctcgacagctcattaggtgtaacttagaaggcggggcatgtcaacaacattaagaggctttaggacatactcctttgccccagcatccaagcactttttcatcctctcagggatgtggtcagaggacatgatcaccacagggatgtgcttcagcttaggtgattccttcacctccattagaagatcatacccagtcataccaggcatacaataatcagtcacaatcaacttcacatcatgttccctatttagaaactccaaggcttgatttggaccctccataatagtcactcgagcattgcagttctttaagagttgggatgcaacaagacgatcaataaaggaatcatcaactacgagcacatgaggggcatcagtggccatggtactctcaacactacttccgcttccttcctttggggaanagcttgcaaatatgtgatataggactg

SEQ ID NO: 38874 - DNA, 415 bp, Setaria italica
  Peptide Sequence Number=SeqID_104848
tgttttcatcttttggcactatactatcatgcaaagttgccactgatccatccactggccagtcgaaaggatacggttttgtgcagtatgagagtgaggagtccactcaagatgcaattaataagcttaatggcatgctagtagatgggagaaaaatctttgtgggcctacacatgcgccgtcagaacagagaagtcaagttcacaaatctatatataaagaacttgcctgctgaattcaccgatgatgatctgcgggcaagagtttgcaccagttggtgaaattactagtgttgtgatcatgagacattctgatggtgcctccaaatgttttaggttttgaaattttttagaaatcagaatatgttaccgaagcactccaaaagttgaatgacaagtctatagatgataaggtc

SEQ ID NO: 38875 - DNA, 452 bp, Setaria italica
  Peptide Sequence Number=SeqID_104849
caagttggtgtgcaccgaatttattgtcatagttaaagcatgcagtgtagctttactgctatattcagtgccagcaatggagacaatgtccaaatgaaaaggttgtgcctgtcatgctccactatagcgtggtaccgttgcagttaaactagacacttatgctgattttgctcatcacagtaacatccaaccaccttgctacttgcaccatcctatcatcagaaccctgaaagaaggcatattgtttatccaagctccacaaattcagtttcttcctggtcatgtctgcttttacacactagtgcgtggatggagcaaatactatgagcactatcaggacctgaaagtcattaaacacagcttaggcatctcacactgtgtgtgatgtctaaggttttgtaaccactttgtacagtacatcgtgccagtcatttcagcttttcaagatctat

SEQ ID NO: 38876 - DNA, 481 bp, Setaria italica
  Peptide Sequence Number=SeqID_104850
cgcaacagattatacactcggaaaggaaaggagcaaccctgaccaacactataatgtcactgtaactaactgcaatcacctggtgatgcctcactgctctgctaattcagctaccggtagcacctactctgctcatgacccatgcatcttttcaagattgcacagattattcagctaatacttggggaagagatccttgacatggacggtgaagaagtcacagccggcggcggcgacggcggctgtggcggggtatctagcacagcagccctccaggtggcagttgccgtcgaccttgcggaggtagccgaggtcggagcagctgatgcccgggatgacgtggtggccgagatccccgatggcgccgtggtggctgcacatctcgaaggtgaggtcgtccagggtgccctcacggtacacgatgagcccgtcctcctccggggtgaagttccgcatagggcggaacaccttgtcgaacgcc

SEQ ID NO: 38877 - DNA, 359 bp, Setaria italica
  Peptide Sequence Number=SeqID_104851
actaaatttataagtatcatcagtaacaccatagtttgtatccatgtatggagcagtatactgcatgagaatctggatcgtaactgcgtaagtccttttgaaatagctagcagcaaagtttcatcattcaggttaccagaataagattaaacaacaatgcaatatgatgtttagtgtcacagataatatgcatcatgcaagacaagtgaaagtgtttaaaataacacaactgaataagaattaatctttacaacggataaagggcttaaggattacaatgtacttcaaagttgaggttccaccatcggagctaaaactccaattatcagcagaatcatccagaaggattgaacacttct

SEQ ID NO: 38878 - DNA, 452 bp, Setaria italica
  Peptide Sequence Number=SeqID_104852
acagggtgttcactagcttcagtgttgatgcaaatttcactttagcttatcttgaatttctgcaacaacttcgctcagccatgaggattcttcttccaatgttttcatgatttcagccctttgatatttgtggaacttttgaagttctgacaatccatttctcagaaatccatcatacagtgcctgtctcttctctaatatccttgcatttctttgcaaatgttgttcaatttcaaggcccatcctcagattgctttgaagcttcgccattttagctttaagtgactctttctcctcttcttgagatgcttcaaagttgaggttccaccatcggagctaaaactccaattatcagcagaatcatccagaaggattgaacacttctcttcaaaagtaatgtttgaaggacattcacagtctctgcaacgaaggtcatagaattttaaaaaacc

SEQ ID NO: 38879 - DNA, 2694 bp, Setaria italica
  Peptide Sequence Number=SeqID_104853
ttttttttttttttcttttcacatgatctgtttgtattaccacgtgataatggcctccatcaaatcaaagcacgtggctacagcaagcgctacaagaatcagctaccagtcgtggtaacaaattaatgatcatcatcataactacgagatctgtacaaaagaattgagatgcacaactcttcttgtaaaatgaattttgtacatatggttaaccttctagtctaccaaccgtgccttcctccatgtgtttacatctgacactttctctaccaatcagttgaaatatgcacagcaaatcatcgactttaaggattatattgcatgcttctaaacaaccaggtggtggagaaccaaaccttacatcttggatctcttacttcttcataagaaagctctccttgagaacctcagctgcgaatattagtagttccaccatctccatgcccgcagaagaaagagggtctgctttctcagactttgattttggtgaatcagatggatcgcagagagcttcataggtaattgcatctgatgaatccccagaccagcttaccggaagaaccacactaagagctgttttcataaggtttgcttcggttataagactgttcaaatcttgaaatgtactctccaaagaactagctgatttgacatcatcataggccttcaaaagcacaatatgcagtctatgcactgaagaagttagacgttccacagtaccaacaccttcaagaagagtagcattttcaactcttaaccttgcaatatccattaagtgctctttgcaaactgattgatcatttccatcagagctcccatgtccaatattactgtttctcatccagtgccttaaagatgtcctcttcagcatatttttcagcatcccttgttgatcatgcccaggaatgacttttgatgaatccccagaaccatgaccttccttcatagcagagccctttaattgcagatattcttctttcacttttgctaattccatcaggaccttcaccttttcatctttgacctgagataagttcttctgaagatcctcaataacaatttggtctttctgtttttctaataggtatctttcttgttcctgtgagaagagcataagtgcttccatcttctcctgtaaggcttgtgcaagtgctttagattcatcaaatgatatggaattggaatcggcaggaaaatcactcttagggcttgtgccagtgctaggactgatatctgtagtaacatgaacatctttacaactgttgtcacaacattgcttctcgtcgacagggtgttcactagcttcagtgttgatgcaaatttcacttagcttatcttgaatttctgcaacaacttcgctcagccatgaggattcttcttccaatgttttcatgatttcagccctttgatatttgtggaacttttgaagttctgacaatccatttctcagaaatccatcatacagtgcctgtactccaaaggaaactgtctcttctctaatatccttgcatttctttgcaaatgttgttcaatttcaaggcccatcctcagattgctttgaagcttcgccattttagctttaagtgactctttctcctcttcttgagatgcttcaaagttgaggttccaccatcggagctaaaactccaattatcagcagaatcatccagaaggattgaacacttctcttcaaaagtaatgtttgaaggacattcacagtctctgcaacgaaggtcatagaattttaaaataactttcaaggaagattctgtctgtgcctccagttctgtcagtttcctctgcaagtcatcgtttaagtgtttctgattgtcaattgcagattgatattctctcttcctttcctcaaagtcagcaaactttttcaacactgcttcctcccgctctttcgctttctcacactccattaatgaactgtcccgttcagcaaatgcttgagcaacactgctctggaaaaaccttacttgcttttctagatccttgttctttgatagctcagcaccatgtaactcagcaagctggctcttaactcgataagcttcagcaagctcctcttgtaaattttgattctctcttaagcaaccatttaacttcttctggaggttctcaacatcctgttccaaagctgcagtcctctgagaaagcattcgagttgcaactgaaacataaccaggcccagtttgttgcatacataattgttcaatatcttttctgagttcatcacgttctcgctggagttcttcaactcgacgagttaagacttcaacaagatccactttttcgtccatttcatattgtagcccttcaacacgacgtatcaatacttccaaagaattctgtttttcatccttttcgcgctgtagctcctcgacccgacgaagcagcgcgggggaatctgcagcttcgtccattcccagcccaccccaggggccctgcttgggcggggggaagggaattgggactcgggagcacaaatccgcaacaaattcgagcgcgggcacgcctgaaatacagcgagacaaacaaaatcaacgttgaacgcaataaacaaactgaaaacacgcaggaagattcgattgaggttgcttgagaatcagggaagcgcgggacaaccaaggggggcaagtcctggttcccgacggggagccgaggtgtgcggccgtgcgggcttcgtgc

SEQ ID NO: 38880 - DNA, 658 bp, Setaria italica
  Peptide Sequence Number=SeqID_104854
cggtacgtacgttctttacgtttagttttttttttttttttttttttttgaagactttaaagccatggatcactgtatacgaaacaatgtttctacacggacccaacacgaacgcgacagtttattagcgcagcatagtccaccgcggcacaccacgtcgcacagcagcgcaggacacacaattcagacacgcacaagatctctgcatgaaaacattctgctactactagaagtgataacaggacacgatgacacgacacgttcgccatgcagctgctcttttattcagaagaaggacgacgtcctgcagcaatccgctacgcacgccggctgctgccgcggctgggtgcggcggcgggctcctcctcgtctgccggggtgacgacgaggtgctcgtagaagaagccggagaggccggcgcctaccattggccccgcccagtacacccagtggttgctccagcggcgcgatcccacgatcgccggaccgaacgcgcgcgccgggttcatcaccgcgccatcgagcgcgccgcaggccagcacgttggcgccggccaggagccccacggcgagcggcgccaccgcaccggcggcgcggcccctcctcggctccatcgccgtggcgcagtaggcgtacaatagaaggaccgaaacgacca

SEQ ID NO: 38881 - DNA, 631 bp, Setaria italica
  Peptide Sequence Number=SeqID_104855
gcgtcgccggggctcgcggtggtgaccgcggacgaggcggacgcgggcgacgggtgcatggaggcgcattgggtctgggggcgccgcggcggccgcggccgcccgagccgcgctggtggtggtagtagtagaactgctgctggttcatggcgatggccttcttcttgagcttggtgttccagtagttcttgacgtcgttgtccgtccggcccggcagcttggacgcgatgatcgaccacctgctcccgatcgagctgtagagcgaccagatgatctggtcctcctgctccgtgtagccgccgtgcttgatgttcggccgcaggtagttgagccaccgcaggcggcagctcttgccgcaccggttcagccctgctttctgcggcagggcgatccagttgccaccgatgccgtggcgctggacgtagctccgcagctgctcgtcctcctccggcgaccagggcccccgcttcacgctcgccttgtcgcagcacggcgcgcgccccatgtccgcggcggccaagagacgagcaagcgatcgatcagttcgacgcggcgcacgcagggctggctgcagcttatatgctgcagagcagagcctctctgacctgacccgtagccgtacgggtgcgca

SEQ ID NO: 38882 - DNA, 246 bp, Setaria italica
  Peptide Sequence Number=SeqID_104856
gcgagatctctcagccctgcctcccccgtctgatctgcaggtaatctcccccaactgccttgcgtcaggtccagcacggtgcacgacgatgcagctgccaatctcgcgcgccctccctcaacggcgacgatcccttgcgctcccgccactccctgtcgcttccatagccgtgggctgctgcaaagcttgtttcttcttttcccaacagaggggtccacgtgctgacgtggccagagggtccacgtg

SEQ ID NO: 38883 - DNA, 1850 bp, Setaria italica
  Peptide Sequence Number=SeqID_104857
cgtttagcaaaggaagattttcaccaggaaactgaatcatcacactggaacaaaggcttcataagttcctatattactacctgaacaattatattattcctcggagacatcggaagtggggtggattacaagtagctgagcaagttcactcaccccaacggtaaaaagaaataaatcgacagggaaaaaacagttagccatctagttacagagagagagcccaaaaaattaactatctagcaggcagcacagattaacccggaaagcaagacaacctcttcctcttcgtgctcttctttggggtcaagtccttttgcaaactgccattagaatgaggaagaactaatgggctggtgcgcttggcagctcttcttctcccgctccttcttgtccactgaatcggcaacttccctgcaacttgggcgataccatcagaggtggcaagctcagctatgtgttggatcctttcctgcatttgcatgacccatgctactgacaagtcaagcgagaacgaatcatccaatggtttttgccacagaccaagtaggacatgctgaaatgactggaatgatagagagggctgaaaatccttgcgtgttccgcacatcatgttgacctttagcacatgcttgcataggttaccctgcattgaccatgagcaattgcagagagagaattcagaaccaggattccatacggttcgcatctgacttggatccttctggctgactacttttgctaaaagaggctccttgtcgtcaaagataacagcatcatcaggaatctgcaatgccctttgccatgatgtggatgcaatatagtctgctttcacctctggaaatgatccactctcatctgagaataggttgatccaatagctggaatggagctctgtggtgagcttgtgcactaaccagtccacccgttggagagcatccagctgcacatcatcgtatgcttttaacttcagcttcagatggtaagcttcaatggcaccacatgattcctgacttgctaatggtagatttctaattgagtcaatccacatctccaatttgggaacccaaaatgacttgaaatattttatgaaggctgtttgatcaacaaagtcttgaaacaactgccctagggcatccatgggatttttctcactccagatattgtatataatcttgcctagttggataaaaatttcccgctgtacctcaacattgctgcatttcttgattacatttttaagccaggttctcctgatgtgccacaaagagaacaaaaccgggcaggcaaatacatccctgattgggtccagctctgaagccgggtcatcaatgataaacccaccaattctccaggtggagtctatagaatgtattcgatcggtaagtgccctcatccatttcaatgtatccttctttgcaacagagcgggttataatccatgcaacaggaagagcctgctgccttgagtcaaatacaaggagggtgtgcaacggatactttagcttgcttacaccaaatgaggaatgagaagccaaaagactttgatgaccaaagcgcatcatttgctgcaattgccattctgtctgaatccccagaatgaaggcatctgtctcagttgaatcctggtggaagaatacagatttcttatttctgtcaacccacattctgatgctagcttgatcatctagatccagctcatgtgtagacctcttgatgatcatccctagcttctggacatactgggaagcaaggctatcaaccttggcatctgagctacagtaccgctgtatcccttctatatgcgtctgcagtatgttctcttctggaacaccgagatagatcaatgacatg

SEQ ID NO: 38884 - DNA, 419 bp, Setaria italica
  Peptide Sequence Number=SeqID_104858
ccaaacatttctgatgcccgcaccaatgtcaagccacatggagattgctccagccaacgccaatacaaccacacaaaatcaagccaaatgttttctcacaagagaccaactaccttctagtgtctcttcagaatctgcagcttcccttggagcaggaccaaggggagtttgatccatcatcgggatctgcaggggactttggctacgatctgggcgccctgtttgcctcgtgttggcatctatagcaaaaccatatgcgtggaatcagaaatgtcaacacccgcatgcaataccaatgctcatgtgcattgcaccgtgcacagtttgcaataagatgaggggcgctaccactgccacatatctcacacaccacttcgccctccatgatgacggagatcgcatcattctcgaccaagccc

SEQ ID NO: 38885 - DNA, 431 bp, Setaria italica
  Peptide Sequence Number=SeqID_104859
aatacctcaatacccgaaccaattaaaagagtctcaagatttggcataatggacggaagctcagcacaagcataacacaccacatctgactgggcatgtccaatttcttcattttcaacagtagtccaagtgaaagttttatattatctccggaaaagtcaataattgagatctttggagctttgcactctactgtctgcaacctatagcaatcaagaacagtcaggcggctgagctgctgcagcacacaaggcatcttcagaaaaatgatctccttgcaactatagagctccaactgctccaaagcaaaggagttggaaagaaggcactctaattcatcacccgtaatacgaaccgaactcagattctcaagggaccaagttcagatgtgggaatgaaaaaacaacaaagtagtacaaagttagaaagaa

SEQ ID NO: 38886 - DNA, 606 bp, Setaria italica
  Peptide Sequence Number=SeqID_104860
tattgttttgtggttcctttgatatgtattgttgctcctaatcattcatttgcctatgtgggaacaaagcgacgagaacctttttggtgtgttctcgttcgtccgatttcagtgcgatctgaggcaactttctcggggaatcagccgctagaacatctgtgatcattggggaggtgattccctagcaaatcccccagtcaagtctgatgattttgatgttcctcccaaattggatcttgacctagggtgttctgaaattcttaaaatcggtgatggattgctgatcttttggagtttttcctcttggatccgttttctattgttgacatgagcaagtggtttaatttttgcgtgaataggagctgatttgatttgagttttggggaattgacggggaattcagactgttgtttatgtgctgcccggctttgaaaatttcaccagctgcacctttgtttcaggtgttgtttttattcttgaggagagcatcacgtgatttcctacagccacagcttagtttgtagagcttccgtttgattgttttgctcggcagctgcttcaggcctttcttcaatctctcatgcactcctactcttagttcttttg

SEQ ID NO: 38887 - DNA, 348 bp, Setaria italica
  Peptide Sequence Number=SeqID_104861
agcaaagtgaaattcctgagaaacctgtacagaatctttggttttacacttaaagctacaggcaaaaattttcgtctgggcgtgacgagaacccgtggcaggaagcggccggcgttcaccagaaggcacgcttccggcggaaccgcctggccgtggcgagcaggccgacgccgaggcagacggcccacacacccatctccatcgcccacctcaccgtctccacctcgacgtcctcctcctctttccacgccacggcgtcgtcggagtcgtccccgaccacctcccactcgtcatcgccgcatgcccccccgcactggcacccccgtccgacgtccgtggcctcctccg

SEQ ID NO: 38888 - DNA, 379 bp, Setaria italica
  Peptide Sequence Number=SeqID_104862
accttgcaatggcttcaaatcttggttcatcaagcaaaaggcatataaaccgaggttttgcattcgtgcgattttcttctcactcagtattggtcaatattgttgcctcttgttttgtttttttaaaaagcttatttggacaaacaatcttatgcaaataccaagatatgtgcaaaattaccttcaatctatcctcttaagtttctattgttgctaatcaatgaatgactctgcactttctcttcctgtgcccttgctccccaaccaaatgccaactcgggtaactttgtcctaattcagcataagaaatctactactcctactgccatattcactagaatacaatccctgatctacagctacaatccacagccagtga

SEQ ID NO: 38889 - DNA, 958 bp, Setaria italica
  Peptide Sequence Number=SeqID_104863
tttaaggaagacaaacaaacattaagttaacctacacatgaacctcataatcccaaatcttctacgacaatggatagataaccatataggtcaaccaacccagttctgcagtgaacacaaacattgataggataactggtacgagcatacacgcttcacatctcacaacttctcattgtctgaacaaacttccaagggtgatcgagcaggaactagtccagcatctccagctcgtcctcgctgccactgtccctctctgacaattcgtctggagatggtaggtctgcctgcatgtttaaggcgcacgggcctgtatccactgacgactgcagcagcggattgcccgatgaaacggaccttgcaagttcaggcctaggcgttggccccctgtagacaggcagttttggcaggagttgaagatccctgagcgtcaatctgttgttgacctgcatgaaccttggcgatgggttcgccatcatagccgttggtggagccggcggcctgctaacgccaagcacagtggggccacgaggagcagtggcagcaaccggaggagccgcagcgggtacctgttggctggaggagccctgcaggagctgccgttcaggcgtgaccgttgcggcagccggcggcctgaaaaccggaagcttcggctggcgctgctggtgcacagcagtgggcaaccatggcacggtggtcacagccgcggccggcctcatgaacgggttggccagcgtgatcattgtggcagccggtggtgcaggtggctgggagttgccgtccatagcagtacctcgcacttcgggactgaactccttaatttgccgtgtctactacttgttcgtttcactattggttcttgataacggcaaaaactttgtgcaggtccttcctcaatatactgatatctcccaccagatcgatgtaccagcagcacctcttccgatgtacccttgat

SEQ ID NO: 38890 - DNA, 1093 bp, Setaria italica
  Peptide Sequence Number=SeqID_104864
ttttttttaagtcaaattgtagtagcctagcccaaaatagcagcttacagacatcaggcatcaagcgcacaggggcagaaaaggataaagtgaaccaaacacggccttgacgaatcgcagcctggaggtctacatcagtttaagtgttgcctccaagattccagcagaacaaggtactatcttaatgccagaatgattacaaggtgtcatcttaacctttcatccatctatgttcatacaaaaccagttacaaagtgtgttctcttcaacgtccctttcttctgccgcccttctgttttcccttccctttgtgcttgccctttctcatcttcggctccagtgcatcccttcccgatggttttggtgccgacagaagatgcttcacgtccagtataccattcttgaagtgcccttgcgtggccctaagaactcggttctctggcctagtcgtctgaggtttgctattcttgtctcgcttcctgaaaatcccaagtagcttttcctcttcaattttcttcagttctcttttcttttgattcttaagagctggcttcgctacacttaatggtgtgcggtgcttcttaacggcctttccacccaactcaaccaccttacggttctcgatttgcttccgctccttaaatgtagaagcaccaaagagctcaacatctttcaacagcttcccaatatcaatgtcaggctcatcatcagatgtgtcatcagatttctccaaaactggctctcgatacatatccgacagactcgatcccatgaagctgtgccactcgttgctggccgacggcgccccggcgcggcggggcttccgggagccgggggccgatgggtcgaagatcacctcggccggcgcgttggctggcgtcggcttcggcctccccttcaccatcctctcgccctcctcctgctccccgccctagacaatcctctaaccgatgtcagggcaacggctccggcagcttcacagggtatccttctctcttacggtgacgagcgacgtcggcgagatgcccgggcggcgcggcggggatgggaaggcggcgcgaggtaactgaggagttcgttgcctagggctcga

SEQ ID NO: 38891 - DNA, 362 bp, Setaria italica
  Peptide Sequence Number=SeqID_104865
aagtcttcgatgtcctccatttccatttggatctcatcaggctcaatgtactccatctcatattcttcttcatcttctggcacaaaacaacattttttccatcatgttcaacaatgttgtcgaagggtaatatatgcctttcttccgacgttcgagtaattcactttgaatacaattatctatttttgcagccagttcagctttgctcgctttcatgttaccaatctgagttttcttcctgggtacggtcattaacttctccctcactttcagttgaagttttctcattcttattcgatactgagtctatttttgtcaggcgctgcttgattttatgcacaagtaactgtggccaaaattcc

SEQ ID NO: 38892 - DNA, 1188 bp, Setaria italica
  Peptide Sequence Number=SeqID_104866
tcctcgtcgtcctcccccaaccagagccgagccccgcccccgcccgctccaagcgcgtcttccccacctcggcttgtcccctcccctccaccatctccatgggctcgtcggaggccgacgaggaccagctccttaagagcttcctggcggaggtcagcgaggccgagcgcgacaacgaagtgctcaggatacttggttgcttcaagttaaacccctttgagcatcttaagttgtcttttgattcatccccagatgaggtgaagaagcaatataggaagttgtcattgttggtccatcctgataaatgcaagcatccgcaggcacaagaagcttttgcagctctggcaaaagcacagcagctcctgcttgatccacaggaaagaggatacatccttgaccaagttactgctgcaaaagaagagttgagggcgaagaggaaaaaggagctgaagaaagacagtgcatccaagataaaatccctcgtagatgagggaaaatatgaagagcagtttgaacgatcagatgaatttcagcagcaactaataattaaagtacgtgaaattttgacggagaaagaatggcgtaggagaaaaatgcaaatgaggatatcggaggaagaagggagacttaagaaggatgaggaggaaacaaaagagatgtggaagaggaagagagagcatgaagagaagtgggaggagaccagagatcagcgggtctctagctggagggatttcatgaagacaggaaagaagggacgaaaaggcgaaatcaaacccccaaaacttaagacagaagatccaaacaaatcttatgtgcaaaggccagtgaagcccaagtaagaggactgctattggtgtctgcaatcaaagaacatctgctagtgatcctttgtgccacctgattcgagctgcagccctgtaatgttgttctgcaggctgtaagtttgaaatatgcctttgggactctagtgtagtcggtgaagaacagataattactagtgaaatggctcatattactacctagagtgatattggattgatgtacccatgaggttgaaagttttattggaaagaagtagaaaaatttatgttggaaaagaaccctgctgaagtgaatgtcgaatggctcacctagtcatctcactgtttcttgtttcacctttcaatgtaagtaatgctgatatatgta

SEQ ID NO: 38893 - DNA, 633 bp, Setaria italica
  Peptide Sequence Number=SeqID_104867
cggggcgaggccacgggtcatgaggaggcgatagtgctggtagccgaggaagctgatggtgctggcggtccagagctggacgtaggggaggccgagctccttggcggcgtcgatggagaagcccatgacgacgtcggagacgacgcaggtgacgggcgggtggcccgtggcggggtcgttgagggccgcgaggaggcggcggaaggggccgaggcaggtctccgtggtggacttgcagagggaggggatgtcctgcgtgacgtcgtcgtcctccgacgggggtaggccgtccgggatggtggcgaagcggaagcccgggacgccggccacggccgcggcgccgcgggtccggacgaggcgggcctggttgtactcggtgttgacgaaggtgacgtcgaagccccgggcgtggagcagcttggccacgttgagcatcggggtgatgtggccctgcgcagggtacggcaggcacacggcgtgcggcttgctctgcgcggcgccgccgagagaacccatggtgatctgagatctacggttgcgtggttgctggctccggcgttggctctgctagcactgctgcgttgcacggcgaggctggtagctctggtcacttgagctggtttcttgggtgat

SEQ ID NO: 38894 - DNA, 597 bp, Setaria italica
  Peptide Sequence Number=SeqID_104868
actccatcgatgtgcaaacttgccttgcccaggccgggagcaaaatggctcagttgccttggcaaggtcttccttgccctgacaagctagcttgcccagcaaagcaacctttcaaggcagctaaaacacatccctttttttgcgagtaaggtaaaacacatccttgcccagcaaggccaggataggctgggaaaaatatctaatatatcctgtataaacacaggcaccctcaataagtgaaccaagcaagtcactgccactggaagagggctctcattagttcattatctggtcgatgctcaccatatattgctacatcaccaataacatgtagactacataagtgaaacactccagcagcaacactccatgaatcggctcacatagcccacggcgaaggagatgtctggctgcgtgtgcgtcaggtacctaagcccgcccacgatgctgcggtgtcatgtggcgtcgaccttctccgcgatgctgtcctttgacagcttcagcttctccattggctaggagcttccttgcgtaggcgctctggcagagggtgatggcgtggctgctctgctctacctcgattccaagatagtagct

SEQ ID NO: 38895 - DNA, 784 bp, Setaria italica
  Peptide Sequence Number=SeqID_104869
aagggtgagagctccatggcagctgacgatggcaacctcaaggtgaacatcatcatcgagcgagagcgccgtaggaagatgaagggaatgttcaactccctgctagatctcatgccccacgtccccaagaaggttgaccaggtaaccctagtggacgagaccatcaacttcatcaagtccctagagcagaccaaggcccagctggagaagaagaagcaggagcaagtgctcgtacggcaagccgcggcgtcctccatgtcgatgccgcgcaccgcgcacgggatggcggccttgtcggatggctgggaccccctgcctcagcagaaacctgctgcatcggcggcggcggccgcagggcctcttgagttccagacgtggtcggcaccgaacgtcgtgctgagtgtgctgacgaacgacgaggctgtgatcaacatctgcgcgccaaggcaaccccatatgctgacattggtgctgtcagtcctgagcaagtacaagatcgacgtgacctcgatgcaggttgtggccgacaccgccgagagcctcctcaccatcaatacccgtgtgaatggagctagcggcgagaacccgtcagcggaggacatatacaagctggcggtgtcagagatcgtggtgatgctctccagctaggccggcgtcgccgtcggtgcctcaacaacgtctcaagttgcatcgctgctcatggatctgctcagcttcagcccctctagactggaggtggtcgggaggtaacttaagtcttgtttaatttaactttgtcattccc

SEQ ID NO: 38896 - DNA, 511 bp, Setaria italica
  Peptide Sequence Number=SeqID_104870
cctgagctcaagtgatcctcccacctcagcctcccaaagtactggtattacaagtaagccactgcacctggcctaccagtggtcttttcaaatgtaaatctgatccacctccacttaaaaattcatcattgctgctcattgcttttaggataaagactcagttgaacccagtcatctccagtgtagtcccagtcactcatattgatctttcatttctcccatgggccatccacctccctgacacaaggcttttgcacatgttccttttatttatacctgctatttccagacattgttttggtgctggggatatgacagtgaacaaagcaggcaaacattcctgccattctagagctcactttctcgtggttgctttttggttggaatgttcttgacctttttattttgttttgttttgtttttgttgttttttgttgttttgtttttttctattagggtagttttaggtattttattttatttatttttagtaattaactagtcttttatt

SEQ ID NO: 38897 - DNA, 517 bp, Setaria italica
  Peptide Sequence Number=SeqID_104871
cgagggtcgtcgacgtggcgtaccaggcgctgagggacgagctggcgtggcagctgggcgccagcctcgtgccgccgccggtcgggatgagagggttggacttgtgcgtggcgcggggagacgccggcaagctggtgccgccgctggtgctgcgcttcgggagcggcggcggcggcggcggggatttggtggtgccgccggagaattactggggggcctggacgacgccacggcgtgcatgatggtgttcagctcgtcggatgagacgaccatcatcggcaactacatgcagcaggacgtgcacctgctctacgacctcggcaatggcgtgctctccttccagacggtggactgcagctccatgtgatgatttgtatggtcacggcagccggccatacgtagagagagtacacctgcttgtatgtgtgcacattgcacaccatatgcacgtcaccacgtctaactaaaaaacatgtccgtgcatcgcaaacgaaaaaaaacccccctcatatacccc

SEQ ID NO: 38898 - DNA, 438 bp, Setaria italica
  Peptide Sequence Number=SeqID_104872
ctggccgagagagtgatgatcacacgcctcactgtacggaaatggatcaagaatgcgaccacgccatgatgtacgagcggatctctaaagagaacctggatatcatgcgccagaggctgctggagaaagtggtctggccgaccgatgacaccagcaccggcgattaacggcggcacgacgagactggagctcgcgacgacgccgagcaacgagtatgactgctttcactcgacagtgtactctgtacattgtcttcaggggtttgatttgacctgctcatttcttgtatacgacagccctgcatggatagaacagagcacttgatgtatattctcttctaggggtttatggtttagtgcaatggaccctttttgtccttacaatacaactcagcaaagcatcgtaacaatggtgttccttctgtttgagagaactaga

SEQ ID NO: 38899 - DNA, 1715 bp, Setaria italica
  Peptide Sequence Number=SeqID_104873
aataattattggtgttgttcttaaggtttacattcttcatgttgtaaagcattgcctttttgggtcatgatttgtgtcattgaaatcatttgagcaccaaggaaatacagtaaatccttgatgcaacataataggatcaccatgctgtcttcctcagaaacttgccagcttggttctaattctagcaaccctgccatcgatcagcagaatttacatcccaacaactctactgcggatgaacagattttgcttcccaatgcattagagagcgagagctacccacactatttgctcaatagtcatgaggtgggaatgccaagtggaagtctgattggtcagcaaaatacaagtttgagcttgtgggaatcagctggatctagttctaggggttgcttagttgatcatggtaactttttccaggccaaaggggagcatcttgcgccttctctgtctattggaggcccattaagtatagacaggaggagacatgaagccaatagttctttgccttcacacaacttaaacatagacctcaatgttaatcaggctgatcaatttggctctgatgatgttgaccttgtacacagtaatgggcaatcaagaacaactactgtttcagcccacaggggctcttctctaactgagcgtattcttcatcatggaatatcttcggatgatataggaagttcttcacggaatgcagactgttttgaaggtgcatcaggccaagaagttcatctgcttgacagtcaccatccaacctttaagagaaagtatattgatggatgtcatgcagagtcttctgccaatggaagctcacgcaatcgtcaccaaaataataatactctgttatctcctccaaccacatgtgaaaattcaactatgtccgcttcaacaaactttagtgttccgtatcctcctgtggaacagctaaaccagagtactaatatttcttcgagctctagtttgtctgatcattattctttgtatagtgatctacatgaaaatgaattcgtgcgaagtacacggatgagaataagcccaagcgattatgagcaatcgctgcccaatctatcacctgaggggagtttcaggtgctcagcttatcagcctacacagtcttcatttattccagtgcaacctagacaaatgagctcttctgctggttctcatagtcgacctcatgtgcctgctgttactcaattttcacaaaatcttcaccgtccatcaaatgttagttttggatcaagaattgggagttcttccagttctgctggcaatgggagttcttccagatctgcaatacagatatctgcttcgcaagatcccagtactagcttgatgggaagtgattatcctgagcacctattgttaggttcttctttctttaatgctgattcaacaaatttcttatctgcacctggaagcagaagcaaccagcaaaattctggctccagctctggttccatgcttagagctgctgtaaatgtgggatctcaacaagcccctggattcagtgcatctcagccaagtacatctttgagaggttcagctgatatgtccaggaggtccttgatttctgctggtgtttctcattctagaagctcaagcatcgcattgcagcaccgtggaacttcatccacatcacgagaggttcggggtcatcagccaaggaatacaaagactactacgtagacccaatacaagacaaagaa

SEQ ID NO: 38900 - DNA, 516 bp, Setaria italica
  Peptide Sequence Number=SeqID_104874
aactttggcagctccctctccagcccctccactgcgctccacgaatcagagtctggatcatagcccttaacctgccccaagtaatcgtaagagtacaggattccttcaaccaccgcagctcggcccttccaccccatgtcaagcaccggtgacaccggcgcccacgcctccgcaggtggcgccgcaggatcgtaggccaagccgccacgatccgccaccgcaaggaccttcccggcaaggggcgcgcagccgtgcatccacttctcacggaggtggacagggctggctaaagttttccacttcgcattaggggaggagaggtcgagagcctcgtcccagaagggggacgagggaacgcacccgccggcgacgaacagtacaccggagtgcacgacggccgcggcgaactcccgcgtggaggacaggcgcggaccgatggaccaggatctggctcggggggtccaatatttgcaccgatgcagaggggaccccggcaacggatccgccgactaggaa

SEQ ID NO: 38901 - DNA, 302 bp, Setaria italica
  Peptide Sequence Number=SeqID_104875
ttacattttgtgaacaaggcaattaaaatttaacgagtgtagttccttatattttccatgatccttgcaccatagagtttgtaacgagtgtagttccttatattttccatgatccttgcaccatagaattatatagtaaaaagaactgcagtaaaagcaacctttcttaatgttaaatgcaaactgatccatacgccatattcattgctgcattataattaagaaatgtggcgactactgcagttattggctttcttacttgaacaggtctacaagatctgctgccaacaattatcaaccaa

SEQ ID NO: 38902 - DNA, 331 bp, Setaria italica
  Peptide Sequence Number=SeqID_104876
agatcaggatccggaaggctgacaacgacgctgaggaaggcgggaagaaagaaggcactgcgcagggagttcttgttggtcctgctgggcagtaaagctgagttagagagacctgcatgattcaagttactatatggtgcccagaccgagttcgagcttaagtacaagatcaggatttagaaggctgataatgacgccaaggaaggcactgcgcagggcttgttgtcctcctgggcagtaaaactttgtttagatagaattgcatcttacaagttttacggtgaccagaatccaaattgctctttgcttgaaatggaatggtgtctgtgtg

SEQ ID NO: 38903 - DNA, 523 bp, Setaria italica
  Peptide Sequence Number=SeqID_104877
tgtagcttgggatgtttgtgacaagcacgccttctgagtcctctggtatatcaatctcggtgccatcaacttctaatcgaacttgccatggtaagtccacaaatgccttatcgatgatgctcttggcgccttccctcgcatatagcaccttatttaagaactgactgtaaaacttttcaggattctcttcacggagattatgaatgtcaagtgcaaccttagcatcacaaccaataccaagatagttgttcatgtacttcactagaagtacattatttgatttcttatcttcaaatgtcaccttccatctatccaggatagtgactgctgcatgctctatgtcatgtaagactgtgcggagaccaccttgcttctcaacagcacctaggccacctccccatgataaaactcttgaaagatacattgccagtgccagctggaagaattgcaacaggtggaggtgattcataattttgcttatctatcgcgtcaagaacccaaccaacagtaccatcgccaccac

SEQ ID NO: 38904 - DNA, 335 bp, Setaria italica
  Peptide Sequence Number=SeqID_104878
tccttcgaggagcgcgacgccggccggggcggcggcaccagcgtgcggatccacatgtccggctgctcctaccgctggttccacttccacaggatgttcggctacgactggcacaacaagaagctggacccgtccttcatgaacgtcgccaagggcagggagctgctgcctcgccttgtccaggtgtcgatcgatctcgacaagagaggggcgtgccggggatgctccgtcaggaggttgtccgaccagtggaccaggccggcggacttcccggcgatcaacccggccttcgccaaccggaggaaccggttcatctacgccggcgcccctccagg

SEQ ID NO: 38905 - DNA, 612 bp, Setaria italica
  misc_feature (506)..(506): n is a, c, g, or t
  misc_feature (526)..(526): n is a, c, g, or t
  Peptide Sequence Number=SeqID_104879
ttaactcttaagctttgcagaccaaacaccagaatgatgacatgaaccctggcggctaaatttgccaaagatattctggttgagtgaagaagcatcacactctactacttgtatctctgctggagttgatgctgaaaaaccatcctccgggaggccaacagttgatagtccatgtctcaaaagatatgccaagtaaaacttcgatgatgaagaccgtgaacaagtaacaagaagcccatcttgttctaaaccaagagctgttttgcatctaatgcaactaacgagaagcttttttcccgaaggcatcttttctgagacctcttgtgcactgtagtttctttcaagcttaaaattttcacaccttgacatgctcatatttttacaaaacagctcagcatttctattaagatccccatgctcaatagtaacagcattatcagtacccaattgtgatttgcctggagaattagaacgctctgagtaagcacaaaagctcattggggganctcaaccttctcttttttcncacagtgagaatttacacttctgttgatcaaagactcatgacagtctctgttggtggttctttccggagtagctgctaatgtggat

SEQ ID NO: 38906 - DNA, 358 bp, Setaria italica
  misc_feature (343)..(343): n is a, c, g, or t
  Peptide Sequence Number=SeqID_104880
tgttcttgtggttgtattccttggaaaccagcggcggctgctggctcgcttgcgccgccgtgcattggaggaggagcacaaccagtagcagcgagacggcatacggcatggggagcagacgtggcaagagttgtagctgcaggatgcatgctgggttgcggttgcagcgaaggtgccatggtgctttcaccgtgttcggcacagctggctgccgctgctgcagcagttggcccacagctagtgtcccaattagcagcagctagccacagtgctggactactgtagctgcagagctgaagcgaacagctgcagctacagtgttcatcttttagttcaaaggggngacatgcagacagtg

SEQ ID NO: 38907 - DNA, 536 bp, Setaria italica
  Peptide Sequence Number=SeqID_104881
ggggaacattacgcccaaaatgcaaactgactctgattttcaactgtgaaatttgaacttggccatatgaggcaaggtatcacatgcaagtacatgttttcattttcaaaatccttagtttatctttcaaaaacttgaagaaaacacaatcaaataactaatctttagagattaatgacaacaagaaccaagttgtcagggtagcaaatatatatactatttccagagaagaatatcaaatttgcaaatctacgctgtgctagtatatgctgtgtgaatcccacctatatatccttagatcacagtatcagaaagatggcaaattgtagcaatgagtgtggtttgtgtttgtctcaactttttgttatttagcatctgagttatgattaaagaactatattgctcagcacaatttctgcaacatgatctaacagcacactagatgttggagccactttatgtgaatctttaagctagccaaggccaatagtccatagaataagcggtgtcaacgttttcaactgctcagtctaact

SEQ ID NO: 38908 - DNA, 431 bp, Setaria italica
  Peptide Sequence Number=SeqID_104882
ggcgcgaattggcgtcatgtgtataaggcatttgctgtgatcgagtatcttctggctaatggcactgaacgtgctgtcgatgacatcattgataacaactcacaaattgcaaaatttgtaagtttcgagtatgtagagcctaatggaaaagatgttgggctcaatgtgcgaaagaaggcagaaaatgttctagctattatggatgacagggagaagcttcaacaagtcagggaaaaggctgctgctacaagggataagtactttggtttgtcatcaactggagtaacatacaagtcaagtgcagcatcatttggtaatggcagctactcatctggcagtcgctatggggtcacacagagttcaaaggaagctgacgcatccagggatagctacagaggcaaggaatggagctacagcagtaaagaacaatt

SEQ ID NO: 38909 - DNA, 389 bp, Setaria italica
  Peptide Sequence Number=SeqID_104883
catcaatacatggtgttgttcatctagccttggttgtgagttagtgacattccttggcaatcaatcattcaattttggtgctgtttatcattggattgaatcattgaactattagaatattagtcaactagtgcatccatgcatgctggttctctttacattccgtatgtatacttactataaagaattgagagaattcatttcaattcctactgagagttatacccacgtacccctcacggaggatccactgttcagttgtttccttacagaagattacgatgaggggagattacgatgaggagggattcattttgtcgtaatcccccgttctagatcccgcgagtgcccaagttttaatgacaccgttttagtaactaacctaacta

SEQ ID NO: 38910 - DNA, 1133 bp, Setaria italica
  Peptide Sequence Number=SeqID_104884
atgtcaccattttgcctgatttgtttgcctacatgttgaatatcattcttcacaatactcgcaaggaaaaactaatctatgtgtctatgtgctatttctccttttttttcatttttttatctcttacactcgaacaacgattttatttggatgcctgatagtatggctactaaaatggctggatctgtccaagtggttaaggatgacactgttaaacgcacaccgatggcacggcctagcattggtcgtgaaggaaagccgattaggttgctgtcaaaccactttgctgtgaagcttaatggagtagatgctgttttctaccaatacagtgtttccatcaaatctgaggatgataaggtggttgatggtaagggtattggccgaaaggtcattgataaactgttgcaaacatacagttctgaacttgatgggaaggattttgcatatgatggagagaaatgttttttactgtgggaccacttccacagaataactttgaattcactgttatcttggaagaaacatcttcaagggctgttggtggaagtccaggacatggaagccctagtcaagctgacaaaaagcgagtaaagcgatcacatcttgcaaaaaaattcattgtggccataagttatgcagcaaagattcctctaaagtcagttgctttggcacttcgaggaagtgagtcagaacatgctcaggatgctctgagagtccttgacattgttttaaggcaacagcaggctaagcgaggttgtctacttgttaggcagtcatttttcagtgatgacagtcgaaaccttgttgatttaactggtggagttagtggctgtcgtggactccactctagtttccggactacaattggtggtctttcattgaacatggatgtttcaaccaccatgattgtgactcctggaccagttattgattttctcctcacaaatcaaaatgtcagagatatcagggatattgactggcccagggccaggaaaatgcttaaaaacctgagagttaaagctaagcacaacaacatggagttcaagatcattggccttagcgatcaaccatgctccagacagacattcccaatgaaagttagaaatggaagcattgaagttcaaactatggat

SEQ ID NO: 38911 - DNA, 503 bp, Setaria italica
  Peptide Sequence Number=SeqID_104885
tcccaatggccctaaagtctgccgcgctcgcaatccttctagtggtttcgctcatctttgcagatcacgtcaaatgccagccgctggtcaggagcgaagggcaggagctcgccggaaacggtagcggcaatggcggcggtggcgaggtgtctcccaagagcgactgcaacgagggagccttataccatgggccgtgcctcgagttgatctgcgcggcggcttgcctcttgcagatgaaccgaggtggacactgcaagggtgggttcttcggcgcttgcttgtgcttcgtgtgcaactgatggcgccttcttttgtgtgctatataaagaggaggaataaaagtgacgcgaccgtgtgatcgcgtaatgaaatttctttactaataattactgtatcagtgatttaacaaaaaaaaattactgtatcagtgacgcgttgtatggattaacaatttcgtgactatttcacatgatgttcatgcatggccgttgtacttgttctaa

SEQ ID NO: 38912 - DNA, 597 bp, Setaria italica
  Peptide Sequence Number=SeqID_104886
cttgagaaacaggagatgttaaatagaaagagagaggagcaaaggcgcaaggaaatggagagacttgatcgcgagagaagaaaagaagaggagagattactgcgtgagaggcagagagaagaagagaggttccaaagagagcaaaggcgtgaacatgagcgtatggagaagtttttgcagaagcaatctagacgagcagagaaacaaaggcaaaaggaggaaatgcgaaaaagaaaaagaggcggcaaggcaaaaggctgccagtgaaagggctacggcacgcagaattgcaagggagtatatggaattgatggaagatgagcgcttggaactaatggaattagctgcacaaagcaaagggttgccctcaacgcatcttgacagcgacacattgcagcagcttgattcctttcgaggcatgttaagtcaatttcctcctcaaacggtgagactgaaggtgccattttctataaagccttggattggatccgaggataatgttggaaagcttttgatggtgtggagattcttgattactttcactgatgttctaggtctttctccagttacacttgatgagtttgttcagtctcttca

SEQ ID NO: 38913 - DNA, 664 bp, Setaria italica
  misc_feature (1)..(43): n is a, c, g, or t
  Peptide Sequence Number=SeqID_104887
nnnnnnnnnnnnnnnnnnnnnnnnnnnnnnnnnnnnnnnnnnncccctttgtatatgtatttgatttgatttattcacgtatgatgggaacacacgacgacgacaaacgaaccaaaccacacggaagcacgcatacacgatgaactgactgatggatcacggatggctagctagctagtaggcagtaattcggtagtacgtagtatagctaggtaggaacaagtagtatagtatcctgcatgtctcatggccgcatcatgtcttgggctcttggcaagccgatgatgcgggggatgacacggtggatcaggggcacttgtgcttgccgttcttggtggtcatgttggcgtagcaggggcagacgttctcgttgccggcggtgcccggggggacgcagccgcagcgctggcagcaggtgttgcacgccctcaggcacatcttgggccgccccgacttgctgcaccggtacgagcagctcgcgccgcagtcgatggcgtgagcctgtccatggggagcggtggtctcgacgaggagcaggacgacgactagcgagagtgcgaagagcatcctggccttgcccatggcggcgcgcgcggggaagctttgcttgcttgctcgagagacgcacgcagatggtgctagtgactcgtgtgctttttcgttt

SEQ ID NO: 38914 - DNA, 1001 bp, Setaria italica
  misc_feature (889)..(889): n is a, c, g, or t
  Peptide Sequence Number=SeqID_104888
aatgggctggtttttgatcaagactatgggcaagctctactgcgcataaaaaagctaccatgcatccctttttggttgacaggagatctagacaatcttgaaagaagttgctattgaggatgtcatctcacttcgcacgggaggaaaaattagaacctccctgtacctcgaaaagtgagttatttggggtggtgctgcatggaacaagtgttgactgtgataccagagctgtgttgtgtagtgaatgctctcatggcaagtgctttcttcaggactcaacattgcagatccttgatggaacaatagtcatgcaagatgattgtttcttgtttgtgcgataccctttggtactatggttctggtccaccataatatgccatgggatgacatcaaacttaacggagtggcacatctggttccatggaaaaactgaaagaagttcatgggtggttactggaagaagttgaggaatccaaagttcagcgttgccatataagctcaacttttgtgctatgttctgtgcagtggttagtgttgtggctagtgctgtcatcaagacttgcaattcgaacacagcgggtgtctgatgtagcgatactaggcaagctgatgcgttgtgatcgactaactagatgatacgggatgtaatttgaatgaaacatggcacatcagttgagttgaagttgggcttggttcaggattgccaccggaagaaattggggatagagctgaagtctgcagggcagaattccgcaaggaagttcagagaaggaaccaatatattgagatggatctgtctctgaagtcatgaatcaatttcgataaagcttattctgttttgtcgagcctggagctgctgacaaagcgtgtattgtatatcaaaattttnttaaaagggctaaaaagccttctagcccaaaggcctaagagcagtgctgaataagtaggcatgcctgaaccagcccaactttcaaactcaactgatgtgccatgtttcattt

SEQ ID NO: 38915 - DNA, 446 bp, Setaria italica
  Peptide Sequence Number=SeqID_104889
tatctgaatttaagcaaatctcccttaggcaccattcccggacaaccagtcctgatattactctgtagccagctatccgtatgtctggatcttgttgcagaattgatagaagaagagcctggcaaacaataaagccgaaaaaacatccaactaagcaaggcagaaccataagcaattaaagataaatgagcacactagaaaaggtgttgctactaactgagggggttaattttgaactgtttgctgcagtggtatagaccaagcgcttcaagtactcttcggcttgaccatccagtttcatttggtcttcttgcctatcaacaccacagatgctcccaaaggcgtgtaaagcggccagctgtctacctctgccctgtcggtcaaacgatgactcgacaacatgtctagcaacatttgatgatgtcagcaggaaatgtgctccttga

SEQ ID NO: 38916 - DNA, 576 bp, Setaria italica
  Peptide Sequence Number=SeqID_104890
catgagtcgagtccagattaaatattcttgaaggttacaaaaaaaaacttttatgtactagaaggaaattgtgctttatgcatttgccatttgagcaaagcaaacagatgaaactacagcaaaaatccatagtatgcacttattaaatggataacaggaattaaagtcaaataaagacacttttaaatgtccaaaatgtgtagcagaaactagagtcaaataaagacagcaacattcacaaataacatgcacttagaaacacattcaggtacatacagctttgcaggctaattttctgatgtcctttgagtctgtgagcaatccagttcgaataaatgcaccatagcttggtagaagcgacgctccatatcttgaggaaaatactttgtctaagcattctgtgacagtttcaaccatcccaggtgcatctgcttcactctgcaatgcacctaacagcttaggcagaggacaacgttccaggaactgcctcacagtatcatcactatgcaaccctgcaacaatgaaatatagactcagtctcctagtcagcacatgactagcctatctccgtctttc

SEQ ID NO: 38917 - DNA, 615 bp, Setaria italica
  misc_feature (579)..(615): n is a, c, g, or t
  Peptide Sequence Number=SeqID_104891
ccggtggccgccgacgacacgccggcgccgcccgcgccggcggccaccgtcgcgcgtgtgtgccaggtcaggatccgagtcaagatctggaagtggaccttctagtcacatcgtcgtcctcctaggggccgcattgcaaaagttttcgggtaaaaaaagtggctttacttttttcacgtcgactgaagtttctccagtaggaaaccgaagcagaatcaaacgccggtcgctgtaaattttgtgtttgaattttaccaaatttggcgggggaggggaggaagtggatgtggtgaagtgaaaggaggttatccattctgcagtgtgaggcttgaacgatttgttcatttttttaaagtattttttcctttttcatctccattttcctgttggtagtgcaagtacaatttggtgatctgttacttttaactatgtaatccgaatgtataattggtagtgagatgcaaaagtagttgtactagtactgtactctccccatttttgcgtgtttattcaaatctgcagatgaagtgaacaagctttgttctgaaattttacttagtaaatttttactaaaaaaannnnnnnnnnnnnnnnnnnnnnnnnnnnnnnnnnnnn

SEQ ID NO: 38918 - DNA, 644 bp, Setaria italica
  Peptide Sequence Number=SeqID_104892
aatcgacaacttcattttaacggccagaacttctacatcataagttacatgcacgaattaagatcattaagttacaatacatatgatggtcatcgagatgaccaacacactgctgtgacgaatgaattgaataaatctactttgctatacccactaattccaattgttgccaagagcctcctgtacaaggctcactgcaagtttagaaatcttctaatgagtctactctaccactacaatcacatgatgatacaaaacccatgtaatggactctacaagccaacatatcactggcactttttggcttcatcatctggttgatagccactttcaccctcgttgtcgaggggcggtggcacaccaaatacccagtcgagcacattcaggtacttggaccggaatacttctctttcctgtgcatagcaatgcataatgattgaggtagctatactgaacacgactacatcggctcgctttatctgcagtattggtgggcagagtcctgcatcagtcatgcatgtgaaaaagctctcgatggctctggcaaggcagtacagggatatctcaattcttctgctcttcttctcgataaacagtgccaaacctgttggaaacgtgccaagtataacaagaggggttatttt

SEQ ID NO: 38919 - DNA, 397 bp, Setaria italica
  misc_feature (1)..(44): n is a, c, g, or t
  Peptide Sequence Number=SeqID_104893
nnnnnnnnnnnnnnnnnnnnnnnnnnnnnnnnnnnnnnnnnnnnagttaaaacacagcaagatcatacttttatttattgacgagtcttacataaaattagaagatcatgtgaattcggtacacatttattttctaaagttgctctcgaatacattgtttcaaacttttgtacagtagcacaaagtgataggagaccatgaaaaggggcatctttttttgatccccaacttcatccagtgcaacaggtagccccccttacattcattcatcttgagcttgattggcatccagacttgagctctccccttcatctggaaagtggccatcgatgaagtaggtcgagcacggatacccgcgggaggcggcggcaacggcgcgggcctcgtcggcagagag

SEQ ID NO: 38920 - DNA, 2369 bp, Setaria italica
  misc_feature (2336)..(2369): n is a, c, g, or t
  Peptide Sequence Number=SeqID_104894
cgttcacgagcagccccaactcgagtgaggtgagggcaagggaggggatcccggagctcgaggaggagacggagatggagtcgatgagggagtctgtaaaggcgaggaaggcggtagagagcacagcgtcgaaccggattgaccatgtggatgtcagcgccaaggtgaaggtgtccatggagcacaaagaggttgacattgagagtgtggatagtgcttcggtacttgaatcaggggaggagagtgtgtgcagttgtgattgtgaccatgtcaatgctagaacaggaggaccggtgccaccaggtgatgatcaagggaaggtgaagaaggtgagctcggaggatcactcatccatagtactcgaagatgtacggccaccggagaacattgggacaagagatgttgccgaggttgttcaggagataaaggaacagttcaactcagtggctgcctgcggagaagacgtagcaaggatccttgaggtcgggaggatgcagtacagatcaaggaataaagtcttaagattgatattttcacggatgatggggacctttgccttgctattttcttccttatccgagccaccagcgaagaacttggaacaatcagcaatgaattcatccaaaagaagtcaaaatttgagtaaaagattcgacttctccagcgatgttgaacttaatactctctccgcaacaatggataggctgtacgtgtgggagaaaagacttcataaggaaattatggaggaagagagattgaggattacatacgacaaagaatggaagcgcttgaaagagttggatgctagtggtgcagagccatacaagattgatacaacacgggcgtcaattaggacactgcttaccagaatcaacatttccattagatcagctaaagttatctcgaggaggattcacatactacgagatgatgagttacatccacaccttgttacgcttatccaagggcttgttaggatgtggaagttcattcttgagtgccaccggaagcaattccataccatacttgaaactaaatctcatatcctcatccctaagaatggacctgaaagaagctcctccaaggttacattagaactagaaatggagcttttgaactggtgtttctgtttcaggaattggatcctatcccaaaaggcttatatcgaaaccctcaatggctggcttgtgaaatggctccctcaggaaaaggaagaaaccccagatggcattgcaccgttctctcctggtaggcttggagcacctgctgtgttcatcacagctaatgattggtgccaagctatgaaaaggacatcagaagctagcatcgtagatacgatggaggcttttgcagttaatgtgcatatattatgggagcggcaggatgaagagcagcagcagaagttaaaagccgaatatctgtctagagatttcgcaaagcggctcaagtctcttcagaaggaacatggcttgcagggacagttggaagctgataacacagtgttgcccatcgctgacaatggtagggcggttgataaccgcatggttgcgttggatacattgcataagaggttggatgaacaaagagctagacatgaggaaaccgtgaaacaaatccgagaggcaagtgcaactgatctgaaatcaggcctggctcccatatttgaagcactggaatctttcactcaagagacgctgagaggctatgaaaatgtcaggattacagttggaagtggtggagcttgatacaaattttctgttcgcagctcttgatacctgaagtccacaattaccgctggagcaatgggtaatgtttaattcatccaacgagctattgacaatcagaaactgtcttcaatttgccagccatgcacaagcacagcaccattgtacttggggtaatgttgaatccatccaatgtacaagaaaggacggcgcattatttcctgcatgattgtgcacgaagcaatgttcacaggacgcagggatgcttttgagacgattctgatttctgagatagccaattcaggtggagctccctgagtagccaattactagtcagtagctggagctgcttacagagagagctgctaaggagcctagaactctgtctagttggagggccctcaaaggaggggaaggcaattttgtagccattatcagcttgtgtacatattagctaagttactgactccgcaggctagctcgttatttatgtagaattttatctgtacattgtaaaagatatatttatgctccggtattcgatggtgtcagtctgctgaagagcatacatgttgagctaaaatgccatggtgcctgatgtttaggtaaagnnnnnnnnnnnnnnnnnnnnnnnnnnnnnnnnnn

SEQ ID NO: 38921 - DNA, 795 bp, Setaria italica
  misc_feature (732)..(795): n is a, c, g, or t
  Peptide Sequence Number=SeqID_104895
aatggtggtgatggtgatgcaaggtggagaggccggcaaggccctggtctctttattgacgagtgcagtggtactgtcattgatgggtcgtgtatttcttgaccaacaaagtttatgatggtgcccgttgtgggattcgaccggactatatcgtttctttcgacctgggaaaggaggagtggaggagagatctccgaggaccgataagtagcaatgttgaacatgccaaggtggtactctacttgaggcgtgatctttctttggctgacctgaaaggctcgctagttcttgccgaccagcgagaccaaccttttaccatggacatatggtttctatcgaactttcagaatgggctttgggtgaaagagtaccacatccggactgaatcgataatctcaaggttgggaggtgagtaccatctaaaaccattgttggtgttggatgatgggaggttggttctttatctagcaagtaaaggactgctgttcatatgtgacccaggaaccaacacttttgcacaagtggataagagatttcctgtatcagttgctgtgtatacaggaaatctcttgagtttaggggagggtgacatggtgtagtattgtcataggatgatactcaaattagctcatgtctgatgcacttcataggaatcactgaatcaccctcctaccttatggaactggactttgtatccatattgctaatgatgagtagtttttattgtaaatnnnnnnnnnnnnnnnnnnnnnnnnnnnnnnnnnnnnnnnnnnnnnnnnnnnnnnnnnnnnnnnn

SEQ ID NO: 38922 - DNA, 327 bp, Setaria italica
  misc_feature (143)..(143): n is a, c, g, or t
  misc_feature (253)..(253): n is a, c, g, or t
  misc_feature (288)..(288): n is a, c, g, or t
  Peptide Sequence Number=SeqID_104896
gccaacctggactttgagtcacctgctccgctgctcgtgcatatgacttgcaaccaattgcttgagacaacacatgctgttagggtcagttattggtgtttgttgcactgaacagaaccgatgattatgctgcagcacggganctactcattattgagaatagatggaagatgggtggttgggtgcttgccaattgcattctgcttcctgactataaatatagtgcatcacaagggctgagcacaacaaaacngagccctcctttgcttccatcctatacagaaaacngaagtacctcatcacatcatccactactgatatggcttg

SEQ ID NO: 38923 - DNA, 567 bp, Setaria italica
  misc_feature (1)..(38): n is a, c, g, or t
  Peptide Sequence Number=SeqID_104897
nnnnnnnnnnnnnnnnnnnnnnnnnnnnnnnnnnnnnnacctaaaagtgtcttgtgtcattgggcattcagacgcactccgtatgtccaacttggaagcatgagaagtagcagctaactgtgtctaatgttgccacttgccaagcctgcctatctaatctatgggcatttgtgttggcacgccttggaattgcttggcatagtagtcgttggcgaattattcagccaagagaggcctcaatatccactcgacagcattcgatattgggtgttgttgctgtatgtttgaagcctgcgactggttgtctgtgagatagtatgaagatttaagagcttgaccagcagagatgccaaatgcagagcttgagcttcatcatgaaaatgcttgctgggtagctgcctgaatgaggatccctttctgcagaatctccgtggcgtcgtcagctttcctcgccctatatttatgttcgtcaggtgctatggtagcatcagtacatgcatctcactgtagcctgagagccgcctcattgtaaacattaatccacttaatggctgccacccttttgct

SEQ ID NO: 38924 - DNA, 577 bp, Setaria italica
  Peptide Sequence Number=SeqID_104898
ttctttcttactaaaattagtattctattgtaagtcggtatttgttcttggtatttatgagatcttgtgggaagacctcgtcattggagaacaaataggtcaaggctcttgtgggacagtatatcatgctttgtggtatggttcggatgtggctgttaaagttttttccaagcaagaatattcagaagaactgatacagacctttcgacaagaggtatccctcatgaagaaactgcgtcatcctaacatactgctcttcatgggtgcggttacatctccacaacgcctctgtatcgtaacagagttcctccctcggggaagcttgtttcgcttacttcaaaggagtggtaccaagttggatgtgagacgccgtgttcacatggctttagatattgtaagtgcattttctttatattatgagcctattgtccacatgattcagtgcatagatcagctagttaatgcttcatattttgagcaagggacttgtcaatcccctagcaaataaaattttgttaaatgttctacactatttctgtatgtatacttcaatcccctagttattgttctgtgtttt

SEQ ID NO: 38925 - DNA, 487 bp, Setaria italica
  Peptide Sequence Number=SeqID_104899
tttctttagttaagttccttttgatcctcagcaacccctgcaaagcactttagcgtctaagataacaaatttggtaagctctgtttttctattaaacagaagttgtagatatagcactactttttccaaatacatagcattctagcttgtaataatatgttgttaaaaacattgcaattttgcaagttgatagacttttctttcaatggtccatttctactccaaaggtcatttaccagacatcatataatttcacaccatctcaataacaatagttacttaatgaggactttaaatgggggtgtacggtcatctgtagatgttgccttggttgttttgtaaattctagaacgatatctgcagaggaacttgtgtaggcatcaaatctgatctgtttttagtatatattcttgtttgttgctagcatattcctttttgatttttagaatcacaacacaggctaccaaggtgacaaataaagttcgtt

SEQ ID NO: 38926 - DNA, 1135 bp, Setaria italica
  Peptide Sequence Number=SeqID_104900
cgcagctggggcgatgaggaggaggaagaagcctccggacggacggacaaccgtggccactcctgaaattgtgttctctggagccttactcggattggatggcataggaaaataaaaaggatcgaccgcagaaagaggtataaggagaatgattggagggtgaagcatggtcagtacctcgtcatgtgagagaataagcaaggatacgatcctaaaggtggatcgtactggcgaccaggaccaaacaatgagtacatatgatggtactgtacttcgacgagaactaaagtgaaaccatctcgaagtaatgtgcctattgaggatgcaccgtctgactcagacgtcgacatagctgacgcgtacgacacggtgacacgctatgggacccagcctgagcgtgcacctctccacgacaacatgggacagcagtttgcaaggctctcaaacgaggccggcgtggttatggagcacgccgtcggatccggtgatggtctgcttcgtcagtttgcagagagggttcggaaaagctgcagacgaatggccatgaggatgaactgcatgtcgtcctcagatgtgcaccacgggggcaatggccagggtacttcttcgggatcacgtcggactccattggcgactcccccagggctgcaacaccgtccactgctgcaggtcctagcaggagatcacgaggcaaggaacccgcatccccggcaggcaagcgaggactctgaaggtgagcagtccaaggatgacgaccctacatatggtgaggaactggagatttccggcatgatcgatgttccacctgtgactcagacgcggggagagtccagctaggaacctgcacctcgtacccggatgccacgctggcggcatcgttcccgggaccacaccgacgttggccgacgttggctgcgccaatgtgctgcccacgcatccaagaagggagcgtcgcccaagagatccttttagccctccggttgagcggcggccacgacaatgaacgttgcatgtctcaagtgtgatgcactaggtgtacaatttatgttatatgtgcgtgcaagactattggaactgtcacgtgtgtaaaagactaagttggatgttaggtttatttctgttcgtacaatggtat

SEQ ID NO: 38927 - DNA, 417 bp, Setaria italica
  Peptide Sequence Number=SeqID_104901
tagctcgatcaatctctctactctccacctctttatgctgtagctcctacagttcctgcagcagcagggtccatgtcatcatccttgtgaaactttagcgtagcgcctagaattgggcacaacatggttctctttttcttctttggcttgtctttccgcataagcttcttgattgttactttcatctggctctcaagtgttcctttcttttgtagcatgtactccctcagatcatgttatccatggcttccattctggccatcatagagtttgattcttcagcttctctccttatggccgaacgggctatgctggccacatctttcttctccagcaaagacaccaacttcttgcccttgcctccttgagccatataaggtactagattatctgagacttgtatggttttgaagctct

SEQ ID NO: 38928 - DNA, 441 bp, Setaria italica
  Peptide Sequence Number=SeqID_104902
ggatcccaacaccaaaatcctcctcgacgaaatccacaagtgcttctccgacgaactccacaagcgttttgcggagagcgacctcaagtgggagcatcgtttcctggaagcggagcgcctccatggtgaccgcatcgtcaagctcgaggccgcagccaaggtgttcgaagaatggcgcccccaggtcgacgccgccatcgatgacgtcaagcttgaactcggcaagctgactcgccattgggaccgttccgtacgcgactcggcgtccgcggaacccggcatcttccccacgcctcagtcggcgtccgagcgcccatctgctccggatctcaccgccgacggccctcatgggcaccgcgtcgatcacatacaccgggatgacgggtatgggtcagtattcacccatacctcaatcccggtcaagggtgcgtctccatcccc

SEQ ID NO: 38929 - DNA, 467 bp, Setaria italica
  Peptide Sequence Number=SeqID_104903
aattacttgaacattcttttgaatatataattgtctatgaactactgatatcatcattgaaaatactaatagcgtccaaagagtttgaatacgcagtactctttgagtgagatacaatagtcgcaacatacagatacagtcaccatttatcagctgattccttgaatgttactatgcattcatacattttttagtttaaacagcagcagcagataacagaactgctgactgtcaatctgaaccatgtgttcccacacacactggtccgttgtcaatacaaagtcatttgaattgttgaatcctgacatttttgtttcgatcacttccaaacatgcagattccatgaaggtggtgtgctaatatcagcatgaaaactaatcgtccctgggctgagccgccagtcacaggctacatgatgatcaccagaatgccgtgcatgattgactagttgccgtacttattagtta

SEQ ID NO: 38930 - DNA, 363 bp, Setaria italica
  Peptide Sequence Number=SeqID_104904
ctacataaaaccataataatcatggataactctacaaacatgatcatgaatgtgaaaggagtttgtggtagtaatcttattctggtcctgtgtcttacaaatattgttctatttaacctttagttaggaatttaattttcccattcgataaaagaaagggaatttgatatttgctagttgtccatctggaaccaatgtaaacaaatatataacaggaagatggggtaaaaaaaagccaatatcaaccagagagttgcatcgctctagtaatttgcactacctattgattttgacactagagtccgaaaattccaaatcgctctcaccagcagagcagtaaacatagctttgttttgcatcagt

SEQ ID NO: 38931 - DNA, 376 bp, Setaria italica
  Peptide Sequence Number=SeqID_104905
ccctagggtttgtgggggagagcgagcagcaaccaatggagattgagggaggaggaggcgaatcggcggagtcccttgtccatggccgctgcaagaagcggcctccttcgccttctcttccgggcgacggcgaggactcacccaagtctaccaccagcggtgatgatgacgacgaatggttcattagcgacgacagcggcagcgaggaggatgaggattacgaagatcagggggcataccctccttttacaagtgataatttcccaacggctagttctgactatgatgagcaggttgctgttttgtatacaactccagacattaaccgtcgagggccttcaccaatcatgcttttccctgcattcaaaactggcta

SEQ ID NO: 38932 - DNA, 559 bp, Setaria italica
  Peptide Sequence Number=SeqID_104906
gaatcattcatccaaagccagcgcctgtacggccaaaggtgtgcgctggatattaagtacttggtgctgatcaatgcaatggaagctcgggtcgatatcgaggtcattcgtgtccctgcccatggcatcaacctgaagctccttgccaagactagtggtttcagcaatgtgatccggctattcagaggcactgttatggaggtgggcttctcggcgagctttgctgtcgccgtggagaaacacaactaccttgatctgtacattgaagggtctcagagagatgatcttacccctgcgcagaagacgcggcgaaatgagtggtggcagtgcggctttggatcccgctaccatggggttgaggatctagtggcggagttgggggattttgcagcagtttcggtcaagattagttttaaatcttacgagaagaggtcttgaggcagcagctttcgtttaataacgtcatccatgttgatggatttcctggtggccggctaaactaagcttgtacaaactgagttttttcggacactggcgcttgggcccgcttgtcatgtgc

SEQ ID NO: 38933 - DNA, 532 bp, Setaria italica
  Peptide Sequence Number=SeqID_104907
aatcaaacctgaagctccttgccaagactagtggtttcagcaatgtgatccggctattcagaggcactgttatggagaagacgcggcgaaatgagtggtggcagtgcggctttggatcccgctaccatggggttgaggatctagtggcggagttggggattttgcagcagtttcggtcaagattagttttaaatcttacgagaagaggtcttgaggcagcagctttcgtttaataacgtcatccatgttgatggatttcctggtggccggctaaactaagcttgtacaaactgagttttttcggacactggcgcttgggcccgcttgtcatgtgcattacgttaaacttgttactgtggttattgcgttaaactacctgtgcgtctctgaatcatggtccatactgagcaacgaggtatccgcttgtcatgtgtatttattttctttttaggtggcatataatctgtaatttttcgtagcaaatcttctgtcgtcattcatatcgttcaagttggtacagtgttccggccag

SEQ ID NO: 38934 - DNA, 937 bp, Setaria italica
  Peptide Sequence Number=SeqID_104908
ttagctatctcctggtcttcctctttttagaatctaggagatctttgatgaaggggcataccctccttttacaagtgataatttcccaacggctagttctgactatgatgagcaggttgctgttttgtatacaactccagacattaaccgtcgagggccttcaccaatcatgcttttccctgcattcaaaactggctaccatctatttggttctgattataatcttgctgataaatctgaagtctctgtgagcaatgattgggattgctcaaataaatgtcattgctattcaatgaacttgattcaattcattgatgccaaaattgctggttatcaacatacccatcctggacatgccaagatctttggctttattgcggcgcgagaaaagatcaagcctttgcgcaactatgtctataggcgtaatattgataattgtgaagctgtatctgtgaagcgaaagacgggtgtggcacgtttatcactgaatagccctgcacgagtcatttcaatgccgagtcgtgcattgattgagtttgagctccatgccataagtgaagataaaactgatggtgatgatgacctgatcattgaaggatgcactgagctctgcaacatgaccgtatcggaatcattcatccaaagccagcgcctgtacggccaaaggtgtgcgctggatattaagtacttggtgctgatcaatgcaatggaagctcgggtcgatatcgaggtcattcgtgtccctgcccatggcatcaacctgaagctccttgccaagactagtggtttcagcaatgtgatccggctattcagaggcactgttatggaggtgggcttctcggcgagctttgctgtcgccgtggagaaacacaactaccttgatctgcacatgacaagcggccaagcgccagtgtccgaaaaactcagtttgtacaag

SEQ ID NO: 38935 - DNA, 404 bp, Setaria italica
  Peptide Sequence Number=SeqID_104909
atttttatatgtagagaagtagaggttccctggccaactttactttctaatcatttactaaatgctcagcctggaatggcactaagactttcatgtatgtgcttatgatgcttaacgagtttatacatctttggtaaagattagggatgaaagtggtatggacagtatccgttcgttcgtccaatcgaagggatttagacactcaaatgaatagttcctatccgaatccggacattcaatatccgtacctattcgtaccgtatccgtattcggatactcaaagttgtatttataagattcgaataggatgagtatcgatattcgacacgtcttagcactaatcatatccgaattcgatccgaagaaaaaaaaatactatatgtattgtatctgatcgttcgtat

SEQ ID NO: 38936 - DNA, 352 bp, Setaria italica
  Peptide Sequence Number=SeqID_104910
gcagccgcatccaaacctctatatgtatcccctaaaaaattcttcttccaaaatgcaactctttcactatcattgtcttcggacatctcggagatctgtaagcaaaaagaagagcatggtaattatcccttatattaacaaaactagcgattacttcagcaaagcaagggggcggacttcactacggtcgtgatgtttcacttgaaccctaattttttgtacaataaactgcacccgcgccttaattagaacccagaagtgttacggtgtcagctacgccgatcttgcggcctcgagaagaaaagccggagagatgactgacagatgagcggaggcgccgtggtgtgcggca

SEQ ID NO: 38937 - DNA, 266 bp, Setaria italica
  Peptide Sequence Number=SeqID_104911
tgtctgtacgtatatatgacagtgctacaacttcagtagatatgttgacagtaaactaacaccatcttcaaagggacccaatcatattttcaggtgaaaatgatcttgtcatgtacatggataaacatttcagccgtgtaggtatatatatgtttctggtaaaccaaataaataaataaaaacttgaccaaactagaggaactaggtgatttgaaaaaatagactcaagttgaaggcgaaatacgctaggtaagggtgtatgccca

SEQ ID NO: 38938 - DNA, 280 bp, Setaria italica
  Peptide Sequence Number=SeqID_104912
gtgcatggttgaaaaccaccggaaactattacgggtcggaaattgcgcagactcggcgactcgccaagagaaggatgtcacttcatatagctcaagtaatcagatggaaaagaagcccaacagatgagaccaatcaatatgaaatcacatggaagtgggaaacattcagctatccaaactgtgctgtcttctaaaatcagtggaaacttgctgctcgtgatggtttgcctgatcactgtacagattccagataagttgatcgaagaattacagaatacca

SEQ ID NO: 38939 - DNA, 1342 bp, Setaria italica
  Peptide Sequence Number=SeqID_104913
acttaggtaacacttggtacaatctttgctacagaatagctggcacagtacagaccaatcaatatgaaatcacatggaagtgggaaaccttcagctatccaaactgtgctgtcatctaaaatcagtggaaacttgctgctcgtgatggtttgcctgatcactgtacagattccagataagttgatcgaagaattacagaataccaggaagaatataatgcatggaattgtaagggtgtctaaaaaaattgactaaaagcagtgccatactggagagaaacactgctatccgtaagttctatgcatgctgtgtgaggtacaatcagaaagggtctcttctggctttcttgcttaacaaacaaaacagtagtaaaacatgtgtgtcagtatataccagcactctggcgttaccatatgaaaaaaagaatgtgactccttcaactttaatcatgaaacctagacaactttttcttcacaagtttgggtttcactaaagcgataatttcagttttcatcatcatcttccagcaggtagtcttctatttgatctctgaaataaacagtttgctgaatcagtgcactgaagaacaaacatgatattagcaaatgaatggagtgttgaacatgtggaaacaagtggtcatgtaaactaaacatcatgctaagaagcaacacggaaaggtttaatgttttcctttagtatatcactgataacatgcacaataaatacccagacaatgaggcagcctacaaagcctcaccttagtgagctggcagatgcagtgtccactttctcagtccaaaacttcggtagtagtgaaaagaattgtccatacgtatctgtagcagatggtagaatctggaaatggcagctttgacaacaatgagcagtataaagatcaattttcttctgggccttgtgctttgtgttttccaaattctggagttctgattcactgaacgggcttccacatatcaggcagagaatctcagagaaagtaacaaactttctgaaaggaaaaagacaattggtgggaactatgtaaagatgcacaaaaacataggaatatactttccctgtccaattaacatgttcattttctgtattcaataaagctgacaaagtgtaggcaagcaaaagagatactgtcgttagatggtgtatgaattagagacttttgcagaggtatgtaatctacagttattttgatataatctaactgtgacagtgatggtagtgagcttagaaatgttttgtttattttatatgactagcagagaactgattattctatatactgaattcattcaggttctaaagacttcctagaactcatcaaaag

SEQ ID NO: 38940 - DNA, 733 bp, Setaria italica
  Peptide Sequence Number=SeqID_104914
aagcttggtgggcaaatgggcatgtaagttatcaatgtgtttgctaaatgcagcattatcatataacaaatggattcctaccatctagctttattaattatagatctttctttcaactgatgaattccattgcaacaatatatggcatgatattcggattactttttttgttgttggaactgcatgctactctgtcaccataattttctggctgttatcctgtgacctctactctgcttattattctcaggagaaggatgtcacttcatatagctcaagtaatcagatggaaaagaagcccaacagatgaggtctggctaactcctcttttcttatagtctgacttcatatagctgtgtacttagtttattttatttctgactaactcatctttcttatagtctgactcatggaactaagcactcaactttgacttctgcataataggagaatgctgcttgcttggacaatgagataaaatatgaccaagatttcgactatcattattttggttttaagacacaacagaggtattatctgttgaaacctggtggaaaggtcgacgaaaggccgcaggatatgttgatgagagtttctgttggcatacataaggatgacacactgtataagaattgcactatatataagcgcttggcatgctattacattagattgcctcatctgtgaaaagttttttatgtgacatttataggaggagaatcgtgtaagggat

SEQ ID NO: 38941 - DNA, 541 bp, Setaria italica
  Peptide Sequence Number=SeqID_104915
tctaaaaatcagtggaaacttgctgctcgtgattccatcacgagcagcaagtttccactgatataagatgatcgaagaattacagaataccaggaagaatataatgcatggaattgtaagggtgtctaaaaaaattgactaaaagcagtgccatactggagagaaacactgctatccgtaagttctatgcatgctgtgtgaggtacaatcagaaagggtctcttctggctttcttgcttaacaaacaaaacagtagtaaaacatgtgtgtcagtatataccagcactctggcgttaccatatgaaaaaagaaatgtgactccttcaactttaatcatgaaaccagacaactttttctcacaagtttgggtttcactaaagcgataatttcagttttcatcatcatcttccagcaggtagtcttctatttgatcgcttagtgagctggcagatgcagtgtccactttctcagtccaaaacttcggtagtagtgaaaagaattgtccatacgtatctgtagcagatggtagaatctggaaatg

SEQ ID NO: 38942 - DNA, 1282 bp, Setaria italica
  misc_feature (1008)..(1008): n is a, c, g, or t
  Peptide Sequence Number=SeqID_104916
ctagttataacagcagtaaatacaagatctatacagaaaacggatggtccaaaaacatcattggataaattcatcttggtacaatctttgctacagaatagctggcacagtacagaccaatcaatatgaaatcacatggaagtgggaaaccttcagctatccaaactgtgctgtcatctaaaatcagtggaaacttgctgctcgtgatggtttgcctgatcacagcactctggcgttaccatatgaaaaaagaaatgtgactccttcaactttaatcatgaaaccagacaactttttctcacaagtttgggtttcactaaagcgataatttcagttttcatcatcatcttccagcaggtagtcttctatttgatcgcttagtgagctggcagatgcagtgtccactttctcagtccaaaacttcggtagtagtgaaaagaattgtccatacgtatctgtagcagatggtagaatctggaaatggcagctttgacaacaatgagcagtataaagatcaattttcttctgggccttgtgctttgtgttttccaaattctggagttctgattcactgaacgggcttccacatatcaggcagagaatctcagagaaagtagactcgttggtatcaacattctgaaacttgggtcgaagccgtgatggcaggaaatcatgatagccgtttgctgagaacttattaaaagagaatggcttaagcttttgtgcggttcttaaaatggtatgctctcgagaagggttctcttcccttagtcgtgaaacaaacgatgcaactaagctgttgatgcccctgcaaggcctatcaagaagttgctgcatctttaaactatcaagttcacagagcaagctaagctcttgggcaaggcaatcatggagtggaagaacccacggtaacttcccaccgtagtaatcaaacggaaacaaattaactaaagtaacttaaggttaacatattggacatcagctggtaaagagtagccttgccccttnacggtggcagatagcacatgacatgctattccagatgcacatgtccccagcatgatcttggtgtagccattttccagtgcaatcttctgcagtgaaagcatgcgcaagcatcgaataaagtcatccctccctgtctcatcatcgatcatgccgaccacctccttcagcctggccaccttgtcctctgacccagatgagaatacgtcctcaagaggggcaacgtgcacttgcttatcgccgggtgaacaaaacttccttgtaagtaacttgtcta

SEQ ID NO: 38943 - DNA, 1013 bp, Setaria italica
  misc_feature (18)..(18): n is a, c, g, or t
  Peptide Sequence Number=SeqID_104917
ctgcgtcgacgtgaagcncggtggcggcgtcgatgtgcaggcaccggcggccgcggctacggcggaggaccattacggcggctacaacccatctccaatacctcgcctgatcatacgccaccagttcatggatcatccttcatgttcaatcaaagggatcaactaataaaacggttaatttagattgcaatctactgcgtgtatgtatggtgcacgttgatgatgatcctatagattgcaatactgatgtcacaaaccatatgcacaattcattagaaaaaaaaacatgtgaataatgcatttgcagtcatccatttgaatctaaataccttcgtttccatttaaaagtcatgacttgcagcattcattctgattcctccgtagcaacctgttgtatgtgtgtgaaattctgatgcagttgcaagcttggaagttgatctaacatctaagctttgatccaaccttcaggtttctcaggaaagcggtaccatttacactgatggcatccaggacatgcccagcttcagactccctgcctgcatgctcatacaaatgaaatgcagcgctcaagatgaagctgtcaggtttcagcgattcacgagtcatctcaaagagcgagatcgcatcgtccacaagaccgtgctccaggtacactctcatcatggtcctgcagcaggccagatcgggagccacacctatctcctccaccattcggttgaagatcctctgggcaccactgatctttccttccttcagaaaggcaaaaatcaggtggctgaagtgagggcaggatggggttatgttgctgttcagcatcatctgaatggtttcctcagcttctgcatagagtttgccctctgtgtatgctctgatcagtgcaagataggaaagcgagttgggagcatgaccgctgccctgcatctcctggaatattactcttttgcctccatgtgcagtccagaagtggcataggcgttgatcatggaattgaagctgatctttccaggcctgat

SEQ ID NO: 38944 - DNA, 506 bp, Setaria italica
  Peptide Sequence Number=SeqID_104918
ggcggggcggggcttgcaagcagtacaggcattcaggagggttacttgagaaatatttggagataattaagaaaattgagaccatgcttagtactatgaaaggattttgtcaaggagggtttataggagtatttgtgaatgtgatagaattcaagtcgtgacatgtgtcggaggtctcaatgtttagtactataaccacatgcattgtaaagaaagagatataggagtatttctttcgtctcgttgcaatatctaaccccctatagctcttatcccagtgtacgtctatccctctctagtagaacttcaaacccccttcgatccatgccatgcagccatcttctgcatgttatttatacaagtgtaaaccaatattcacgctgaatggtttccttccacaccatactccatatagtccataaatctaattagattaatgttatgatgtagttgtgtatgtagtatgaactgctttggtttaaacggctctcataagattaagtttt

SEQ ID NO: 38945 - DNA, 580 bp, Setaria italica
  Peptide Sequence Number=SeqID_104919
cagtgtgactaaagcaaaacaactccttccgaagtccagagtccggaaggaagagaacccagccgaccgagatggcagcagcatcagctccgaacccgctcgccgtcgcctgcctcctggctctcgtcgtcgccgcaggtgcggctaggacggagccggatgctaaggcggcggacatgctgaggcgctgccacagcgacaaggggtggagcggccgcctctgcaggtacgtgtgccaggccagcgggttcgccggctacgacttcgccctgccgaacgcggccaacggggacctggcgcgctgctgctgctgccccaaggatcacgcctgcgtccaggtcgacgcgtagcagagttgccgaatgccaagtgctgccctcgcggcctgccgggaccgggagttgcggtttctcaggctgaaaagaccaaaaaaaagtgcatgtaatggaagggaaataaccaatgagcaaataaaagttagcgtatccagtttttttttaaaaaagacgtaacagacaacttgtttgaacggctcagaccaagttcgaattaaccttttgtctattcttaccgttaagtt

SEQ ID NO: 38946 - DNA, 1071 bp, Setaria italica
  Peptide Sequence Number=SeqID_104920
agaagaaggaggtagtctcacctccagtgttctcggccttcacaactgaatcatcaactgctgctttcactccaccggaatctgtccatcatttgacaaccccttcctctccggaggtcccatatgcaaagcttctgacttcggtcgacaacagccagaatggtgaaacagttgatcttcagtcgtatccgaattggccagacagtccaatagtgcacctgatatctccatgctcaggttattctggcacttcctccccattccctgaccctgagacgccaaagatatttgatggtgagggcactggaacacaaaagttgatacctcgcaacatgcgcaatggttatttccttttggatggccacattacagcagctgtaccagttgcagacttctctgcccgccttcaccacaatgatcatgatatggatcacctggtatcatttgacttgactgtagcagatgtggcgcgccgcctagagaagaaaactgctattcttggggattctgccacaacatcttttcgtttgcccccagcagtggcgatcacaagagagatctataccatgacttacctgagaaagtaaggcagtccctgtcccttcgactgcccagggagttcaacatcaatgtcattgatgctcctaatgtggagccaaccctagggaatgacaaggttgctgctgggatcactgtggagctggaaaaagcccggtcctatccagtggtacagcagggggccagctaacctttgcactgaccataatcttacaggatgagggagtgagcttctgcttctcactaccagatcttttgccgctgcttcagtacctgattttcgcagatactactgtgggggatgcaaaactatgttgaacctgcagttagtgataattcaaagttggatagtgattccaagtgaagctatatcatgataagatgctcaaggattctggagtctttggttatgtttaaccggaaaactttttagcggtgtagtgtgtgtacctgtctgcctatctgtctgtctgtgcatgtatgtatgtatgttgaaacctgtgcattgacttt

SEQ ID NO: 38947 - DNA, 1382 bp, Setaria italica
  Peptide Sequence Number=SeqID_104921
agccgggcgacgacgatggcctctagagagtaaagaatccagcatgccacccacctgccccgtaacttgttcttgctcgtcttcatcaacatcatcatcctacttccgccgaagcaaccaaggacgagaggcgggggcggaggaccgccgccgcagcccaatccgctaggtgggggagggaaccgccggcgcaaaggggaaggatttggacgatgacagaagctgcaattacaaggtattggtgccatgaatgtgagcatgccgttgacattgaggaggccatggccgaggagatcaagtgcccattctgtgatggtggattcattgaagagatgattggcgcggaatttgaggggttggctagccagcggtcggagcgggattcatcacaatggggaacgtctgacaacccctttgagcaaccaggagggacggcggacagcgaggatgatgaagaagaagatgatgatgatatgggccgtgagtttgagggtttcatcaggaggcatcgacgggcatcagctcttcgtcgggtacttgacagcatccaagacgacctcagggctgacagggaaagagacaattccattctgatcaatgccttcaaccaggcccttgctctgcaaggctcagtgcttgatcctgatgaggtccgggatgaccaaggcacatctagcaatgatgatggtttgctggaggagtatgtgctgggagctgggctgagcttgctacttcaacatttggctgagagcgacccaaaccggtatggtacccctcctgcgaagaaagaggcagttgaggctctgcccactgtcaaaattgaagaggttgtcagctgttcagtttgccttgatgatcttgagctggggtcccaggcaaagcagatgccttgtgagcataagtttcactctccgtgtatccttccatggcttgaactccatagttcatgccctgtgtgccggtttgagctaccatctgaagagacgaaagacttgaacgagccaagcagtgttgtcagaacagaaagcatccatgaggaagtcagagctgatggccctgggagtgtcagtgagagcagtaacagagcttgggcccttgttccttggttcaatgggctattctcagcacctgaaccgcaaactgccagaggtgcattcactgatcaacagccatcttcagctactggaacgaacccgaatgctggggaaagttgattccatcctcctttgtgaataatgctcatacatctgagaatagcaatgaaccttgttggtagaacactttttttttgtactgataatccttcttggatgaatcgcaaggtgcaaagtttgtggctgttttgttttatggttaattatctatttaacctttcttgagtt

SEQ ID NO: 38948 - DNA, 256 bp, Setaria italica
  Peptide Sequence Number=SeqID_104922
ccacgggcgcgcgagagcagcagccaccgactgatcaacggcgggggcgggggcgatctgatgctggcgtggcggtgatggctgcgccgtccgccggcgccgggggtgggggcggcgccgcgggggagggctcctcctcctcggccgccgcggctgcagcagctgcgacgatcggggcccacggggtcgaccaagttgcagaagcgatgtggcagatgaacttaggagaagctgtggaactggggccatacccaga

SEQ ID NO: 38949 - DNA, 571 bp, Setaria italica
  Peptide Sequence Number=SeqID_104923
ctaaggagagacaagagaaagtaaagatccacacacattcgtactgttgcttggattatgctcagctctgtgatgtcgtaaggtaccgcatacaccgaatgaagaaaaaattgaaggatgaattggacagcagaaatacaattcaacactatatatgtcctagctgtaataaagatactcatcctttgatgcattacaactggtaagctacatcgatgagtacttccattgtgaaagttgcaatggtgaactggttgcagagagtgccaagctagcttctgaggaaatgggagatggcattgacaatgtaagaaagtgtaggcatgagaagttgaagggcatgctccaaagagttgatgagcaattgaagccattgattacgcaacttgatagagtgaagaatttgccagcacctgaatttggaagtctaaaatcattggaaagagcaattcttggtgcttttacaaattgtgacattggtgcatctgattcatctaggaactcacaggggccgtatggtatgctaatcagaaagacagaggttgaatttgaaattattgatggtgtaaaa

SEQ ID NO: 38950 - DNA, 1014 bp, Setaria italica
  Peptide Sequence Number=SeqID_104924
tagtcatgttcgatgtgcaactctttgaaagggtttgtttaatggaatttcaatccgttccactttaggagcaattgaagccattgattacgcaacttgatagagtgaagaatttgccagcacctgaatttggaagtctaaaatcattggaaagagcaattcttggtgcttttacaaattgtgacattggtgcatctgattcatctaggaactcacaggggccgtatggtatgctaatcagaaagacagaggttgaatttgaaattattgatggtgtaaaagaaggtgctgaatctggtaaaaatggcacagagttgaaagtcttacctccatggctgaatcttgaaaaaaaacaatgggagagacctgcatattggaactggttgaaacaacagaagataaaaatgaccaaaatcaggacccaaaagataagagtatacaggaagaatatgtaaaggcttattatgaggccttgatgaaaaagcaggaagtggaagatgcaaaagggataatgcaggaggaagatgagaaagttgtttctgattctcaatctgaacgacagttgggcaagaaatacaaatggcaggatgcggaagagggtactgaatgggaagaggagcaacctgcaggaaatgcagcagagacatacaagtcggcagattttagtgtggatgtccaagaatctggtgatggtgaagatggtattgtctgggaagagggttaaaccttgaatagatggtgtgaccactttgattgctcttgaattcatcgagctaattgcttatccgaaaggatggtgaaaggttgctttgctgtaatattgttagaaaaagacaattgacacggttaatatgagaaaccgggccaaaaatcacataaactacaatgttttttggcgggagagaaccggcaaaactacacatgtacacagctttctgccactaaaagctggcaacaccacggcttgaagtaaaacaaaaaaaaaaaaaaaaaaaaactaaacgaagaacgtag

SEQ ID NO: 38951 - DNA, 650 bp, Setaria italica
  Peptide Sequence Number=SeqID_104925
gcgagacaaacaccgcgccatcacatacacatacctcgccttcctcctccatcccctgtccacaccaaaaggagaagggaggggaggagatctggagaagaggagaggagaggagttggccattgtcacttgaaggctcgagtttcctctcttttttctttctcttgcttcttgctttgcttggttgaggcgccggccatggccaccatcctggagaacatccagaagacgaggttcctgccgaccaggccgctcaaggacgagctgcccaccttccagggccgcctcggcggcggaggcgggggaggcaaggagagccacctcatgggcctgaggaagcggctgtcctccttctccggcaagatccagcccatctcctccgcgtcggcggagtgggcgttccggcgctccaagtcggcgccgtcgctcggcgccgcgttcgccgcgggcggcggctccctgcggcagtggtggcagtggggcgtcggctggctcctgaccaagaagcccggcttcgcgggggacctcgagatgaacgaggaggaggtcgccgcgctcggccgccagagccggggcagctggggccacatcctctacagggtgcgcgccggcgtccggcggctcgtcatgtccacgcactccctccccaa

SEQ ID NO: 38952 - DNA, 726 bp, Setaria italica
  Peptide Sequence Number=SeqID_104926
ttatcttagtcccttctaacacacagaaaaataatcaaccaattcagtgtccacttgaatgtttcagactattatcaaacaatgcaacccgatgaaatcaacggcggtataatttaagcttgaggagttcaggtttcatgcctaacaacaatccatgtttccaaacgctccgagcaaggcacatcgaaaagaaaggcagctggagcaaattactgaggactcaccagcgcagtgtgggcagaagaggcagcgcagcgacgacaacgcctctggacgagccaccaccaccgacctgcaggggcggctggtcgagatcctagaccggagcagccagatggtggcggcgcagctggaggcgcagaacatcaacagccgactggacagggagcagaggaaggaccaggtgagcagcctgcttggtgtgctcggcaaggtggctgatgccctcttcagaattgctgataagctgtagccaccatcatgtgtcttgaacaccgtaaataaaacgctgcaagaatgtacagatttatacaggttcttggcgtccagctgttcttgtgggttggttctgaaattggttagaaacctcaaatgggatgccctattttttagcccatgggatgtgtatctgtatgcccccatggccccaaaactgtatattctgctgactctgatcctgcagaggaattgaagtgcatatctgatacacaaaataaaaaaaaaaaa

SEQ ID NO: 38953 - DNA, 433 bp, Setaria italica
  misc_feature (6)..(6): n is a, c, g, or t
  Peptide Sequence Number=SeqID_104927
cgtggngagcaaggaggatgtggcggcggcgctcgacggtggtgcccgcggggccgagggggccgggctgttctcgtcgtctgaggatgaggatgatcaagaagacgatgcggccacgccgagccccacgccgatggcgacgccggcgctggcgccggcgccggtggccttgcccatctccgagaagacgactgatgcgtccaggcaagagagctccgagcaaggcacatcgaaaagaaagcagctggagcaaattactgaggactcaccagcgcagtgtgggcagaagaggcagcgcagcgacgacaacgcctctggacgagccaccaccaccgacctgcaggggcggctggtcgagatcctagacccgagcacaccaagcaggctgctcacctggtccttcctctgctccctgtccagtcggctgttgatg

SEQ ID NO: 38954 - DNA, 755 bp, Setaria italica
  Peptide Sequence Number=SeqID_104928
gatatattgatgatatattgttctgaggcacaattgtagtcttatgctatcctattacagcatgattgtgaacaaatccagactatatagctatatatctcatgatgttgaaccatgtgttgagtgtctccttaaacatcaaattcaataatcattgatgttccagaaatatcacagcatttattccataatcaacactctaaagaattgaaggatgaaaacatcagtcatataatgtttgtctagaattgtactccaaattgtttgagtgatgaagaggtctatgcattgatgagcgtttgaaagcgcgagccaaaaactgcctcattgactagttcagactcttttaaaaaaattcattttgagtaggagttcattcacccaggacttgtatttctggagattcattgtgcttcctggacaattgagaacggttctgaaataattttggagtaactcttagtggagaacctaacaaaaataaagaggtatataagttcaaaagatatataaatatgagatatgaggccatattgtgtataaaagacaaaacttagtgtctgggaagcaaaggtgagttgtgagaaagaccttttattgctgtaggaaaaaaataacttagaaatataaaaaaaagaatttgaaatacaattaaagacatgcaggaatgattagaaagaacatagaagattagataataaaaaatagaaatgaaaagaaaacaacattgaagaatatttaccttattttggtag

SEQ ID NO: 38955 - DNA, 403 bp, Setaria italica
  Peptide Sequence Number=SeqID_104929
acttacatatatatatatatatatattatatatatatatataaactagcatacgtaattcatctgtgccagactcgcacgtggattcacggctgtgtaggcgtgtatgttggtacagtctgcgagggcggcccgtacgatggtggtaagggcggcgtgacgccgtatgacggtggtaatggcgcgtattcttcgtccgcggccaccaattctcgcttcatcttcctcccagtatcttgggctcgggatgttgtatcagcaaacgatgagacaaggaggagagagacgaagcacagaactaccaagcctttgctgcttgcccttggagccatcgtggtatatagtgtctgcagttacgttgttgcgtactctataagttcgttcgtttacgtaagaatagacta

SEQ ID NO: 38956 - DNA, 238 bp, Setaria italica
  Peptide Sequence Number=SeqID_104930
agacggcgcgaagatcgtggaggacaaggagtacttcagcgggagcatcatcgagaccgcgaagcgctcgtcgggcgacgacgaccgggtgataaagctggagctggccaaggaggccggggacctgcatgaccgctgcatcccgcggaagcccaaggccaagagagacggcggctacctagtcatctcctgcaccgcgcaggggaataataacaagggatgacgactgcgtcctcgt

SEQ ID NO: 38957 - DNA, 538 bp, Setaria italica
  Peptide Sequence Number=SeqID_104931
gccgacctaccgcgcggttgtcgtggaggacaaggagtacttcagcgggagcatcatcgagaccgcgaagcgctcgtcgggcgacgacgacacgtcccaggacctcgccgttctccggcggtcgtcgtcgtacaacgcagacagggtgataaagctggagctggccaaggaggccggggacctgcatgaccgctgcatcccgcggaagcccaaggccaagagagacggcggctacctggtcatctcctgcaccgcgcaggggaataataacaagggatgacgactgcgtcctcgtcgccggtggcatgcggccgtcatcccggcgagctggcgatcgagtggtggcggcgcctgcgtggcttcttgcgtggggaacagtagataactgtcctgtagtccagtttgtttccatctgcttgctagatcctgcctgtgattctccgagtgaagtgagccctgtcaatatgtgtgctgtgcctgtgctgcgtcgttgtctgaacttgatactgtcctgtaaccccattagtgctgtgctaat

SEQ ID NO: 38958 - DNA, 572 bp, Setaria italica
  Peptide Sequence Number=SeqID_104932
aatgaaaagaagaggattgcttcaaatatttcaactaaaagcacatattgtatccatctccacaacgtcatgatataaatcacaaaatcaagctaaggagacgtttattctttcattatcattcctttatcggcttcccttaatgcatgcttggtggtggcgaaggtggttcaggaatagtccaactaccgcatttgtttcctgcaggcaccggcttgtggcaatctcgtgaaacaaaataagcatgctgtacatctacggttttctcgtcctcatctgtcatggtacgacatacacacaccatgtcgtatgttcgcacaatcaggcagcaggcatagtggggttccatgtaggcactgccacgcctaatgctcagatcacatatctctataaattttgctttctcacgatagcaatcctgctcaccccaaccacgaggcattatagataaggtgaaaactaaagcaaacaccaaaagttggatgattgattttgtagtcatcttgtactacagtagtgttggtgcttctatgaccaagtatatcttttatgggagaatgtagctggttgtt

SEQ ID NO: 38959 - DNA, 1586 bp, Setaria italica
  Peptide Sequence Number=SeqID_104933
taagtctcttaggatttatatggaaattattttggccaaagtccaaaactcgtacatttgtctgaatgattgttggatcagatcacacttgtcactttgtgtggaagagctcctccatgtcctcgaggctccgtcccttggtctccggcaggcacgtgtagacgaacacaaacgcggcggccgcgatggctgcgtagaggtagaacgctcccgccatggtgatggccttgtagagcgtgatgaaggtcatgatgaccaccgcgcacatgacgcggttcatcgccgtgccgagcccggcgccctgcgcccgcagccgcagcggcaggatctccgagctgtacacccacgccatgggccccagccccatggagaagaacaccacgtacgacaccaccgccaacacgctcgccgtcgacgccaccgcgtcctgcttggcgggcgcccgcggacgccgcgaacagggagcccaccagcagcagcgacgccgtcatgccgcccgtgctcacgaggagcagcggccggcggccggcgcggtcgaccagcgccatggcgatgaggatggacccggccttagcgacgccgaagaggacgttgaggctgaggaccgaggtactggtgacgccagccgtggcgaggatccgcgggccgtacagcaccaccgagtcgatgcccgacgcctgctggaagaactgcagcgtcagcaccatggccaacacgcgccggacgccgggcttcgccgcggcctccttccacgcgccgctgctccttcctttccctccgccgctatcgccggagacgacttccacaatctcgagcagccgctgctcggcctccgctgccgtgtccgacgtcctgtccagcacgaccttggcctcagcgacccggcccttcatcaccagccaccgcggcgactccggcatggtgagcgtgcctaccgccaggaacaccggcggcaccaccccggccgcgaacatcacacgccacgacaggtgcgccggcagcccggagaaggcgaggttcgacacgtagctcagcatcactccagtgttgttaaaaatctcggggacgtgaggtggaggaggccgcgggaggacgccggcgcgacgatctcggcggcgtagatgggggcgatgacgaagtcgtagccgacggcgatgccggcgatgaagcgtcccgccatgagcgcgttgtacccttcggcgagcgtcatgcacagcgggccgaggaggaagaggacgttggcgagcacgatggtgaggcggcggccgaggcggtcggaggtccacccggccagcagcgcgccggcgagcgagtagaggttgatgatccccgagagcacctcgatctgcgcgtcgctgatgcccaggtcctccgccatgaagatctgcgcgccgctcatcaccgccacgtctgtaaccggcgaggacggaggtcatggaggcgagcacggcgcagaagaaggggtacttattggttcgcttcgccggcggcgacggtggggaggcggcgccgagcttgccgagcaggggcgcctcggcgtccgggcgctgcgccatggcttctctggctctggctgcaggtcccgg

SEQ ID NO: 38960 - DNA, 139 bp, Setaria italica
  Peptide Sequence Number=SeqID_104934
ggtcagaagatttatccagggaaaggcatccgcttcattcgtgctgacttcaagaaaccttcacaaactccttgggagcggagctgcaggcggcggcggagaggagggagcgagcagtggggttcgttgctccgcgagg

SEQ ID NO: 38961 - DNA, 496 bp, Setaria italica
  Peptide Sequence Number=SeqID_104935
actgcagcgaggtgttcaagtgcacatgggagaggtcgaggtcgtagaggtcgtagcggaggtggttggccatggcggcgacgaggctggacttgccggtgccgggcggccgtagagcaggtaaccgcgcttcccaggccttgccgatgcggcggtagtggtccctcctgctggcgaagaggtcgaggtccgcgacgatggagcgcttgaggtcccggtccatggcgagcgtgtcgaacgtggccgggtggtggtggctgaccctgtaccacgtccggccctcgttcatgcagatcttgagcgcgcggtcccgctgctccacctcctcggcggcctccatgacgaagggcacgtactggtccacggcgacgtccgtgtgctcggcggcgaagctgagctcgagcacgaagtcgcggtcgccgccggtgccgggctcgtctctcctggccttcttcttcccccggcagaagtagcagtgtgacgacggtgaacgagt

SEQ ID NO: 38962 - DNA, 403 bp, Setaria italica
  Peptide Sequence Number=SeqID_104936
acacaagtgtatctcaatatggagaggtatgaagaggcaaagaaagaggcagaggagggactcaagttgttgctggaatggggcataagctgggacaaaaggatgacttgggaagtctgggtgtcttggggcagggtgatgctggacaaagccaaagagaatgagtggcctcacagtgcagcaggcatcaccgacctggggcttgtgaaatgagcagctggcatgtaatgatattgggtgccgtgtcttatcttgaatttggaaggctatctcttgttgttcatgaagaaccacctggttcctcgtaggtttagtctacagtttcttttaatcttgaataatgtaagacaccatgtagcccatcttatctaataaataaggagaagcaatgagtcggtactcc

SEQ ID NO: 38963 - DNA, 1132 bp, Setaria italica
  Peptide Sequence Number=SeqID_104937
aacaacacgcagcgcatcttctttctcttctccgccgcgtcgccgccggacagcaccgccgaatcgatggagggttgggataaggggacgaagagcacggtgggagagatcccgctgctgacgacgcgggcgggtccgcgggacggcgaggcgtggcggcagcggctgaaggaggagtaccgcgcgctgatcgcctacacgtcggtgaacaaggccaaggacaacgactggttccgcatcgccgccgccaacccggagggcacccgctgggagggaacctgctggtacgtccacaacctccgccgctacgagttccccctccagttcgacatccccgttgcctacccccaggtcgcccccgagatcgagctccccaccctcgacggcaagacccacaagatgtacaggggagggaagatctgcctcaccgtgcacttcaagccgctgtgggccaagaactgcccgaggttcgggattgcgcacgcgctgtgcctcggcctcgcgccgtggctcgcggcggaggtcccgatcctggtcgactcgggcatggtgaagcacaaggatgatgaggcagctcctgccgaggcatctggctctgctgctccatcttcctagttgcaacttgcaatggagagtgtgcttattgtctgatgagctaagtgatgattggataaaaactcggtggtgaaccaccaaataagagcaatacttgcatatctaacaagcatgtcccatatctgctgattgctgacggaaaacttgaatatcatcttagccttagccttggtagcatcagttgccattgagtttcccgaaacctgcagggtgtcattcaacctgcgcagttcttcatagttcctgttgggatttgcatacagagcatgagagaacatcctcatgcagaattcatctggattacacttgtccaagatgtcacggaagagctgggaattgttgttgccaccttcattctccccttggcctgtaatcttgagcacaatatcatggtacataccaacacgggaataggctacaggttcccccgatgcagagcaaaattctttggccttctgcctgttctttgtgatcactatcaccatactgccattggcgcaagtcaacaggctcaaag

SEQ ID NO: 38964 - DNA, 1137 bp, Setaria italica
  Peptide Sequence Number=SeqID_104938
gtgtgccttggcagtctctttaggctccgggtaacttataattactttaaacatattcgatgacaaaccaccatacaggtattcgcagtccagttcctgcaagagtacgcaaccaaccaatacatacaatacaacttccatgtccaaatacaatgtccactaattaaagagaaagccttcaacgagacgatgtgacttgcagttctatcacaccttcagtaaccaccatcaacctacacacggttttgaaatttgaattctattacgactatcatcagcttctggtccttgcaccttgcccgcaacaagactacaaccactctcttacacaccagcagtctcgtccaaggatgcactagtcttcatccttttactgccatctatgccaatgtcagtgtcgtctcccttgcgcttctgaggctgctggctttcattgttgtcaacctccttggagcccttgatctcttccacagcgtcttcttcgactaacgcatccaccacttccaccacttctgttgcattcgtcttgttcttcatagcatcttttccttcctcagcatctcctttatccttcttattaggctgctcgtctccctccttgatttcagccacagttttgacagaaccatcagcgttgacatctgaatcttcgatttcgcaatccatcttcttatcctcatcactaccttgctcatcctcattcaagctgatatcgtcctctccctttgccaaaccaccatcagtttcctccaagtcatcactatcatcaccgcattcgttagtgtcatcaccgccttcttcaacagccttctgcaaagactcgatcagatccatcatctctcggttgatctgtggattcactaggaagtcacagatatcagttgggcaggaagggcacttcttcacaatcttttgagcccttagagtccgaccaccacggcttctttctctcacagaggactgggtatcatatgccccaagcaaacaagtcttgcaaaagttgtgagcacagggagtagtgagtggttctttaatcacttcctggcagatagaacaagcaaactctttcagcagtctttcggccacagacatctgagcacaccttgttcttctccggatttgcttgtcagtcttcta

SEQ ID NO: 38965 - DNA, 308 bp, Setaria italica
  Peptide Sequence Number=SeqID_104939
ctggtcaacggggtagtcgctgacctcgacgccatggccactagcgcggatctcacgagtttccggctggcggtggcccacgtccaggtcgagtcgacccgcagctttgtttccgagctgtgggccgaggtggacggttggcaacgtgccctccccgctatcgatgacctttctcgggctgtggaggaagccatgtcggaggcgaaccgtcgcctcgacgaggtgcgcggcttggccgatcgcgccgcgtcccgcacccaggagctagctgatctgatggcgatgccgaccgctctgctcaccagttg

SEQ ID NO: 38966 - DNA, 444 bp, Setaria italica
  Peptide Sequence Number=SeqID_104940
tctttctttagtttctggaagtttagaaattgatcgacgaatatgatcccagcactccccgtgctctgctctgggatcaccgttggcacattgcagtcccagtcagtccaccaaataaaatcctctaaaagccccacatccaactccttcaaactatcaagggatccttcgtccctgatgatttgtagcccacaaaggcctgcaattagaatccagtcactgtcaggtcaccaaaatttgaaggccttggagatgaggaaagggaagaggccagccttagggatgcagctggataggatgggcatgaacataggatgcttcctattgtttccattggatgcaaaacatcctggttccattattgtctaaggtcctcgggtattccatcattgctgcatccaccattgccaagctccctcagatactaaaaattttgaagcatgg

SEQ ID NO: 38967 - DNA, 418 bp, Setaria italica
  misc_feature (416)..(416): n is a, c, g, or t
  Peptide Sequence Number=SeqID_104941
ttgcaggcagtggaaggagcaccatgctgaagatacttgctggtagagccaatccaagtcaagattctggactgtctggcatagtcatctacaatgaaaagacagtatccgaagttcaaaagagtcgactgattgcctatgtctgtggtcagctcaacaagtaagtcaattaagattataaagacttcaaggttataaaaatctagcaaaaccagccttatctaaatgatatgaacttaggttacagctagagcatataatatgattaattcaaatcaagctatctagtgacaaactgttccttcctttggggggaaaaaatggagaatgcatgaaaaacaaaagcttataacagcactggatggaggaggccagaggggtatatttgacgaaggcgaaggcacacaaaaacccgntg

SEQ ID NO: 38968 - DNA, 110 bp, Setaria italica
  Peptide Sequence Number=SeqID_104942
ggaggctcatgctgagaagattccaggacgcacgaaacaggggtggtggagtggctagtcagtcaccctcactgcacagcatttgaacaggagtacaggacaacgatttg

SEQ ID NO: 38969 - DNA, 497 bp, Setaria italica
  Peptide Sequence Number=SeqID_104943
ctttggtacgcagcattttcctttctagcatgtacagcagacacaagaagtaatctttttatggccaagctaattgattgcttgtgtattttggaatggtaggcctaacagaagtatcaagagggtgctgcggatcaggggtaattgaagttgggcaaacatgccgagggcgaagaacatgtggagaccccagcaggtacctgtactgggatgctgtccatccaacagagacgacaaaccaacttatcgcgaatgtgatgatggattctattagagaactctatagctagactaagtgaaaagagggccgtgatttatagtctggattttactgcttcagggggcactagtttttatcggagtcatgcgtatctaaatgtaatagagttaatatatagctaaattcgaaatggaccttattgtgtcacagaaaaagagagagggactactagtagtcaaattgtattgtgatgctgaattgctgatggaatgatagg

SEQ ID NO: 38970 - DNA, 855 bp, Setaria italica
  Peptide Sequence Number=SeqID_104944
ggagaaactgggtataggaggactattccaggcttcttcgacacaaacctgaggctcgcccagctcaggaggggtgtaagctttgcatcgggaggctctggatatgacgacagcactgccaacagaataaatgtggtgtcattctctgcacaattgcacaaccttttccgttacaagctactcatccgaacattgcttggaccgagaagagcagagcgacttgttaacagggctacctttgtgataagcgctggtacaaatgatatactttctgtctatcttgcatcaaatcggtcgaatgcaattagtatggatatgtacgagaatcacctgatagcacgtgttgctaatcatacccaggctatgataatgcttggaggaaggagatttgtttttgttggactgcccccgatgggttgcatgccaattgcccgaactttggtcggcacaggatcagacagatgtgatgagacattaaatcagcttgcaacttcattcaactcgaagctagttcaactgttgaattttataaattaccagcgtcaaattagaacttcatacatagacacgtatacaactatacatgacgcaacagtggatcctaagacctttggcctaacagaagtatcaagagggtgctgcggatcaggggtaattgaagttgggcaaacatgccgagggcgaagaacatgtggagaccccagcaggtacctgtactgggatgctgtccatccaacagagacgacaaaccaacttatcgcgaatgtgatgatggattctattagagaactctatagctagactaagtgaaaagagggccgtgatttatagtctggattttactgcttcaggggg

SEQ ID NO: 38971 - DNA, 1031 bp, Setaria italica
  Peptide Sequence Number=SeqID_104945
gctccgacattccccactccattgccgacgccgacgtactgtcccgccggcgaacatgtccaatatgatggccttgattctgctgttgttgaggtggaagccgaagccgcctttctcctgcaggccgatgagcacgtcgacgaggttctcctcggcgttctcggcgccgctcctgaccttctcgtcgaggatggccttcctctcgtcgatgatctcctgcaggatggagtccaccgtcctgtggatgtcctggaggctgcgcttcatgccggtgaccttggccagcacagtggtccacgtcgggaacaggtccgggatgttgaagccgctcgaaagcccgacgccggccttgatggccgccatgaactccggcgcgttcttccgcttcttcccgaacgccgcccgcgacacgatgctgttggtgaggctgtggaacatgacgctcaggttcaccggcgtcgacggccccgccgcgcggatctcctccagcttcagcgccacctcgtcctccctgatgtggcggaaggagagcacgcgcttggggctgaggatctcggcggcgcagagctggcggagcttgcgccagtagtcgccggagggggagaagaggatgtcggcccagttgtagccgacgattctcgcccgcgaggagcttgggccgggtggcgaagttggtgtcgtgggtcttgagcaccgcgcgcgccgcctccttggacgacgccaccacgagcggcgtctccccgagccgcagcatcatgagcgggccgtgcgcggccgccagttcccgcagcgcgcggtggggcagtacgttgacgaggtggtgcatgctggcgatcactggcagcttccacggcccaggcggcagccgcggcctcggcctcagggcgagcttcaccagctggagcagcgcggcggcggccacggagaggaggagcgactggtagatgtacgcgtccatggctgcgggttcttgctagctagtacacagtagctagctgctgagcttgcttgctgaggagtgtagaggacag

SEQ ID NO: 38972 - DNA, 282 bp, Setaria italica
  Peptide Sequence Number=SeqID_104946
cacctacataatatgttcctaggtgttgttaggggctgcgggtggcaaaagattggtgcttgtgttaatcttggtgcgtactacctcatcgggattccagctgccttctgtttcgccttcatttatcatttaggtggaaagggactttggttcggaatcatctgcgcacttatcgtgcagatgctattgcttctctccattacattgtgcagcaactgggagaaagaagctttgaaggccaaggacagtaattttcagttcatccctaccagtagacatgac

SEQ ID NO: 38973 - DNA, 465 bp, Setaria italica
  Peptide Sequence Number=SeqID_104947
caaacataccctattatctcgtatgaatgcaaacataccctctttcctgtagctttagaaacgttggacattattcctttttgacaaggttatatgcagttttgagctctttcgtaaaattggagattattcctgaactttgcactgctcatttttcttcaaatacttaagcagaggcgagcttaattgcctagtaaagccagcctgtctgcctgtgtttataattttatatccataagaatgcttctgatttctcagagctatatgtcatgccagtgtattatcagtttgtctttatctttgctccaaatcaatgccatcactgttttttctcgaatactggaaatactcattagtgcagagacaaattttatttattttgaatcaggatgccgcagcaggtgcagtaccatggagatgaggatgcggaacagtgggtgttcgcaggggacgtacgcggatgag

SEQ ID NO: 38974 - DNA, 632 bp, Setaria italica
  Peptide Sequence Number=SeqID_104948
tacaacaattagacttttttttaaaattacaagaacaatgatagttaccatggatgaggagcttgcaggggagcctttgcagtcatcagagcactgaaggttagtggagaggcatgtgagaatgttttcatgtttcggtgtcttgcatactgcagtgccctatgtttttgaaatgggtgaaagtacaagttaagaaatgttggttgtcttggcaaacctgagtattggcgaatgccaagtcataccctttttgtgcatgtgtgatctctttgtgcatttttagctgatcatgatagattgagtgagcatgtggcttccctccaattttctgttcatggtcataggagctgcgggattttatatttatatatgtctctggctaccaaatatttggtggtgttttgctattgatgattggggtagttctctcttcatgatcctttgatctatctttatgcctcaggtgattttatttttactttttgcagtaatcatcacatgaacgaagtctgaaagaaggatggttactttggtttcttttggcctgcagaatttagttcttgttatgtgcgttcaaattgagttatattacagtaacaattgtactgataactatttggttttctggcagc

SEQ ID NO: 38975 - DNA, 438 bp, Setaria italica
  Peptide Sequence Number=SeqID_104949
ccagttaacatcgcgaggcgtcacggttttccctaccagtgagcaagctggatcctgcaatatatggctcaccagaatcatcgattacagaagcagacattgcttgtcagctcaatggactcacagtacaacaggcaatggacgaggcaaagctgttcatattggactatcatgatgcctacctgccattcttggaccggattaatgcgatagagggacggaaggcatatgcaacccggacaatcttgttccttacccaagctggcacactgaaaccaattgctattgaacttagtcttcctccaagccagccaggcgagcctcggctaagcaaggtcctcacccctccctctgatgctaccaccaactggctctggatgcttgccaaagctcatgtcagctccaacgacgctggtgttcatcagctcgtaaatcact

SEQ ID NO: 38976 - DNA, 876 bp, Setaria italica
  Peptide Sequence Number=SeqID_104950
cctgcaactcctgggtgcagaccaccagggaactgccgaccaagagggtgttcttcagcaacaagccatatttaccatctgaaacaccacctgggcttagagaactaagggataaggagctgaaggacctgagaggagatggcacaggagtgcgaaagttatctgacagaatatatgattatgcgacatacaatgatttgggcaatccggatcgggggaaagagttcatcaggccgatccttggaggcgagaagatcccttacccacggcggtgccgaactggtcgtccaccaaccgataccaacatgacggctgagagcagagtagagaaaccgcatcggatatatgtaccccgggatgaagcatttgaggagctgaagcagggagccttctcagctgggaggctccgggcagtacttcacacccttatcccatcgatgattgcaaccatctcagctgatacccacaacttccaaggcttccaccacgttgataatctctacaaggagggcctcaggctgaagttgggtctccaagagcacctattccagaagataccccttgttcagaagattcaggaatcgagtgaggggatgcttcgctatgatacacctagcatcctttccaaggacaagtttgcatggctccgtgatgacgagtttgctcggcagactgtggcaggaataaacccagttaacatcgcgaggctcacggttttcccaccagtgagcaagctggatcctgcaatatatggctcaccagaatcatcgattacagaagcagacattgcaatttagctcttttagttacacagtacttactaaattaggtaacttaactaaactaaagttaaactaaaaactaaaggtaactaaa

SEQ ID NO: 38977 - DNA, 529 bp, Setaria italica
  Peptide Sequence Number=SeqID_104951
ccccgagccggcgacacccgaggagcgacgggtgcgccaagagatgcgcgacttgctcgaatgcgccactgtctagcaggcagaaagttccgcgtcccggcgacgcggacaaaacgccagtagggcggcgcccggcgcgcctccggagagacggggggagtctgtccaccagcctcctcctagggcaaaccaggccgcgtccgttcggcggacaccaccacccgcgggaggcggggctcgatccgttcattgacgcgtcagccccgtctcgcgcgcccgcgacaccctggacgcgcggaggcgcacccgcgcggatagggaggatggggtagatcgcggctaccagatccaccgcggcgggtgctacgacagcaaggaagaccgtagcccgagccctgacccggcggggccccgggccttctccgcacgcatcctaaacgcgccttttccgccgcgcttcaggcaaccgacgaacgtagccaaatactcgggggagatgaaccctggggtttggctcagcgactaccgg

SEQ ID NO: 38978 - DNA, 778 bp, Setaria italica
  misc_feature (35)..(35): n is a, c, g, or t
  Peptide Sequence Number=SeqID_104952
ggtgtagattgctggagttgccaatttaccatcgngtaccacaagcatagcgtatgctgggtacttggaagacgcccaagatgggatcctgtgggcaccctgctctgtgagcacgagagcacacattcttcttcgtcgtcgtctcttgaaagggcatgcggcatgcctgaacttgtggtacacatcttgctgcactggcatccaagaaatgaagtgcgtgaattgttcagaagcaataatacttttgcagtttgcagtttgttagagatgttcctcttttgcatttgctgtacagctcacttgggttgattgtttccttaccaagattgatgctttacttgatggcttgctgctttaggaaacaaacactaacggagcggtgagttccttttaggggccgacagcatgcatggcatgcgaccgctcgaatgaattccttttccccatctctttctaatactactaagctttcccttcccaatgaacatatggggacagtaacccagttattttcctctgcttgaatgaatgagttctaacgatctcacggtaaattccccatctcccctcgcacccttcatcagttctcctccttcccacagcggctagatcgtcttcaacatcgatagtaaaaaaaataactttaaactatcataaaaatagaaattttaaagtgtcgtccatctggcgaaatcgaacggtagaaacaaaggaagtaccatgaagtactaaaagagaagtaccaagaagtatcaatttggtggaacccagaaccaaa

SEQ ID NO: 38979 - DNA, 2063 bp, Setaria italica
  Peptide Sequence Number=SeqID_104953
tttttttttttttttctcgagaaaaatgtaattgccattaggggtacatagaaatacacgaacattttcagttcatccatgctaatcgtgacaataaccgagtataaaacttccagcccatgccaggccccaaattaaactgctgaatacataagaccaaatggtaccgaaactgtttcaggttattccttccacagatgtcacaattctagtaatgtggcactagcagatgtctcaaacttggatctatgaatacattggcatgaatgtaatcttagcacaattcaactctggccagatactagaaacgccagcaaggcaaaaacgcaatgcgcctactccgacagggtcgacttcagctctccgctcttctccatctcgagaatgatatcacaaccccctatcagctctgatttgtagtacagttgagggaaagtaggccagttggagtatgccttcagaccttgtctaacttcctcatctgataagatgtcaaaggatccaaagctgatcccttcattcttcaacgcgttcacaaccttcgaactgaagccgcaacgaggagcatctggggtgcccttcatgaaaagcatcactggggctgaggaaatcaaggccttcagtctgtcctcaagagtttcctttggtataacccctttctcagacagaaccttcttcaattcaccactcttatgcatctccatcactatgtcggaaccaccaaccagttcaccttttatgtacagctgagggtaactaggccagtttgagaaaacctttagaccctgtctaacatcatcatctgcaaggatgtcaaaactggagaaaggaatgttctcttgcttaaggatgtgaaccaacttcccactgaacccacactttagctcctcaggtgaacctttgataaataccatcacagggctggaattaacaaggctttccaaacgagctttcagagcatcagtaagcccgactggttcagaaactgcaccaccctttccagttggagcctcaggttccactgtctcaacgtttttgcttccctgtggtttgaggggaatattgtgctcctcaaaaacatccttcaattcaccactgtcatgcattgcaataacaatatcacatccaccaagcagctcacctttgcagtacagctgagggaaagtgggccagttggagaacttcttcattccttcacgtacatcattgtctgtgagaatatcaaagctcccaaaatcgactccttcctgcttcaaaatgtcaaccactttacggctgaaaccacaccttggttgctcaggggttcccttcataaacaaaaatacaggatgtgaattgacaagctgctccaatcgcttattcagtgaatctggcaggccaacagagtttgtgccctcatcagcagaagatccattccgctgagccaattcttggaccttttcaagtacagcaggcccagcagccactccaaggctagcaggtacagcggactcagcaacactagcaggcccagctatttttgcaaccttattggccaggctagctggatttgctccctcaagagtatcaacagttttgccttccttgcagaaaacaaaatatggcaccgctgaaactccatatgcctctgatatttcaggttgttcttcagcttcaaccctgaggaagactgcgtgggggaagtcgacggcgaggtgggcgaagacctcatccatctgcttcgacgcctcgcaccatcccgcccagaagtgcacggcggccgcccgcgcgccggccaccgccgcatccagctccgccttcgaccccacctccctcaccgccccgccgctcgccatcgcctgcactgcaccaccacccttcgcaggatgagacgggaagaagagatgcgggtggaggcggcggtggtggaggacgccgggagtggaggttacggcttggggttttcctctgctttgcggccgcgcgatcgaatcgatcgatcgggtgggtcgtgcagagcagcgcggagcgagctcagagcccggatgggtcgccttccttttttttttttgtgcggcctaccc

SEQ ID NO: 38980 - DNA, 1054 bp, Setaria italica
  misc_feature (976)..(1054): n is a, c, g, or t
  Peptide Sequence Number=SeqID_104954
gatcttgctccctggcatgtacgaggaggcactgaggctgccataagtcgttcaggagctcggagctcgccgggacttgaagctgcggctcgccggcggcagggatgcctctgtgggacgtggaggtcttcgccgacgagaagcgcggcgacgtgtacctcgcccaaggctggaagaagttcgcccgcgcccacgacctgcgcgacggctacgtgctcgtcttccgctacgacggcggcgccgccacgctcgccatcacggtcttcgaccggagcacgtgccgcaagcagtacgtgcacgccggcgccgctggcggcgggaaggccggccgacggtcgctggccatcgccgagccgtcgcagttcaccgtgagtctgaggcagtgcaacctgggaacgaagcagaaccagtacctgaacgtgccggtggagttccaggacgcgcacgggtacgcgcggcggcggcgggtggagctgcggatgggcgggcggtcgtggtcggtgaacctgaagcgcgggaggcgggcgctcggggaccgcacggcgctcaagtacgggtggcaccagttctgcgtggacaacggcctcgaggtcggcgacacctgcttcttcaaggtgatccgcgagggcccctgcgtcgacgacgacgacgacgagtgggaggacgagtgggaggacgacgagcacgtgctccaggtggaggtgcgcaagaaggacggcaccatgctcacctgatctgatctcgtcgcgtcacgacggccgatgctgctgatgatgagcaatttaataacctagtaatctacgtgctttaatttggccggcttccatgttatgtggaatgacttgttggcgacaactaggatttctattctgactgctgatgaattagattgttcgttctgaagctgtcagtaaagacgatctctgctctgaagttattcttgtgaacggcatggataaagttagcaactactccnnnnnnnnnnnnnnnnnnnnnnnnnnnnnnnnnnnnnnnnnnnnnnnnnnnnnnnnnnnnnnnnnnnnnnnnnnnnnnn

SEQ ID NO: 38981 - DNA, 759 bp, Setaria italica
  Peptide Sequence Number=SeqID_104955
ttcctttcgtcttctaggtagtcttgggtccttgtccgtttgcttcccgtccgtccaagctccggggcgcggactttccgccggggcgccaacatggccatcgtcggcggcacggcgctcgacttcgccttcctcgagtccatcggcctcggctacccggtctggaacaacggcgccatgaacgtccagatccagtggctccgggacattcttccctccgtctgcggcggcggcgcgccgccgggaggacctcgctgcagggcccacctcgccaagtccctcttcgtgttcggcccttcggcggcaacgactacaacgccatgctcttcttcggcttcaccacggagcatgccaggaactacacgcccaagatcgtcgacaccgtcgcctccggcgtcgagcaactgatacagctgggcgcggtggacatcatcgtcccgggagcactgcccgtgggctgcttcgcagtctacctgacgttcctcccgagctccaacccggcggactacgacgagtacgggtgcctgaagccgctcaacgagctctccgtctaccagaacgccctgctccagcggaggctcgccgggatccgggagcggcacccggcggcgcggatcatttacgccgactactacggccacgtcgagcggatgatccgcagcccggcgcgcttcgggttccgcgacggcgccgtcccggcgtgctgcggcgccggcggcggcaggttcaacttcgagctcgacgcgcggtgcggcatga

SEQ ID NO: 38982 - DNA, 310 bp, Setaria italica
  Peptide Sequence Number=SeqID_104956
gtcggtcgttgtctcctttctccgcctcgccgccaaaaccctagccaccgctccctccgcctccaggttctctctccgaggcatcaagggctaggggtttttggtgccgcgccgcgggctcgaggcgatggcgggtggcgggaagaaggagaatgggggagggcctgggccgggcgctgatccggcagcggaacaaggcggcggcggccgccaaggagcgcggcgaggcgctggccttcgggcgccgccgcgcgatgccgctcgagtccgtcatcgacgtcagcgatatcgacgccgtgctgcagccggg

SEQ ID NO: 38983 - DNA, 463 bp, Setaria italica
  Peptide Sequence Number=SeqID_104957
gagaattggtatctgaaatggaggctaaaggagtgaagcctgatgttgtgacatacagtacgattctcagtgcgtactgtaagagtggcgatacagattcagcgttccaagtgaaccaaaaaatgcttgaaaagggtgtgcttccagatacaatcacctactcatcactcataaggggtctttgtgaggagaaaagactaaatgatgcgcatgtgctctttgaaaatatgattaaactcagcctaatacctgatgaatttacctatacatcacttattgatggccactgcaaggaggggaatgtggagaaggctctttctctgcacgatgagatgataaagataggagttcttcctgatgttgtgacgtacagtgtgcttattaatggccttagtaaatcagcacgtactaaggaagctcaacggttgctcttcaaattgtatcatgaagatccagttccagc

SEQ ID NO: 38984 - DNA, 319 bp, Setaria italica
  Peptide Sequence Number=SeqID_104958
aaaacatattgtattcaacactttttggtactatacaaaatggatgattcaattcctctctgtttcaagtaataatgcagggattgcatttgtcctttcaagctttcagaggatggcattgagctgcattttgcaacgaatcaccttggacattttctactgactgatcttttgcttgggaagatcaatgttacggctaaagagagtggcatagaaggaagggttgtgatagttgcttctgacagctacaagcatccatatcgagaaggaattcgttttgataagatcaatgattgtagtataagtgaaaacagcctcc

SEQ ID NO: 38985 - DNA, 680 bp, Setaria italica
  Peptide Sequence Number=SeqID_104959
agaagagcaaatatgacaggcaagctaagaaggagcacatgtctaaattgctcttttcaaaagaagtggagcatggagacttgccaccagaactaacactcaatgataggattttggaagaaatgactgcacgtgaagacctcaaaaaattgtttgtaaagatttacattgataatcaaactgatggttcacctggagagacggagaagaacactacatgtgcacatgcctaataatatgaaacaggatggaagaaaatgatgaagacactaaagcagatgacggactattgagatgctgttgctaccagggaaatttgatggatttctaccagtgttccaggctgagtcaaaagggatgacctagaagtttatcatgacacagcaccattagatctgtggctaaacctgcgaaatggattatgttgattgaatcgctcttgtactggattgtttgcaatttcctttgttctaattttccatttggtgcattgatgaatctgatatgcatagaacacagctatgctagctggtcattttcaatgtctacttaacaagcagtaccctctgtagttttaatacttcttgcatttctttacatgtctggatgatgctaatatgtgttagtttgattttttatgtatttggtatgttaaacgaaacttttacaattcacatgcc

SEQ ID NO: 38986 - DNA, 589 bp, Setaria italica
  Peptide Sequence Number=SeqID_104960
caattgtagtcctataatgcagagaacgaagaaggggctccatctttcttatcacttctatagtgtcttgcagcacaaaccatctaccaggtctaagtatcctgtcaatttctgctgctacttcaatgatatggcaccttcttgtaaggggccctaggagataactcatgtgaagaagatcgtaagtccgtgggtatgtattgaaagattcacaccagtcatgatataccccaatcaaacctctgttaaaaatgatgggcaatgtatctggctgatcaacaggtacaacattcataacccacaatggttgatgaataagtgatgctgcaaatcctccaaaaccagcattcatgtccataacattgcgaacgctagaccaattaactgcaaattcattgagatatacttctgaaacaaggtccttccaatggtctgtatcagaatcgactctttcttgagaaaactggatggaagagttgttagatgtagttgaatgcttcatagtaagtctttcaggccatgaaatgggcctgcaagagttgttagatgtagttgaatgcttcatagtaagtctttcaggccatgaaat

SEQ ID NO: 38987 - DNA, 264 bp, Setaria italica
  Peptide Sequence Number=SeqID_104961
gcggtgtgattgtgtcgttttgagctccaaggatctcaattggccatttgacctctttcatatcatcaacagtcacatatgcaggatgagaaaggacaactacttctgtatcgtcagtttttgctatctcggcggcaaattttcccccccagcagtaacctccaaccccaatagattttccttcgtttctcaaagaagccaagagtggcttggcatcttgagcagctgtgactggggatgagatttgatccattctgaaaggta

SEQ ID NO: 38988 - DNA, 806 bp, Setaria italica
  Peptide Sequence Number=SeqID_104962
caaatggccttctctgcatccgctacacttcataccatataggccctctcactccaccacctatcacttttatcgcaaatccagcaactcagcaagccaaacctatcccaggagcaccccagcatctagtcaacaatagagctgtgggacttgtgtttgatccatcagatgaccctctagctaaacagaagttcatgatagttaaggcattaccatttgcaaccaccaatgatgcattaaccaagttccgctttgtcacattttcttcggacaccggtcgatgggtcatgtcagatacatttattatcgcaaacatcgaacaagtgaggtgcaataaggtggtatgtgcaagtggtgtgctatactgggattatcaggaggatttaatctggtttgatgttactagaagtgtaacagggagcatcaagatgccctggaagctacaagagtccaactttgaggggtgggaacgccatagcattgatgtttctaacaatggtatgctcatgtgcacaatcatagacaaggatggtttggcattgtaccagcttgtgacaattggtgatcactattgggagctcaagcacaagaaaggatggaaagacattatggagacgagtggtgacgcattccagttctgccactcgatgaagctacgcaatgggtggcagaaaaagttctgtgagaggtggtttgtgcgaccgctcggtttagaaaatgggcggttggtttatattggggtgaggctgaaatggaagacatctgatagggtattacgctatgacatggactcaggcaaggtggac

SEQ ID NO: 38989 - DNA, 471 bp, Setaria italica
  Peptide Sequence Number=SeqID_104963
cagggacatcgcctgagatcggctgcttggtctgctgctgatcgccggagttctcgtcgccgtctggtagcttgggagacaatgggaggaggcaaggacaagcatggcgagagtgacaaggggctcttctcaaacaccatgcattatgtttgagaagagccccttgtcaaacataatgcatggtgttggcggtggccatgggtacccgcatcagggataccctcctcaaggctacccaccaccaccaggggcgtacccgcctccccctggggcgtatcctcctccacccggggcttacccccctccacccggggcatacccaccacagcatgggtaccctcaaccaggtcatggaggcagccatgggggcagccatggtggcttagggatgggtacggttctagctgggggcgccgccgcagctgcagctgcatatggagcacacaagctttctcatgggcatagcggaca

SEQ ID NO: 38990 - DNA, 286 bp, Setaria italica
  Peptide Sequence Number=SeqID_104964
catactaaactcctatgcaggacttaccagaacttctgttgtccggaatgcctctgcgatgtatttagcagggtgattgttcatccttcatctatatgtttggtggggtactatagcctgtgcgcgagtgacaagatggtttgctaataagtgactgaataaccttgtcgattccctgcgttgatgctgtagttaagttaagtaagaacaataagctgttgttctgtgaagattatttcatttctcaagtagggtgatgactagaataaccctgcgtttgtcgggt

SEQ ID NO: 38991 - DNA, 438 bp, Setaria italica
  Peptide Sequence Number=SeqID_104965
aggactaacccaccaaccaaccaaggggcgtacccgcctccccctggggcgtatcctcctccacccggggcttacccccctccacccggggcatacccaccacagcatgggtaccctcaaccaggtggttacccgccacacggtggctatccccctgctggttatccgggctcgtctcaccagggtcatggaggcagccatgggggcagccatggtggcttagggatgggtacggttctagctgggggcgccgccgcagctgcagctgcatatggagcacacaagctttctcatgggcatagcggacacggtgggcatggggtctttggaggctatggccatggaggtcacggctttggcggccacggcaagttcaagcacggccacggccaccacggcaagttcaagcatgggcacggcaaattcaagcatggcaag

SEQ ID NO: 38992 - DNA, 2123 bp, Setaria italica
  Peptide Sequence Number=SeqID_104966
cccacagggacatcgcctgagatcggctgcttggtctgctgctgatcgccggagttctcgtcgccgtctggtatgccgagtctcagccttgaatttgtcttctctctctacctgtgcgcgattccgtagtatttttttttttggctccacgatttctgggggcgcatgtggtggtgctgcgtgcgatcgatgctctgctttatcatgtcctcgcttctgcttatcaaggatggcggtttcggtgaactagggtgcggacggccagatctgtcgatccgtggagcggggttgatgatcctggaagttactcctctgtttggtcaagttctaggtggggattttgtgggttgtggggagcgatgatcaggacgggaacttcgaaatgttttgtttatgttttttaggagttcaatttgagtatccagtagatcctgctacttgtatgaatataacgcatgggattaaatttcctgcttgatcatagttcatcgtagagcaaataagatctattcggtttcgtagtcggccactcctgatacagtagcatgctgaagtaaagcgcgctacgaaattggagaccacagattacttttgtttgtttttatatggaggatccatatctgctcaactttttttaaacaattgatcgtgtgaacgtttaggtgcatgctgcaaggcacggttaactatcatatattaagtgcatcatatttttcctttactaatgaagtatcattatttcccgttgaacatgtaaagttgggtcagaagttgtgtcatgagtggggaacagaccactagttccactttagatgatgacgcgtccaaaatgaagctactagtataccttctatcttgttcaaatttatccctgtgttgcctgttcgttgaacgtagtttgtggatatcaaatattcctactagtatgccttccatcttgttcaaaattgtactgttcaatttacttactagaccacactagttcagcgtctgataccacatccaaagtgaagcttcaacatattcacactagttcatcgcagtgcattttttgtgaatatgttgaagacctgctcagtgcatcttgttacaatctgcaacattcagtggactgacaatttgcctctgcatgttcttcctccaggtagcttgggagacaatgggaggaggcaaggacaagcatggcgagagtgacaaggggctcttctcaaacataatgcatggtgttggcggtggccatgggtacccgcatcagggataccctcctcaaggctacccaccaccaccaggggcgtacccgcctccccctggggcgtatcctcctccacccggggcttacccccctccacccggggcatacccaccacagcatgggtaccctcaaccaggtggttacccgccacacggtggctatccccctgctggttatccgggctcgtctcaccagggtatgaattgctcttccattctatgcttagcttttaaaagtacagagtcatcagaatggatagcaatagcattcctactgaactccatcaagtacttgtgctttttttgtttccaaataaaaaatggtattggctcattacattgagttttggatcttgtggattgcttcttgttcctaatcatgctatgctgcaagaaacaattaagctgatcagtaacgcatcgactttggtatgatgaaatagttctagctctgttgtgttggattgcgctttattcctaattacataattgttctgtacttgtctccaaaaggtgcaccaactttgatttcattatcggacaagcagctaccattgtgatttcagaaatctgtagtcctattgcgtcaaatcagccaaatggtgaagctcatttcatgctaatgggatattgtggttgcaggtcatggaggcagccatgggggcagccatggtggcttagggatgggtacggttctagctgggggcgccgccgcagctgcagctgcatatggagcacacaagctttctcatgggcatagcggacacggtgggcatggggtctttggaggctatggccatggaggtcacggctttggcggccacggcaagttcaagcacggccacggccaccacggcaagttcaagcatggg

SEQ ID NO: 38993 - DNA, 714 bp, Setaria italica
  Peptide Sequence Number=SeqID_104967
ctgcgccccgggcccgcgcgtcagcgagccacaccgcgcgctggcggcacgcgttttcccttcccgaaccagaatcctgctgcaagccttcaaaacttgccttgcgccgcgttgcctcctcgggtatatagccggggaaggggggcggccaaaaccatcacccgtcgcccacagggacgatcgcctgagatcggctgcttggtctgctgctgatcgccggagttctcgtcgccgtctggtagcttgggagacaatgggaggaggcaaggacaagcatggcgagagtgacaaggggctcttctcaaacataatgcatggtgttggcggtggccgatgggtacccgcatcagggataccctcctcaaggctacccaccaccaccagggggcgtacccgccctccccctggggcgtatcctcctccacccggggcttacccccctccacccggggcatacccaccacagcatgggtaccctcaaccaggtggttacccgccacacggtggctatccccctgctggttatccgggctcgtctcaccagggtcatggaggcagccatgggggcagccatggtggcttagggatgggtacggttctagctgggggcgccgccgcagctgcagctgcatatggagcacacaagctttctcatgggcatagcggacacggtgggcatggggtctttggaggctatggccgtgacctccatgg

SEQ ID NO: 38994 - DNA, 1694 bp, Setaria italica
  Peptide Sequence Number=SeqID_104968
ctcgacgcgctccagctgcgccagggcgccttcttcaccgtctgggcgtcgctgatcgctgccgacgtcgccttcttcttctccgcctccctctcctccgcggccgccgcctccctgccgctcaccgccctcgccctgctcctctgcgcccagacctccttcctcatcggcgtctgggcgtcgctgcagttccgatggatccagctcgagaaccccaccatcgtggccgcgctggagcggctgctcttcgcgtgtgtgcccattgctgctcctgcgctcttcacatgggctctcgtgtccgcggtcggcatggctaatgcgtcctactactttgccgcgttctgcatggtgttctactggctgttctccataccccgaccgtccagcttcaacaaccggaagcaggacgctccgatgcaggacagtgatggcattctgggtcccttggagagctgtgtgcattccttgtatctgctgtttgtgccagtgttgttccatgctgcatcccatcatgccacactcttcacatcgtggggcagtgtgtgtgaactgctgctgctgttcttcataccgttcttgttccagctctatgcgtccacccggggtgcgctgtggtggatcaccagggatgcccacacaatggatcagataaggatcgcgaatgggttggttgcactggttgtggtggtgctgtgccttgaggtgcgagttgtattccactcatttggaaggtacatccatgctccaccaccactgaattacctgcttgtcacggtcacaatgcttggtggcgctttgggccttgcagcacatgctgcgggcaaggttggagatgcggccagctcagcggcctttacagtgttggcagtgctagtcagtggagcaggagctgtagtcattggattccctattatgttccttccactgccgatgatttctggttattatgttgcaaggttctttactaagaaaagcttgtcatcatacttcacctttgtggcaattggaagcttgatggtcctttggttcgtggtgcacaattattgggatctgaatatttggattgctggcatgccattgaagtccttcactaagtatgttgttgcagctgtcatcatggcaatggctgttcctggtttggcacatctcccaacaaaacttcgctttcttctggaacttggtcttattggtcatacattgttgctatgcaacatcgagaaccgattgttcaactatgcctccatgtattactttggattagaagaggatatcatctatcctagttatatggttttgattacaacctttttgggcttggctattgtaagaagattatatgttgatcagagagttgggcccaaagctgcttggatcttgacttgtctatattcatcgaaactatcaatgttgtttatgacatcaagatcagttatatgggtttcagctgttttgctacttgccgttactccccctttacttctttacagagacaagtccaaaggggctgctaggatgaaggtctggcaagcttatttccatgcgtctgtcgtagcattttctgcctggctctgccgggaaacaatttttgaagctttgcagtggtggaatggaagacctccttcagatggtctgctactgggttcatatattctgttgacaggagtcgcttgcatcccgatagtcgttctccactt

SEQ ID NO: 38995 - DNA, 2141 bp, Setaria italica
  misc_feature (2088)..(2141): n is a, c, g, or t
  Peptide Sequence Number=SeqID_104969
ttcttaattattaatttttgtttgttgtttgttatttaaactatcaatcagagtgctgctaatttcatgtaagttgataaaatcttattgcttgtgagttttagacatgatcagttatatgggtttcagcgttttgctacttgccgttatccccctttagttctttacagagacaagtccaaaggggctgctaggatgaaggtctggcaagcttatttccatgcgtctgtcgtagcattttctgcctggctctgccgggaaacaatttttgaagctttgcagtggtggaatggaagacctccttcagatggtctgctactgggttcatatattctgttgacaggagtcgcttgcatcccgatagtcgttctccacttccctcatgttcagtcagcaaagagattcctggtccttgttgtggctacaggccttctctttgttattatgcagcctcctattaagctatcatgggtataccggtcagaattgatcacagcagcacatttatctgatgatgacacttcaatatatgggtttgtagcatcaaagcccacgtggccatcatggctgctcatcgcaactgtggtacttacattagcagcagttacatccatcatcccagtgaagtatgttgttgagttgagggctttgtatgcagtggcagttggggttacactaggcatctacatatctgtccagtacttcttccaggcagttgttctgtatcctcttcttgttgcaacaattgtctctgcggcagtctttgttgtattcacacatctcccttctgaatccagcacaagggttttgccatgggtgttctctttcttggtagctttgttcccagtcacctatctgcttgaaggacaattaagagccaaaagttttgcagatgaggatgaagcagagaagttcaccaacatgttggctatagaaggggcaagaatgtcacttttgggtctctatgctgctattttcatgatcattgcattagaaattaagtttgaactggctttgctactgcgcgacaaggctgcggacaggggtgttacacatggcccatctagtcggagctctgccttcccacccaaagcaaggctgctccagcaacgaagagctcatgctgcaccaacattcaccatcaagagattagcagctgaggcagcttggatgcctgcaattggcaatgtgtctactgtgctgtgcttcattatctgccttgttctcaatataacacttactggtggctcgaaccgtgctatcttcttcctagcacccatcctcctgcttttgaaccaggattcagatatctttgcaggatttggtgacaggcagcgctatttccctgtaacaatttccatttccggatatttgctattgacagcattgtataggatatgggaggagacttggcctggcaatggaggatgggctcttgatattgggggcccaggctggctattcgctgtgaaaaatgtagctcttcttgttctgacattgccaaatcacatactcttcaaccgcttcatgtgggattatgtcagacagacagatgcgaagctactgttgacgctacctctcaacttgccctcgattataatgacagacatacttactattcgggtgttaggattgctaggagctatgtactctcttgcccagtacctgatatcaaggcggataagaatcgctgggatgaaatacatttaaaataggatatttaactttttgaggcattgagcctttggacagagacatctttgcctggttggcttggaggaaaaattgcgccatgcagcagagagaagcaagggtcgaatgacttcaccgaatgatctgtatactcagtgtacccgaaaccgaaaggtgctggagcactagcataattgcacatacgataccatcaccttgggccatttactttgaacatttgatggtgtgacattttgcgatatgctttttgacaagcctgagaaaaggactttgtacatcttggtagcttctttcttgtctaaatgatctggtcagataatccagaattgcatgacatgccagtagtttaaaccaaaaaaaaaaaaaaaaaaaacnnnnnnnnnnnnnnnnnnnnnnnnnnnnnnnnnnnnnnnnnnnnnnnnnnnnnn

SEQ ID NO: 38996 - DNA, 141 bp, Setaria italica
  Peptide Sequence Number=SeqID_104970
ggtaacattggaggaacagttcctccaatgttaccacggcatgtgcatagctaagacaattctttcaactgacggtgatttatttgtgccgttgactctctgcacatgccgtggtaacattggtgtaactgttcctccaat

SEQ ID NO: 38997 - DNA, 236 bp, Setaria italica
  Peptide Sequence Number=SeqID_104971
tgcaggtaacaactcctctcattttcaaactaattcctgtggtaatgcaccttggcatccttatgcgttggttccccacggaaaatagtgtgcaaaatgagcttcctttacaggagaaagccgttatgctttaagcccacaaccgatcgctctaacattttgcatagctaagacaattctttcaactgacggtgatttatttgtcttagctatgcaaaatgttagagcgatcggtt

SEQ ID NO: 38998 - DNA, 747 bp, Setaria italica
  Peptide Sequence Number=SeqID_104972
atccaccacagattttgctcatcatactttggaacaggtggaagccattcgcaatttgtttgcagcactcttccttgcaagcattggaatgctcatacatgttaagttcttgtggaatcatgttgacatattacttgcagctgttatactggttataatagtaaagagtatagtcgtaactgttgtcgtaaaggcatttggatacagcatcagatcactgttcaaggttgggctatccttagctcagataggagagtttgcttttgtgcttttgagccgtgcctcacatcttcatcttgttggggtggattactctccttccatttcatgtgtttcaaacatactttcatatttagaacaaactccagattgtcacacatgtatgatgaaaacttataaccttattattattattttgcaggggaaaatgtatctgctattactgggaacaactgcccttagcttggtaacaactcctctcattttcaaactaattcctgtggtaatgcaccttggcatccttatgcgttggttccccacggaaaatagtgtgcaaaatgaggagaaagccgttatgcttgaagcccacaaccgatcgctctaacattttgcatagctaagacaattctttcaactgacggtgatttatttgtgcgttgactctctgcacatgccgtggtaacattggaggaacagttacaccaatcccttttgtggtgatctgggaacacgaagcgtattggtcca

SEQ ID NO: 38999 - DNA, 1995 bp, Setaria italica
  misc_feature (1911)..(1995): n is a, c, g, or t
  Peptide Sequence Number=SeqID_104973
gagtaacttcaacaacagcgtatctgatcatcaagctgttctggagacagtagctgtcattacacatgacaagaagaagaacgattcacagaacacaaattccccaaaacctttccaaataggtgacatgttcggaggtcaggacgagacatctgatgacttggaaactgtgatagataaagaggataatgtttttgtgatgtcaaatcgtaaaacaaagtatccaacacttcaattagatttaaggttgattaaagatctggtggttataatcgtttcggctaccggtggcggtatcatattctcttgtatggggcagccggttattgttggctacctacttgctggttctctagttggtcctggtggtttgaactttatcagtgaaatggtgcaggtggaaacttttgctcagtttggtgtagtgtttcttcttttcgctcttggtctcgagttttcactgactaagttgaaagtggttggtcctgttgctgtacttggtggtctgcttcagattgcgttgttcatgttcttgtgtggcctcactgcggcgttgtgtggtgctaagtcatctgaaggagtgtttgttggagccttcttgtccatgtcatctactgcagtggtttccaagtttttagtggaaaaaggcagcacaaacacacttcatggtcaagtgacaattggaacacttatacttcaggattgtgcagttggcctactgtttgctctccttcctgttcttggaggtgctagtggcatttttggaggagtgatgtcaatggcaaaactgttgcttgtgctgtccatatttatagctgttacatatatgatgacatggtcaattgttcctcgattcttaaaactgatgattcagttatcttcacagacaaatgaactctaccagttggcctccgttgctttctgcttgctgctagcctggtgcagtgattatttcggattgagtcttgaactggggtcatttcttgctggcgttatgatatccaccacagattttgctcatcatactttggaacaggtggaagccattcgcaatttgtttgcagcactcttccttgcaagcattggaatgctcatacatgttaagttcttgtggaatcatgttgacatattacttgcagctgttatactggttataatagtaaagagtatagtcgtaactgttgtcgtaaaggcatttggatacagcatcagaacagctttcgttgttgggctatccttagctcagataggagagtttgcttttgtgcttttgagccgtgcctcacatcttcatcttgttggggggaaaatgtatctgctattactgggaacaactgcccttagcttggtaacaactcctctcattttcaaactaattcctgtggtaatgcaccttggcatccttatgcgttggttccccacggaaaatagtgtgcaaaatgaggagaaagccgttatgcttgaagcccacaaccgatcgctctaacattttgcatagctaagacaattctttcaactgacggtgatttatttgtgcgttgactctctgcacatgccgtggtaacattggaggaacagttacaccaatcccttttgtggtgatctgggaacacgaagcgatggccaaaattaacagcttggccacccgtggagcttccgtatagcattcttttggttggaattttgggttgtacatactgtatatgttgtcaaggtagcatacacgggcgtttgtccatacgagtaaggcgctgatgggggccttggttttgtatcattcttgccacctcaatttaggaagctactagatagggattttggtaccctgtgctcaaatgtactactctttttttgtaagaagattatggaaaagctgtatttttgtagtatgtattgctctgttcttgtacnnnnnnnnnnnnnnnnnnnnnnnnnnnnnnnnnnnnnnnnnnnnnnnnnnnnnnnnnnnnnnnnnnnnnnnnnnnnnnnnnnnnn

SEQ ID NO: 39000 - DNA, 771 bp, Setaria italica
  Peptide Sequence Number=SeqID_104974
taattcgtcactccagagttcatggcaccaagaagcagaagcatgatcatgaggggggacattgtgggtctgatctgtcaaaagttgttgccgttgatgcaaatagaatgtttcctgagagaattggtggttcagctgctgagaagaatccaattggcatgaatgcaattcaagtcgagagagaacgtctgaagataaaaggagaaatgctgaaactcgagcagagccatttgaagtggctgaagtccagcgaggaggaggacagggaactgcagaagatgaagctggagaatgaaaggatgcagctggagaatgagcagctggagcaggagctgaagcttaaggaaattgagatgggcatcaaaccaaagaggatttagtgattacaggaaggaaatgtcagaactagagttgctggaacaatctgcaatccaccaaagaatcgaaaacagaggaactccgtgaattgagaggatctgagcatctgatggtatcatcaccggaagcacggccgaggagtcgcaccagatgctactgagcttctctcagccagaaatatgtgtggaattttacatgtatcaggataagaataagactaaggtgttctatgcacctgaagaccaaagctgtggtttaagtgctgtactttctttttcagttttcttctttatggtaaagactgcagtgcttgagagcattcggtctgatgctagcggatccttaaaaaatgttaagatcattcgtactatggtctttgttgttttaaaaaaa

SEQ ID NO: 39001 - DNA, 487 bp, Setaria italica
  Peptide Sequence Number=SeqID_104975
cgagggcttcaagtcacggctggtgcacgggttcaagaacctgttcggcaggaggcaggaggccgccggcgcgccttcggcgtgcggcgaggacgccggtacccgtaccagctgcttcggcgacaaaggcgccgctgccgctgcgccggagctggagatcgacgacgacgacgtgctctgcatggaggagaggtggcggcctcaccggagaaaccactccctcgtgtgactgctcggtaaagagagatcagctccgtggcgcgctgtgcgcgtgcatggcagacaacaatgcgcgtaggggtggagtcgtagagatccttggaatatgatgacgccactgttttcacacggccatatgacatcgtcgatgatttgttagcttgttctgttgatggaagatgcatggttcttggatgcaaggctcagggaccagccacacgttttaacatgtcgatgcttacagaatgagaggattggttaaggacca

SEQ ID NO: 39002 - DNA, 490 bp, Setaria italica
  Peptide Sequence Number=SeqID_104976
ttcttgaccagtgttgtgtaaaactcttaattggccatgtatggtatcatctgctctggaatactactggagcagttacatgctcttgggccttagcttgagttatatttctttgaacaagccctgaacaagtcttcactccagactgagatttctcaatcttggtactgctgatacttaggactagataattcttcattgtggaggctgacatgtgctttgtaggacatttaacaatatccctggtctctgcttagtagatgtcaataggaccacctgtcatgataatcaaaatgtctgatttggtcactccacaatgtgtgcatatattgaaacaccacattgtatcccataaatatatataattattatttgtcaattaaaaataaaaataaacaaagaaacaaaaaatgtctccagatgttatcaaatttcccctaggggagcaaaatgactccggttgataaccactgctctagatagtgctctt

SEQ ID NO: 39003 - DNA, 469 bp, Setaria italica
  misc_feature (432)..(469): n is a, c, g, or t
  Peptide Sequence Number=SeqID_104977
tggataaaaatttctaaagtttagaattgtcctaaactaatttagaaattggtagtcctaaaatttaggagagagctgtttggatagaatcctaatctttaggatgttagaggaaaaatgacatttttacccccaattactcctctaaatgctcctacattgttcacatattaaatgcttggggagggcaacagaggtaaagggggagtttgaggatcacttttaggagaaaagggactcattaggaccccttgacccttctaatgaaaatagccctcctaaagtttatgagtacacttttaggacccacgtttggatgcacaagtcctaaaaatatcctaaagtggagtcttaatttttaggagtgtgtatctaaacaggctctaagtcatccttgataagtgcaataaacaaaaagggtgtattaatttnnnnnnnnnnnnnnnnnnnnnnnnnnnnnnnnnnnnnn

SEQ ID NO: 39004 - DNA, 364 bp, Setaria italica
  Peptide Sequence Number=SeqID_104978
aacatttgccaggaagatgttatcttcgcaacccacaacggttagctggggagatgttgacaaagttcctccgtacgaatttgtttgcaagcggttccggtagtacccctacacaatgatctctgatggacttgaagaatgctctggtggagttttttgttttgatgttgtactggacccctggctcagaaactgttttctttcagaagtgcaaatcattgtagttaggattttagcagctacgttcaattgtaattgtccaaacagcacacacagatgaaatgagctgaggttgacagaaatggaaatttgtacagttcatttgcggaaattagtcattcctaaaccaaaaaaaaaaaaaaaa

SEQ ID NO: 39005 - DNA, 778 bp, Setaria italica
  Peptide Sequence Number=SeqID_104979
gcctgacgtctggactcaacgtctctgacctcttcccgtcttcgaggctcatgcaggttcttagcacggcaccgcgcaaggcgctcgcgtgccgcaacaggatccagcacatcctcgagcaggtcatacaggacacaaaggaatccatggactacggcaacgaggtggcgaccgggagcgagggcttcgtcggcgtcctgctaaggctccagaaggaaagcagcatggcgatcccactcgacgacaacaccatcgttgcagtgatgcttgacatgttttcagcaggcagcgagacctcatccaccacgctgaactggtgcatgacagagctggtccggaacccagaggccatggcgaaagcgcaggccgaggtaagggaggccttcaaggggaacagcacgatcggtgaaggcgacctcaaggagctcagctacctaaatctggtgatcaaggaagccctcaggctgcacataccagctccactcctgattcctcggaagtgccgcgagacatgccaggtcatgggctacgacgttcccaagggcatggtcgtgttcgtaaacatgtgggcgatttgcaggaaccccaagtattgggacaatccagaggagttcaagccagagcggttcgaaaacagcaacctggactacaagggaacagactatgagtttctcccttttggagctggccgtcggatttgcccgggaatcaatctaggggtggaaacattgagcttgcactggcgagctttctataccactttgactggaagctgcct

SEQ ID NO: 39006 - DNA, 484 bp, Setaria italica
  misc_feature (469)..(469): n is a, c, g, or t
  Peptide Sequence Number=SeqID_104980
cacagaaactactatgaaccattgcatgtcaatcgcaatgatttcgtatctttccaaaatcctatgtgacaagcctgaagctcaaacatctctcatatatttacagagcccctcaaacatttctcatatatttacagagcccctgcctgacttggaatcaccatgcagcttcctaccggatgttgatgatatgctgttgaggtggcattggctgcaaaccccctgctccacgaggttcagaaaccggcgtctcatgcacaacctgcattatcatgaaagttcacattgtgaatatagaagctagaactcgaatgcaaaatgttcctgaagtccacagacctgacgttgattacaccgatgaagcaatgcggtaattgatatcaagatgatgtagacagggttaaggagaaagtgagatatcagattccagtgccttacagttgattagctctattgagcacacttttgnggctgcggagtataa

SEQ ID NO: 39007 - DNA, 598 bp, Setaria italica
  Peptide Sequence Number=SeqID_104981
cattagcagctgtaccggcagcgtaatttgcacagttcagatttttagttaatcagtttgcatataaattagggttaaggagaaagtgagatatcagattccagtgccttacagtgattagctctattgagcacactttgtggctgcggagtataaggaagattgcgtcacggagaaccaacaaagccatcaaagcaacggcaaatactcggcaatatatgacgttttttgggttggaactttgagaatcaaagcttgatgcaccatcagattgatccaaggtgtgaccataactagcaccgtgattttctcgtctttctacagctctcctgaaatttattaggttccttccatgccgaaacaacttcaaaggagcagtgtagtttggtgtcagttgctgcaagcatatctcacatatggtgtctcccttctcgttacaccaccgctggacgcatctgtggtgagcgtacttcaagctgcccttgcaggagcaggggggtctccatgtaggcctcgtcaccttcctcttggcagatcctgcacttcctaccatgacaccgctcttggctttgcccacgcacagctgaacgtcttcagc

SEQ ID NO: 39008 - DNA, 424 bp, Setaria italica
  Peptide Sequence Number=SeqID_104982
acggaagaaaccaaacaaaagaccaatcaactgcaggtgtgttaaaaaaatgtgtcagttggctgcagaatgaacactcatgtcaaagtagaaaatctgtgctttgtaacacttacagcaacggcaaatactcggcaatatatgacgttttttgggttggaactttgagaatcaaagcttgatgcaccatcagattgatccaagaggagcatcgagtggcacctgaaatttattaggttccttccatgccgaaacaacttcaaaggagcagtgtagtttggtgtcagttgctgtggcatcaagagcagaaacaacaaatcagccaactgcaatgtcctgtcattcagcaccgttgactcaatggtgttttttcccctcatcctcagcttaagtaaaagaaaacctgaattactagtatgaaaag

SEQ ID NO: 39009 - DNA, 1366 bp, Setaria italica
  Peptide Sequence Number=SeqID_104983
gaaccaaatcggtcttcctatatctttgtcacaaatgcatgtacattttttatgcaactttcctacaattgtttcacattacaggcaccaagccaacttcatcttcctgacttgtgaagttgagtggctgtatcgtagaattgcttttgtgcacagaaactactatgaaccattgcatgtcaatcgcaatgatttcgtatcttccaaatcctatgtgacaagcctgaagctcaaacatctctcatatatttacagagcccctcaaacatttctcatatatttacagagcccctgcctgacttggaatcaccatgcagcttcctaccggatgttgatgatatgctgttgaggtggcattggctgcaaacccccctgctccacgaggttcagaaaccggcgtctcatgcacaacctgacgttgattacaccgatgaagcaatgcggtaattgatatcaagatgatgtagacaggtatgacgattccagccgttctgaacattagcagagtgattagctctattgagcacactttgtggctgcggagtataaggaagattgcgtcacggagaaccaacaaagccatcaaagcaacggcaaatactcggcaatatatgacgttttttgggttggaactttgagaatcaaagcttgatgcaccatcagattgatccaaggtgtgaccataactagcaccgtgattttctcgtctttctacagctctcctgaaatttattaggttccttccatgccgaaacaacttcaaaggagcagtgtagtttggtgtcagttgctgtggcatcaagagcagaaacaacaaatcagccaactgcaatgtcctgtcattcagcaccgttgactcaatggtgtttttttccccctcatcctcagcttaagtaaaagaaacctgaattactagtatgaaaagaaaagcgctaaaatatatccagctgcttcttttcatgtaattctgttgagaatggttggttatgataagcaagttttggaaagcatcacctgcaagcatatctcacatatggtgtctcccttctcgttacaccaccgctggacgcatctgtggtgagcgtacttcaagctgccttgcaggaggcaggggtcgtcccatgtaggcctcgtcaccttcctcttggcagatcctgcactccaccatgacaccgctcttggctttgcccacgcacagctgaacgtcttcagcaacgacggaggggtcggtgtgctcgtagccgtccgaagtggaaggcacggcggcgtcggcagatgactcatgaacggcggaccggagcgtcgactccgtgatcagacggcccgtcatcagcgcgaagtgatccgccatcctcgagttgcttta

SEQ ID NO: 39010 - DNA, 349 bp, Setaria italica
  Peptide Sequence Number=SeqID_104984
cttctgatgtgttgttgcaaggtggaagttagggctggtgtgaatggctggctgtttggcatcattttggtgctggtgcttctgatgtgttgatttcacagttttgctagcactaacttttgaacgagacgtgcagattgccttcgtgcccgagctggaggagcacgcggtgcttccttctcaatcaggtagctgatggcacttgtcgggaactgatggtgctgggcctgcgtgacgtctgctccatctgcaacgatctgtaggctttcactgttgttgcaggttatcgctctcttcgacgaagcggcgaacctggtctcgccagtttcattgcctttcccgggcgtct

SEQ ID NO: 39011 - DNA, 503 bp, Setaria italica
  Peptide Sequence Number=SeqID_104985
atgtccttcagaaacctgtacttctgatgtgttgttgcaaggtggaagttagggctggtgtgaatggctggctgtttggcatcattttggtgctggtgcttctgatgtgttgatttcacagttttgctagcactaacttttgaacgagacgtgcagattgccttcgtgcccgagctggaggagcacgcggtgcttccttctcaatcaggttatcgctctcttcgacgaagcggcgaacctggtctcgccagtttcattgcctttccggcgcgcatcacttgcaaaaacaaggtcgagtaggtttgtagctgagcagaggcacgttggacaaagcaaaactaccgaagtccagcgttgcttgctcgccttgcgtaaggtgggtatcatacttgacgaacagaacctgcaaaagctcgtcaaaaactgggtagcaaacttttacggtgagttgataagtgaggcagcttatatgaggtggttccgaaacggatgacaggccaagg

SEQ ID NO: 39012 - DNA, 372 bp, Setaria italica
  Peptide Sequence Number=SeqID_104986
cttccctgcaaaacttctctttgttcctgggttactattcgcctctgcgttgcttgggatttgaaatgcggatgtcgtgacggtggtgctgctgtcgccgcagaagaaggagaacgcgggcaccgcgcggcgcgaaatggggttcaaggtgacgccgcgccggaacgtgctgtcggctatcaacaacggcgaggcgaacggcgggacgccgtccgcgccggctgatggcggcggcggcggggcggaggcggcgcccgtggtcgagttcagcgggagggaggacgtggagaggctgcttgccgagaagatgaagggcaagagcaagaacgattacaaggggagagtggagcagatgagcgactacatcaagaa

SEQ ID NO: 39013 - DNA, 660 bp, Setaria italica
  Peptide Sequence Number=SeqID_104987
tgcatgtgtacgccattctgcacgtcgtcgcccgcgcatgagtcaggtaattcataaacatctttaccacaacccttgaatatatccctaaacaaaaactttccatcaacataatctgttcaacatccacttggtgaatccatagcataaccttgagaaatgttctgacttctgagttggaactttggtcagtctagtttcagtgaagaaaacatgctacacggggttccatacaactgcattgcaccattgtgttccaaatcatagattcacctggtggtttaacagtctgttgcctggttgatgatggccaggttgttcgggctttggaaggcgacgtgtcgttggaggatctcaatgaaggtgtccgacctggtcatagccgcttcttcgggtcgtacagcagctccgactatgattctggccagtacaacgaggacatgaagaagttcaggaagatggcgttcaacaacaacaactacaccagcagccaatacagcgcgccgaccagcgagtacggccagataccgtccgcgtcgagcagcgagggccagcagacgcaggagatggagtcgggcgcgatgaagaagagcggctacaagctacgggaataacaagacggaagacaatacgtagaagggaaattacccttacctacta

SEQ ID NO: 39014 - DNA, 349 bp, Setaria italica
  Peptide Sequence Number=SeqID_104988
agctcacgtcgcttccaccagacgccaccggggacaccctccctctcactgtcgcagcagaaaggcgcgccgccgcgttccgttaacctcgccgccgtgctggcgggcgccgcgccaacctttagctcccgacggcggcgggatccgagctccggaccggggggcggtgtgtccccggcgtcgacatacatgcctccatggatccggtcgcggacccctcgccgtcgcggcggtcgctgaagcggcggccgcccgcgcggtcgccggagctgtcgccgaaggcggggggaggggagcctgcggctgcggcggaggcggaggagctgatccggcgggtggaggagctgga

SEQ ID NO: 39015 - DNA, 545 bp, Setaria italica
  Peptide Sequence Number=SeqID_104989
ttccgaacaatacattggaattccacttacatggaagaggtcggccaaccttggattggccgacaaggctaaaaattgctctgggttctgcgaagggattggcgtatcttcatgaagactgccaccctaagatcattcatcgtgacataaaggcctcaaatattcttcttgatctaagatttgaggctaaggtggcagattttggacttgcaaaattcacttctgatactaacacccatgtttcaaccagagtaatgggcacatttgggtatctagcacctgagtatgctgcttctgggaagctcactgagaaatcagatgtcttttcttttggagtaatgcttcttgagctaataactggacggcgtcctgtaagttcgagacaagcgcctatggatgacaacttggttgactgggcaaggcctttaatgacaaaagcattcgaggatggcaatcatgatgctttagtggatccccggctgggaagtgagtataatgataatgagatggcgaggatgatagcctgtgcagctgcgtgcgtgcgt

SEQ ID NO: 39016 - DNA, 868 bp, Setaria italica
  misc_feature (53)..(53): n is a, c, g, or t
  Peptide Sequence Number=SeqID_104990
ctttaaacacacgttcattctttgactttattgatataccgcttgaaatatcncctttttccaccttgcaggcaaggcctttaatgacaaaagcattcgaggatggcaatcatgatgctttagtggatccccggctgggaagtgagtataatgataatgagatggcgaggatgatagcctgtgcagctgcgtgcgtgcgtcattcttcacggcggcgcccacgaatgggccaggttgtccgggccttggaaggcgacgtatctctggacgatctgaacgaaggcgtccggcccgggcacagccggttcatgggatcatatagcagctcggcctcggactacgacacaaaccagtacaaggaggacctgaagaagttccggaagatggcgttgggtggcagcggcgtccagagcggcagccaggagacgccgacgagcgagtacgggcggaacccgtcggcgtcgagcggcgacgggcaccagacgacgacgcaggaaacggaggtggcggggagcgtgaggaaagacgacggcggcagcgctggagacagccagagccaggcttcctgagaatattggtcttttggacggtctcgactgtcaaccaccgcgcatttgtaaatccaccggcccagcctagctgatcgaatcgacataatctgctgacctgttcgcgacgaatcgatgattgtttggttgaggtagcttcttttttccccccctttttgggtagaattggttcgctgtttctctgcgatttcgccgcgactgagaatgttcatgaggtatatatcctgtataattatattcatgactccactgattatgaacaaagctgctgaaaattagttttaaaaaaaaaaaaaaac

SEQ ID NO: 39017 - DNA, 2028 bp, Setaria italica
  Peptide Sequence Number=SeqID_104991
ccgtcctcctccaccccggccacgccatccgcgccgtccccctcctcgccagggactccctccacgccgtccccgccctcggacacgccgtcgccgccctcgtccgggggaggagggaataggtccccgtccccgccgtcgtccgggggaagcgggggcaggtccccgtcgggccactccccgcccaagtcccacaactcgggcggcggcggcggcggctccgggccgtccacgtcgctcgtggtgggcgtcgccgtcggggggttcgtcctgctcctgctcgccagcttcatctgcctctgctgcctacgcaagaagcgccgccgtgccccgcagccaccgccgcactacgggtacccgccgccgcatcagccgccgtacaaggaggatccatatggtggaacataccaccagagttggcagcagcaaaatgcgcctcctccacctcctgagcatgtggtcaagatgcacccttcacctccgccagcatatgccaaccgtcctccacaggcaccgccaccgcctccaccagcgatgttaaacagtagtggtgggtcgggttctaattactctggtggcgagatcctacctccaccatcccctggcgctgcccttggcttctcaaagagcacattcacgtacgaagagttggtaagggcaactgatggattctctgatgccaatctcctcggacaaggtggttttggctacgttcacagaggactgctgcctaatggcaaggagatcgctgtaaagcaattgaaacttggaagtggccagggagagcgtgagttccaggctgaggttgagattatcagccgagtacatcacaaacatctcgtgtctttggttggttattgcatttctggaggcaagaggttgcttgtctatgagtttgtccccaacaacacattggaattccacttacatgggaaagatcgacccacaatggagtggcccactagattaaaaatcgctctgggtgctgccaagggtttagcgtatcttcatgaagactgccatccgaagatcatccaccgtgatataaagtcatcaaacatacttcttgacttcaaatttgaagctaaggttgcagattttggacttgcgaagtttaccagtgataacaacacccatgtttcgacgagggtaatgggcacttttgggtatttggcacctgagtatgcgtcctctggaaagctcacagaaaaatcagatgtattttcttttggagtcatgcttcttgagctaataactgggcggcgaccagtcgacacaacccaaacatatatggatgacagcttggttgactgggcaaggccgttactgatgcgagcacttgaggatggtgattatgatgaattggtggatcctcggcttggaaaaggacttcagtcctaatgagattgcaagaatgatagcctgtgctgctgcatgtgtacgccattctgcacgtcgtcgcccgcgcatgagtcaggttgttcgggctttggaaggcgacgtgtcgttggaggatctcaatgaaggtgtccgacctggtcatagccgcttcttcgggtcgtacagcagctccgactatgattctggccagtacaacgaggacatgaagaagttcaggaagatggcgttcaacaacaacaactacaccagcagccaatacagcgcgccgaccagcgagtacggccagataccgtccgcgtcgagcagcgagggccagcagacgcaggagatggagtcgggcgcgatgaagaagagcggctacagctcgggatacagcggagcatcgtgagggaattcccttcctctttctttctttttgttttcttatgacgtcttcattgcttgcaatttgtaaagtctggctgagttatataaccaaagttgctgacttgcgtgtggtgtacccgagtttgacccgagtatagcttctggttagctggaatcgttgattctttcataagtgtccatgttttgctgtgcaattgaaagagagctaattgactgttgataataataccctgtggcatg

SEQ ID NO: 39018 - DNA, 338 bp, Setaria italica
  Peptide Sequence Number=SeqID_104992
gaaatggtattcaacatttcccttgtgttctccgcgtgtagatcaccataacccacagtggtcagagtagtgattgaccaatacattgatgtaacatagcgaatccacaagctacggtgggttatggtgatctacacgcggagaacacaagggaaatggtattcaacattttctacatgctattcaaccttggattgactgcctacttgatcggaaacatgaccaatctagttgtccatggcaccagccgtactcgaaaatatagagatacaattcaagcagcaaccagctttgcactaaggaatcagcctgagacgccaaggcacacaggggatagg

SEQ ID NO: 39019 - DNA, 288 bp, Setaria italica
  Peptide Sequence Number=SeqID_104993
tttttatatttatacatactttatttaaataagtatcatatgtcttacaatacttgtgataataaatatttacaacacaatattacataaatatggcttatagaactaagttcttttggggaccatgaagattaattcttgtctccaaacatgttgttggattgaaaatccacgagcatgtcgtcggtgctgtccacgagcatgtcgtcagtgctaaataagtcatccaactgcgatgggacctgctcattgttatgtttcgcaggaacatctttggagcaactagcg

SEQ ID NO: 39020 - DNA, 421 bp, Setaria italica
  Peptide Sequence Number=SeqID_104994
gcagtttttcctatacatgtatgcttatgataaagtttaatttatagattaggcacaataagaaattaacaataaaatagatcagttatagtgatctactgtaatgaaagttgtatgaatgtggtctctctcgaaatctcttactgtactacaccctctttttcttgtgatgaggtgagatataaaatgcctgtgtggttagagaaagcgagtgaatgatgaagacattgtgacaccgtgttaggctactgttgaccttctgatgtcgggaggatcatctgcttcaggtgatcctggatcattgagccgagacaatatccatggttggatggtagcagcagacaatgtcaatgactgactggtgggtagcatgaacaagctggacagaggggtaattcacgtcccaggaggcataaagtgg

SEQ ID NO: 39021 - DNA, 712 bp, Setaria italica
  Peptide Sequence Number=SeqID_104995
taactgatgaatcaatatactcatagttatatagctccccaagaaaccgcatatgggcaaggcgttgctgctgcattgcatagtcgtttagctcaagtccaactctaatctcctctagaacctcatctaccactgtcacagcaaagtcatgatgatagtgactaagactagcagtgagtaaagcaatcaggtgaacatggctatactttcccttgtgaacctttagaaaacacttcacaaggtactgttcacagtctgcccaagacaacttgagcaattgaagaagaacatgttgaacagtagatttgtcaagatcggagaaaagtaacctccttatgtattgatgtagatgtggccgaagtttagagactctggaagatctttctggaggtttacataggtaataggcattttctacaagtgtgctatggtgtgcatccaaattcttgacatttttcaatctcttcagtatctccaacatgtttgacatgcgaattgtagtttctggcaagcgataaagaaagcgtccacaggtctcaagaagattgcaggccacatcaatgttatgatgtgtgaaatcatctaagcaagccttcaaacagccaaaaacaaggcatgaaggcgcaattttgaaatttgcaacaaactaccccaaataaaattacgaaattagttttacttaaatttttaagttttacaaatttttagaata

SEQ ID NO: 39022 - DNA, 265 bp, Setaria italica
  Peptide Sequence Number=SeqID_104996
tctttagtaattatcttatatacagttccgtagcaattcacacaattcattgtggtatcaccgtatatcagctgcataatgcacaggccgaccattacgtggaatgtagccatcttctgaataagtggcgagatcaaaatgtcatggcaatacactcctctctcacagctgcaaataggtcggagttcatgtatctctcgcccccgcttgggaacatggtgacaatcatcttccccttgttttcttatctcgacgcgaccttcaa

SEQ ID NO: 39023 - DNA, 554 bp, Setaria italica
  Peptide Sequence Number=SeqID_104997
ttccattcatgcgaatttttttatttttatatatatttctacaaaatcgaaaaaatatatataaaaataaaaagttccattcatgcgtaacttcatttgcaaagggtccacttcggagggaacgtgtttggcagctcgttctgcctcagcctggcccatgagctaggaccgagccagcccagctaggcccatggtggtgtagagtattgagcctggtagcctgggaaacaacctgcaaacaaaaacaacatggcgggatcggcctcaaggacctggaactatagaataaaagtttgctcctagaactgctgcatcgcctccatcatccaactgactccttgtgggcacgctgggtgctgcagctggccaatgtggtagacctcagtggagatatcgccgggactcattggtctgatctccagaatctgctccccatctacagaacactacatactcggtggtttcagatggttcagctacttgtttttggtatgatcgatggctaccgataggccgactctgtgagactttcccaatgctactatcccacgcag

SEQ ID NO: 39024 - DNA, 535 bp, Setaria italica
  Peptide Sequence Number=SeqID_104998
ggcgagagaaggacggcctcagcctcgcctccctgctcttcttccttcgcccaggatcgaacaccaccagcgagtcacagtagcttgaaaccgccatggccatggggctcccaggcctccgctgctgccaccttcccgcgcgcggctcgctccctcccctcggccccgccctcccacgcaggcccctcccgcggacctcggctctccgctactcctccctccaagcccaagctggggacagtattggggaggaggtcctgcgcatgtttcttgaggagaggcagctgcacggcgatttcgtcacgaaaatctctgacatggtctggaggaggaatggcgcaaatgttgatgcggtagaggcgaccgcggtccaagggaacgctgcggatgttgctcagcctgaagatgtccaggaagatgttgcggatgagggagtgttgagattagcggcaaccagggattgggtgtccggtgaaagcagcctgcctgtgagcaagaggcgttctgctaaggataggcagaattgtagtagtct

SEQ ID NO: 39025 - DNA, 893 bp, Setaria italica
  Peptide Sequence Number=SeqID_104999
aaggaaggtaggtggttgcggtggccgtggccgtggtggaggtgcgggccgaggcggcggacgcggaacacggtgacgaccgtggcaacgtgggggacgctgcggatgttgctcagcctgaagatgtccaggaagatgttgcggatgagggagtgttgagattagcggcaaccagggattgggtgtccggtgaaagcagcctgcctgtgagcaagaggcgttctgctaaggataggcagaatgagagcgacaaaaggaaggaacttaaccttttgaaatatgaagctctcaaggatgaattgttgctcttgaccacaggaattggagctgcatgtagtttatactgtctcctggtcttttctctcaagactgctgtcagttatgcttttggggttggtttcagttgcttgtatcttcaacttctgtgtcagcacacagataacctgtcaaaggaagatattccagaagtttttctaaagaagaaagtgaagaaaatcggcattacaagtgaagatttgaagaatacgatagagaagacattgggtggtgctggagtagctctttcatccccaaggcttgtgattcctgctgtgatttttggattgtcagctttatcagatcatttccaaaatagctttttcagttttgaggttcttccagggatgatgggttttcttgcatacaaggctgcagctttggttcaagtttaccgagataacgaggacctccgattgatacttcctgaagaagatgctggtagtgacaacgcttaaggcgtgcaagttagagattatgttaacctagttgttgataaatacagatcggtgtaccaaatcatacttaagtttggaatgaaatttttcacatcaaaaaataataaaaaattgtaaaaa

SEQ ID NO: 39026 - DNA, 1359 bp, Setaria italica
  Peptide Sequence Number=SeqID_105000
tttttttttttaaaaaaaaggaagaacacgctcgcgccaatctttacagtcaaatggtccagaattaaaacactcgagcaattcaaaagacggcggtacgatacttaagacatgacacgacgaacactgtcaaggagcttcaacgacatacgcacacaagcacggttctgagttctcagttggacctgacctgaccagacaagacacacgcaaaccttcaaatggagaatgcaaattaattaaacaaggtaggtaactccgaccgctccagtccggagaggctgcaagctgagcaggtcgacaggaggtagcgcagcttgagacgccgttgaggcctggacgggcgagccggcctagctggagagccagaccatgatctccgacacggccaacttgtatatgtcctccgcggaagggttctcacctccattcacactggtatagatggtaatcatgctccgtgcaccctcggccgcgacgtgcgccgtgatcacatcgatcccgtgcttgttcagcacggacatcaccagcgttagcatgcgtgggtgccgcggcaggcacaggttgatgactgccttctcgtcggagatgctcagcacaacgttcggtgccgaccacgtctggaacccagccggccccgtggccgcggcgagcggtggtggtggtgctgcggccgcaaccgcagcaagaggctgttgctgcggcacaggcccccagccattcgacatggcggccataccttgcgcggtctgcatcaccgacaaggaggacatggcctgagcggcggcttgccgtgcgagtacctgttcctgcttctgcttctcaagctggaccttggtcttctctagggccttgatgaagtggatcgtctctcccaccagagtcgccttgtcgaccttgtctgggatgtggggcatgagcgcgtgcagattgctgaacaggtccttcatccgcctccggcgctctcgctctgttacgatgtgggctttgacgtcgccgtcttcgtcagcagccaacgagcccttacccttggggaagccatctttggcggtgttggtggaagctttgcccgctgctgagtgcttacctttggatctgttggtgttggccttggcgccgctcgccgagccatgctctccaccttggatatcatccaggacgacgtccttccccttgctagcatccatgcccaccgggctatcaatcctggatccaccgttgtcattctcagcgggacccaggaatgtcatggttgccggaggcgtgatgctgcgctcgtcggaagaggcgttgtcttggtggtgaaggggactgtcttgagccatggcacggaggttggagaattttggatgaggagta

SEQ ID NO: 39027 - DNA, 438 bp, Setaria italica
  Peptide Sequence Number=SeqID_105001
cacaagcagacccagtgatgttggtttgacatgcatccatcaaatgcgtatagcgaaacccgactggaagaccaaggtggtcccattgaatccaggacaaacagtgtgcaccatccagattggagctgatatgcttcccaagcagagaagcatgggctcctagagttcctaaggatgtgatgcttttattggtcccaaaagaccttagcagaaatgattgaagaatcattgaggatcatctcaatgtcgaccctagctaaaaattcaatcaacagaaacaccaaaatttgtctatagagcatcaggaggctgccaaggtggtagcctagaagctcttggattatggtcattagggaggtgatacgctccgaatgactcgccaaccctattctcatcaagaagaacaatggcaattggcgcatgtgcattgatttcaac

SEQ ID NO: 39028 - DNA, 184 bp, Setaria italica
  Peptide Sequence Number=SeqID_105002
tttgtgagagtatactcgcacaaaacataccataaatagagtgcttcaacacgatactaccttgttacttagatacttagatatgctgatacagtcaaattaactcatttcttgagaatggagaggtcatcttcaatgcgagcggcagtagttttaacaattaaccacgacagggtacaactag

SEQ ID NO: 39029 - DNA, 666 bp, Setaria italica
  misc_feature (57)..(57): n is a, c, g, or t
  Peptide Sequence Number=SeqID_105003
taggcctgccttttaatttataggaacatatctacattagttctgttaattcattgnttaattcactgttcgctcatagtgaggttactgtgcttagcatttttcatttataccagattgtcatttttgcaggtacgcggtgttgatgtgaaggaagcactgcgccttcaaaaggagaacaaatttgtaattcttgatgtcagaccagaagcagagttcaaagagtcggctcatccacctggtgccatcaatgtacaaatatacagattaataaaggaatggacggcatgggatattgcaaggcgtgcagcatttgcattctttggcatatttgctggaacagaagagaaccctgagtttatacaaagtatggcagcaactgctgctgctctttgattactcataaatgatacagtaatcagcgtatatgttatctttgtacaggcgttgatgagaaggttgggaaagatgccaagataattgtggcatgttctacaggtgggacactgaagccaacacaaaatttccctgacgggaagcaatctcggtccctgatagcggcatacctgttggtcctgaatggctaatggctacagcaacgtgtaccatctggaaggagggctttacacatggttcaaggaaggcctaccagctgttgaaggagaa

SEQ ID NO: 39030 - DNA, 1384 bp, Setaria italica
  misc_feature (1378)..(1384): n is a, c, g, or t
  Peptide Sequence Number=SeqID_105004
aaaattatgcattctatgtgaaataggcctgccttttaatttataggaacatatctacattagttctgttaattcattgattaattcactgttcgctcatagtgaggttactgtgcttagcatttttcatttataccagattgtctccttccagtaacagactaacagggtgcagtccttatgagaagctaagctatcttctaattccctcgagtcctcataagtttttgccctctctctcatgatcacaatgctcgcagctagctctgtagtgaacagcagccttgcttgctcatcgaggatatcatccgggtcagaccttgcatctggccattcctggcgtcccatagaggctgtgaaactccctcggaagcatgctgtgagctcgttacatataagttgtgctgccactaagcctgcgaagactcctgctgaagaggattggaaaattaagaggcaactccttgcacaaaagcgggtacgcggtgttgatgtgaaggaagcactgcgccttcaaaaggagaacaaatttgtaattcttgatgtcagaccagaagcagagttcaaagaggctcatccacctggtgccatcaatgtacaaatatacagattaataaaggaatggacggcatgggatattgcaaggcgtgcagcatttgcattctttggcatatttgctggaacagaagagaaccctgagtttatacaaagcgttgatgagaaggttgggaaagatgccaagataattgtggcatgttctacaggtgggacactgaagccaacacaaaatttccctgacgggaagcaatctcggtccctgatagcggcatacctgttggtcctgaatggctacagcaacgtgtaccatctggaaggagggctttacacatggttcaaggaaggcctaccagctgttgaaggagaagaatgagcaagagagacacatttcttgttacaatgtcgttgctcacatgctttgtgacgagttgtaatgatgtgcttcacaggatctagatcatctctcccgttgagatgtctcgtgttcctcctgccgatatgaagatgtcttaggtttctcgtgtcacctttgttgccaacgtgtcggagtatgatgctgttgcttgggtatgacagtatgatgattatcagctttggccaacaaaaagtgagcagaaccgtagtttcttttgatctcgagcttaaactatttttcttctggcgattaaggctgctgaaagagactttcttcaggttttgtttgtcgctccatcatgttttgtcagtttgtttgttgaaccttctgtcaagatctcagtaattgctgacaggatctggtcctaagctatcaaattttatgtttcagataaaaaaaaaaaannnnnnn

SEQ ID NO: 39031 - DNA, 324 bp, Setaria italica
  Peptide Sequence Number=SeqID_105005
tcgctgactccccccggcgttatccaactcctacccctcctcacctgcccaccacctgctcgccccatccccccggcatggccgccctccgcccacgcgccgccaccgccgtagcgtccgctgagctccggccggcggtccggcgaggcgcatgtcgcgtgtcagcggcggcgttccgctactacccctgctggcaactgcagggcaatatgttgaattggagatccaaatttgcatctaagaagttattgagtacagtagctggtgcaatgcctgatgattcggaatttgaaagtgtggatgcaccacttgagcccgaaacat

SEQ ID NO: 39032 - DNA, 328 bp, Setaria italica
  misc_feature (305)..(305): n is a, c, g, or t
  Peptide Sequence Number=SeqID_105006
cacctgctccaccagggttattccttcttcagttagttttcttcagatgagtgtagcctgtagtgtgctcgtcagatgggatgcagacgattataccttgtcggagctgctgaacggcgacctcttcaccttctctgaaaacaagtcagtggctcgctgctgtcaacaggggttctgttctgcccattcaacatattctaccgctcgacgcgctactgcttcatgcgcgtcatgcgcaacatcatattctcgccattctacaaggtttctgatggctgatttcttcatggctgaccagctaacgngccagactcccactactaagaca

SEQ ID NO: 39033 - DNA, 475 bp, Setaria italica
  Peptide Sequence Number=SeqID_105007
tgctcttccacatgaagaggttgcagccgtacaggaagacgtgcaggctgatgagtgcaaacatgctgaaaacatggtagactatgtccatgtaggctgggcttccggtagaagagaaaatgccggcgacatgggctagaactgaatatatgatgaatagcgacacgaatgtgcctgtgaacaggcctacgaggaatgtgatcatatgggtgttcctgggctgctgcggcttgaggtacttcatggccaccttcctgtcgttgccggcgaaatgcctcaagaagatgcactccacctcgtcggcgagctgaagcaccttgtcggagctgctgaacggcgacctcttcaccttctctgaaaacaagtcagtggctcgctgctgctctgacacctggaatgcagagcatttctcgtcaggtggcgaaacaacagtctatatctgaattcttcgtacaaatcataccgagctactaaa

SEQ ID NO: 39034 - DNA, 1494 bp, Setaria italica
  Peptide Sequence Number=SeqID_105008
catgaagcagtagcgcgtcgagcggtagaatatgttgaatgggcagaacagaacccctgttgacagcagtaggagtgcaccgggcaatgcgtcggtgtaggttgcgccggcgttcctgaggaacaggttgataacgagcgacaagacgacggtgcacatgatggaggctgacatgaggaaggcatccctgtgcgtcagggcggtgttggaggcgaaatcgaagatgaagttgtggttgatcctggtgctcttccacatgaagaggttgcagccgtacaggaagacgtgcaggctgatgagtgcaaacatgctgaaaacatggtagactatgtccatgtaggctgggcttccggtagaagagaaaatgccggcgacatgggctagaactgaatatatgatgaatagcgacacgaatgtgcctgtgaacaggcctgaaagcacaagaaacagcgagttcaggatacatttggggtctgaaattatgaagacgatcgattctatctttgaggctactcgcctacgaggaatgtgatcatatgggtgttcctgggctgctgcggcttgaggtacttcatggccaccttcctgtcgttgccggcgaaatgcctcaagaagatgcactccacctcgtcggcgagctgaagcaccttgtcggagctgctgaacggcgacctcttcaccttctctgaaaacaagtcagtggctcgctgctgctctgacaccttgacgaatttcttcaatattttggtgaaggcctttacattgagagagctgaacttcttgaggagctcgagtccgcggtagagcgccaggaaggcgtcgcggatgttcttctcggcgtgctggaccttcttgcggtggacgaaggcggcggcggggtcggcgccgtccttgcggagcacgttcacgagctcctcccacaccttgagcgccgccctcccggggctcgtcggcgggatgtcgatcctcaccgtcgccggcagctgcagcagcgctcccctccccatgagctgcttcccgctgccgtccttcttcgccttggcgacctcttcaccttctctgaaaacaagtcagtggctcgctgctgctctgacaccttgacgaatttcttcaatattttggtgaaggcctttacattgagagagctgaacttcttgaggagctcgagtccgcggtagagcgccaggaaggcgtcgcggatgttcttctcggcgtgctggaccttcttgcggtggacgaaggcggcggcggggtcggcgccgtccttgcggagcacgttcacgagctcctcccacaccttgagcgccgccctcccggggctcgtcggcgggatgtcgatcctcaccgtcgccggcagctgcagcagcgctcccctccccatgagctgcttcccgctgccgtccttcttcgccttggccagcccgccgccgacgaagctgacgccgttgcgctccagcgccgccatcacctcctccgccaccgccgcgccctccg

SEQ ID NO: 39035 - DNA, 1451 bp, Setaria italica
  misc_feature (1395)..(1451): n is a, c, g, or t
  Peptide Sequence Number=SeqID_105009
tctttctattctttcgtatttcgcctccaacaccgccctgacgcacagggatgccttcctcatgtcagcctccatcatgtgcaccgtcgtcttgtcgctcgttatcaacctgttcctcaggaacgccggcgcaacctacaccgacgcattgcccggtgcactcctactgctgtcaacaggggttctgttctgcccattcaacatattctaccgctcgacgcgctactgcttcatgcgcgtcatgcgcaacatcatattctcgccattctacaaggttctgatggctgatttcttcatggctgaccagctaacgagccagatcccactactaagacacatggaattcgcagcatgctacttcatggctgggacctttaggaatcaggcatatgagacctgcaccagcagcccacaatacacacacctggcctatgtgatttccttcctaccttactactggagagcaatgcagtgtctaaggaggtacctggaagaaggtcatgatatcaaccaacttgctaatgctggcaagtatgtatcagcgatggttgctgctgctgtgaggttcaagtacgctgcaactccaacaccactctggatgtggatggtcgtcatttcatcctcaggcgccaccatttaccagctctactgggactttgtcatggactggggcttcttaaaccccaaatccaagaacttatggctccgggatcagctcatcctgaagaataagtcgatctactatgtttccatgatgctcaaccttgcgctgcgtctagcctgggcccagagtgtaatgaaactcaaacttggtcgggtggagtcccgcttgcttgatttctcactcgcttcactggaaattatacgacgaggacattggaacttctacaggctggagaatgaacacttgaacaacgctggaaagttcagagcagtgaagactgtcccattaccattccgtgaacttgaaactgactgataaagacaaagttaagaacttgttggcatgctcccaacatgaagggaatttaggggaagagatccaggaacgaatacactaccccagctaatgcttgcgctacaattggtgtctaagggataataaagtaatcagaaagcataactgcacaagaccatgacattgcagatttaagatggaataagctcagatggtgcattgtaatgagggtgccagggcacataaacatgaggcactgtggtcaggaaagattgggtggattccttattggtcgattgaagagtgttgtgtgttaatcagctaacaagatctttgttgataactaagttatgtatttatcgaattcatgccagaaaaatattgcatggaattgtaagctccagggcatcaaacataattttaacaatgttccaatnnnnnnnnnnnnnnnnnnnnnnnnnnnnnnnnnnnnnnnnnnnnnnnnnnnnnnnnn

SEQ ID NO: 39036 - DNA, 993 bp, Setaria italica
  Peptide Sequence Number=SeqID_105010
acattttcagttttccgacatgacttctattcttctttgctctatggaaactagaagactcaagtgggtgatgtatatgtgatgaggtggcatttcctttgcttttgctctcccaaactcgggtaacaggagaatcaagtccagtcacattgttgacgtcatcgtcttcagtggcgtatgaactctcactctctactccaaagtcttctgggccagcatgttctgccatgtctgcagataagcttttcggcaggtggttggtgccatttgaatatgcaggtgtagttgagtgtcttaccaagcgctggtcctcagattgagagaacagtgcttgcctttgagaaattgaagtgcagcagggaaccgactgctgccctgaagaagtcgaacctagagaatcagatccaacaggtatatttgcattatgttttgcattttctgatttgtaattctttccctttgtccacatattctcaaggtgctcaagtgctagagcttgatgtgttcgttgggagctgatacccaagggctgtgcacgttctctcccatgactatctgcggatgctatgtcactgcttttggaatgtaaagaaaaccattacccgaagcaacatgggaagtggaatgtaaacttgttgactcaagtggatgtgaagtaccgatcaaagaagcattactggattctggttttagactagatgaatttttacttttgctgggttgcatatctgatgccattttggactgaccctgatgaaatggaaccagttcaacacctggactcgagtgatctattgatgcagaaaattcatctatagaaggcatagaagcctccttttgcttaacagttgtagcatccaccatggattcttcaactcctttctccaacttattagcacgtgaaagagccaatgattcaattctttcatttataaaccttggatttactaagttcatgacaggtctcaaaactgcacaagcgagaagttctcg

SEQ ID NO: 39037 - DNA, 586 bp, Setaria italica
  Peptide Sequence Number=SeqID_105011
attttgccactaggctggaggtcatcttaacatcaaagtgtttactaatgcattctaatgaagaacatgattttctattctaattaacaacttctttttgcccttcagttatgtgctaggtacatctgcaaattgttggttaacactcatggatcggctgttgacacctggagtttctcagagtgaaaaggatttaataaagatcaatatgcttgagttggttgacatttactattgggccttggatgccccgaagaatgggaataaggttgtttccaatcatgggcttatatgtttctatagatcagccatagttgttttaaactttccgtatgctaccagtaattggtatgtggttaatcatcaaaaatggtataccaaaatcctatgctggcatttcttagtgataggactctaagtaatatccaaaattctggatgcttagaaccttctgttcttctaaaaaataacaacacgcagtaaatttttgaaacagtgaataggctgaacttggttccacctgttactgactgactattatcaacaagttcttatgaatttatttgtatgaacaatcttgaccgag

SEQ ID NO: 39038 - DNA, 1185 bp, Setaria italica
  misc_feature (1141)..(1185): n is a, c, g, or t
  Peptide Sequence Number=SeqID_105012
ttggttgtttaggcatacgagggcagattccggtggtcgtctgctccgactccgttcgcgaccgggacccgatccccttcctcgggtcgacgcccgccgccgccgccgcgatgcctcggtattactgcgactactgcgacacctacctcacccatgactcgccatctgtccgtaagcaacacaatgctggatacaagcacaaggcaaatgttcgaacctactatcagcaatttgaggagcagcaaactcaaagtttaattgatcaaagaatcaaggaacatcttggacaagctgcagctttccaagtaggtgcccctttcaaccaacatctgctctcgttcccaggagccatggcccgtcctcgccttccaattctgccaacccctggcatgcctcatggattccctcaagcacctggtgcaccattgatgccaggagttaggcccccgattttaccagctcctggtgttccaggttatcctggtggcccaccaaccatgccgcaaccaggtgccccaccaaccatgccaccaccaggcgccccacctggctccatgccacaaccaggtgcccctcctggttcggtaccaatgcagatagctcctctcccaaggcctccaacactaccacctccaacatctggggtcccaggtgcccccattcctaacaacgcagcacctccatccatgttccaaacgaatccaccgccacctgcaggcccgacttctggtgctcctccggctccaccgtctgctccacagcctgcattctcctatgctcaaccatctgagggcaaccactgatgctgttcctcaggcatgtgaagtatgcacagaaaggctgctcattggaaagtcggtgctgccatcatttaactgagaccatttctgtgcgtctgtcacttgaatttgaggggttgttgagaaaagcttcttatgagaggattcgctgtggttgggaacttgtatggtagttgatgtaagttaactatgtaatcgactgaagatattaatttcagagacgcttgaaagtcagaattaggttttctctgtggtagaaatttctgtggcatgggatgcttgaactcgataacatatctacatgttgtgattcgtcagtattacaaaaaaaataaaaaaannnnnnnnnnnnnnnnnnnnnnnnnnnnnnnnnnnnnnnnnnnnn

SEQ ID NO: 39039 - DNA, 583 bp, Setaria italica
  Peptide Sequence Number=SeqID_105013
aacaagtgaaattccacagacgtttctggccttgagaagcccgctaatgcctggcagaagtctctggccttgctttcagtgacctggtagtcgaatgttattctaatgtttttcagcaccatcgcccaactgaacagttgtttcacaaaagtaacttcacgctcagctccttgcaggccaaaaatggttacatgttcaaggtgattcagcacaagtccctcggtcttccagcttgttggttgatcacaaatgcagcctgatggacatgtagactgcgcctccaggttcctattgtcatgtaacacaaatccccgagggacttgtgctgaatcaccttgaacagatggaatgagctggctccaaaagcatgaccttcgttggatacagccagttgcaagaacgtaatttgaggaagcattttcatgtctcccattaagtattgaaagtcatctatgtccttccgatacacgagcatgagcttaagactgtgaatgacctgaaattgctgcaagagcctcagacaatactgattcttatctctactggcatgttgcccatatacaataaaaaagctgttcagctt

SEQ ID NO: 39040 - DNA, 411 bp, Setaria italica
  misc_feature (377)..(411): n is a, c, g, or t
  Peptide Sequence Number=SeqID_105014
agggccagggccaaggagatcgccgcgaaggcgaaggctgccgtgcaagaaggcgggtcgtcgtatgacgacctcatcgacatgatccaccacgtcgcggagctcagcaggacgaagagctacgagagggacccgagcgcgaggcctctggcttctgcgccggagcttgggagcaagagcaagaacagcgaggagatggaagccttcttttcagtgccgtcctaagttagcattggatatgagatggttagcttgtagagttgtcgtgtgtgatgattgcaacagatgcagtttgtatcaggtgactgaagtgtagtttaatccatgtatgcatgataaagtagataactcgcactgcatttatttggtaaaaaaannnnnnnnnnnnnnnnnnnnnnnnnnnnnnnnnnn

SEQ ID NO: 39041 - DNA, 853 bp, Setaria italica
  Peptide Sequence Number=SeqID_105015
aagccatcaggaggacatagccaagtatagagacctcaaggagaagatggaaaggtatgagaagagttccttatttgtagcagagaattcagatattgaactgaagaaggagaaagaaatagctgctgcagcagagaaacttgcagagtgccaggagacaatattgctccttggtcggcagctgcaaactctgcgccctcctccattggaatcattgagttctgcactgaacacacaaccggtggggcaatttccagaagatgcaggaccagctcgaagtgtacattctaagaagccttcaggtcaatttgatgcagattatacattctcaagtgctccaggaacaggaaacgtgtcccccctgagtggatataatcgacacaaaagcccctctaatgctgctggcagcccttatcttacctcgccaggcagttctaagcgtcccaagcacagatctagatcgtcatcttcctcattttctaaccagttaccagagaaacatggtcgagtattcagtcggttattctcaaaaggcaagagtgaccgctagcttcctcaacctacacagattttttggttattttcctgtcaggtgagtgctgcaagtctagttttttggcaacaacagctgtatacccgttttgtaccatgcaaatggtgccttgacctacggattagtatttgcttgaggttgacttatatccagatttcagtgtgccatagttttagccggtagctttgcctatagcttttggggttggatttacatatacctcagtagaacctcactgtaaatttgcttacatttgtgaagattgaagatgtcgcatcttgtgagttagatatccctact

SEQ ID NO: 39042 - DNA, 365 bp, Setaria italica
  Peptide Sequence Number=SeqID_105016
attacatgcctgctcagaatatattctgagttcatcaattggattgcaggaaaccaactcataagaaggatgtgcaacagaagattcaaatcatgcatagtaagatcataacatgaccaccagtactggttagtacatcactattttaaatcggtgccccctgatagcaacgattcttgtgatgttctaattccaagtttgcatataaatcagtcatgtctgtccattaaacaagtcatgcacacaggagtacctcgagagttgtagagacatcttcccatccacccagagggaattgctcgttcacgatgtgggcgtctacctgcatgtacacgtcacacttgacttatcttgatagcccaggc

SEQ ID NO: 39043 - DNA, 770 bp, Setaria italica
  Peptide Sequence Number=SeqID_105017
tctagttcaaactttgaagccaaccacaccaggcaaaaccatgctcattggctgaccaagcattgtagcctcagcttcaatacccccaacccccccatccagcaacacccaaaccatcaatcatagtggtgtgtgaatcagtaccaactacgctgtcaggatagagaatgccatctgtgttgaaaacgactcggccaaggtactcaagattgacctggtgcacgataccagaaccaggggggacaaccagcatattttggaaagcagtagagccccatttaaggaaactgaaaataactttactttagttagacggactaaaactccagttccatgtttaattgcacagcattcggcgaccttgctacatccacctgcactgagtgatcaataacaagatccactgggaccaatggggttgatcttgttggcatcacttcccaacttggccattgcatcacgcatagctgcaagatcaacaacagctggaactccagtgaagtcctaaggaaattatgtgaatggtgagcaaagggcagttagatatagaggagatcatttgtgatgttgccaatgaaaacctgaagaagaacacgtgctggcttaaatggtatctcagccagctttggagatgtgttttcccaatcaatgattttctcaacatcattcgtggtaacttggaagttatcacagttgcggatagccgactcaagaagaatacggatggagtagggcagtttctctgatagattctactaaaggtaactttt

SEQ ID NO: 39044 - DNA, 687 bp, Setaria italica
  Peptide Sequence Number=SeqID_105018
catcgacctccctaccaacctcagcgagatccgtcctggccagggcggatctcgctgaggttggtagggaggtcgatgctgtaccgctcgtgtccagtaagcccaagagaatcagcatcctcaccagctttgaagcagagaggaatgattcccatccccaccaaattgcttctgtggatacgctcaaagctcttggaaatcacagctttaactcccaggagcatcggtcccttggcagcccaatcacgagaactgccacttccgtactcggcgccagcaagaattatggtggcatggccctcggatttgtatctcatggctgcatcaaaaacagaaagcttttccccagttggacccaagaccattcacgttcctactggggaaaagctttctgtttttgatgcagccatgagatacaaatccgagggccatgccaccataattcttgctggcgccgagtacggaagtggcagttctcgtgattgggctgccaagggtaccgtattgtcttccttgggtagtttaaagtcttgttgtattttcctaagagctttgagcgtatccacagaagcaatttggtggggatgggaatcattcctctctgcttcaaagctggtgaggatgctgattctcttgggcttactggacacgagcggtacagcatcgacctccctaccaacctcagcg

SEQ ID NO: 39045 - DNA, 414 bp, Setaria italica
  Peptide Sequence Number=SeqID_105019
tacctaggtacgtccgtctagccgccgcaccaccacagaacagcagagttgagagccagacaagaatccaaaccgccttgccttctcctcgtcttcttccttggcaggcaaggtcggtccatccgtcaatccatcctacgatggcggcgcccgtgtccgccctggagtccgcttggcagttggtgatcgccaacttcaccgagttccagctcgccaccctcatcaccttcctgctccacgagaccgtcttcttcctctccggcctcccatccctcctcttcgagcgattcggcctcttggccaagtacaagatccagaagaagagcaacacctctgcttatcaaaacagatgtgtcctgcgtctcattctctaccatgtctgtgtgaacttgcctgtcattatttctcctaccc

SEQ ID NO: 39046 - DNA, 639 bp, Setaria italica
  misc_feature (577)..(639): n is a, c, g, or t
  Peptide Sequence Number=SeqID_105020
tttcctgccactgtatggtggctcggacttccaccgttaccattaccgaacgcggtacaccaagtcagggactatgcctcgacttttgtttacatggactggttgtttgggacggacaaggattaccgcaaggcaaaggccgttgaggagaaggaagggaagaacctgtaaattgcgagagctgctgcagcgctggtagctggacaccatccagagaatttgctgattgggactgcatatatgtgtgtacggctagcctgttgaatcaaattaccatcacgtacagtacaattaaagtggtatgcatggccactgtgcagcaactctccgtttataattgcgtgcttgatccttcttataattaactcaaactgcttcaatttgtttgctgctagttcttctgcatataatgttaatgtcacttgttccaagcaggcatctttgtcagacctagttatggtacatgtgtatctgataaatgtactggtctactgggcttggcagagaaacaatgtgttgcagaacccatccattcaaagagtattgattttgtacaagtgacattaacattatatgnnnnnnnnnnnnnnnnnnnnnnnnnnnnnnnnnnnnnnnnnnnnnnnnnnnnnnnnnnnnnnn

SEQ ID NO: 39047 - DNA, 1206 bp, Setaria italica
  Peptide Sequence Number=SeqID_105021
gtgagactgagacacggacacgacgcagccgcccgtcatcacacccacacaggcacgcacgcacgcacgcactcgcgatttgcaccacgaagtcgccagtgccgccgagagagagaccgtccactccgccgcggcccgcttccacgagatccgccacaccgctgccgagatccattacgccgcagccgccgagcaccaccgctacttcagaggcgggggaggcggagcccggcaccactaccgcagaacagagaggggagcagaaaaatccaatccgccttccccatcccctcgttttcttcgccgggccggcggcaaggtgcgcacccccaccccaacctctcgcaatccatcgtacaatggcggcgcccgtgtccgccctggagtccgcttggcagctggtgaccgccaacttcaccgagttccagctcgccaccgtcatcaccttcctgatccacgagaccgtcttcttcctctccggcctcccctccctcctcttcgagcgattcggcctcttcgccaagtacaagatccagaagaagagcaacacctctgcttatcaaaacagatgtgtcctgcgtctcattctctaccatgtctgtgtgaacttgcctgtcatgattttctcctaccctgccttcaaattcatgggccttaggagctctcttcctctgccacactggactgttgttgtatctcaagttcttttctattttgtactcgaggattttatattctattgggggcaccgggcactgcacaccaaatggctatacaagcatgtccacagtgtccaccacgaatatgctacaccctttgggttaacttctgaatatgcccaccctgctgaaattttgttcctgggatttgccacggttgttggtcctgctcttactggccctcatttgttcaccctatggctttggatggtgctgagggtattggagacagttgaagctcacagtggctaccacttcccatggagcccatcaaatttcctgccactgtatggtggctcggacttccatgactaccatcaccgtgtgctgtacaccaagtcagggaactatgcctcgacttttgttacatggactggttgtttgggacggacaaggattaccgcaaggcaaaggcctttgaggactgaagtaagaacttaagttaaactaaacctaaaagttaactaaagggtaaaacttaaattaa

SEQ ID NO: 39048 - DNA, 296 bp, Setaria italica
  Peptide Sequence Number=SeqID_105022
aatggcacgtgatatattggcactaccgtgcagtactgactgcaaggaagcaacaaggactgcaagaatggcaataaccgagtcaggttacaaatactgggttgagcggcttgtctgtgttcagaattggctgaaaactgctggcaccacagccgtggagccaaaggacgatctttagaaagaacacttcatccttcctaatggtccatgatgcaaggatggcaaattgtgacacttggcgtggaatttgaagcaattttcggatgctaggtttagtttctgatgcagccagccgt

SEQ ID NO: 39049 - DNA, 415 bp, Setaria italica
  Peptide Sequence Number=SeqID_105023
agcaaaacctgtggccttcgttcctcgggacttgcagatatcaagcatagcagcttactagcatctagcaacactgtccaatggcttggccccaagggaaactgatggatccaatcagaagcccgatcgctgcaacttcatcttttcatcagtcagcggtgaagcatctccagcaaggcgtcatcttggctcacaggaatggaattagcaggaggtgcctcctgacgctgctgacatccactgcagccataccagacagcagtgaatcaaggaaggctctactgcaagagtatctgaagaaatcagaggagaacaaggaaaagaatgacaaggagaggctggatgactattacaagaggaattacaaggactacttcgggctcatcgagggcccggccagagagaagaaagaagg

SEQ ID NO: 39050 - DNA, 471 bp, Setaria italica
  Peptide Sequence Number=SeqID_105024
agaagtactagaactaagttgaatcttctatcaaggaggctatctgctctgcagaggccgatacgtttgtaagaagaacatcaaccatggctgataactcaggaatcccatcaaagcaaatgaagatttggattgcgaacaggcgagctcagattaagaagcagaccatcagggaagagaatgcaaggctgaggattgagaatgaaatgctgagggaagagaaccgcgaaatgagtctgatgcaaagaaagaaagtatgcggtctttgtgtattaaaggctgagaatgctcgtcttagagctgagtttgaacgcctacaagccattgctgcaatgcggcagaacatagcaaatcctaaagaagagcttgggtcttcctcgtcagcattccagactccagcacctagtagtgcaactgggtctcagccagatccaggaccaggagcatatgtgcccaaagatgaaccgccat

SEQ ID NO: 39051 - DNA, 327 bp, Setaria italica
  Peptide Sequence Number=SeqID_105025
tctcaaaataggggaggtgttgccggatttttgaccatttcgtggggatttcacttattcaagtgttctaaagagatggctactgctgctggagatagtggcgatggtggaggtgatcgttgttcctctcgcggtatggggaaaatcatagttggctttcatgataagtcgaagaaaaagagcacgtgggagagagcaatgctttgtatttggaaagatgtcatgaagatgttgttgcggtgggtcaggaatatccttttggtggtcgttatgctccacaaccagtttcgggaatttcaggtccactaagtactatcatcgtaggag

SEQ ID NO: 39052 - DNA, 240 bp, Setaria italica
  Peptide Sequence Number=SeqID_105026
catctttttgctcttgccggcatgtcagcttaattgatggagacggcattgcatatttgcattctgctattgctttggctttatgtttagaccggcgtcttcttgtctagtcatgtaggcgatacgctgcataaaaattcctctagaaagagagaataatgcgtgaataagaaactaacgagtatgcccgcttttgcatccattgtcgagattattttctcgtccacaaagtaatggttg

SEQ ID NO: 39053 - DNA, 1663 bp, Setaria italica
  Peptide Sequence Number=SeqID_105027
atatgctctgctgttggagatctgaagcaaagccgcaatattgccggggttgccaaccagcgtgttactagcccccctcttgatgagtcagctattgctacgattgttgaaatgggattttcaagagctagggcagaagaagctctgagaagcgtcagaactaacagcgtggagatggcaactgattggttgttcagccatccagaagaatttgttcaagaagatgtgcagcttgcacaggcactagctttgtcacttggaaactccattgaaacacccaaggaggatggaagcaataagaatgatacagctactgctgaagaaaaaggtgtatttgtgctccctttggatgacattctcactgtatcgacaaagcttttctgctctagtgattccgccatggctttcccattgactgaccttctagtgacactatgcaaccgtaataagggggaataccgacagcgggtagtcctgtatctttttgagcaactaagacgtttttcgtcagataccatcactgatgcaggtgctttgtattccgttgcccatttgttggctttgcttctgagtgaagacagtggcatacgtgaaattggtgctgaaaatggtgtcacccctcacgttcttaacatgttagaaaatcttaaatcaaggacagaccacacagataagacttggaattctatcagtgctctgttgctcatattggataacatgctacaatttaatccaaagcttaatacggaaacaacagatggtgcatccaagtcaacttctgacatatccagtgctgacagcaaggcaaatccagcaccacctgatgaagagaaaactgaaactatggattcagcagacgatgcaagtgctaatgtgtttgaaaagattttggggaaatctactggctatttgaccgatcaggagagccaaaaggcactggttttctgctgtgaattcatcaagaaacgtgtgccagcaacagttatgcaagctgttcttcagctcagtgcccgcttgacaaagacacatgctcttgctgctcaattttttgaaaatggtggcctatcatctcttttaaatctcccaagtgcttgcatctttccaggatttgagaccttagcatctgccattgtgcgccacctcattgaggatcctcagaccttgcagagtgccatggaattggagatacgacagtcattaagcaaccgtggcagtcgtactccacgctcatttctgacgaatatggcaccgctgatatctagggatcctgtgatcttcatgagggccgtaacttcagtctgccagttagattcttcaggagggagaatgaatgtagtcttgttgaaggataaggaaagagacagggagaaacagaaagttccttcaatagaaagtggtgtgccatgcaatgagcctgttcgggtgacagctgatattaagtcagttgatacaccgaacagatggtcacggagccacaaaaaggttcctgctagtctttcgcaagtgatcgatcagcttctcgagatcattatgagctatccatctgcaagcaaagaacaggggtttgatggttactccctgttgactccaattgatgttgacgaaccaaacactaagggaaaatccaaagttgatgatggccaagagcttggggtgatgctct

SEQ ID NO: 39054 - DNA, 922 bp, Setaria italica
  Peptide Sequence Number=SeqID_105028
cagtgtgagtagtttttagacggcaacgaacaactcgttacattcttgcaaccaggaaaacaggcccccaaggctcacagctcataagattagctatcgcattcccacaccatctcaaaacaaagactccaagctcatcatcaatcatccggatatcaccacaatgtatggtcaaaatttgacatcacgttgccaatgattattatattcagatcctaaaaactatggatttgcgctacgatcctcaacattcctaacgatggtcatcaccgaaggaccagagtcatgttccatagctccggtctccagcatccccaaggcccgggacaatgaaacctttctcgttcacagtttgatccatagctcctgtatacacacagatccctgggaatctttgattgagcttcttgagggcaggaggagcagcaacagctgatataattcttatctgactgatttcagctccacgctccttgaccagatcaactgctgcagtgactgttccaccagttgctagcataggatctacaaggaggatatggcatccttttgggaatctatcaggtagcttatttaagtaaactgagggcagtagcgttttctcatccctggccatacctaaatggaaagttctggttgatggcaaaattgaagtcgcaagatctgcaagcgcaagccctgctcgaagaataggtacaatcatgatcggctccatctcactgatggattccacaacagcagttcccacaggtgactggatctcccgtgttactgtcggcaaccaatccctggtcgcctcatagattagcagtctccctaactctcccaaggcactcctgaaggcgtgggaaggggtagaccgatcgcggagcacggaaacccagtggctgatcagtgggtgcgcaggtaccaccaccttgaa

SEQ ID NO: 39055 - DNA, 228 bp, Setaria italica
  Peptide Sequence Number=SeqID_105029
agcagctgcaattccccacacccttctctttatctgtctacaatctctctcctcccaaggatccaagaagtaccattgcagcggcttctctcttcatcaatccccaatcccaacaaagcttctcagctcagctcagggaattcccctgcttctgctcttgtgttcttgcaagctctctgctctgcttcttcatctcttctgcccacaggagtccagcagttgcaaaga

SEQ ID NO: 39056 - DNA, 840 bp, Setaria italica
  Peptide Sequence Number=SeqID_105030
tgcatcctccgccgaagattccacaagttgctcatatacccatctacggcagatgaccttattaagtggaggtggaagagcctagcacagtagcaccatcaacaccaacttaactttttttaaaatctaaagcagcaagctagctagtatcacgaagaagggcagtaaatattgctaattctatagtacgtttctactatatattaccatcagttcataacctggatgcgctaattaactacaacagtaggagtaattcacacaacgcatgcaatttaccagcgccgacatgacgtaaagatcgatattgccatgcatagacacgaatttgatggacgggttcaggatccagctagctgatgaaacttgaccggccacaagcgacgacggcgcggtgtgtccccccctgtgccggagacgcctgatctcagctagctgctgcttgctctaggccggcaatggaagctactagctaccactaccagatgaagctcatctcggcgtttgcgcgcgcggcgtcgtcgtcttcgtcgcgggatggtgagtggacgtggcggccctcgtaggtggtgatcaccatgcggggatcctccgccagccgctccactcgcttcttcacccggcagttgtcctgcgtgcagcggtagtagctcctggggttctgcgtgttcttgacgaccttctggccgtacttgcgccacttgtagccgtcgtcgagcacgtcgacgtcgctcatcgtcttgaagcagaaccgcggctcccgcaccttccgccgcgccttccctccgccaccgccgccttcttcatcctcaccgcgccccaccatcggccgtttctagg

SEQ ID NO: 39057 - DNA, 982 bp, Setaria italica
  misc_feature (963)..(963): n is a, c, g, or t
  misc_feature (965)..(965): n is a, c, g, or t
  misc_feature (967)..(968): n is a, c, g, or t
  misc_feature (970)..(970): n is a, c, g, or t
  misc_feature (972)..(972): n is a, c, g, or t
  misc_feature (977)..(977): n is a, c, g, or t
  Peptide Sequence Number=SeqID_105031
ccaagtagaactaccacatatatatatttctccagaatataccaagaaatagcttgaccatccaaatacagtagatccttgagacggaattcacatcggcaaccactgaaactgacgatagctagctagtacagaattaaaccagcttcacctgacgctacgactaaaattctgaaacggagatagatgtctctcttaaaaccaccaactagtagacctagaactaaactatggcagcccgacagcatcttgctgagctcagctcagtccatgatatcttcgtcctcgtccggcaggggcatcgacgctgcagctgtaatctcttcctcaatcttcttctgtgcagcaaggtcaatggtcacgtcggcagggacgagcgcgatctccgcctcgaacctgaggtccatgttccctgcgagcttccttgcaaggtagaggaaaggcttctcgaagttgtagttgctcttggcggagatctcatagtactgaaggttcttcttcctatggtaggtcaccatcttggccttcacctgccggttcttcacgtccaccttgttgccacacaggacaaccgggatgttctcacagaccctgctgatgtccctgtgccaggtgggaacattcttgtaggtgagccttgaggtgacatcgaacatgatgatggcacactggccattgatgtagtatccatcgcggaggccaccaaacttctcctggccggccgtatcccagcagtagaatctcagcttgccatggctcgtggtgaagtccaacggccgcacctccacaccaatggttggttcgtatcgcttctcgaactccccactgatgtgcctcttcacgaaggtcgtcttcccggtgccgccgtcgccgacgaggacgagcttgaagctggggtagtccacgggctgggtgttcggcagcgccatcggggtcgtcgaatccttgggccgtggtgtgcgngngnngngngtcgngagcg

SEQ ID NO: 39058 - DNA, 605 bp, Setaria italica
  Peptide Sequence Number=SeqID_105032
cagagttgcatcagattggctatcgccccaatgctatggctcttaccttgttgttttgttttgttgtaacgcttcagagccagttcagcaaacctgctatctgctagcttttggtcagcttctttatccactcttatattaggattaggatcacgccaacttttcatcacagcatccataaaatcatcaaccaattcagtatatgcagaatcttcttttgtcttgagaacaggatcttcaattttgaagttggaatcccttccagaaatccctgaagcgtcgtagtctgaatcaagccaacctggagtctcattcttatcttcatcacgtgaaccttgttctacatcctcgcagcggtatgttggacttgtcgggctcttatagccatcatcccatggagacatttccattggcattggagatggtggattcactcttagcgacaagtggtgctggacactttcgccatggtcgtgcgggctgagattcctcttgctatcaccaagattgtggagcccttggtcacagcttgatgggtaggccatctcttgggtgtgccggccatcagcatatctgcctctgcttccacatcgctccccatcatc

SEQ ID NO: 39059 - DNA, 1535 bp, Setaria italica
  misc_feature (1522)..(1535): n is a, c, g, or t
  Peptide Sequence Number=SeqID_105033
cctcgccctctccggcttcaagaagctgcacgtcatcgacatggacaccatcgacgtctccaacctcaaccgccagttcctcttcagagttcaagatgttgggaagtccaaggctgaagtagcggcaaagagggttatggagcgagttagtggggtcaacattgtgcctcatttttgcaggattgaagataaagagttagagttctactctcagtttcacataattgtcctcggtctggattcaattgaagctcgaagctatatcaattccgtggcatgtggcttcttggagtatgactcaaatgacaatccactcccggagacagtcaaacctatggtagatggtggaactgaaggatttaagggtcatgctagagtcataataccaggaacaacaccttgcttcgaatgcaacatatggcttttccctcctcaggtcaagttccccttatgtaccctggcggagacaccaagaaccgcagctcactgcattgagtatgctcatttgataaaatgggatgaggttcattctggaaaaccttttgatgctgatgatgcagagcatatgcagtggatttattcagaggctttaaagagagcagagcttttcggtatttcaggtgttacatattctttaacccagggtgttgtcaagaatattattccagccattgcttcaacgaacgcaattatatctgctgcttgtgcgttggaagccttcaagcttatttctgggtgcagcaaaagtgtatctaactatctcacgtacaatggtctggaaggaactcatattaaagtaactgattttgtcagagacaaagattgccttgtatgtgggcctggtacccttattgagctggatacatcatccactcttgcggagttcatcaagatgctcgaagagcacccgaagctgcggatatcgaaggctagcgtgacgcacgaaggaaacaacctatacatgcagtccccggaggtgctggagcagatgacacggccaaacctgagcgtccccatgttcgagctcctcaaaggggtcccgtgcgcgacggtccacgccacgggcatggcggagaacaacgggaagaaagtgtcgtcgctgaggaagctgcgcgtcgccttcaagggtgtcgaagcctcgaatatggacacgaccgagagctcgtaggtctcccgaggaggaggataacgcttttgagacgatcagagtcaagtatacttttcaggcaggctgaaccaaaattgagatgcacgcttgataactttgcatctaacccctcgttttctctggaaattaagcgcagtccaacacagggttcacatgcaccgtggatgatacatccgatggatgcaagtggccgggtgcatgggagcaccccaagggccttgagtaccagaacttttctccctgacctgatgtaagcatcattcatagttagatgctttgtgatcaccaacagatattggcacactaaatttaagccgttgaacctcaaggatagctgatgaaaatatcaaagcnnnnnnnnnnnnnn

SEQ ID NO: 39060 - DNA, 715 bp, Setaria italica
  Peptide Sequence Number=SeqID_105034
ggtgttgtcgaaggtgcccggctggcccgtgccgtaggggcgcgccagcatgaggtgcgtggccgcggggcagcccgcgtccggctcggcgcgcaggagcacgttggtggtctggccaggggtgatgaggaccacgtccgtgtggaacggcttgacgtaggcggcgtcgacgtcgacgacggtgagcgtgtggttggcgatggagaagaagagctcgtcgttgagcgcggcgttgatgagccggagcaggtaccacttgccgggaagcaccttcagcttgaacgtgtctttgctcgagcagttgtacaacgggcccggaaggccgttgatggtgaaggcatctgaaatgtttgggcctgctccagtcttcagggcctgggcgataattgcctcgggatccgcgttaaaccactctccgaagatgatggggacttccttgtagggtttaaccgggaacgggtagggcacgccgcgcttggggaggatgatgatggggccgtagagcgtggcgcgcatccaggagacgtgggcgtgccagaagagggtgccccgctgccccgtgatggtgaagttgtacacgtagctctgacccgtccggatcgggcactgcgtcacgtacgccggcccgtccgaccaccccgtccgcagctgccgaacgccgtgccagtggatggttatgttgtccttgacactgttaaccaccttggagacgacg

SEQ ID NO: 39061 - DNA, 511 bp, Setaria italica
  Peptide Sequence Number=SeqID_105035
gtatttgtttgtatggtttctttctaggcaagacaatcactcattgtttttccttgatgcttgttgatccacggcatccagtaagttaacaatctcttttaattcatgaatctagtatgcaacacatactggttggatttcgttcagttgcaaaatacattaatccctatcattggggagggaggaattctacagatttgtagcacactagaatgcagctcactaattcaattctaaaccttttcatggtctgatagcatggttaatcaaaagatatttccaattttaaaaattctctggttaattgagccaatccttataggagaaggcttcattaaactgataatgcttgaagtggtgatgccacttagcttgttcttggtgcttaactctggttgtcttaatctcctgagcagatatgaagtttttgttttgtcatgtttcgtgtatttccattgcgtggtgcaaattgattgattactcctgtccgaactaatgagtgattgcctgg

SEQ ID NO: 39062 - DNA, 432 bp, Setaria italica
  Peptide Sequence Number=SeqID_105036
accgaggctgcacaggctttgccgtcgcaaccacaggtgcggaggcgccgagcagcagcagtggggccgagcgcactagccgagtcgtcgacagggaggatcggaggcggggcaagtggttggcgtatacgctgtcaggtgagcgggcgggcgccctccgtgccgcatctcgttcacgcacttgttgctgtccgcttccgcggccgcggcgcagcgttattcctcctcccgaggttgctgatgggcgccgctccgggcaatgcagaagggagaccggcgccgcccgagtcccacggcgccatggggggctacgagctcgtccacagcgacgacgcgcccgccctcgcggtggatctggaggccggcggcggcggcttccccaagagcagcggcgggcccgcgaagcgcgctgcggcggggacctctccggcg

SEQ ID NO: 39063 - DNA, 1388 bp, Setaria italica
  Peptide Sequence Number=SeqID_105037
caggcgagggaggtgctgaagacgcacgacgccgcgtgctgcacccggccggacacgccgggggcgcggcggttatcgtacggctacaaggacgtggcgttcacgccctacagcgactgctggcgcgagatgcgcaagctcatcgtcgtcgagctcctcaacgcgcgccgcgtccaggccacctggccagccagggaagctgaggtggacaaactcatcggccgcttaaccagcggaggacggagaccagtgtacctggaggatcacatcttcacgctcatggacggcattgtcggcacggtggcacttgggagcatatacggttcagagcagtttgcacacaagaagcacttccacgatctgttcgatgaggccatggctgtaaagagcagcttctccgctgaggactacttccccaacgtcttgggtcgccttgtggaccatctcaccggcctcgtctcccgccgtgagaaggtattttgggagctcgacactttcttcgacaagattatcgacacccacctccagccgtcccgccccacaccggacaacgggcctggcttcatcgacatccttattggcctcaccaaggagcacgagggcactttcagttggttcactagagaccacatcaagggaatgttatcggatacgttcatcggtggagttgacacgaactcggtcacggtggtctgggcaatggccgagctgattcgaaacccggaggttcttaagaaggcacaagacgagatcagaggagcgatgggcaacaaagagagggtagagccagacgacttgcccaaactcaaataccttaagatggtgataaaggagacgctacggctacacccggtggcaccgcttctagctccgagagagaccatgcggcacatcaagatctgcggatacgatgtgcctgccaagacaaggatctttgtaaacgtctgggcaattggcagagaccctgcaatctggagcaaccccaaggagtttgacccggataggtttgaggggaatgatgtggacttcaatggggcgcatttcgagcttctgccattcggtgctggacgtaggatgtgccctggagtgaccatgggggtggcgatagtagagttcacgctggccaacctgctccactgcttcgagtgggagctcccagatggtatgacggcggaggatgtgagcatggaagaggcaggagggctcaccgtcaacaagaaggtccccctgtgcttgtgccgaccaggtacaagtggcagagatcatgagtcatgaccagcttatattaccaagaccgcttatggatccaagacacttgtaatatctaaataaatccgatcatttgtgagatatatatgatgtgggatctccaaaaagtttgtggtaat

SEQ ID NO: 39064 - DNA, 848 bp, Setaria italica
  Peptide Sequence Number=SeqID_105038
ggatgcggctgctggagcaaatagttttggttttattgtcggaggatctagcatagaacaacgaaggctatgcgccactgaagtggcaaagcggaatgtttcaggcttttggattggtggatttggccttggagatgatattgaagagcgctgcagtttactcaatgcagtaacagatgtttgccaccagaaaaacctcggcttgtgtctaggcttggtcttccagaggaggtcttggagggtgtagctgccggtatcgacctatttgactccacgtatatttaccaacttactatgggtggtttcgcactgatcttccctgttgacatggttgggagagagatgcagaatggtctgttcaacaatgatggtggagattcaacaaagattaacctgcgtgcaactacatatcggaaagatacgtcgcggctggttgatagctgtagctgcttcacgtgccagaatcacactcgtgcttacctgaatcatttgctcaatgtccatgagatgctggctcagattcttctggagatacacaatacccatcattaccttcgttttttccgttccatacgggaagcaatcaatgttggagagtttgatgtatttcggcagcagtttgttaagaagagacgtgcccatatcaccgctgctgttctgtaggcgtgatcaagggtttatcgggctgtgctcacaagactgaccgatcatgtaatcagatttatgtacacctgaatatttactagtcaactccaatgtcaatcgtcctcaaatctgaaaagattgtctaggaataattaaggtttcccggagaacacggaagcagatgttaaacatagagtgttcaa

SEQ ID NO: 39065 - DNA, 401 bp, Setaria italica
  Peptide Sequence Number=SeqID_105039
cgtggtcgaagcagcgtgtcagtgtcatgtaccttgtgcctttgaccagcacatgtagggacttgctcattggaaggtcgagagcatcacgcagattcttgttgcagacattatcttgttgtccggtgaggatgtgttggagttattccaaattcactctaggaaataggccgggcttctgacagagcagaggcccgtcgccggaggcttgggtacggtaccgactgtagagacgagagaagagagagagattatcagattctcttgtaagccgccataggcgtgtaaccctatactcttgagatagtgagattgttgccggctggtgcccgtggtttttccccttcacattgaaggggttttccacgtgtaatcgtgtgtctcctctgtagcttgattct

SEQ ID NO: 39066 - DNA, 457 bp, Setaria italica
  Peptide Sequence Number=SeqID_105040
tttttttttttaggatgccaataaaatcatctttgtttattatttatgataattcatgactattggcatgtgaaactttattattggagtacaaactcatacatcatttagaagatggcaccaccaatgaagggctgctgcaagtaggggtttgccaaagccacttggttgaacacgctagataccagttgttgttgctgccagtgggcgataggactcgtcagagctagttggttgaacacgtttggcagcaatcgttgttgttgccagtaggtagtggtgatggggttcaccgaagccacttggttgaacacgctggacaacagttgttgctgctgccagtgggtgataggacttgttagagctagttggttgaacacgtttggcaggaactgttgttgctgccagtaggcagcggtgatggggtttgccagagccatttggttgaagatgtttg

SEQ ID NO: 39067 - DNA, 409 bp, Setaria italica
  Peptide Sequence Number=SeqID_105041
tgttcaaccaactagctctgacgagtcctatcgcccactggcagcaacaacaactggtatctagcgtgttcaaccaagtggctttggcaaacccctacttgcagcagcccttcattggtggtgccatcttctaaatgatgtatgagtttgtacagcaacaacaactggtatctagcgtgttggttgaacacgtttggcagcaatcgttgttgttgccagtaggtagtggtgatggggttcaccgaagccacttggttgaacacgctggacaacagttgttgctgctgccagtgggtgataggacttgttagagctagttggttgaacacgtttggcaggaactgttgttgctgccagtaggcagcggtgatggggtttgccagaggccatttggttgagatgttgtgga

SEQ ID NO: 39068 - DNA, 250 bp, Setaria italica
  misc_feature (216)..(250): n is a, c, g, or t
  Peptide Sequence Number=SeqID_105042
tcctttgaaaggaacagatttgtaatcctcttggcttataagtggctccattggtcataacttttgaattaggacaaggttgttagctggtagtctcgtgtttcttgcaaattacaatgtatttctggctactattggtaattttgcacattaatctgctgtcagctaaacctcatataaccattactgtaaatgatacgcattggtgtacttttnnnnnnnnnnnnnnnnnnnnnnnnnnnnnnnnnnn

SEQ ID NO: 39069 - DNA, 1089 bp, Setaria italica
  Peptide Sequence Number=SeqID_105043
tagacgactgtgaaaagtttgacagagttcatggcctgattggcacttttgccttcatgatgctcaacaccattgatgcttttagtcagtacatgattctgttgttcgagttgttctagtctagctttaagatgtttcacctcttcttccagtgaaacaatcaatttgtccttttcaaggatctcttcatggacttcctcagcagatcttgaaacgctagatccttcagcatcttttgtgcttacaactgaagtagtcccttcctcagtatatattgtctgatgattctcaaccttattttcttcttcattttgctcagcatcaactgcaccaggtgacacaactgtgtcatcgttgtctggtgaattttcgagcacacatgatgggaggacgccatccatatgtgaagaatcagttctggtgctatcttcatcaacagcaccattcacactaacagcacaagaatgccttagagtagaagtaccatgatcctctgtgactgaatcatgtgcagcaacttcattggctgattttgctccttgacttctatcagatgcgtattccatgttcagatactctgttggaaatggggcccaaagggattcttgatgacaaagtatatcataagataaaacacttcctaacgagtggccatacaatgaaacctttccgctgtaaccaggatttctcttcagaaatttcatgtacaacttgttcaactggtttgagaccgagtcaataatatgctgacagtagataggactcatgtaatatagaacatcatgaactgtggcacctaatgcaactcgaagacctttaactccatccaaagtgagtttctcaacagtatgttcaccactgagcttcaaacccttcctccactgacagggaataaatagaaccctctgggtgcttctttgataagaagttaagtatctttcagctaggttagcagttactcgacggaaatcaacaacatcatcaacaagattagctttctccagcctctgcccaatgccatgaaccatgaatacaagatgaccaactggaacctgagagcaataatcatccatttcctcttcctttcgc

SEQ ID NO: 39070 - DNA, 1360 bp, Setaria italica
  Peptide Sequence Number=SeqID_105044
ctagactagaacaactcgaacaacagaatcatgtactgactaaaagcatcaatggtgttgagcatcatgaaggcaaaagtgccaatcaggccatgaactctgtcaaacttttcacagcgcaaggaagtacgaatcagtcctattcaccacaaatcagatacacgaaactaaactttaaggttgacacattctttgctgttggatctcccttgggtgtcttcctttccctccgtaatgttcgtattggtattggcaaggggcaaggttattggcaagatgagaacataatcgaagagatgccatgctgccggcagatgttcaacatttttcatccttttgatcctgtagcatacagagttgaaccacttgtatgtgaagattatctaaagaagcgccctgtcattgtgccctaccatagaggtggaaagaggatacatgttggagtgcaggagttcacagaagatattgctgcacgttctcaagccattgcccgtcaattgaagtcattaaaggtcaaagcagtagctgctatgctagcattgagcagaaatgacacagaagaggattgtgtgagtgctaatgagaaagaaagatcatacggttccatgatgatggaaaggttgacaggttcaccggatggtcgaattgaccatgtgcttcaggagaaaacatttcaacactcgtatctatctgctctgggagctcataccaactactggcgcgatcatgatactgctctcttcattctaaggcatttgtatcgtgatatacctgaggaacctccagaaaatgagattgaaagggtgcctattaagctattttatgaaagggatccatttgttgaagaaacgcccctgacatttgcagatgaagcgttggtcaaggagttctccagaaaggtgagaacttgctcaagaagaaaggagaatgatgccaactgcgaaacctcttgatggtgtgccattatctgttaaagccaagttacaaccttaccgccctcgccaagcataagatcatgtaggcatggaatggaagaacagcccgtgaaatggctatcctgagagaagacaattccactaaacggtgtagtttcacacttgacatcagaatttaggcacttccgagaatgttgtacagttttgctctttccaaccctgaatgcaatgctgtacataagatccagctgtaggttcggttgtctttcttggatgtaatgttggagctgtacatattacagaagacagatcgacagggattagtctcgagcgatggttgtagttgcttctcacgttacagaatatggcagggattagtgtcaaaacgatggttgaaaatggtcacaagtcacagccgtttgctt

SEQ ID NO: 39071 - DNA, 1643 bp, Setaria italica
  Peptide Sequence Number=SeqID_105045
aagatcatacataaaagtagatgaaatgagctatttgatcagaaggttagtactgtacatctggataatggcaataaacagaagaaactaataagggagttagtgaggaaatggtatctacaaatttcatctgcagctatacgtgtgtccaaggaggtcttagttgcttatgtcgaagtatttgggatttgctgggaagtcatgctctacccgcagctcgccttcgtcagcgtctgagtgcctttgagggaagacaactctaatatcattgtagagataaaatcttctttcttcctcagtctgagtactgcgactgtgtggttctgatgagagatcagatttgcattgctgccttgatcttgatggcttcttggagaaggggctcaggaaacgtaggtgcaaagcataccgaagaacacctccagctgaaatatcattgaccttggaagatctgcaacaagatttatttccacctgacagagatgtgtctatttgacagcagcaaccaccagcattggctacattttctgaattcactataacgtcacattccatggagcaacatcctgtatttgagtaacctccattctctgactcatcaattgggtagcagttatgccccttttcagaaactgcaaagtcaaaacaaaattcattaactttgaactctgtaatttggatttatctaccaatggtattggttttattacattcggaaaatagagcaccgcgctctctaagttcacttccacactggactgactcgacctttacgtcactggccttgcttccttctttggtcagataagagggagaagcagaggatagagtcatcttttgccgcatgaaagttttgcttccagcaggcatgtcactcaaatcataggcacagaagaaggtgtgaagtggtgttttctctgggttactgaccaacagttgtatgcggcctttaacagggatgcgtaaccgactttttgctgaccgtgaatcactgttactgaggcttcttttgagttttgggcttttgctattattcgtaggcaacctccccgcaagatcaatcgacgaatagtacaacaaggagctatcttcatcgatgcttgttactgtaaatggaagcttctgagttgggggagagaagttaccaccagtcacattaagaatagccagaaaaccatcaatactctgattgtcttttccacatgaatagcgaccagataagagagactcctcaaaggagccaaccaatgacctccttacagggacaaggttcaaactcctaatacatccaatgcttggagacacaggagcagattctgggacccagtttcgatatcttctatcaaaactcctcttagggatcattgtaccaaacccatcatgaaaaatactggtttcttctaacacatcactcatccttattctaccaccatactctgaatgatcttcacaatttgatccccccatttccttcaagccaaggaaatcattttcaatttctccagataaatccctctgagctctagtagtcgtcattctatgcatccattttggaccaagcggagaaagagtgagtggtggagaatgtgataatcttgcaggcggtatagacacccttgcaagattcataatcctttcagcaa

SEQ ID NO: 39072 - DNA, 505 bp, Setaria italica
  Peptide Sequence Number=SeqID_105046
gctgaactctgctggttaataactgtggattttatatcccaaaatgatcactgctgccagatgaaaattggcagtaagagcaatgttattattcagtgccacaagaatgcaggataaaatctcaagttgcacaagttaacaacagctatctggtcgatagataaaactgtttgttattaacaagaactgtggaaagaatggatttctttactgcaagtgggaattttcagctaattgcaagagagggataagcgggtagcagagcccaaccaaaaatatgtactgaatgggccttggaaaaatcgtcataaaaccccaatatgtgcttcaaaaattcaaaaacacttaaaagcttcagccattctttaattcagcagacaatcacattacatggcgagtacttatttacgttttctacaatgacactggcaacatcacaaaaccaacaattgatctagtacgtgccctggaatcacctttgatcagtatgcaccactttatcttt

SEQ ID NO: 39073 - DNA, 464 bp, Setaria italica
  Peptide Sequence Number=SeqID_105047
taacatagtaaaggaagagagagctttgtttgtgatttcctttgatggttatccattgactagagatgaactatatgacttcttcagctggtttggagtaattgaagaaattactatagaggaaccaagtataacgcctgatttgcactgggccctcatcacatttcagtcaacatatgcagtaatcagtgtcctcaatgaagataagatgtttcactatgtcataaatggaaaagatgtatgggttcaacgctatgttgaagctaaggggcgccacttcaccacaaatgcgaaagatttagttaatttggaataagggagttcgctccagtaagaattgaaaaaagggtcggggtttgttccaaagtgcaaggatataataatctgagtcaacctggcaacataatcttttgcttttttaccaaaataaactccttggctagaaactatttagttgccaatgg

SEQ ID NO: 39074 - DNA, 547 bp, Setaria italica
  Peptide Sequence Number=SeqID_105048
tgtttttttttaggtttttttaacctttttttaagttttttttatttttttaacgtgaggaaccaagtataacgcctgatttgcactgggccctcatcacatttcagtcaacatatgcagtaatcagtgtcctcaatgaagataagatgtttcactatgtcataaatggaaaagatgtatgggttcaacgctatgttgaagctaaggggcgccacttcaccacaaatgcgaaagatttagttaatttggaataagggagttcgctccagtaagaattgaaaaaagggtcggggtttgttccaaagtgcaaggatataataatctgagtcaacctggcaacataatcttttgcttttttaccaaaataaactccttggctagaaactatttagttgccaatggaatgattgtaatcctattagtgatatggacatgggtggtatttatatacttaagaaccaaataatctttattgtaatagacataatgttttaatgtgtccatatgctgaaggttactatgcatggttaatattacattacaatgg

SEQ ID NO: 39075 - DNA, 524 bp, Setaria italica
  Peptide Sequence Number=SeqID_105049
agttactaataaactagttagaaggaagaacaaaagtcagctgtggttgactggacacagccaatgtctaaagtttgtactgccaccatcgtagagcttagtacgccggagaacttaattgttaacagcttgagtaaaaaggatgcttaggtaagtgcaaatgcttggaggaacaatgactctgttgtggcacataatctggaatttgacttctaatgggtcgccatcttttactttgggtagggaagaagatggtgatgctggctggtaatgtcagtggtagcctgtcaacaatgttttgggcgtgtgctgcaagaaggcagtcaggcacagcgacttcctagatcttctgcatattcctaagtatactgacttggtcatgcatgttcgtaaccagatgtgctttgagctgcatttgaagaatcacaatgcgtggactccacaaccaggctctagtctcaaacttgcagataagtggggctcttgcagcataagcttcagagagaagtcctctctgtgcagtt

SEQ ID NO: 39076 - DNA, 1447 bp, Setaria italica
  Peptide Sequence Number=SeqID_105050
ctgctgtagccctgatctcttgcgcatcgattacctttgcactgatccttgctgttaatccactaaaatcagcatgtactgaagctgaggaactgttgtcatctgtgcgctcacagagagaaaatttggacaaagctcgtcagagcgaagctgcttctctgaagcattccaaatcagcttttgagcataccagtcattccaaatcagctcttgagcatgatggcaattctggtacttctatacaatcaactgctcatattattaatcctgaagctcaaccctcaccgtctataaactgtgaggagacaaagtcagctgtggttgactggacacagccaatgtctaaagtttgtactgccaccatcgtagagcttagtacgccggagaacttaattgttaacagcttgagtaaaaaggatgcttagggaagaagatggtgatgctggctggtaatgtcagtggtagcctgtcaacaatgtttgggcgtgtgctgcaagaaggcagtcaggcacagcgacttcctagatcttctgcatattcctaagtatactgacttggtcatgcatgttcgtaaccagatgtgctttgagctgcatttgaagaatcacaatgcgtggactccacaaccaggctctagtctcaaacttgcagataagtggggctcttgcagcataagcttcagagagaagtcctctctgtgcagttggagtatgaacagcaacattaaaaaatcccttcaggcctatcaatcattcagtgtagaaagcgattaagtaaatgagagtgaggtgatcattggaaagggatcaattagcgcagccaaggataattctcttaaacggaacttctaagaaagtatgcttgcattcttaacttgaggggacccttggaccagtatttcttcaggccccaagaaatgtgcttttcctgagagagcagctgcagcctggttgcaaatgcaaaggtcatccctggcacgttcaccgcagtagctgtgatctagtagtcgatcagtgatgtggaggaggcgacgtgcaacatccggcgcatgagatgtgtgcgggggtgtaaatttcaccgcaacctgcgcacttcggagtttggacgggcacatcacagagttcagcccgggatcctttgaagaccatgtagctcaggttaaggaaacatgcatgagttgagctcagatcagatgcaatctgccgtcatttggattttgatggttctgcgcgtacgacttgtgctggtgtgcagcgcgccaatgccaggccttttttttcttttttgatactggtgcttgtgcaatgccaggcttggaaagagatttccatgagaacatccgagtctgcacgacgtgtgcccatccgctagttggttggatcgtcgggttgttcgtacccggttcgaccgttttgctgcttggttggagttgctgacgtgtaaccaa

SEQ ID NO: 39077 - DNA, 1004 bp, Setaria italica
  Peptide Sequence Number=SeqID_105051
ctaggaatcggacaagcagccaagcacggaaacggaaattggcttgaggacagagcctcctgcagcgctgcaggctgcttgcctaggctggctggctctgaaacccacgcaatcccatcccttctcctcggacctcggctcctcccttccttgctctgcccggccgccgggcgatgtcgtcgtcgtcgtcggccctggcgaagggcaagtccgccattggatcctcatccggatctgccaaattcgaggccaaagggaaatcctcctcggcagcagccgcagccaccaagcgagcaaccaccaccgccgccaggggcagggggaaggctgtcaagaaggtgtactcgctgcccggccagaagttcgatcctccggaggagagggagcccctgaggatattctacgagtcgttgtccaagcagatcccctccagcgagatggctgaattctggttaatggagcatggtttgctgtctccagagagagcaaagaaagcatatgaaaggaagcaaaagcggcagcagcaagtgcgaatgggcacccccgattaagcctagcggaagcaaagatagacctgaaagttcaaagaaaccagtcgcatcgagcaatatggactcgaaggcaaagaaaagagtttattacagcaacgacgatgatgagttcattgtgaagatgaagagatccaggggatgacaagtttcacagatgaggtcagatacatttactttggtttctagataccaaaaaaagacattctttaggatatatggtgaaataaatgtgtactttgcagcatactgtaagtgttttcaaaaaagataggtggtccatcctgcaactgtatctgaatctcgcatagatatggcctgcaagtttgtgctgttaaattggaaatgcctggtaggtaaatgtgccgaatttgtctagaaattaatgtattctgtatgaaacgaaatggacatatataatatgcatagtgaatactactcatactatcagtaaaa

SEQ ID NO: 39078 - DNA, 886 bp, Setaria italica
  Peptide Sequence Number=SeqID_105052
cccgttctgacttagcaaaatcctggggctcactgctggcaaacgctaaccatactgcagtaccagttaagtagaagaatatagcaggtgcaaagagtgatacactccaagaatgtgttgaatccagaagatagcctgtcagtgcaatgccaacaattccaggcacagagcctatggtggttgtgattcccaggagaatgctagcatattcacgagagatatcttgatgggtacaataaagccctgacaatgcgaagttggagagtgatagaccaattgtaagaaaagcaactatttcccagggaggtagtccaagatccatggaggaaagcatcaagaagatcgcgggtgacacaaaggaaattgtttgacatattttccgtacctttgtggtgtcaactccatttgatatcaagttgtctgcaaaaggtgctacaattgatgtaacgaccattgaacccaaaggaggaaggattgacacccatgctgcttctgtcaagctcaggttcagctcctcactaaagaatgttggtagccaagacaagcaagtataatgcccccaatttccacaaaagtgtgcatatatcattgcccacacggccttgcttttgaaaaatgctctccaaggcacatccttcagtgaattctgcaaatcttccaatgatgggtctgatgattccgaagatacagttgatgagacaagtccatcagatacagtagaactttttcccaaattgaataggccttcgttgttacccaactgttgccctttaagagaatcaaaccctacgcaccaaataatcccaagaaggccaaatatgtaaaagacggactcccagccaaggttctgaatgatgggaggggcaaacagaagtcctaagacact

SEQ ID NO: 39079 - DNA, 501 bp, Setaria italica
  Peptide Sequence Number=SeqID_105053
cgaaggtcgtatctccctcttccaaactccaaatcagacgttctatatatgaatcttgatctactcgacaagatctacgcagtggttgagtccaatcattatttggagtaatttgatccaaccggtctgaccggtggggtcagccgatttgacttgtctacacggggtgctcatcttcccgatggcataactctctcatccgaagtccaaatcggacattgcatatatgcatttcaatcatctcaatgagaactatgctgtggtgaagtccaatttgcattttggaaactttttccaaactagtctgaccggttgggagaccggtccaggaccgatcagattcttccagtcttgccacttttgggcgtcaacgcatgccccctatttctggcaagcttgcatggcataaaataccctcctggtccaaaagtgcgtgaggacgatgatgaaaaaacatcaaccatatatattttcacaagcgaataaacaccttaaccgtcc

SEQ ID NO: 39080 - DNA, 420 bp, Setaria italica
  Peptide Sequence Number=SeqID_105054
aggaccagctgcaggagaaggctgctgatggggaggctggtcgtcagcaactgcagcagggtgatgaggcgacgccgaaaccgccaccgccgccatcttcatcatgatatcatcatcggctttatttcagcagatgatcaatgccatcacaagtttttgcttgcagcacatccttgaatttgttgtgcaatccacaggtcatgatacatgctgaaataactatttatcacttaagcaaggatctctcaaaaatcagatgacttgtattcatgcaatctgattctgcaaatctaggtgatgcgaactagcacacgcttgtgagtgagctttggctttgctgttgctaccaatatgtgacgccgattgccactgttcatttctgtttgctgattgaaatgcgtatggttgtgcaatttgtct

SEQ ID NO: 39081 - DNA, 304 bp, Setaria italica
  Peptide Sequence Number=SeqID_105055
cccccgtgctccaatatgccgatgacactctcatcctcctcaaggcagatcaagacgggctggtggcgctgaagcaggtgcttgatctgttctgcgaggccacggggctgcacatcaatttcaacaagagtaccatggtgccaatgaacacttccagctcgactaccacggcgcttcagagtattcttgggtgccaacttggcagcttcccccaaacctacctgcctacctggggctgccactgtcccacgagaagctacgtctgtccgtgttcagccctctgatcactagagcggacaggcat

SEQ ID NO: 39082 - DNA, 261 bp, Setaria italica
  Peptide Sequence Number=SeqID_105056
caataacagtggagtagatgtatttttcaatgtttacctgaatggaatcttttgtgattacttgatagccatttgcttggtgatttaacatctcaatttgcttcttttgactaagtaattctgtactggtgctaatttaacatctcaatttacatccattgtaatgcaggcatttcaggtcacggttcgtaacaagaagagagtagggtataattatgagctgagcttgagatttagaggtgaatggttaattaaaagagg

SEQ ID NO: 39083 - DNA, 1038 bp, Setaria italica
  Peptide Sequence Number=SeqID_105057
cgcgaccgcgtcgagctccagctcctcttcccgtgcccgcctcgcgcctcgctgagagatctgcggcggccaccggatccgtgcgtcgtcggcgccggggggcgggggaggaggacgagcagagatggaggacacggcggcggcggagaaggcggagaaggcgtcgtcgtacaggtactgggtgcgggaggccaccggcgacgccacgccgatcccggtcccgcgcaagctcgaccccgccgccaccggcaacgggaacccgccaccactcggctccgtgtggaaccaggccggaacctgggaggagaaaaacctcaactcatgggccaatagtaggattaaggatttgttgggctctctagattcactggaattcccaacagggaaggcatccatcgatgaagtgtccaaatgctcaggagatgcatttcaggtcacggttcgtaacaagaagagagtagggtataattatgagctgagcttgagatttagaggtgaatggttaattaaagaagaaaacaagaaggtcaaaggccatttagacattcctgagttttcatttggtgagcttgatgacttggagttacaagtaaggttcagcgatgacaagggcctcgcatctgacgacaaaacacggatttgcaaggatctgaagtcctttctgactccaatccaggagaaaatgcgcatgttcgaagaagagctcaaaggtagatagcaaagattggcaagagtcggcagtgctaggtaactggctggcgctgctgtgctagatgagtaagcatgctgaaactgaggtcttgtgctttcgccatcttctgcagtcgtaacttggacgactgggagcctgggactgtatctgtgtactaatgtaatgcacaagaactgcctaaactctgaagcatctcttgatcctccctcattttcacggaggatatatgataacaaagaaatttacaatatttctgtgtggatgtttcatcctgtatctaaagctatgaaggtacacccgaaaccgatcatatcaggatgctatag

SEQ ID NO: 39084 - DNA, 438 bp, Setaria italica
  Peptide Sequence Number=SeqID_105058
atcagctgatgcctgcagttgcgtcccctgttgccggctggagcgatggggggagcgccatggtgcctgcattagggcatccggctgagacttggggaccggcgtacggggagcatgtgtactatgcctgatcgcctgattagcagttgcaacgcttgttgcattgtctgaaaattagcatctcttgttgtgttttacttgactcaactctgccctggctatgctggccgtctgtgctacttggaatcgttgtattccaactttcattcagtcatgtaacgacattgctccgtgctcttgtagcggtagcggcattctaggacaagttttgtgtcaccttgtatataccactttgtctatcagcgacttgtgaacctatgtgtggcacgtgaatgtttcggagcatctattgcgtatgatatctgaaaggatttggag

SEQ ID NO: 39085 - DNA, 540 bp, Setaria italica
  Peptide Sequence Number=SeqID_105059
tgctggtcagaatttgcgaattagagaggatcctcagggaacgtttgttgagggtatcaaggaagaagttgtattgtctcctgcacatgcactgtcccttattgcagctggagaagagcatagacatgttggatccaccaacttcaatctactaagtagcagaagtcatactattttcacactgacaatagagagcagcccttgtggtgagtctaatgaaggggaagctgtcaccttctcacagctggttcggagagctcaagggcggaaacaactggagtacggcggaaggaaggatcttatatcaacaaaagcttgctaactcttggaacggtgatatcaaagctgactgatggaaaggctacacatattccgtatcgagattcaaaattaacacgactacttcagtcgtccctcagtggtcaagggcgtgtttctctaatttgcacagtgacaccagcatcaagtaattctgaagagacccataatacactaaaatttgcccaccgtgcgaaacgtattgagatccaagcatcacag

SEQ ID NO: 39086 - DNA, 524 bp, Setaria italica
  Peptide Sequence Number=SeqID_105060
actatgtagaaaatagttggactatgtaaacaaaagctaactcattttcactgaaaatttctgctgtcttgtattctgtggtgatgatggtatttgaggcgaatgaatttatttaaataggctgtctttcatccacattttgtggttgtacacttcgttgcaattgcaaccattaccatgtttcaaacatagattatcgaaaacattctttggtgttattacttgagatgttcaaataggctaataatttttgagatttacattctttattacagcgctaccatatagtgttattattcttacttttgattaccttttccaattttttgggcattatgatcatcagtcaattgagattgatgaactgaagcaaaaggtgtctgaactcattgaaatcaaagctcaacttgaggatcgcaatcaaaagctactggaggaaagtacttatgcaaaaggcttggcttcagctgcaggcgtcgaattgaaagcattgtcagaagaagtgaccaagctgatgaaccaaa

SEQ ID NO: 39087 - DNA, 3281 bp, Setaria italica
  Peptide Sequence Number=SeqID_105061
agacggacggacggcgaaagggctcgcatcagcagcagcagcagccgcagccgggctcgccgacgtcgacaaccacaacgaccacgtcatcgtcgcgtctcacaccggagctctcgctcgacgggcccgcgtccccgctgttcgccgggttggacgaggacccggcgcccaaggagaatgtcaccgtaactgtccgcttccgcccgctcagcccgcgggagattcggcagggggaggaggtcgcgtggtatgcggatggtgacacggtcgtgcggagcgagcagaaccccaacgtcgcctatgcttatgatcgagtttttgcaccaactactacaacccgtcatgtatatgatgttgccgctcaacatgttgttagtggttccatggagggagtaaatggtacaatatttgcatatggtgttacaagcagtgggaagacccacacgatgcatggagaccaaagatccccagggattatacctttggctgtcaaagatgcatttagcattatacaagagacactgaatcgtgagtttctcctacgtgtgtcgtacttggaaatttataatgaggttgtccatgatctactaaatcctgctggtcagaatttgcgaattagagaggatcctcagggaacgtttgttgagggtatcaaggaagaagttgtattgtctcctgcacatgcactgtcccttattgcagctggagaagagcatagacatgttggatccaccaacttcaatctactaagtagcagaagtcatactattttcacactgacaatagagagcagcccttgtggtgagtctaatgaaggggaagctgtcaccttctcacagctgaacctcatcgatctggcaggttcggagagctcaagggcggaaacaactggagtacggcggaaggaaggatcttatatcaacaaaagcttgctaactcttggaacggtgatatcaaagctgactgatggaaaggctacacatattccgtatcgagattcaaaattaacacgactacttcagtcgtccctcagtggtcaagggcgtgtttctctaatttgcacagtgacaccagcatcaagtaattctgaagagacccataatacactaaaatttgcccaccgtgcgaaacgtattgagatccaagcatcacagaacaaaattatagatgagaaatctttaataaagaagtatcaaactgagattcgcagattaaaggaagagctagagcagctgaaaatgggtattattactggcacaccctcaaaagatactggggaagataatatcatcctttggaaacaaaagttagaagatggtaacgtcaagctgcagtctaggctggaacaagaggaggaagctaaagctgctttacttgcaaggatacagcgtttaacaaaacttatactggtttctactaaagcgacccagacttctagattttctccacatcctggaccaagacgaagacattcttttggtgaagaggagctggcgtatcttccatacagaagacgagatataatgatggataatgaaagcaatgaattgcttcttcctgttgaagggtttggtgtatcacttgaagattcttcaaaggaggaaaaaagaataggaaaggacttctaaactggttcaaactccggaaacgtgatggagcttctattctgacaagttcagaaggtgataagtccagtttgactaaatcaaccgctccttcaacacctattggggaaagtgtcaattttcgtgcagaaccaagaatttcaaattctttggctggtgagaatgtatcagctgatctgtttatcattggccatggggaatttccttctggaagcattcatggtgaagaaattgctttgaccagtggaaaaacgatggaccatgttgatttactgagagagcagttgaagattttgtcaggggaggtagcacttcagactagtgttcttaagcgccttacagaggaagccggaagaagcccactgagtgagaacattcagatggaaatgaagaagatcagtgatgaaattaaggggaagaagcggcaaatagcatctttggaaagggaaatagctcatgcaacattgggaagtcaaggaaaggctgacaagttagaactttcaccgtcttatcctgaattacttgagcagctcaatgagaaatctttcgaacttgaggtgaaggctgcagataatagagtaatacaagatcagctaaatgagaagataaatgaatgcatgggattacaagctgaagttactcatctcaaagaacagctgtcccaagctcttgaagctaaggatttgctgtcaaatagcatggtacagaataatagagtagttaaccatgaagttgaacgccatgctgatcaagacagtgctgttccaagagaggtttcttccgaactgctacaaaaacagcagcagtcaattgagattgatgaactgaagcaaaaggtgtctgaactcattgaaatcaaagctcaacttgaggatcgcaatcaaaagctactggaggaaagtacttatgcaaaaggcttggcttcagctgcaggcgtcgaattgaaagcattgtcagaagaagtgaccaagctgatgaaccaaaatgagaagcttgcgactgagttggcatcactgagaagtccaactccacgcagagttaccaatggaccaagaggtggtaggagggaaagcatgagcagacgacacgagccagctagcagaagagacaccaatgcaagccatgaaagagaaaaagctctagagaatatgcttatggagaaggaacaaaaagaagcagagctccaaaggaaagttgaggagtcaaagcagaaggaagccttcctggaaagtgagctcgccaacatgtgggttctagtagcgaaactgaagaagtctcagggttatgaacacgaggattcggaagccaaacatgatgtctcgtgaccttgtaagttaatcatgaaaagtctgcctggcttgggtgtgggttttctgtatgtatgtaagttgctagtatcggtttttctgtttgttagtgtgaattagcctctcattctgtatattctccgcgtgatcaaatatgccagtagtgccttgcctgactcgtgtgcctagagatttctattgatgctacagcggcattttgggttcttcaggcacataacccggcattgcaggaacattgaacagatgtctggaaatctgacgagtttctgatgcccattcaaaatatctaacctgtattagttctactcatcctgctcttaatattgaa

SEQ ID NO: 39088 - DNA, 493 bp, Setaria italica
  Peptide Sequence Number=SeqID_105062
tggcgcgagatgcttacaatcggagattctttaacaaaaaaaaaaagaacaataaaaaattttctaagaataagaaaatagtataaatggaaaatgtgcgatatgttgtgaatagctttgtgtaagaaagtttaattttcttatgtatagaactttctttttactcgccacttctttttactcgccacttctagtagaatagaaattctgaattactataattgccctttctattatactgcaatagaacatagtagaatagaacgactctttcttactttcttaaaagagtttcttacaagagtgaaacaaaactaaagaaagagagaaaaaaagtttggcaaactttttaatgcaaaacgaccaattaaagaaaagagttgatactacaattcgactactcaatcaattggtagtatccctagagtccactcctcccccatactactagcgaaagagaaaatgtaaagactaccattaaagcagcccaagc

SEQ ID NO: 39089 - DNA, 343 bp, Setaria italica
  Peptide Sequence Number=SeqID_105063
tacctagggacctagacgagctcgccggcgccgccgagggagctcgccgtgtacgtcaacggcgtcaggacggccaactcgaccggccgcgcccaggggtaccggatgagcggggcgctcggcgccgcccacgtggcggggctgtcgctgcccgtcggcaaggagttcgagctcaaggttgtcatgtcataattcgtaacatggcattggaactctggattggcgcgtattgtccgaataaaaattgatcgaaagattaaacttcaaataaatgacatcatcgtcaaggcaatgctatgaactttacctcttcgcaaaataaaaaaaaaatctttaagcacaa

SEQ ID NO: 39090 - DNA, 675 bp, Setaria italica
  Peptide Sequence Number=SeqID_105064
tgtggattccttttctctttaatgtgtaagaatccacagcttgtagcacctcagctggagctattttgagatttcagcttctttggtcatcatgaactgtatctgacaagatactgtggtgccctgatgaatttcaagtaatacagatatgtgtctttttgtttgcagttggttgattttaatcaaacttgcaagtcccatattttcatatgtgctgtttttttatttagggtgctattaaaatctgcttgtgaagttctattagagttcatctttcttgctgaggcagtgataacaagtgaagcattttagagcatttgaagtatgcggttatattacttttttaagggtggcatgcatttatattgctttaaggacatcgcctgcctactgagatcagagcacttcaactttgatgtcatatcagcgtactgctaaagggtgcactgcttgttatatcttgccttacttttttttcctctgttaacacttataattagggattcaagtttttgtttctttgggtcatttggttgaccaaacctctttcaaatgaactaatccgggtttcgtacaagaaaaaagtggggaaaaaaaggatcttgggcctaggggtgtgacccagagctacccattaagtacccattgcaccctacttgcaattcatggattagt

SEQ ID NO: 39091 - DNA, 1613 bp, Setaria italica
  Peptide Sequence Number=SeqID_105065
gacagagagagggaagatgagcttcaacaagagcaggggaggtgggaacggcggcggcggaggagacgagctggtgctgagaggctccatctccaagaagtggaccttcctcctctgcctcggcagcttctgcatcggcctcctcttcaccaacaggatgtggacaatgccggagccgaaagagatcatcaggaggtcgacactcgaagtggagaagatgaatcttgtcgccggtgactgtgctccgaatagtatcggcgatgcaaaacatgttcctggagaggttccaagaacccaagatgttatacagacactggacaaaacaatatcaaacctagaaatggagctggcatctgcaaaggcgacgcaggaatccatgctcaatgtcgccccaacacccgagtcgacagggaaacggaaatacttcatggtcattggcataaacaccgcgttcagcagtcggaaacgaagagattcagtccgtgctacatggatgcctcaaggtgagaaaagaagaaagatggaggaagagaagggcatcatcattcggtttgtcatcggtcatagtgcaacttctggcggtatacttgatcgagcaattgacgccgaggacaggaaacatggggacttcatgaggctggatcatgtcgaagggtacctggagcttgcagcgaagaccaaagcgtacttcgtcgcagccgtatccatgtgggatgcagagtactacatcaaggtcgacgacgacgtacatgtaaatatagcaactcttggaaacacgttgtcaaggcatcgttcgaagcctagagtctacgtcggctgcatgaaatctggcccagtgctggctcagaagggtgttagataccatgagcctgaatactggaaatttggcgaatggggaaacaagtacttccgacacgcgaccggtcagctctacgccatctccaaggatctggcctcctacatagctctcaaccagcacgttctgcacaaatatgccaatgaggacgtatcgctgggagcctggttcatcggcctcgacgttgaacacgtcgacgatcgccgtctctgctgcggcacgccaccggattgcgagtggaaggcgcaggcaggcaacgtatgcgttgcgtcattcgactggagctgcagcggcatctgcaaatctgccgaccggatcaaggaagtccatcagcgctgcggtgagagtgagaatgcgatatggaatgcaaagttctaaacccaagatcgtccaaagaaactacactctttttacaaggaatgcacatatacagacatatagaaacccatggctgaacagagtgtgacaccgaagatggtgaccaagggatctctgttttgcatgttgacagccagtatgaagagagcttgagattcagagaagaatgtacactcaagtgtgcatccattatggtgggcaggaggggtatttcttttattttcctttttggggtgttttggcttaggaattggattattgtaagggaacttttctgttttggtgctcgaaaagatcccgggtttactcataaagagaaggtaggagaggagaggagaggaggatggggaagagagtgaaaggagagggagacatgggg

SEQ ID NO: 39092 - DNA, 676 bp, Setaria italica
  misc_feature (610)..(610): n is a, c, g, or t
  Peptide Sequence Number=SeqID_105066
tgggatgctactgacaacggcacctagtacgaaccgaacgaactctgccgatggaatggcatcgcctgcaatgatcgccggcaccctggtcgtgtcacggccatacgtttgcggggttcagacctaggtggtaccatctctccacatatagagtatggctcggggtatggagtgtcgacagatggtgacatatatagctatggggttttgctactgtaaatgcttactggaaagaggccaactgacagcttcgaccacgggacaagtctagtcagctatgtcaagatggcctatccaaacaaattactggaaatactggatgtcagtgcaacatacagtggaaacacccaagatgttattgatttggtcattcatcctatgtttggaattgctctagcatgctgccaggactctccaaggcaaagaatcaagatggactatgtggttgaggagttgaaagccattaagaaggcatgtgcagctcttatgggttcatgaagtgaaagtggccacctaataatctgggaaaattataataactaattgagatacccccatgtgttgctgcgggaaggctgtgaataattatgtaaaggttcgatatttttanaatgccatgaaaatgatgtaaaagactgcagaacaactacgtgctgaatgcagcgacagggcaaaa

SEQ ID NO: 39093 - DNA, 193 bp, Setaria italica
  Peptide Sequence Number=SeqID_105067
gtagttgtaacttttgtgtgagtttgagattgtgtcaaagaaaaaagaaaaatgctttgtgtggctgacatcttgttcttaacaaattcaagttagttgccaacatttaaaaatcaagcaatttttacctacggatctagttttctggtttcccttgaagaactggaaaagctagcagctctgggggatgagt

SEQ ID NO: 39094 - DNA, 692 bp, Setaria italica
  Peptide Sequence Number=SeqID_105068
cagagttttagtgagtgtttctctcacaaagaggttttaaatgttgctttgtctcccctattgcagcttatagttgttgaaattaaactttcaagcaattacgtacaacactgtatgggcatctgtcaccaagaaggaaagtgtgatgtaggcttcctgggttaaggtgctgctccaaagttctcacaaactcatccataacatcgctggacagtccaaaaatgttgcactatcatgggctcaaaatacagctctcacggcatgtgccatcgtgttcggggcaatcaagcttttctctggctcatgcacatgcatcttattgatctcgaaggaaccctcatcttgtatgatctcccgtagttccatgtccgaaggcccgtacatcggtacgtagaaagaatcaagcatttctctactgattaagccctgaggagcggagttacgagcatagcctgcttctccatctgcctgattcacgcacagccgttgttgcttggtggccatagcactcttgcactttttgcgtcgaagatctcctgatggaggctagcagtttgcacgatgattattaagggaacggcggcggcgttcccgggccgtcgagtctttccttgcgaggaagagaacacagcaaagttttaggcatcgatatgatcaaggagttgaggagcgatcttggttacgtaattaag

SEQ ID NO: 39095 - DNA, 997 bp, Setaria italica
  Peptide Sequence Number=SeqID_105069
ttctgatagcattggagtttggatagttcccacacccatctcgtatatcatcaattacagatgccatacagtgttgtacgtaattgcttgaaagtttaatttcaacaactataagctgcaataggggagacaaagcaacatttaaaacctctttgtgagagaaacactcactaaaactctgtcaccaagaaggaaagtgtgatgtaggcttcctgggttaaggtgctgctccaaagttctcacaaactcatccataacatcgctggacagtccaaaatgttgcactatcatgggctcaaatacagctctcacggcatgtgccatcgtgttcggggcaatcaagcttttctctggctcatgcacatgcatcttattgatctcgaaggaaccctcatcttgtatgatctcccgtagttccatgtccgaaggcccgtacatcggtacgtagaaagaatcaagcatttctctactgattaagccccttgaagccatatcgtttaaggggataattatagtatcccaaggggcaatgcactgatagggacgggaacctagcatggaaaccaccatccgacccccagggaccaattcttgagcccgcgacttcaagaaaagactgaaatcctttctgtactgttcacggtaagcccgaatgaccaagggccgccttgctcgccttaggccctcgtcttcatcatataaagggatcatattattctttagatcctcaggtgcctctgatatccaatgcagggtgtatgaagatacaactaggtctaggaagctgttgggaaagagcctcttgtagaatgacccaggcacaatgccagcagtcagaaccaagccagaactttgggcgctttgctgaaatgaaacgagccgctttgcgacatcgttgaaatcattgtcggggaggtcattcagaagcacgcggagctctggtggtgcctgatcatgctgtgcagcatggtgacggagaactgcatcgaccgcagtc

SEQ ID NO: 39096 - DNA, 1456 bp, Setaria italica
  Peptide Sequence Number=SeqID_105070
ttgttgttgttgttaaaatttaattgtctcaaacatacacttgtcgagttgataaacacatagcttgcattgcttatttacctctgatatccaatgcagggtgtatgaagatacaactaggtctaggaagctgttgggaaagagcctcttgtagaatgacccaggcacaatgccagcagtcagaaccaagccagaactttgggcgctttgctgaaatgaaacgagccgctttgcgacatcgttgaaatcattgtcggggaggtcattcagaagcacgcggagctctggtggtgcctgatcatgctgtgcagcatggtgacggagaactgcatcgaccgcagtcgagactagcgctaatgcattagggccagtggagcagcccaagtcggcgatcaccatgctgctggggacaccggtaggtttcaagttcaacaagcctatgagagcctcttctatgacaggctttatccagttttgcgcagcactctgaggagcggagttacgagcatagcctgcttctccatctgcctgattcacgcacagccgttgttgcttggtggccatagcactcttgcactttttgcgtcgaagatctcctgatggaggctagctagaggccaaaccaccaaaacgtatttgacaggttagctaacaattttaaaatcagttgcatggcatcaaacatatatactattttcaaattaaaccatgtgggtagactgtatgagaatgcctatatagatatgcatttttttttggtttggttgcacctttagtttgctgtgttcttcatgcatagacattcaatctgtattcatagacttgcattacatttgtaaatttcaaaagtcagctacagtattgttttttcaactcttctggatcttgaatcctaattcctactatactagactaataagagaatccacatgattttatacataagaaagaaaaatcgaatgccgtgaattgtcaagacaaagggaggaagttgattaacaataagcaactgatcggcttttagtttattcactaataatcaactgaggtgagcaatgttagcccggatccttcgactgaacaggtaccccttctgctttttccgctttctttgttcccatattttcaccggcagccaccatacccatcactaccaggaagcggcaaactcctgacggctgaaaaccgtcaggaatgagttatatgtgtcgatattcaactttttctttgttatatgtgttgatttagtaggcttttaccattcacatgtttttggcatgagttgattcgataatattactagaatgctttcaggatgtttagataaatgaactctaaaggtaataagtgttttaggaaactgaaaaagggtttaatttagtgattgacatgtgggacttgggcccgtggtcaaagtcaacaaatatgttgaccagtcaatggtcaaggctgacat

SEQ ID NO: 39097 - DNA, 579 bp, Setaria italica
  Peptide Sequence Number=SeqID_105071
gtgagaactttggagcagcaccttaacccaggaagcctacatcacactttccttcttggtgacagagttttagtgagtgtttctctcacaaagaggttttaaatgttgctttgtctcccctattgcagcttatagttgttgaaattaaactttcaagcaattacgtacaacactgtatgggcatctgtaattgatgatatacgagatgggtgtgggaactatccaaactccaatgctatcagaataactaaactgttggttgtccataaacatagcatatactcaatgattcaacgtgtcacataactttagcgcatcgacttatattaattataaatatagctacaaacaaatgtttcaaggatacaatacaagacatcaagtaattcttatacacaatatatcacataactatattgtaacaatatacttatactagctatatgatgatgtacaaatgtataataagtttcctcataagagagtgtggttaattcttaattgggtagatcttacaccatgtagagcactacatctttaccgacacaaaatgagacaatgttgcttgtgcaaccgatc

SEQ ID NO: 39098 - DNA, 747 bp, Setaria italica
  Peptide Sequence Number=SeqID_105072
cggtatggaacaaaaaaaaaaagtgtggtggaggaaattaacccttgaagccatatcgtttaaggggataattatagtatcccaaggggcaatgcactgatagggacgggaacctagcatggaaaccaccatccgacccccagggaccaattcttgagcccgcgacttcaagaaaagactgaaatcctttctgtactgttcacggtaagcccgaatgaccaagggccgccttgctcgccttaggccctcgtctctgatatccaatgcagggtgtatgaagatacaactaggtctaggaagctgttgggaaagagcctcttgtagaatgacccaggcacaatgccagcagtcagaaccaagccagaactttgggcgctttgctgaaatgaaacgagccgctttgcgacatcgttgaaatcattgtcggggaggtcattcagaagcacgcggagctctggtggtgcctgatcatgctgtgcagcatggtgacggagaactgcatcgaccgcagtcgagactagcgctaatgcattagggccagtggagcagcccaagtcggcgatcaccatgctgctggggacaccggtaggtttcaagttcaacaagcctatgagagcctcttctatgacaggctttatccagttttgcgcagcactctgaggagcggagttacgagcatagcctgcttcctatttagattttcaaagaacagaactggagaacactcacttgtcttgtaaagtccta

SEQ ID NO: 39099 - DNA, 545 bp, Setaria italica
  Peptide Sequence Number=SeqID_105073
ttttctgaacagttgggaatgattattaactttgatgtttatccataaaacacccagagtcttaatagggtcactgaaaaagcaatacttaaaagaacagcaaacagaaaagcagccagtgcagacattgttctcccggtctccttcagagcgcattcttagaacagaaaagccttgttggaggggggggggttttcactggtcaaggactagcagtagaacatggacctcttgagctcatccttgatctgcggaagtgggttcggaccagcagcacgagcagataaattgctggagctcgccacatcagagccttggttgacgtagaagcgggcacggaatgcgagcttgtgggcgtagtatgcaggaggagcgattgacaccgagcgagtgcagttcgaatacatgtagcacaagttatatgtgagagactgcagaccatctgcagtgaacttgttgtcatctcgcagccatgctggtatcaagggaacaagtcgtcctacacattaccatgtgctgcagtgaacttgttgtcatctcgcagc

SEQ ID NO: 39100 - DNA, 402 bp, Setaria italica
  Peptide Sequence Number=SeqID_105074
ctgatacatccaccatttttggagtgacactgatcattagcaaatcttggacacttctggataaaattggctactgcaacaccataatctgtctataaaagttaaatctgagtatgcatactctctctacaacaatccacatggcctagctggtcatttagaggtacaagtaaatatcgatgatgagataggaaaccgccctaatagctggtgatctgccttcctggtagtgccgagagatggacttcacgatcagatagatgagtcatattgccagcatcatccatgtcttactccttgaggcaccatatcgtccagtagccccgtcttctcaactggaaacggccggcgaaacagatgacgacggcgtcgtcggcgactgcaccatagaccaccctcggg

SEQ ID NO: 39101 - DNA, 1262 bp, Setaria italica
  misc_feature (1)..(34): n is a, c, g, or t
  Peptide Sequence Number=SeqID_105075
nnnnnnnnnnnnnnnnnnnnnnnnnnnnnnnnnnaactttattaataacgccaatctcacattttgacaccatatgtacatcggattcggtatataagttgacaaaagaaagatagatgatacatttaactaatggaagaaagcatatgcttttcaaaagatataatacatttacaatttgttgccaaaaaagaaaatacagcggctactccaacagccgagtaataaaatatatgtacaccagctcctcagcctatcaagttccctatgggtgaagttcatggtcctgaaccatcaatcatccgtctatccgattctgagctctgagatcagctgggtaccgtgaatttcacagtactgccagaagccagtagtgtgtgcttcagcacagttgcagtgcagatattactcctacattcacgagatatcaccaggcggacatgtggaacagctttccagctctctccaagagcaggcttgacagctccattgccagcagaaaccatatgattggttaccagaacagataggttatgctcatctgctaacttctttagaatcattgccactgatatcatcatcgaccgcccttgcggatatttgcctccaatgatgggagcaagtaaggatgatatcgagtcaatgataagcaagcaaattttgctaccaccattgtttaccttgtcattcgacagagagatttcgagttgatttagtacttcaaacaaagcaaatatatcaaacacggactcacagatgatgcttctcatgacatcttcaatctcacatcctttggctttatgaccaaataggtcaggagtcccatcaattatggtagcaacgcgactaggagagaaggagttactagtatccaagtacataaccacccccagatgcttggctgcaacaagtgaagcagaatgcagacaaacctgtgttttaccggaagatgatggtccagtaacctctgtcaagtgacctcggcgcaggccacctccaagaagtgtgtcaatgccttcaagcccagtagggaggagatgctttttttcagtgacatccttgagcaattccatcccattccaaaatctcccacacctatcttcggtggaaggctgatcttgactcatcatctccttatcctgtatctagcctagcaaatgggttgggattggttgatccaagacctgacccaagctacccacttttaactatattattggggttttttttttttgttggcttgacccaataagtaccagaaa

SEQ ID NO: 39102 - DNA, 591 bp, Setaria italica
  Peptide Sequence Number=SeqID_105076
tagcaatcaaagataatgcctaccacaaaaagatgaggatcaaaagttcttaacatggaaatgatggtggtataaaaaagaattttgacataaataaaatcccaataatataagcaacaatgacagtacgaatcaatagaactgccaggtggtggatgcagtgacactcaggtttgctcacaacctctacaataccacctacatagcacttaatagatactgaaataatgcaggaatagatttacacaaactcttggtttcaccagccaagcgttggaggagcatatcaacgaagggagcacctacaacacggtggatgaaaccgacaacaaactggcggagaattgaaggagacctccacacattatctagccaagacaagtgtcaatttcaaaatcaagtagcaaaatcatgtatgcattcaataattgcatcttaccacataaccattgtgacaatcaactgcagtgtgtgcaatataatgactgttaggtacgacttcatgctatccatgtcagcaatgtaacaaatgttatgtatgacttcatgctatccatctcagaattattctttacctagcagtcagatcag

SEQ ID NO: 39103 - DNA, 643 bp, Setaria italica
  Peptide Sequence Number=SeqID_105077
aaagtaacatcagtttgttttaagggtgttgctgggagaagatgacccatcaagcataaataatacttgcattgtattaattcccaaggtgggtcagccagaagagcttggtcagtttcgaccaatcagcctctgcaacgtgatatacaagatcggttccaaggtgctggcaaacagattgaggagaatattgccggaaattatagctgaagagcaatctgctttcatccctgggcgactgaccacagataacatcatcacaacttatgagtgcatgcattttatgaagaagaagcgagctcaagatagtaggtgttgtgccctaaaactagacatgaggaaagattatgactgagtagagtggggttatctacagtcagtcatgataaggcttggttttcaccgaatctagatggagtcgattatgagaatggtgaccacggtttcattctcggtgcttttcaatggtgaacggatggaaggttttaaaccctcaaggggtatgtgtcaaggggatccaatctctccctacctctttttgttggtagcagagggcctttcgtggctgttaaaatcacgagttcagtcagcgcagcttaatggcatcaaggtggctccatcggctccggtggtgagtcactta

SEQ ID NO: 39104 - DNA, 1926 bp, Setaria italica
  Peptide Sequence Number=SeqID_105078
cttctgctttcgttcacaacctcaacagcttcgaatcttcctctccctgcattgatctcccggatgatctgtccataggtgcccatgccagccccttggagattcttgacgacactagcacaatctctcgccagcctgaattcctgaatgagtaggtcgcttgctagtgctaggccttccttgcatgccagcacttcttctgtcttggcgtctgtgaccctcttcaataccacagctaatgctccaacaaaagcgccaatagcacttcgcgccactgctgccaccgctaccgtgttcgagtttttggatatggccgcatcaacattgattttagcaaaaccatgcggaggggtatccacttcggaatctgaatctatcccagttgttgttgtgactttgggcttgatttcaacatctccaattctattataaaccgttccaacaaaacagtgtatcaatagcagactttggaacatattctcatgaatggccttgcgccgtgcatgccacactgcccacaatctcatgaccacccgtataagtttatcatgtggcagtacctccatcacctccttcagccaacctcgggcatcttgattctgagcctgacccaaaacttctgtaatggcattgtgttccaatgcccagacacaccggaacatgttgcactctagcaatgaatatctccattagtccaaggctccacgaaaccacagcagctgttcggagccatgttcctgtggtggcgcacgtcactttttgggatagaatggcgagcaagcctccataagaacatacgaatctttgatggcaccttgaccttccacagataacaatgacgctggctggctggaaaaaatgtgctggaaaaccattcaggctctggtgcttcgattggaaacatttggaacagagcaaccttaagttcttcctcgctgaaagttaacaaataattaggctggcaataaagatatgataagatcctggtatcaactttgtgaaagcagccaatcattattggcagcatcgacggagtcacatcgtgaaagtaaccaaacaaccctgactgcatcaacagggacagcgtgtgaaagcaactaatcaaccttggctgcaatagcggggaatctggtgttgctttttaaaaaacttcaacacatggcctcacctgagaacaatctagttgcaagtacttaaaaagctttgcagcatggagctcgccgcggattgcaagagagagtggaaaatcgaaagacgcttgatatacatactgagtttccagtctcctgtcgccatcgtagctacgttactgttcaacaatctatagcatgaagatttcgaattattgccctatcgccttcttcttagcattatcatcttgtgctatatacacaacaacaaatcgatcgcttgtgtgtttctaaagtctttaaaactataatttaggtgcattatcttcttgttagcctactgttctgatgatgatatgtacgaccattaagccctcggtagctatacatacacggctttgtccatgtgtatgcacacacaattggagatttttttgcgaatcacacggttcagatgcagtcgctcacatactcgcacacacactcacccctacgaacacacgcacgcaaccctacctatatgagcacctccgaaggacctcaaaattgacaaagtcactactagcgtctcactgtcaacgggtacgtcacctaccattgaagtattagcgccgattaaatcctgaaataaatccaggaaaatgcgagcaccaatgctgggttgaggactcgaaccctattgggcagaaccttactgcgcttagttcgcacactattggtgatctaattgtctccatcatttggttttgattttgaccctgcttggcctgtcacatgcttcacagcttactgatac

SEQ ID NO: 39105 - DNA, 168 bp, Setaria italica
  Peptide Sequence Number=SeqID_105079
ctcgtgtattctgatgggagtgccatctgctgaactgcatacttataatgaaaattggtgctttctgctttgcatcatgtgccataaaatatgattgcataatatcatgtcttcctgttgcttgcagaacaaccctaacacagagaactgtaaaataaaggcaatgtt

SEQ ID NO: 39106 - DNA, 700 bp, Setaria italica
  Peptide Sequence Number=SeqID_105080
acgaatacccaacaagccccgtttagcgttgaggtaccaggatatgatggtagcaaccagcaacgttccacacagcccacacctggaagcgggagcagttctgttgcgccattaggaccaccaccagctgttacatctataggccatggtcatggtctgggaggtcatgttattcagcagacagtccctcccgccacaccaagcagcccatatcctccaacagccacaagtgtccggccgagggctttgtcaatcgcatcttacattgcagcagcatcatacagagcggaggatagggagcctcatggcatttctcgtgctagagctgctaatgttcaaaacaataacattattcccagtcaggacattgcctctggatttgctgaccagccatacccgcactcctggggtcaggataccaggtggagagtctggaggccaagtgcagagccaggaaccagttcacaacataatcaagagaatagtagtttcccaactggcatatcaacctcagggctgccgccagaatttctcgcatacctgcagtctcgaccttcggacaggaggcatccatttctgtgataagtattcagccaaaagttgaaaaaagaactagcaggttcagcatcaggctgttatcatcttatgtctctgtaaccggtagctgttggcattattatgtctggcaccctgtccgctg

SEQ ID NO: 39107 - DNA, 537 bp, Setaria italica
  misc_feature (501)..(537): n is a, c, g, or t
  Peptide Sequence Number=SeqID_105081
acgtagacccgactctagccgcgccaccgtcgtggcccccaaagcagcggccgccgccgtcgaggcaaggaactccaagggcggcggcggtgacgtcggcaccgactctcccgtgtgaggcgcggcgctccgaccacgacgccgaggcgagctcgaggcctggagcaggcaagcggggcacgtaaacggcgggtggcgacagcatctttcggcgtcggcgtccttgtctatagcttgctgatgggtgcatgaccagccgggaaaaggttggtgaggcaatcggctcctcctcgtcctcttgtgcctgcgttctgaattgtcagctatattttttgcatggtatcgggattagatatatcgagtcatataaatatcctgatcgtttggagtcttcttctatgtatgatgcgaggtgtgtgtagaaacggatttcgtgagatgatatgtggacgaatttaagttttcttttaaattatactttaaaaaaaaaaaaaactaagnnnnnnnnnnnnnnnnnnnnnnnnnnnnnnnnnnnnn

SEQ ID NO: 39108 - DNA, 1285 bp, Setaria italica
  Peptide Sequence Number=SeqID_105082
aggtgaacatgattcttgacaatcttcctgtgaggaggttcactgagcagaatggaatgaccattcagtggacaggctatccagttggttatattccagaaggcaccagtgatgtctatatcatcaatcacctgaaatttaaggtcttgatccataagtatgaaggaggcaaagtaaaggtagttgggactggggaaggaatggaagtgatctcagagactgacagtgatgccaactctggctatgagattgtgggatttgaggtgatcccatgcagtgtgaagcgtgaccctaaggccatgtcgaagcttaagatgtatgataaagtcgatcctgtgaactgccctgtggagttggagaaatctcaattgatcaaggagaaagagcagattacttttacgtatgaggttgaatttgtaaacagcgatatcagatggccatcacggtgggatgcatacctgaagatggagggttcaaagattcactggttttcaatcatgaactcactgatggtaattctgttcttggctggcattgtttttgtcatattcttgcggacggtgaggagggacctgactaggtatgaagagttggataaggaggcccaagctcagatgaatgaggagctctctggttggaagcttgtcgttggagatgtcttcagagagccaacctcatcaaagctgctctgtgtcatgatcggcgatggggttcagattctgggcatggcaattgtcaccattttctttgctgcgtttggcttcatgtctcctgcatcaagaggaatgctgttgacagggatgatagtcctttatatgttacttggaattgtggctggatatgctgctgtcaggctttggaggactttaaaaggaacgtctgagggatggaggtctgtctcttggtcaaccgcttgtttcttccctggcattgtcttcatcgtcctaactgttttaaacttcatgctgtggacaagaaatagtactggagcccttcccatctcacttttcttcggtctttttgtccttgtggttctgtgtctctgtgccacttacccttttaggtggtttctttggcacaagggctgaaccaatagaattccctgttcgaacaaatcagatacccagagaaatccctacaaagaagtactcatggctcttcatacttggtgctggaactctaccttttggaacactcttcatcgagctgttcttcattctttctagtatttggctaggaaggttctactatgtgttcggcttcctcctcgtcgtgctccttttgc

SEQ ID NO: 39109 - DNA, 532 bp, Setaria italica
  Peptide Sequence Number=SeqID_105083
gttatttcatccatatcccagtgtcaaagtactcgcctcgaggattatcttagtgaaccaacctgctcctgcaaataaatactttcatgtggcatactcagatgtagtctaaacatgatggataactgataaccagtgactgttatacatctacatgataagctcttgatgttctcatggaacatctattatagaaaatatgctctctaattaaagctttcagggtacagcaccgctttttgttaggttctaaatatattaattttatttttttatagtgcttcctgtcacgtttgctaatagcatatttgttgcaagatagttataatgtccaattcttcttattgcaaactaataatcaaacctgctaccaatggtgcatagtcttttaattttgctatttatggagaaaagcaaattggtcttaatactgcattccttttgcgttctgtttatttacaggtaaggttgaattatatgcataaatgatggagagatatttagggaagtactaagttggctcctcgatcaa

SEQ ID NO: 39110 - DNA, 458 bp, Setaria italica
  misc_feature (441)..(458): n is a, c, g, or t
  Peptide Sequence Number=SeqID_105084
taccggacgctgctccgggaggccacggcggcgctgctcaacgcctactacaacgcacccggcgggcccttcctgtacccgaccaccgccagcgtcatcgaccacatgaacggcgcgctgctcagctccgcgcagagggtcctcatcgacggcgcgcgcttccgcagggccaacgccggcggtggaggaccggccggacggacaaggctgccgtgcgacttggcgccctgcgcagcgcagcctccccgctagctatctccttgctaccagttgatggtgtccaagatccacacatacatactcattcattaccgtaccaccaccaatgcaatgcatgcataggaccaaccaaccaaagcgatacaattactacttgtatgcactgactgacttgttgctcttgtccggtcattaatatatttgaaaaggttacagcacatnnnnnnnnnnnnnnnnnn

SEQ ID NO: 39111 - DNA, 418 bp, Setaria italica
  Peptide Sequence Number=SeqID_105085
ttttcctttttaggtttttaggattttcccgtttccgttcttggaggcggcggcggcgtacgaggaggccggcgtcatcaacggccgtgggcatggcgacgccggcgtgctgatgctcaagggcgctaggctgtcgctggctgaagagaggtccatcatggaaacgagcgccttgaggaggacaagcagctgctcgtgcacgtaagcaatctgcttgtgcgatagaatgtatcatcagatcagaagatccaacgatttctcaagtgaacacacaacgcaggcgtgcttcgtcatggtactgagtactgactggtttcatgtgtcaacagtttgtgctccgaatggaagttcgttagcagccaagaaaaaaaaattgaagtacatctgtcaacctggaatggaacagcccttcttacaa

SEQ ID NO: 39112 - DNA, 530 bp, Setaria italica
  misc_feature (40)..(40): n is a, c, g, or t
  Peptide Sequence Number=SeqID_105086
ttctatatgattgttctccgatgaacctcaagtcaatatnaaaggtactcataatccatgtggtttttatgccatttcatagtatactttattcttaattttcttttgataaagttggaaaaagctatttactgctatattgttgagagttgatacttgatactaaatgtgttctagcttatacgcagggcaactttatttccataaatcaatccttcttctggcagggcagagtcagaatcgcacatagttttatactacactattaagtagcacaaaagcttctccattttgttaatgtattttgtaattacatcatgtactttgaaatattttctgttcaattcgccgccttctggcagcagcaacagctagtcaaccaactagctttgacgagtcccgccgccttcttgcagcaacccatcgttggtctgccctcttctagattactgatgagttgtacttgaataattatgtttgcatgaggacatgggtgactccgcggaaatagaaaagtattggttgagatt

SEQ ID NO: 39113 - DNA, 538 bp, Setaria italica
  Peptide Sequence Number=SeqID_105087
gattcagatggtcttatggattctaggaaactacacaagttttttctttttttgtcaccatttgcaaagatttccatggcttgacacctaaaattgacaagacttttaggttaaatcactgatttcaaatactgataatccctatggcagcatcaggtaactatcggcatatctattatcggctagtaattccaccagatgcatcatctatccatctagctgtcactcaagtacataaaacaaacaagccataaataaactagaagcaatccttgcagcaactaagagtggtggtgccaaaacgagcattgcagtataccgtatactcgctgtgttcttcatacaacaagattgatgcgtgattccagtccaacaaaaaatgccttcagtttgcatagccttctttagttcggtagggtaaggcattttctaaaagtatggtacaacatctccttggaacatgatgagtcttatcctcggcatacttgaagacctcgtccaccaacctcaactttaaagcagcaaaaaccatgagatt

SEQ ID NO: 39114 - DNA, 1499 bp, Setaria italica
  Peptide Sequence Number=SeqID_105088
ggggggggggactgatattttattgatacaacattgcaataattattaagtttaattttaattttgatacaacaatagcaccagcaatagtgcagctgggtgcttattcgatacaagaatctgctaggaatagcagaagaatatccgcatcttgaaattcatgtagtgaatacaagaatctcctagggaaggcagaagaatatcctaatcatcgaacaattgaagtagtgaatcttaacttctttagttcggtagggtaaggcattttctaaaagtatggtacaacatctccttggaacatgatgagtcttatcctcggcatacttgaagacctcgtccaccaacctcaactttaaagcagcaaaaaccatgagattcaagctctgtggcgactttctccaaaactatgctggctgatagggtcggtattagagttaacacacagcctccaccaccagctcctgttagctttgagaccaggctatatttcagagttgttcgcaacactgtttctatagaagaatggctaactcccatgcactgaagcaaaccttggttcatctccataagctctgctagcttttcctccttcgaggtgatggctatttcatcctcggctgctaactcaacaatgcttgaaagctcttcactaatggagtccactgcatggaagacagaagccatagcatctggatgcctagatgctctttcagatacaccagcaactagggcctttgtgttcctaccaactcttgtatcagtgatgagcattttgactgggttcctggacttgaggtttgtcatttcccccttcttgaatttaatcatgcttccgaaagtgctaacagaattgtcgatgccagaaggcttgccatggatgatcttttccccttggaacgcccactggttgaccagctcaagatcatccttcctgaacaactcccactcatcagcctccctgtctcctccaatgccgactgcaccagccgccgtcaatatagcacccgacatggacacgcagaaagctgcggacgagccgagccccgcacctatgggcaggtccgaggtgaccaccgccttcccaggcttgcagcccatgatggaggtgtagaggtaaaggaaggcggagaggccggaagagagccagatcttggcctcggggatctcttggccctccaagagcttggcaatggcggcgagctcgtcaggggagcatggcgtcggcgccccggccttgccgcccacctcccccagggccccgcggaggcgcgaacacggccaagagaaggtgaggcatgagtccctaaggtccagctccaccacgcctgcgccgccatcctccccttcggggaggagggtgagggaggatgtggtgtagaggtcgatggcagcggcgacggcagcggagccgtggacgacggcgtgctcgcccgcgaggatgatcttgccgggcgcccgggcgcgtacctccatcgattccccggtcacggtcggtcgtc

SEQ ID NO: 39115 - DNA, 505 bp, Setaria italica
  Peptide Sequence Number=SeqID_105089
caggccatctgttatgaaactaccaggctcctgctagacgaggatggctggagggggttttatagaggttttggacctaggtttcttaacatgtctctctggggcacatcaatgatcgtgacatatgagctcataaagaggctctcggtgaagtctgaataattcttctttacttctttcccaactgaggtggttagttcaagatcacccaactgaggtggttagttcaagatcatcgttatcaatacaggctatatagtgtgtttgctgcacggaaactgtcggcgagtattatgatagagtaggatgcagatttaccacttagttgcataacatgcttctgtatgagacttgcgatatgtatatatctgtgctaaaggccctcttttcaggatgttgtagccagcctctctagggtgtaatcgaaacagcctacagcccataggctttttctggctaatggggcaccttatggctgtacctgttaatgattcagcaaaatttt

SEQ ID NO: 39116 - DNA, 639 bp, Setaria italica
  Peptide Sequence Number=SeqID_105090
tagtgtcttgcgagctgcgaataattacgtgggcattccaccaggtgtggaagcagtttcaccgcagggaacttcttctgagatgccacatcagcccagtcaaactgagatagtcaatggtgaagttcatgagaagtacatggcatttaaaaaatttgatacagttaatgaccacggtgatcatttctactcaacaaaagttcgtgctgttagaaagccaacgaaggcttgggtgaagcggattcaacatgaatggaaagtcctagaaaatgatttgccagacacaatatatgtaagagcttacgaggataggatggacctgcttagagctgtcattgttggatcagcaggcactccttaccatgatgggcttttcttctttgatgtctatttcccttatcgatatccaactaaacctccggaagtgagttaccgctctggaggattgcggcttaacccaaatctctatgaatgtgggaaagtctgtctcagtctcttaaacacctggactggtactggatgtgagaggtggatcccatctgattcaaccatgctgcaagtcttggtctctattcaggccttggtttgaatgcaaacctatttcaacgaacctgggtatgctatgtatgctaacactcc

SEQ ID NO: 39117 - DNA, 537 bp, Setaria italica
  misc_feature (14)..(14): n is a, c, g, or t
  Peptide Sequence Number=SeqID_105091
actagcatacagtntaaaaaaaaacttagtctcttcagttaggacacccaacagttcctagtactcttctaaccgccaggatatagaaccaaaatattgcagtttctaactgaatctaattctaattctcaagtttgctattactgagatttgaaggggaatgaaaaaagtaggaagatcagtacatcaggtggaaaatttctttccttgaatgaacttggaaagattagttcttaaccacaatcatttatcgcttctgagacgaaaataaaaacccaaatatttttgctaaagctaagaagacccagaacagttgcacctaactgtggttaaggaaaaacagcatctactttcagcagaaactgtattgattgacttattattaagagtagtgccaaccaaatcgaacaaagcaacagagattattggatgccatctcactgcaaggtgtcctaactcctaagcaaacaatttataagctgtaaaatccaggaaccttaaatctgtaacatcggctaccacatacatagatatatc

SEQ ID NO: 39118 - DNA, 822 bp, Setaria italica
  Peptide Sequence Number=SeqID_105092
cgggagatgaaggcgtcctacttcagctggttctacggggtaggcaacctggccgtgctcacctcggggaccctgctggtctgggtcgaggagaaggtcagctgggggctcgggtacggcgcctgcgcggcgtcgatggcggtggccgtcgccggcctcgccgccacggcgcccgtctaccggatagtgcctccggtgggcagcccgctgaagggcgcgtgccaggtgctcgtcgcggtagctcacaaggcgggtgtgagagtacctgacgacgctgctgacctgtacgaggaggtgcacgacaagacgccattgcttgatgaaccagcgcgcgagcagctggagcacaccgacgagttcaggtgcctggacaaggccgcggtcgtcacgggcgcggacctgcaaggcgccagcccgtggaggctgtgcacggtgacccaggtggaggagctcaagactctgctgcggctcgtcccgatctggctcacctccgccgtgtacttcgtcgccaactcccagactcagacaaccttcgtgcagcagggcacgatgacggacaccaggatcaggatcgccggcggcgcgttctccgtcccggccgcgtcgatgacaagcgtcatgacggtgtccgtggtcgtctacatcgcgctctacaaccgggccgccgcgcccgtggcgcgccgcttcctgggccgcgcggaggcgctcacgccgctgcagctcatggggctcggacacggcgctgtagtcgccgcggtggcactcgccgcgttcgccgaggtgcgcaggctggcgagcgccagggccggtgcgccgcccatg

SEQ ID NO: 39119 - DNA, 1179 bp, Setaria italica
  Peptide Sequence Number=SeqID_105093
ctcgacggaatatcatccccgctgctacaactttccaaatcggaggcactcgctaaggaggagcccaacaaccaccatccctcgaccaaagaagacatctctgagctgtccctacaagacatcagcaagatatggggcctccacccatccgagtttggcccaggtgaacctggaccatcaacaaggcagccaagggtggcccctctcactgacgacgaggttgccaagttcacttgtggtatctgtctcgagacgcttcccatctttgacctcttccacggcatgccgtgcccccacaagttctgtgctcggtgcatggacacctacattgagggcaggacccgtgccggtgaggtgccgatcccgtgcccggacccagcgtgcaaggaggagggaaatggcggtggtgtcctgcacccggaggactgcaagaagtccatcgacttcgccgtgttctgtagctggagtgaccagctcactgagaacgctatcccaccgagcctgcgcatctattgccccaaccgtgagtgcaggatcatgctcgagtccacctgcacgaacaagacaccatccaaggcgtcgtgcccggcgtgcaacagcattatgtgcaaggcgtgtggcctgtactggagcatcgatagtagcgaccagcacgactgtgctgaggggcagaggccatgctcgtgaagaagctcgcctccgagcgcaagtggaagcaatgccccaggtgcaggatgttggtggagaagaacatgggctgcgatgtgatgacctgcaggtgccatactgtcttctgctacgattgcgggcgctcaatgatgccattgcaggatggagccgagttgtgccggtgccgcaacgtccattgatgctccccccacccaggcgatcaggcaagagtaaagctgcgcaaccccaacatcgactcgccggagctgagaaggaagggcagccgacgtgcatcaggaatctgatggatttgtgacagcttcgtcgcttgccttgaattcaaggttgctttacctatgtcatgttgtggtggcttgctggattaggacgtcttgtatctgtccgtttaattacagtactcgaagaacgacttacccaatactttagaacctacttaccaacggacaatagaccgtagacccccaacaaagttactagtagactacggta

SEQ ID NO: 39120 - DNA, 376 bp, Setaria italica
  Peptide Sequence Number=SeqID_105094
tccgacagtatgtatcaagtcattagaagatggagaattttatctaggaaaatcaatcaatgggatatactgtgcatcattattccaggagtcccaacttcagataaggcagagtgggtgttgaagcatgacagagacattttccccatcctgccaaatctgaactatgacaaacaatgtgatggcccatggatcttaacaagaattttactattggcgacatgaacaacattctgatgaagattctgatccggaggacaacgaagcaattgtggaagagaaaaatggaagagaaatttgagtgggactctgacaatgataacgttcttgagcctggaagtaggagcaaggattcttacattgtttcctttggtag

SEQ ID NO: 39121 - DNA, 409 bp, Setaria italica
  misc_feature (207)..(207): n is a, c, g, or t
  Peptide Sequence Number=SeqID_105095
aacaaaaccacagtcatacactaccacaggcacctgccgttctccactctcccccactcactctccggcaaagtcaccgttgctactagcattaccgctgctactactactactggcactggggcctgacggatacaacgcggcagcagctcgctagctccatggccatccatgaagctgccgcgatcgacctctcttctgcaagcncggtgggacgaggaggaggaagacgccatgctcactgcgctcggaagaggtggtaggggaagaagccgttcttgtcggtgagcgggtccacgatcttggcgatccccgtcatgagcctccacacctcgtccttgaactcctccttgctcctcttccacgcgggtatctcctgctgctgctggctggggaaaaccggacggaa

SEQ ID NO: 39122 - DNA, 344 bp, Setaria italica
  Peptide Sequence Number=SeqID_105096
ttcaggatcttcaacacgattgactgagaaactacattgttgaggggaatacagattttcaacagcttcacgtaaagaccgcagaattatactctcagatgagaagaaaatctttctcttgtcaggtgcgacattcacatcataggatgtggttggaatacggaaatccaggatagccacaggatattgcttggcattcgagcttctgtacagctcattgacaagttttgtgacctttggcatatcaacaggtctgccgttcacatagaagaattgtctatctcctgaattgcgaccagtaccaggtccaggttttgagagaaagccttctacttggcagccat

SEQ ID NO: 39123 - DNA, 195 bp, Setaria italica
  Peptide Sequence Number=SeqID_105097
tttagttccatttgtagatttgtgatgtcaggcactcaggctttcagcataaaagtttgccatcttactctcttaggcttatgctctgtctctatgcactgtttttttctcgtataaattctctaatgacaaacaacatatggttcaccttttttccgctatttggcaaatctttttgggaaattatgcgacagg

SEQ ID NO: 39124 - DNA, 677 bp, Setaria italica
  misc_feature (632)..(677): n is a, c, g, or t
  Peptide Sequence Number=SeqID_105098
cgttcaagggtcttccaagttcaacggcatgtccgatgacttcgacaaggacgaggagcagcggatgtcagtcgtccgctccggcagcatccgcatgctggaggaggacggcccggtggagaacaccgttggaccctcgcacgcaagggagattcagtcgccgtcgctgacaccggcaccagcaccggtggtgggagtcaagaagcgggtgcggttcgtgctgccagcggcgagcccaaagccgaacgtcggtgtgcaggaggagctgcaggagctgtcggacgcgcgggaggccggcatggcgttcatcctcggcaactcgcacgtcaaggctaagagcgggtcgagcttcctccggcggttcgtgatcaacttctgctacgacttcttgcggcggaacagccgggggcccaactacgccgtcaccatcccgcacgcctccacgctggaggtcggcatgatgtactatgtctgaagtctgaacccctgaaactctctggagaagatgaacatagtaggaagagtaaaagatgaagaggagatgaaacaaagttttcagctgtatatgctagattttgtaagtgatgttgagttgtcgtgtaaatgcagcctgattttcttaggtcttcagnnnnnnnnnnnnnnnnnnnnnnnnnnnnnnnnnnnnnnnnnnnnnn

SEQ ID NO: 39125 - DNA, 1941 bp, Setaria italica
  Peptide Sequence Number=SeqID_105099
cgccgccggggacgacgaccagctcctcgacgccgccgccgccggtgccgccaagaaggccgcggcggagaacggcaatgccgtgacgctgggggggcgcggcgggggcgccgccgccagcgtcaggaggctgctggagcgccacaaggtgctgcagcgggtgcttctcgtgctggcgctggtcggcacctgcatggtgatcggcgacggcgtgctcacgccagccatctccgtgttctcagcagtctctgggctggagctgtccatggagaaggaacaccataaatatgtggaactgcctattgcttgtatcatactggtttgcctgtttgcactgcaacactatggtacacatcgggtcggcttcattttcgctccaattgtgatcacatggcttctatgtataagcatgattggtgtttacaatattattcattgggaacccactgtataccgagcgttatctccgtattacatgtacaagttcttaaggaagacacagagaggaggttggatgtccctgggaggaatactgttgtgcgtaactggttctgaagcaatgtttgctgatctggggcattttaatcagttgtcaatacagattgcttttacatgcatggtgtatccagcattgatcctcgcatatatgggacaagctgcttacctgtgtaggcatcatatcatggaaagtgactataggattggattctatgtgtctgtgccagagaaaatcaggtggcctgttctggcgattgctattcttgctgccgttgtggggagtcaagcggttatcacgggtacattctcaatgatcaagcagtgcacttctctgggctgctttcctcgggtgaagatagttcatacatctgccaaagttcatgggcaaatatacatccctgagatcaattggatcctgatgatactgtgcctagctgtaaccattggtttcagggatactaagcatttgggaaatgcatcaggactggctgttataactgtcatgctggtcacaacatgtctgatgtccctggtgatagtcttgtgctggcataagagcatatttcttgcaattggcttcattgtgttctttggaaccattgaggcactgtacttctcagctgcacttatcaagtttagggaaggagcctgggtcccaatcgtcctggctttcatcttcatgttgataatgtgcatctggcactatggcaccatcaagaagtatgagttcgacgttcagagcaaggtttccatcaactggcttcttggtctcagcccaaacctcggtattgttcgtgtccgtggcattggcctcatccacaccgagcttgagactggcatcccagcaatcttttcgcattttgtcaccaatctgcctgcctttcatcaggtgctcatattcatgtgcatcaagaacgtcccgatccctcatgtccggcctgaagagcggttccttgtcggaagaattggcccgaaggagtacagaatttaccggtgcatcgtcaggtacgggtaccatgacttccacaaggacgacatggagttcgagaaggagctggtgtgcagcatcgcggagttcatccgttcagggtcttccaagttcaacggcatgtccgatgacttcgacaaggacgaggagcagcggatgtcagtcgtccgctccggcagcatccgcatgctggaggaggacggcccggtggagaacaccgttggaccctcgcacgcaagggagattcagtcgccgtcgctgacaccggcaccagcaccggtggtggatcaagaagcgggtgcggttcgtattggtctacctattcttaagtaagtttatttgttagtttcgttacgtttctagtagtctaaggttttcgcattcgtcaccaatctagacctagacctttacaatacaaggtagactacaataattacaatagtagacaatacaaa

SEQ ID NO: 39126 - DNA, 498 bp, Setaria italica
  Peptide Sequence Number=SeqID_105100
cgcacggggaggagaggagatcggacggtccatgtggtgtgcaccaatcttaaagcaccggaagccatataagatactagcttccggaagtcagataggattggctagaaggccacatgaagcccataaccttatctatccagatgggcccttaagctgcaaagcccagcccaattacattaaaaaaagggtgaaatacctaggatggtaatgggtaaattcccgttgggtatggtcatccggatccatccccacataaaaatttgagaccaccagaatgcccatacccagctctaggcgaggaatttcctcagacccatacccaataaggtaaatcatacccggcggtcacccgtaccgccaatagtttattaagcacatgaaatcagcactttagcagcaaccactagtcccagaacacataaaaattagacaaataatagcatataataatctctacggatcacataacaccatcacacaagtcattctatcatt

SEQ ID NO: 39127 - DNA, 658 bp, Setaria italica
  Peptide Sequence Number=SeqID_105101
taaacactagtaacaagtaaatttacaaaacaattgcactctgatagaaacattagctatatatgtttacaaccagaattttgagagaatcatttagagcttctcatttgggcagctattgaactcagatcaatccaccatgcccatttgctgcttaagtgagcccatcttgcgcagaacttgacagaaatggctcatcacctgaaaactccatagtaacaggaagaacagtaaacagattcattccatattcctaatatttgtataaaccacatttcagatgtacatctataaatgtttagaagttactaaatgattggtagtagatatgcaccacatactaaataataatcggacggtgtaattccaggaggacctgtcaagcgcgtgatcatcgttactaatcggacggtgtaatcctaggaggaccggtcaagcgcgtgatcatcgttaatgcattaagcgatgcttgattgcttgcacggctgaaagcaattctcatgcaatccggtttctctcaacgcgataatgccccatgatcatgttactacaaaaacaatgcccagtttactagaatccaatttactacaatgcattcagtattgtaccagaactcatatgatgggttaatcaacactgcggcatcaattgttttacc

SEQ ID NO: 39128 - DNA, 413 bp, Setaria italica
  Peptide Sequence Number=SeqID_105102
ttcagcaaaaccgtcacaattcctgcttcaatagctctgaatttgttcggatggttcaatatgagattaaatattgccgttgaagcatccttcttgcctcttattgtcccatcccttaagaggtgcaccaaaggagctataccgcccaaaatccctatagctgccttgttctcatctatcatagacaaactgaacaatgctgctgctgagttctcctgaccttcaacactaccatttttaaggacttcgatgatcaaaggtatcgctcctcctttagctatcaggaccttgttggtctcatcgatcgacaagttcaacaatgcagtcacagtgttctcctggattttcttatccggatatgacaccaagctaataagaagctgggagccgccatctcaaggatcagtgctcta

SEQ ID NO: 39129 - DNA, 492 bp, Setaria italica
  Peptide Sequence Number=SeqID_105103
aagcactgctccaagagggacatttactacatgtacccctccattttcgtagaagtagctgttgttgaccgtgccattaatgatatctgcatactcttcaagtgcagtcggcacaatctcaatgtggttcctgtcgtgaaaggtttggtgatgggctggataagatttgtggagggtgaaaagaaagtgtattgtataacaagtgtcaatgctgctttctccatccctgttagcattgaggcaatcaaagatgttgttagtgttgctcactacatacttgtagttgagaaggagacagtgttccagcgtttggccaatgacaagttctgtgaaagaaatcgctgcatcgttattacaggaagaggctacccagatattccaacaagaagattcctgagacaccttgttgaacagctgcatctgcctgcttattgcttagtggactcaaatccttatggttttgacattctggccacatataaatttggttcc

SEQ ID NO: 39130 - DNA, 1031 bp, Setaria italica
  Peptide Sequence Number=SeqID_105104
tggtgcagcagctcctgcagcagaacaagcactgctccaagagggacatttactacatgtacccctccattttcgtagaagtagctgttgttgaccgtgccattaatgatatctgcatactcttcaagtgcagtcggcacaatctcaatgtggttcctgtcgtgaaaggtttggtgatgggctggataagatttgtggagggtgaaaagaaagtgtattgtataacaagtgtcaatgctgctttctccatccctgttagcattgaggcaatcaaagatgttgttagtgttgctcactacatacttgtagttgagaaggagacagtgttccagcgtttggccaatctagttttatgatatcacactgtctcctcagggaagaggctacccagatattccaacaagaaggcatgtgctctttattctctaagttcattttgtaattcctgaacacgctattccagtcatgaattcttttttcccatactagattcctgagacaccttgttgaacagctgcatctgcctgcttattgcttagtggactcagatccttatggttttgacattctggccacatataaatttggttccttgcaattggcatatgatgcaaacttgctgcgtgtacctgatatacggtggcttggggttttcacatccgactttgaggatttttgccttccagactgttgcctccttcacttgtcacctgaagataggaggaaagctgaaagtattcttgctaggtgctatttacacaaggaagccccagaatggaggtcggagctggaagcaatgttacaaaagggtgtcaagtttgagattgaggcactatctgcaagctccatttcatttttatcggacaaatacatcccccagaagatcaaacaaggaaggcatttataagattatacttgcacccgtccggaatgtgcctgtcttacagaatgggctattcctttgtttgactatagttatgtacttatgttgcatgactggtttagtatagtagttacatgtctgatgatgt

SEQ ID NO: 39131 - DNA, 605 bp, Setaria italica
  Peptide Sequence Number=SeqID_105105
ctgaacctgggaatccgtgcggacggcgatggctttgcagcaatcattcccaggaacacaacagttccagcaagaagggacatgctgtttacaacaacgcacgacaaccagactgaggcactcatcgctgtgtatgaaggagaaggggaacgtgctgaagacaaccatctgttaggatacttcaagatcgctggcattccaccagcgcccaagggatcggttgagatcagtgtgtgcatggacatcgacgcctccaatgtcctcagggtgttcgcaggggtcgtcaagcctcaagggccagccattccgcccttcattgaggtgaggatgccgacgctggacgatggccatggctggtgcgggcaggccctggcaaagatgtatggcaagactctcgatcttgctgttctcccaaagaagctgcagccatgagatgcttaccgttgccctgtaagtagctagtgcgttgtgcgtgtgttgtggttgctcagtgttcagtgtctcaccgtcccggaccttgtgggacttgactgtttgtgttgctgggcggtctgcagaacgaaactcactgtaatctttgtacaataatgtgtcactttacatgt

SEQ ID NO: 39132 - DNA, 488 bp, Setaria italica
  Peptide Sequence Number=SeqID_105106
tttgttccttatttaaatttaaaaactttaagttaagttcttaagaagcttgtagggtagaccaagttcattttccccaaaaaccttcttccatcataagaaacgatagtttgatggttaatggagtaggagtgggagtgggatttgctgatagggggtgactatatcctaaagctttatgttattgcagaccctatattttgtaaataagaaatagaacatgccctctgagtcagctgtaaagtatggcagctgcttcagcatttgtggccatcatttatagcaatgttaagttgaattggtgcctttattaacaaccttcagggcattcctttatacaagcttgaaaagtgtcacaattgagattgatccaccatgccaatcctatctaagttactatactgatttacaattcattctgaagtagtgtatcaaattttcttagttatggttttataatttttatgcctattttacacttttcacta

SEQ ID NO: 39133 - DNA, 243 bp, Setaria italica
  Peptide Sequence Number=SeqID_105107
agagaggttggttccaactcaaatggagttaatggagcagctatgattaccctcatatttgcgatgcttgggttgcttgatgatatctcaagtcttgccacagatcgcaatcgtaaaataccacaatggataaggttcttggttcagattgtcgctgggacttacttctctatctggttgggttctgcagatattttgacaccatatagcatgaaatttttggttcctctgcctccacctctt

SEQ ID NO: 39134 - DNA, 2073 bp, Setaria italica
  Peptide Sequence Number=SeqID_105108
gtttttttttttttttgtacttaccaataggacgttccgtctttacttttacaagttcacatcacgtctgcatttcattgtgcagctccaccattacaacaatcacagcaagtcaggtgacaaagcaactggtcgcacaggccgcgagttgcgggctcctcttaggaaaccagcgatctgaccgggacttgtcaaggacagacacttcagtcagtacttcgcagattcagcaacaagatcggaatactgttcaggcacaaaggatttcactttcaaagttttcttgccatcttgaccaggagagtatgctttgatgccaataactgtggccatggtatcatgtatgcgcccatatacaaatctttcaccacgccaatgctccaaaggccttgagcggattcttgtgcttcttctcactccagactgccacgcaaggccagcatctccgaggctttttctttgattcaaatgtttggtcctgtttctcatttgagctcccttttgccccttagctttgtttggcgacagtgcactactcgtaacaactctctgttgctcaatgttctcatccatacgagattgattctccgaatcaaaatttgcttgggatatttccagtgggtggttagattcatctgccactttttggctcctctttgattgttgcttcttttttccttttcgagctgcctgtcgcttcttctctttgattggggacactgcattgctcagatcagctgccaatttcttattgtttccatcatgcatctgaggctgattcactggatcaatatcttctagaggcacctcggatggatgacttgacttatcttgtataacaccatcctcttcaaccgcttcaagatgttgaatgttgtcctcagctgcatgagaagtctgatcaacaccatctgaagccacatttctaactggtgtcctggccaacacttcggccaagctgccctccaaatgatgaggagaagaaacttctgtttcattattagacatatcagtaggattgtctattggcacattgtcttccaccatagaaatatcgctcctgctgcatgcagccttttctttggcaacttctgtattgctgtacaaaccaagtggggaaccttctgcttgcctttcatctgcatgatcagacatgattggttctggatcaagaacatgttctgcagctttgacccccagatttggggtctccctgtcatattcacttgcagtatacaaaccaagtggggaacctcctgcctgcctttcacctgcacgatctggcatgtttggttctggatcaataacatgatctgcagctttgacacccagatttggggtctccttatcaatttcacttgcagcaaaggtctcatcagtcaccaaaacatcagatgaatcatgcaccaatgattgttcacccatcacaatatctggtgaaccttcagattcatcatcttcctgtagatctgcacatttatcattccctgcaactccaggaaataaatgtttctctaactctgaaacgcgactctggcaactctggggcaaaggattttctggaggaaccctcattgattttttccgtgcagtattgcttcttcgtggcctatcttcaggaacagagttgtggagacaaacattttctttctctattttgcgcatctttaagatctttcggagaaagtcttcctcttcagatccatccagatttttgagtgaggccagtacataagtcagatcatctccatccttctcagctaatgaatcttctttctctgaaacatctgaaatagcacattggccagatcttggaggaacagactgctcatttttttcagcaaacgaggcatgcgcatcatcttgcgagagctgagatcctgtcatagtttctgtttgggaagctggtacctcagttggatcttgagtatcagcatcagcaaacttgaaagtacggactgattttctcccagcaaagtagagcgcctcttgggttctactacaggatcaaaattcattaccatctcatcaacaacctcaccatttaaccgtcttatctccttctcagcttct

SEQ ID NO: 39135 - DNA, 1136 bp, Setaria italica
  misc_feature (1104)..(1136): n is a, c, g, or t
  Peptide Sequence Number=SeqID_105109
gcaggcagcacacactccactgcgctgcacgccaccactccgcttgtcctggggccatggcgtccaaggtccggttcttcttcatggccttcgcggccctcgcctgcctcctccgtcccggcgcgcccgtcgagctccaccgcaagctctctggctggtccgacggcgcctgcgcgacgtggtacggctcacccaacggcgccgggagcgacggcggcgcgtgcgggtaccagaacgccgtcgacctgccgccgttctcgtccatgatcgccgccggcagcccgtccatcttccagagcggcaagggctgcggctcctgctaccaggtgagatgcaccggccacgcggcgtgctccggcaccccggtgaccgtggtcctcacggacgagtgccccgacggcgtgtgcctggaggagcccgtgcacttcgacctgagcggcacggcgttcggcgccatggcgaagcccggccaggccgaccagctccgcagcgccggccgcctcaagatccagtacactcgggtgccgtgcaactggaaggggatggagatcacgttcggagtggacaccggctcgaacccgaactacctggcggtgctgatcgagtacgagtccggggacggtgacctgcggtccgtggagctcatgcaggccggcggcggccgcgcggcgtgggcgccgatgcagcagtcgtggggcgcggtgtggcgctacaactcgggctccgccctgcaggcgcccttctccatccgcatcacctccggctccggcagggcggtcgtcgccaacaacgtgatccccgccggttggacccccggcggcacgtaccgctcggtcgtgaacttcaactactgacaagtacaataactgggtagatgcgcgcgcccgccggccggcgtgttactgtgacggcggcgtggcgctattagcttggtttatgattcaggctgtgcgtgcgtgcagtgggcgtagaattaacgcctgtgcagtgttgcgtgggtgacatggtgcaactccgtgcggtcgtgttatcgtgcatcgccggaatggtgtgtccgtgtcaagttgggtatgaataaagttggaagtgaagtttggtagaccnnnnnnnnnnnnnnnnnnnnnnnnnnnnnnnnn

SEQ ID NO: 39136 - DNA, 504 bp, Setaria italica
  Peptide Sequence Number=SeqID_105110
ttcatgcacctaagcaccactattgcaaaagtgcttcagcgagaactatggtgctggctaaacaaattgaggagccatatcacagatttgatctgattgagtcacggcctaccacctcatctgctgcctgcagataacctgctgcaagtgatacaaagataggatagtgtgagataaaagcctggtggctctttctccgctgtttgcaaacgatttgttcataatcacagtttactgggaaactttcccgccttcaggcattcacttacggaagtgcaataatgcaacaagccactccgctggtttatccatgttgactaatgtgtaagcactcatagctttgtacaatgaaatcaaatctacatttgtgaaaaaccactcatatgcagtgttggctttaccaaattttgcacatattttttacccggtgtattcgttgtgccaagttctatgatggggcatctcaattctttctgactgctgttgatataattatagtgcaat

SEQ ID NO: 39137 - DNA, 441 bp, Setaria italica
  Peptide Sequence Number=SeqID_105111
ggagtatgtgcttgaacaatcacccaggatttgataatgtatgttcaaggtatctctgtacttaattctcgtctattcattttactactcccaagtttcctgaagagagttatgatgtcttaaggtcataatgctaagtaaccatatttgttgttcataagtctattttatatatattcatgttctatgtttgttgtattatgtttaacgttaaagcattctgttgtcagttacagttatgatgcaacttattgaaactataagagaacaatcatattgaccagattcaatcctagaattactatgtcgctgttggctgattggatagagtttaatacagttatttgtacttcacctagctatgagaagaagaaaaagatgtcaaagtagtgatgtactgtagtacctgattggtaccatgtgacctaaggtgttctaggg

SEQ ID NO: 39138 - DNA, 250 bp, Setaria italica
  Peptide Sequence Number=SeqID_105112
gccggcttccagatccgtgagcagtactgggatctgtatttggagcataagctagtggaatctcatggtagttggaagggaaagtggtttcatattgaagatcacaagccgtctctacccaagattactagatatcgtccaaagtacagcagccggtggcttgatgaaccaacaactgctgaaagtattcaagtacctgatctattgaccaagattgttgtgttgaagaagcagggtttgacaggagtag

SEQ ID NO: 39139 - DNA, 293 bp, Setaria italica
  Peptide Sequence Number=SeqID_105113
actctccataatcaattgtgccactgttatcgatgtccgctgcttccattagagcattgatttccgagtccatcaaagtagcaccaactctgtgcaagccagtttttagttcctctaatgtgatatgaccactgttgtcagtgtcaagcattttgaacatttcttttaatccagcaatttcttcctcagataaactctcagcaataaccctaagggccattttcttagtttgttcattgcagaaaattgtttcaaccgacttagaacagcagaatcaagaggcttgtcaggag

SEQ ID NO: 39140 - DNA, 309 bp, Setaria italica
  Peptide Sequence Number=SeqID_105114
cagccgctcagttgtccagagttctcccgacgcggcgatgcttcgtctccccaccctcaccgcccttaaaccctcgacccccgccatctgctcgaaccccatccgcatctgcggcagccatggccgacgccgcaaacccctcctcgcctcatccgctcctccgccgccttcttcgtcttcacggcctcccaagccgaccccgagcccggaaccaccaaagcccgcacacgaggcccgcagccagaacccggaggacccagccgccacagcgttccccacgaccaagccccggaagccgcggcgcgggcg

SEQ ID NO: 39141 - DNA, 458 bp, Setaria italica
  Peptide Sequence Number=SeqID_105115
ctgtgacagcgatgtaaaaccattttgtgctgaagtcattggaatttcctcattgattgggagtcatactgatgggaaggcttcaactggtaactgacaggcatgcagtttcacttatgatcatgctgatgcgatagtagaagatgtcaaggttgccgtggcaaggtcaggtcatgctgagagtcctgatcatgatggctgtcagactgccaaaaatagaagttgcatggctgttgatgatctgccgcaggagtttgagagagagcaagctggggctacactggaggagctgttttctctaatgatgaagaggaagatgacagtgactgggaccctgccagtagccttgttgtgaataggtggttttgcttgaactgcacaatgccaaatgtggacgagattactaattgcctgaattgccatgagcttaagggatcagttgttaggttggtattact

SEQ ID NO: 39142 - DNA, 630 bp, Setaria italica
  Peptide Sequence Number=SeqID_105116
gaattttttcaatcttaattacatgacagtgataattgataagtagtaaagcagttaattgtgtgactgggatgtcatctcaactgcattcttgtggaattattatatgcagggcccaccacactatagattcactatcatatatctatgtaagtacaagtagatttttttggggggtttcaaatacggcctactcctatagcaatgtcgttgcttagctagtccgtactggtacgtgctcgtggtaggcgatgggggcactatatgcatgcaagtgtcctgtgcgtgctactactcagtgctcactgaatgagactaccactacaacaactaccagagctagcaatgttgactacctgaaaagccagccatgcattcgatgcatgcccataggcacgtcggtatcatggattcacgggttccagttcaccccggagagctgctggtagggatgctggaaactgcaggcggcggcggcagcttccggcggcaccggcgtgccgagaatggcgtggtgatggtaggtcgccgcagcttgcacgccgagcggagtgaggaacgtagggattgcattggcgccgccgccgccagtgtcgttgtcgacggcaccggcccaacagcacccagctg

SEQ ID NO: 39143 - DNA, 474 bp, Setaria italica
  Peptide Sequence Number=SeqID_105117
tttttgttttgatccaaactgacactcctacaatgtgctaaattactaaaaaaacaggccatgctccatccaatttacagcccattttttctcaggcatctggtcctttaacttgctgactttccatcagggactctcctctacaacagtgctaccagctactgcaagtgtggataacaatgagttgctcaatgcaggagacattgatggagacaaactgaactggactggctctactgtcctgacttttaggtccatgacgtctgtaatcaggccaggcctcatgatcttgtcaccgacggcacactcacccttcaacatcttggcgaccattgacatggagggcctgatcttggggctatcctggtggcacagaagccctattttcagcaaccgacgcgcttcctcggtgtcaaaatcaagcttcagggtcctgtcaatgatgctgtcgagatcaccggactcataaagcat

SEQ ID NO: 39144 - DNA, 350 bp, Setaria italica
  Peptide Sequence Number=SeqID_105118
tggtgctctgttacaacttacaggaggctgctctctgtgttccatacttgcttggtcaatttgagctgtgtgatttgtttcaacaaaattatgaacacagcatccctaattaatacctcttgcataatttacagccccaatgctacgcgacatgcaaaaagagagaaactggagcacgcttcaagagttacagatttagatcaattcttctttttcgagtgcttcaccagccagtcgatgacagaatcaatgttggtcgagttcttgcacgatatcatgaagcatgccacttctcggtcagtgattgtctttaggcccctgcaataccattagtaacacagcagatgagt

SEQ ID NO: 39145 - DNA, 436 bp, Setaria italica
  Peptide Sequence Number=SeqID_105119
gtaatgggattccagtcaagatggcttgctcaggaggtcatggagctcaccttttgcaatggccatgttttctctatctgctgcgtcaacaacataactgcacaaccaaaacaatataaacatccaacactagaagctcattccctattgattcaactatgacatccagaaaaaaaatcatgcaccagtttcaatgcagctagttattaaatataaaacctgtggaagtaaatcagaataaaaaaccatacagctggtgcaagttccagctcattatttaagcaaagataacagaaagtcagaaaaaaaaagtgcttcatcaatatcaagaaaacgagcaaaaagatagaaataaacaatgcacccaccaccatcatacacaacaaagcaaatttgggggaaaacaggtaacaggataaagaattattctattcta

SEQ ID NO: 39146 - DNA, 1067 bp, Setaria italica
  misc_feature (1)..(24): n is a, c, g, or t
  Peptide Sequence Number=SeqID_105120
nnnnnnnnnnnnnnnnnnnnnnnnctatttttttgttttgattcaaaacaaagtgaaacaaatcacacagctcaaattgaccaagcaagtatggaacacagagagcagcctcctgtaagttgtaacagagcacgcgcgtgcacaataccagacgcggcctaccaacatattgccaaaccaggttaacaaaattatgaacacagcatccctaattaatacctcttgcataatttacagccccaatgctacgcgacatgcaaaaagagagaaactggagcacgcttcaagagttacagatttagatcaattcttctttttcgagtgcttcaccagccagtcgatgacagaatcaatgttggtcgagttcttgcacgatatcatgaagcatgccacttctcggtcagtgattgtctttaggcccatgacttctgtgaagctttgcttagggaaagcttcaggcttgtcaattttattgccaatgactagtaatgggattccagtcaaagatggcttgctcaggaggtcatggagctcaccttttgcaatggccatgttttctctatctgctgcgtcaacaacataaacaattgcagaaactgcacggcagtatctctcccacatgctccggaatcttggctggcctccaagatcccacaattttattgtgacatttcctttggttacctttctcatattgaatcctacagtaggaatcatatcctcactaaagcctccggtagcaataacattgacaagtgatgtttttccggcattttgaagccctatcaaggaaagctccatctcttgcttgaagaagaggctgcggagccagttgaggaaggcctcccagaaccccatggcgcccggctccccttctcctctccctgaccccccgcgaacaagagaggagggagggaggcaggcccggtggcggcgaagaaggcggaggggatcgagcggggggcggcgacgggttaagagcgagcgggcgcggcggaggaggaggattcggtggtggcctccctgtccaccccccgcgttttacttttatttggaggcggagggcg

SEQ ID NO: 39147 - DNA, 1240 bp, Setaria italica
  Peptide Sequence Number=SeqID_105121
ctttgcagttttcaatttacatagataagtgaagttgcgtttaactctatggtgtgttgttaattgtcgtattatcgtatgagattcctttattatcattagccggtgatctgttcaatcttggcttttaattagtggagatgtgcttggggagttgctggcagtttgtatgtatgatctatgattgtaattagctttccttttcctttaaaatttagtttatttgcagactagatttgtttcttgaagcttggatagtggctaattactacttggtaagttggtattgtcaacatcttctttccatttggcttatgtaccccccttttaactatttagctgtgttaaccttggtaaccagctagcagcttgttaactaggtgatacctaagactactaactggcatattagctgggttatctcttggctaatttttagcagctaatagttagctctaaaggatccaaatagggtcttagtcaaattgctactgtagctaggaaagttaactgtcttcaagttgcattctctgttataagttcagaaatttgctgctacaatatgtttgatgctagctttatacctagctgaaatgcatccacaaacagcattttctggcatgaaagcagctcttgatggtcttatgtaagctgcaatctccattttgttgtggagggcttacactgctgtttgctgcccttgttatgtccatgcattttattgacctgtagaggtgctgaactagtatgtattccaatgtcagattgtaaatattggtgctgacttttttagcaagaaatacatttgatgatgacatgtctgccacggtacttgttatctgcacttgggttagttacttgtttgattgcttagccaattggatttttgcttggttggaattaagcttatatgctattctagtggtatatgatcaatcttgaatgtaaaagtgccacctttgtggtaatgtctgtatatcgtgatttttcgttctttgccatctgctttactatcactccaagcaaggtgaagctgcccaccaaaaaaagtatttcacgtcaccctagcaagtgtacattagagggaggtctcatcaaagagtcaagcaaaagcacattccaggtatctggtagccctggtaggcaccaatggctgcagtcagcatatgtgagtggttgtcgctgctgctccgtggtcaatggtttcccttcctggtgattgtgtataccgatgggtgtg

SEQ ID NO: 39148 - DNA, 521 bp, Setaria italica
  Peptide Sequence Number=SeqID_105122
acgcttgagtcttgtaaattgggtgcactgtagccataaccttcataaccttgctgttggtatatttagtagttgtttccattatactggctgttggcatcttgctggggagcctgtttgttttgaggactacgaccccaagaaagccgaacattctgcccaccaatcaggctcccattgagcatacggattgcttcctcagcagatgacctaaaagtattgcaagccaatcgagcaaaaaagaattagcttacagatatcaagtcacagctgtcagctaaagagcttcaagaatttatgaacctgctggtaaattgaacaaatccacaacgcttgcctacaggaatcttcacataggcaatttctccataaggagtaaaagtttgccttagatactcctcatttacattggaatctaaccacccacaaagacctattgcaaaatagttggaagataaggtaacagcaattcctagttttttcttttcgtaaacagtttactcactgttgtattgttggga

SEQ ID NO: 39149 - DNA, 437 bp, Setaria italica
  Peptide Sequence Number=SeqID_105123
tcttccttgttgcttggtttgtgctggcggtggctgctgctgaggtgctgccacctgctgttgctgctgctcatagttgccataaccagggtatccatagtagttttgcacgcttgagtcttgtaaattgggtgcactgtagccataaccttcataaccttgctgttggtatccatagtagttgtttccattatactggctgttggcatcttgctggggagcctgtttgttttgaggactacgaccccaagaaagccgaacattctgcccaccaatcaggctcccattgagcatacggattgcttcctcagcagatgactgttgtattgttgggatcattctccgaaagatttccttgagagctctggtatgctcctgcgagtacaacacatatggataccatcagaaacattgcaagcatacaggttgggaatatt

SEQ ID NO: 39150 - DNA, 729 bp, Setaria italica
  Peptide Sequence Number=SeqID_105124
ataaccttgctgttggtatccatagtagttgtttccattatactggctgttggcatcttgctggggagcctgtttgttttgaggactacgaccccaagaaagccgaacattctgcccaccaatcaggctcccattgagcatacggattgcttcctcagcagatgacctgctggtaaattgaacaaatccacaacgcttgcctacaggaatcttcacataggcaatttctccataaggagtaaaagtttgccttagatactcctcatttacattggaatctaacccacccacaaagactgttgtattgttgggatcattctccgaaagatttccttgagagctctggtatgctcctaactgaggcatggattacaggagacagctgaagacatttccaccctaaatgcagatggcatggcatccattagttgcatatgtctgctgggcatccatattcttcttgttagctgcaggtccaatcctcatctgccttgtagataacatcattccattcatctcagtcatagcacgtgcctgctcattcaaatctccaaagcgcacgaaaccatatcctttggggcgtccagtgggcttgtcaataacaactttggcccccctaactgaagggtagctagctctgaacacctcttccaacatggaatcggtaacatcagcagccaaatcaccaacaaatattgtgtgatcagaaccattgtccccacgcttatc

SEQ ID NO: 39151 - DNA, 710 bp, Setaria italica
  Peptide Sequence Number=SeqID_105125
gctggggagcctgtttgttttgaggactacgaccccaagaaagccgaacattctgcccaccaatcaggctcccattgagcatacggattgcttcctcagcagatgactgttgtattgttgggatcattctccgaaagatttccttgagagctctggtatgctccattagttgcatatgtctgctgggcatccatattcttcttgttagctgcaggtccaatcctcatctgccttgtagataacatcattccattcatctcagtcatagcacgtgcctgctcattcaaatctccaaagcgcacgaaaccatatcctttggggcgtccagtgggcttgtcaataacaactttggcccccctaactgaagggtagctagctctgaacacctcttccaacatggaatcggtaacatcagcagccaaatcaccaacaaatattgtgtgatcagaaccattagtaccccaaagacttaataccccaagacgactaagcggatgcccagtttagcttaaaagccatgtcaacattcggcatcatccgcccattgaagttcatcagagtatattctgcagcagctcgggtgtgaaactcaataaaaccataaccttcagactgcccattctgtttgttccttataattttcacattggcaatctgcggcgccacgggcgcgaaggcgtgatagttaaggtagctctcgtccatccagt

SEQ ID NO: 39152 - DNA, 812 bp, Setaria italica
  Peptide Sequence Number=SeqID_105126
taaaataaaggtactttaaacccaaattctcacaaaattaaaacactgacctaactgaggcatggattacaggagacagctgaagacaatttaccaccctaaatgcagatggcatggcatcctgctttgagaaacacgaatcttgtttagaggtttattacttattaagtttgctatcccaattttagacttagaaaggaaagagctggaaggaaaatgtctgtttacagcaacagaagcaatgccggctacgttgaggtggactgtctagaaggaaaacgactatgaaaacactaaaatccagcaagaacagtgaaaaagatcagaatacatagttggcttagttctcaaaaagatgctatgatgcacttagataacctatggaagtatgaaacaacagaaaaaggggaataaaaacctatggaagtccaacaggtacataccattagttgcatatgtctgctgggcatccatattcttcttgttagctgcaggtccaatcctcatctgccttgtagataacatcattccattcatctcagtcatagcacgtgcctgctcattcaaatctccaaagcgcacgaaaccatatcctttggggcgtccagtgggcttgtcaataacaacttggcccccctaactgaagggtagctagctctgaacacctcttccaacatggaatcggtaacatcagcagccaaatcaccaacaaatattgtgtgatcagaaccattgtccccacgcttatccccaagacgctaagacggaatagacccaagtttaagacttaaaaagaccaatagtacaaacaa

SEQ ID NO: 39153 - DNA, 1759 bp, Setaria italica
  misc_feature (1)..(61): n is a, c, g, or t
  Peptide Sequence Number=SeqID_105127
nnnnnnnnnnnnnnnnnnnnnnnnnnnnnnnnnnnnnnnnnnnnnnnnnnnnnnnnnnnnnttttttaatctcaaagacgcacaatatacttcaataattaagatcttcaaaagaaacatcaggagtgccatcatagttaacattggtctctaagagcaggttcaaccacgaccacgcaactacataactactaatctatggaatgattcatgaggtgcagtgaactgcagttgtaactctacactattaatctgatagctgatagcgctccaaaagtgcacaaagcaatcatccccgctgtgttcgtcactgctgcaggggttgctgcgactgtggctgctgctgttgtggtggtggaggctgctgctgctgctcctcctgtgctggttgtgctggcggtggctgctgctgaggtgctgccacctgctgttgctgctgctcatagttgccataaccagggtatccatagtagttttgcacgcttgagtcttgtaaattgggtgcactgtagccataaccttcataaccttgctgttggtatccatagtagttgtttccattatactggctgttggcatcttgctggggagcctgtttgttttgaggactacgaccccaagaaagccgaacattctgcccaccaatcaggctcccattgagcatacggattgcttcctcagcagatgacctgctggtaaattgaacaaatccacaacgcttgcctacaggaatcttcacataggcaatttctccataaggagtaaaagtttgccttagatactcctcatttacattggaatctaacccacccacaaagactgttgtattgttgggatcattctccgaaagatttccttgagagctctggtatgctccattagttgcatatgtctgctgggcatccatattcttcttgttagctgcaggtccaatcctcatctgccttgtagataacatcattccattcatctcagtcatagcacgtgcctgctcattcaaatctccaaagcgcacgaaaccatatcctttggggcgtccagtgggcttgtcaataacaactttggcccccctaactgaagggtagctagctctgaacacctcttccaacatggaatcggtaacatcagcagccaaatcaccaacaaatattgtgtgatcagaaccattgtccccacgcttatccccagcgctagcggatgcccagtttagcttaaaagccatgtcaacattcggcatcatccgcccattgaagttcatcagagtatattctgcagcagctcgggtgtgaaactcaataaaaccataaccttcagactgcccattctgtttgttccttataattttcacattggcaatctgcggcgccacgggcgcgaaggcgtgatagttaaggtagctctcgtccatccagtactggagatctccgatccaaagagacctgatctcgccacttcccggcgcggtcccgtactgtggcggaggcgcgtactgctgtggcggaggcgcgtactgctgcggcggaggagcgtactgttggggtggcggcggagcgtactgctggggcgggggcgcgtactgctgcggcgggggagcgtactgctgcggcggtggaggatactgctgcggctacggcggcggtggcgcctgctgctgcggaggcggcgccggcgccccagagccctgtggcgggggcgcgccctgctgcccgttcatcggcggctggtgcggcggctgcatcgcgtccccggcaaggcggag

SEQ ID NO: 39154 - DNA, 378 bp, Setaria italica
  Peptide Sequence Number=SeqID_105128
catcccctgcggcatgagatgagcaagacggctgcggtgcggccgcggaagctgctaaacgcggcggcagtgcgggagcagaacggagtagcggactgcgcgggaggtgaagggcgtggcgactctttccggcgtccagtcgccttccctgcgccgaagccttcggctgcgctgattcttccaccgccgcctcgcccttctctggatgcacagcttgctagatttcacgctgagtttgcagtgtctcgacccgtcggcattcagctgaacagctccacttcacatattgcaaagtaggtggcgtccgtgcttgcttctctgaatgccttgcgctccttgcttctttgtttacttcaaaatacagagtgaagatggtgc

SEQ ID NO: 39155 - DNA, 880 bp, Setaria italica
  Peptide Sequence Number=SeqID_105129
tcaacattgctagcctgatggcatgctgggttccatatgcaccaaaagccagacatagctctctcaatattatgctgcctgaagttccatctgaagcaacatgagccaagaaagcagcattaagatatgcaactgcgttgcccagaggacgtggagcagctcggtatgtctcaaatagaacagaatttcctcttgtacttactgtcctatccatggttccatcaccagataagtcaccaatgggagtccaacgaggaatgtaaatgcttaatagcagcgtcttgtaatcacaaggtggcatctgcaggaattcctccaacgtgatggtcaacctttccgatgatacctggatgcgtaacgatgaaccggcagcaagaaggatcgttgcgatgtcagaggaaaactggtccctctgcgccattatcagatttccacccaagctcgctgtgttccggacaaaaggagaagccaccttctccatgtgatcagcaatcttacaaaagatcacatcattgcagccaccatcttctcttaaagcctcaattgccttagaaatcgataccgcagctccaatttcgacacccttggcctccttactaaccgaattcagttctgggatgcatctcaggtcaatgtacctatcgtacacctctgcctctctgtaaacgcctgcagcagtgttgcccacaaccacctttgttccacttttgccaaacaactcagaacctaccagcttatagtactcctccacactccgaggccagtgccaagtgctcccacttccgagcaatgccggcggcgtgcacccttcaatcccagcagaggctctgatctcagccttcaggaactccggaaagacaccaatgctcccctcctcata

SEQ ID NO: 39156 - DNA, 467 bp, Setaria italica
  Peptide Sequence Number=SeqID_105130
caggtactgttggtgttgaattatttttcaaggatgtgccatagctttcatcctcaaattcaagaggaattgtcctaatagtgaaatctgagtcaagttccaaatcatcgatgccaggaaaacattcaatcgatatatcatcaatttctgtattatgattctccaaaggatgaagttggcattgtattttctcctcagaattcctgatttcctcaagatggcacacttgatcaacctcgatctctcttatagcatcttttttcccattcatcaaagatgagacacggaatagactctgatttaactggagccagtgtgattcatccaatgtgttctttgcacagaatatatatatgttgaccgcatttgtttggccacgcctatgagctctatcctcagcctgaagtaattccgaagctgattttgggagctccacgaaaacgacattctgagcagatgagaagttt

SEQ ID NO: 39157 - DNA, 665 bp, Setaria italica
  Peptide Sequence Number=SeqID_105131
ttagcagtgatggcatcacaatgccagaccaagcaaccagcttactcctatgctaaattagatgagtcggtaaatgtcactgtattgagtagcagaaacgatgtaaccatcactactataaatggcagatagtagaatgtgggtactgttcatgaagtgtgagctacaggtcttggccatcctccttgtgttaattaactgtaaaggcattgttttccgcagtttctcaccagttaacctgttaggctgatttgactagtggttttatgtgtctaacaagatttttcttattataccgtacaaacagcgtgagactgaattaatttatatttcagttccaaactgcctaccgctagcacataagccacgttctgttgttacaatgaatcacaattccacacaatagatagcatttgttaggatatatcataaatctgtgcatggtctttttcagtctttctttctttcttttttcagtgtcagacatattttaagcatgagcaattttagaaggcgtaatcaagaagtatgaaagcacctggaatgtagtcaagtccaagttttcaaaaaaaaatgtagtcaagtccaatgctcacgatgaaatggagtctgctgttcactagggaatgtagacaggtccactagtctacctctggcttccaacg

SEQ ID NO: 39158 - DNA, 510 bp, Setaria italica
  Peptide Sequence Number=SeqID_105132
agacggacggacggacgaacctacggaaggtgagcgcgaacggcgatgcagtccttgacctgctgcgtggagtaggcgtacttcttggcggcgatggagttgaggtaggcggcggcgccctcgcggaggaggtcgccgtagcagtcggtgcgggtgttgcacagcgcgtcctgcagcgtctgcagcttgctcccgaagaaggcgctgcacacgtcgccgaaggagcccaggatgctccccagcgacccgatgcacgagatgatcgcgtccgggtgggctcttccagtagtcgcaggttccggtgccggagtagccgggcgtgtagccgccaccgtacttctgctcagcgacgtgatctccctgcaggcccctgctggcagagcaccgagaggcgacgcccaccaggagcacggcgacaaggagagccttgccgctcatcattttgctctctctctctcttcctctctcccctcttctcctgtgtttccgaagaagactaccagcgcaaag

SEQ ID NO: 39159 - DNA, 759 bp, Setaria italica
  Peptide Sequence Number=SeqID_105133
agggaaatcctgacgtggattacatcccatgtacacgattacatcccaaccaccagtgctgacactgacagaaacaagctagcgcgagtacacatgcagttcgtaagaacaaccaccgttatgtttcactaccaaccaactcatcttatttctcacatcagcaacaacgacaataagggaagcatcactatactgaagaacgaagcagacaacgagacggcacggcatcatgcatcatcatggccatgtgaagacgacgcgcagaaactaatataaggcccctccgatccggggagacacgtctggacttgaacatggcggcctgcgcggcggcggcgacctcggaggtgagcgcgacggcgatgcagccttgacctgctgcgtggagtaggcgtactcttggcggcgatggagttgaggtaggcggcggcgccctcgcggaggaggtcgccgtagcagtcggtgcgggtgttgcacagcgcgtcctgcagcgtctgcagcttgctcccgaagaaggcgctgcacacgtcgccgaaggagcccaggatgctccccagcgacccgatgcacgagatgatcgcgtccgggtggctcttccagtagtcgcaggttccggtgccggagtagccgggcgtgtagccgccaccgccgcctccgtacccaccgccaccgccaccgccgctcatcattttgctctctctctctcttcctctctcccctcttctcctgtgtttccgaagaagactaccagcgcaaaga

SEQ ID NO: 39160 - DNA, 449 bp, Setaria italica
  Peptide Sequence Number=SeqID_105134
aataagatgagttggttggtagtgaaacataacggtggttgttcttacgaactgcatgtgtactcgcgctagcttgtttctgtcatcagcaacaacgacaataagggaagcatcactatactgaagaacgaagcagacaacgagacggcacggcatcatgcatcatcatggccatgtgaagacgacgcgcagaaactaatataaggcccctcgatccggggagacacgtctggacctgcatccatcatcatgcacacacggacttatttaacaagcacgacgactacgctgacgatggaagcttcatcttctattctagtggcaggcgaagttggccttcttgaacatggcggcctgcgcggcggcggcgacctcggaggtgagcgcgacggcgatgcaagtccttgaacctagctagacgtaggaagtaaggacgtaacttacttagg

SEQ ID NO: 39161 - DNA, 686 bp, Setaria italica
  Peptide Sequence Number=SeqID_105135
aacattcagcaggagatacaattcagaaatgactgccctcttttctggatgtttttaatttcattacaaagccaaatccagccattcaggaatgccatgtctggtcaaagaactcactccaaccaactcatcttatttctcacatcagcaacaacgacaataagggaagcatcactatactgaagaacgaagcagacaacgagacggcacggcatcatgcatcatcatggccatgtgaagacgacgcgcagaaactaatataaggcccctcgatccggggagacacgtctggacctgcatccatcatcatgcacacacggacttatttaacaagcacgacgactacgctgacgatggaagcttcatcatcataagtagtggcaggcgaagttggccttcttgaacatggcggcctgcgcggcggcgccaccgtaacccaccgccaccgcctcccccgccgtacccgccgccgcctcctccgtacccaccgccaccgtacttctgctcagcgacgtgatctccctgcaggcccctgctggcagagcaccgagaggcgacgcccaccaggagcacggcgacaaggagagccttgccgctcatcattttgctctctctctctcttcctctctcccctcttctcctgtgtttccgaagaagactaccagcgcaaagagaagagagcgccg

SEQ ID NO: 39162 - DNA, 2368 bp, Setaria italica
  misc_feature (38)..(38): n is a, c, g, or t
  misc_feature (52)..(52): n is a, c, g, or t
  misc_feature (68)..(68): n is a, c, g, or t
  Peptide Sequence Number=SeqID_105136
tctctactccctcgttgtcgtgtctctagttttttttntttttttttttttntttttttttttttttnttttttttttttttggtctcgatttggactgctcccttctagatgtcatgaacattcagcaggagatacaattcagaaatgactgccctcttttctggatgttttttaatttttcattacaaagccaaatccagccattcaggaatgccatgtctggtcaaagaactcactccaaccaactcagcctgtttggtgaaagatgctacacgaactgtgcacttgaagtaacgattgggttttccgttttccctagacatgcagccgagtcagtaggtacgacaacctcataagcctggcaatcgcagcacttgcaccgtcagcatcattgtgattcagtaaagcgtcttccaaacggccatcgctgtaggcatgcttgtaaaagcagctgctcccaaaggggcaagtgccctttccgaagtcaaagtgcttacaatcaatagacctgagcttagccttgtagccttcaacgatttcctgtttttcttccttcgaggagtaccacgtaacgctaggaactacatagtatgacaatttgcggcatattggacaagccctgagtgtagagttgacatccatgccagacgtaggagaggtgctacgccaattcctaatgcacgagatacagaaggaatggtcacagtcagatagcagaccaaacctcctttctgctgctgtaggttttgaaaacacacggtccaagcacacaccgcattctatatcttcactttttctcaaggcatcaagaagtctgttgtttttcttgcatagcttgacatgcacaccactttcgtcaggacggtaaggatgcaagcactgtttttcacagaatgcgcatagatctccatgcatctgagaacagtctttcccataagggcaagtgccagcagcagcagaagagcaaattgacatataagcaggatcttgagatgtttgattttgcacagtttgataggacggccagctgttagcatcctctggagtgtcatgttcatgataatcaactgcccatgcaggttgatgtgcagaaagtgctgttgtagactcgcatatctgctgcgtttggtcccatagatccgtttggtattcactgcaatgacttccagaagaagtgactagctgagaagaattggaggatgcacgcgctgcggtggttgctggttgggagcagttccgatgaacttcaacatgttcatttctgcaatggctaccaaaggagcatgcgcctttctggtaaaatgtgcaaacattatctggttgatcattgcagtcatgggagaattcacagtaatctcctttgaagcatgctccatgcaagaagaatttgcaagggaccctcctcgacatgcccgccgagcctggatcgagctgcaccgtcgacgagtccggggacaccaaggcgacgcgaggtcctcccccgtctccgccgccgcgggtgccgcccgccgaacgcctagggtttggtcggtgcagcgcgaagctccgctcggtcggtacctttcgtcgtcctcgcgcctccgcacagcaacaacgacaataaggaagcatctttatttcttactttacttgtaagtaacgtaagcagacaacgagacggcacggcatcatgcatcatcatggccatgtgaagacgacgcgcagaaactaatataaggcccctcgatccggggagacacgtctggacctgcatccatcatcatgcacacacggacttatttaacaagcacgacgactacgctgacgatggaagcttcatcatcataagtagtggcaggcgaagttggccttcttgaacatggcggcctgcgcggcgtcctgcagcgtctgcagcttgctcccgaagaaggcgctgcacacgtcgccgaaggagcccaggatgctccccagcgacccgatgcacgagatgatcgcgtccgggtggctcttccagtagtcgcaggttccggtgccggagtagccgggcgtgtagccgccaccgccgcctccgtacccaccgccaccgccaccgccgccgccgccgccgccaccgtacccaccgccaccgcctcccccgccgtacccgccgccgcctcctccgtacccaccgccaccgtacttctgctcagcgacgtgatctccctgcaggcccctgctggcagagcaccgagaggcgacgcccaccaggagcacggcgacaaggagagccttgccgctcatcattttgctctctctctctcttcctctctcccctcttctcctgtgtttccgaagaagactaccagcgcaaagagaagagagcgccgccggcagatgagattgcttgg

SEQ ID NO: 39163 - DNA, 759 bp, Setaria italica
  misc_feature (726)..(726): n is a, c, g, or t
  Peptide Sequence Number=SeqID_105137
gcaagatgctgtacactgtacacccaacaacgttcagagttcagaaatcaaatcacattgccaatgtacatgtacgacagtctacagaattgcagaaacagtatatttggatcacagatcccaatccccgttgggcaggttcagttcaagctgctgcatacagacacaagacaacctacactgaaaactgaagattagctcaaacgtgtgaggagccaaaaaaggaccaggccttttatcaccagtgattgacaatagcagcatacgtgaaacaacacagaaaagcaccatgttttctaggatatctacatatgttaatctaactatatttcaaaccaattggtcagaactgttggtgtgatgattaaaagagacttgtgcatgctgtcatcgccatgaactggttgagctcatggtggtggcaacctaggggtacttggcaactatgtcctgcggacgcatcatcgctactgctcttatgttccactgcacctgccgcacctgatggatcagagatggatgccatctctcatgactacggctgagctaccccaggagcgaccaatgagcacctggagtcctggacaggaggcgaagcagaatatgttccttttcagctcccttgcacccagctgacggaacctgacacgaactggtgcaacattgtcacctcccctgcacccagcctgacgggacctgacacgaactggcgcggcacatccttgngtgctcagactacgcaatatgcacaagtgacgg

SEQ ID NO: 39164 - DNA, 391 bp, Setaria italica
  Peptide Sequence Number=SeqID_105138
gaaatacaaggaacaacaatcagaagttaaaacgagctgcatgcacgtaacagcaaggccaaacagataatcccatcaccattaccattacctggtgctcccatcaacaaaaaatattctcattatctagtaattacctcatggttatatgccaaattccagggaagcatcattgcctctggaatttgtaaacttccattaaagttaatccaagttattggataaatctcacaagaaaggtaaccagatcattacaatgtattcatttgtaaccaaggtaagaaatgctcaggatcctagaattgcatagcatggaggaatcagtattctctcacaatttcaaataataatcaatttttttatttttcaaaaaatataatgaatttggcga

SEQ ID NO: 39165 - DNA, 375 bp, Setaria italica
  Peptide Sequence Number=SeqID_105139
accaggatcttggatggaagcagaagggaaaacgggtcatgtggctagcagcttctgtttttttccccttatattttcactttggtcgattgctcttgttgattaactgctaaactcacctctttttctacctttcatcttctctgttgggacttggggccacgacttgtaaagcttgtttttgcaagatctagctcccttgcaaacgctatgtcgttgatgtgtcctcatgcatgtttcagtgttctgtccgccattgtgtagtactgtagtgtatgtccttcatcacatgttactttttaatatactgtcaaagctctgtttagtagagttcttctgagtgtgattcactggtataagtgaatttgtgactag

SEQ ID NO: 39166 - DNA, 407 bp, Setaria italica
  Peptide Sequence Number=SeqID_105140
atggccgccgccgccacgcggagccgtccgaggaggacgacgacaactccagccgccgccgccgccagagacagactgaagacgaagccagcagcgaggcaggagctgcttccccggaacagatctacgaggcgctcaaggagatacccgacctgggccgtgctgatctgctgagagcctacagcaagctcatccacgatgctcgccagttcaggtgcctcatggcgttgcccagcgacatgaggaaggactggctgctcatggagatcggcaaccagtgaagaagcaaggcttgctatgcttgccatgtctggtctgcagggcaagtatatgacagcatgccggaacaaatatcgtcagccgaatgctatgtgtttaattaactagtaagttgtagattatgttaa

SEQ ID NO: 39167 - DNA, 1860 bp, Setaria italica
  Peptide Sequence Number=SeqID_105141
tgtctaaccaagaactttgcctcggatttcagctcatccactttgcggttacgagcttccatctccttccgtagctcgcagctgatctttaggaggtcatgcctttcactctgcagcttcaccagctcatcgctttgtgcttgccactcttgcttcagaacactcctttctgaccttaggtcagctacctctctcccaaagtgctccagaagcgtgacaacaagcgacttctcaaggatctggttctgcttcacatcctgagcatcagaaatagtattcagcaggcacttgatctcatgtaagaggagctgcacaactacatcaatcttcattagatccaatgatccatatttctcatccagatgcagtacttccatcacagaaccaatcccttctgtcagcagctggttgttttgtgacaagaaatcagctttctcctcttgaaccttgcatacctcttgttgcttctgcaattgagccacaacatcagaatttgcttcggccatgtcacctaagcacctctgtaagataaaaatctcagtctgagcttcaacaatcttgtgctcctcctcttgaagctggttctccttgtgcttaacttcttttagcagtagacttatctgcttctgtatagcactgaattgagttatgtctgagctggtggcttctttgtgccttccttttctagcctcaacagctctcgtagtttgatcacttcatctagggccttgtctctgtcctgctcaagatccaagcatcgcccttctaactctgcatattgggtttccaaactgagtagagcactgttgatgctatccacctcacgcataagagttctcttttcagatcgaagtacagaattctggttgcggaatgtatgagtagattcctctgaatctttcagcttccttctaaggatctcaagctctgtattattgtcagacaacaaattttccaagaatacatttttctctgatagcttctccatggtatgagaaataccctcaatccgtgcaacaaacatggctctctcagactgatggccgttaaccttggaattaaggtgtttgcatgattcttccaatgcaaccttcttgtcccgcaatccttcaatttcagtagttgcagctgaaagggatctctccaaatgagcatttttctccaacgtcctctccagtagcattagattctcaacatacaaggcttttacaccctcatgattttttatggtctcttttagctcaacatttccatccctcacctcttgtgcaagtgattggagtgattctacattgaaattcaccacttggatttgctccttgatcgaaaagtgcttcctatccaagtcgcccttgttatctttgaggtatgaaagctcatgctgaagcacccttttctcctccacatgccgagacacctcttcctcaaggcgccgctgcgtattcttcaaagaaattatctcatcctgcagacggattatcacagaggcagaggagtggttttgatcatccaattttcggttctcttctcgaatagtttccaattccttttgaagttgaactttggttgcttcaatgttctcaatcttacttgcttcaccatgcttttcaagagacaaaagtcttagcttctcctgtgcttgtgccaattgcttctccaaagatagccgggccatttctgcttgcatgctcttgagttgctcctcttgtatagagatgctaagcttctccaactcaatgtgcttctcatttagctcatcatgcttctcttttgaggcaagcttcagattatctagctccagatgcaaattctggttagctctctcaaggagaaggcacctttcctctgcggtgctcaaat

SEQ ID NO: 39168 - DNA, 2587 bp, Setaria italica
  Peptide Sequence Number=SeqID_105142
atagtatataatttttttttattatttctatttatgatacatgctctagtacaccaaatggcgccgctattgacgctgctcctccatgcctaaatataagaacttttagcgtttgatttgaattttgtccctgaatccaagaatttctaataaaacaaccattaacggtgatacccggctgctaaacgtgaacatggacatttcgcttgttgcttaaattagaagtcctgaagattaaccagtggtagttttaatagcttctgactgagcttctaagctctgaacgagagcatgggggagttagtcatcgatggccttggccctcatgcagcaggacggcccgcgggtcttctgcttgggccgccggctgtcgcgccgccgcccgtagaggtactccaccagctgcacgcgcgaccgccgctgcacctgcacggtggccgctgccttggctgcccgccgcgccgcgcgctcctcctcgtgccgcagcagcgcgtgctggaaccgctgcagctccagctccagccgcccggccttctccgacatcttgcgcacgcgctccaggatcttgcgctggctccggctccggaggtccacgtcgtcgcccgcagccgccgacgtgaactcctcagctttcttcaggagcttcccgttcgcgtcgatcagctcctcgatggcgtcctccgcgtcggccatctgcaccttcacgccgtccagctcagcatccgacgacgcctccacaccgccgcgcagctcctggacaatggaccggaggtcccggagccgctgtgcctccgaggacagccggtcgatcaccttcttcttccactcccgctgcggctccatcgtggtggttgccaccgtggtgacgacaggccgcgggaggacctcctgcttgtcgacaccgaggtccttcacggtcaccactggctcggagcacgaccgcttcttgcccttgttgtcgttctcggccgcctcgctctgcggtggccgcaggtccacgtcgtgcctgcggctgccgctgctcacccggtccacgctccacagcgcgagcatcttgtcgtcagactgccctgcaaccgatttcttcttcctgtggtggccgtgcgaggcagcacgccggctgggagtctggacgaggtccagctgtatgtccttcatcatgcgctcgtagttcacgtcgctggcgtcactgtccaggatctccttaagcttcagcatctcgatctgcttcctcgcgtcctggaggttgttgttgaagtcgagcctctcttgctccagaacaacccctgtatccgacaccactttctggagggctttgatggttccatggagtttctgcaactccatgtctttcaccatcttcgtcgtgttttgatcttcgcttgggcgcacagcaatctttgacagttgaggtgacaatgcattctcctccttgagcatgcttggtggcaagcaatccttggccagcgacaaggtttgtttctccagggcatcaacttcagtttgcagtgctccgagcagtgtgaagtcaccattcagatcaaccttcagccttctgttctcaatctccacggcatttagcttatccttcagctcatccacataagagttcctccgagtgatctcctccttcaacacctccttctgcaccatgtcactgatctcaaaactttcgcatgtcacgatgagctcaaggaccttctccttgaagagagacgcattggcagtggccagttgcatgttggccagcagtttagtgatctccgcgtcgcaagatttcacatcaatcacaggctgttctttgctcctaagcacctgcagttcacttttcaacttctggagctcctcccttagcatttcgttcgatttctcaaggccagcattgtcaacttcttttcgctgttccatgttctgtccagtctcttggcttttcctgccggatttcaatagcttggtatctctcctcatcgcacgccttctggatccaattgaaatttccgcaccagagccgtcacagatgctcagagttctactgagttccttctcaagatagttgttctcgagttgtaggtctccaagcttcttgttcatcagcttgatttcctgataaagctcgtttcctgctgcatgtagagacccaaaatcctcatgcaaacactgcaattgtgatgtcctctcatcatgaaggcttctaaaaatgacaccaaggatgtctgtcctgactgcttcaccaacaagagtgctgaaatcatcttcaaatgacttttccttctccctagagccataaactttgctagacagtgaggtgttctcttctatcagcttgataatctctgcttgcaatgattgtcgtgattcttgcagctctgtgagttgtctaaccaagaactttgcctcggatttcagctcatccactttgcggttacgagcttccatctccttccgtagctcgcagctgatctttaggaagtcatgcctttcactctgcagcttcaccagctcatcgaataccttacaagactacaataccaacaataaagaagttaccttaccgtaagttagtaattacttaccttacctttactaa

SEQ ID NO: 39169 - DNA, 600 bp, Setaria italica
  Peptide Sequence Number=SeqID_105143
tttcagtctgggacgtgcagcgttgttctcctagagtacaaggcagcatgagtctggagtcaaatttgtcatcagggagcacatcattccatgaagttgtacgaggaactcctctcaggaatccagccaccgttgtgactcgtgctagcaaggccacccctctaggttccggggtatagagttgtaattttggtggcctgaggaagttctgaggcggctcagaagggtgcaagttctgcatctggctcaagaagtctgactcgacgttagattgtcgctgtgggttggcttgagttaactgaaatggccgtggctgctggccggaagggcgcaatggtggcatatgggcaggatcagccgtgatgtagtgcatgtattgctgcagctcaggaggaaccaccggtgccattcccttcccatgaccagcatctgaagttgtagctgaagtgatttaaggtagtcgatcgcttcatctagcatggacactttgtcggtcttggtgcaatttggaaggagctccctgtagtgccttcagcttctcattgatcctatcccttctcctcctttctgaaaaaattgtggaactcagcagatctgctt

SEQ ID NO: 39170 - DNA, 1071 bp, Setaria italica
  misc_feature (1)..(51): n is a, c, g, or t
  Peptide Sequence Number=SeqID_105144
nnnnnnnnnnnnnnnnnnnnnnnnnnnnnnnnnnnnnnnnnnnnnnnnnnntttttttaattacctaaaaagtcaatgtaggagcttctattgctccgaaaacaagcttctttttatgtagtgtttataccagtatctaaaaatgtagtgtttatacagttcatcaagcaagtgtacagcatgagaattccatgcgtggtccatatactcagcttattcaaattcacttaaacagcagacactggtcgttgatagggtctgctacaaagcgatactgatttctccaagcaaatggatttgtgtaccttcaaaatttaccatatctatggttctcttcttcagttcacttgagttttgagtttactcatacaacatagcggtatgtaacgtatctgccggccgtctcactgggtctgatgatcttcacgacctgacctcgtttgaggccatagtatctggcaataggatccgtaatctgtattcttggaagctgagtttcctttaaggtgtaccgttccaatagtgtcttcttctcctcatttgtaagcacctgatgctcaggaacaagaacatgctcctttatatttataagcaactcggcctcctggaaaatttccaagtgtatctttggctctaattcaatgagaaacgacttggcgaatggagtgagattctgctgaagaaccaacacagctctggagacgttctcatgtgtcatcatttcaacatacttcttgatgtgtttcatccccaccttgtcatcgttgggaaagaaaacatatatctggtcggaggggtcgttcttcttgtacttgttgatgaggaggtcctcgcggtggaaggactcgccgaacttgcggaggaagtcgcggcggctggtggcgagctcgtgctccaccaccaggtacccgcggtcgcgcagcatctgcatcaccgtccgccggatccggtagagccggcccatggtcacctcgtcggtcaccagccccgccgacatctccgtcgccgccgccggctcgcttcctctgcttcgctttccggttcgagcgaggcggctgagctgagagcttg

SEQ ID NO: 39171 - DNA, 442 bp, Setaria italica
  Peptide Sequence Number=SeqID_105145
gcattcagtttttctgttatgttttttattacctagcagagatattctgcaatgtctactgtcattcataggtgcgttaggactattatatttactgatgcttgtgtttttagggtcatttctgttgaataatcagatttctgttttttgggtggtgagggttaagcaaatgaagcaaaatctagcgttcactgtcttgtggctattgaagttacccatagccatttaatacattcagaattccagttctctagtgtgttcatgttggtgaaatgcacttaaggcaaatggtattcaaaccatgttcatcggaagcaaaaaattctgtgatgtaggttttggacacgcgtggccgcctgttgacagctctcggctatggtttatggccgtctatggtgcttctgtcagaaatcgtgcagacattcatccttgcagatttctt

SEQ ID NO: 39172 - DNA, 1383 bp, Setaria italica
  misc_feature (1333)..(1383): n is a, c, g, or t
  Peptide Sequence Number=SeqID_105146
gagagaggaaataattaggcagaaataataataataagaaaacactcccgtgttctacgaccgcaggtggtggtggtgcgaacgcgaggcgaccgaggggggagacgccatgagggggacgaagcggccgctcggcgcggtgacgtcgtgggtgcggcggcagccgcccaaggtgaaggccttcctggccgtggtcgccggcatggccgcgctcgtcttcatccgcttcatcgtccacgaccacgacaacctcttcgtcgccgccgaggccgcgcacgcgctcggcatcggcgtcctcatctacaagctcaccaaggagaggacctgcgccggactatccctcaagtctcaggatttaactgcgttgtttctagctgttagactgtactgcagctttgtcatggagtatgacatccataccgttctggacactgccacacttgtggccacactgtttgttatttacatgatacggttcaaactgaggtcaacttatatggtcgacaaggataattttgcattgtactatgtggtgttaccttgtgctggactggcactacttattcatccttcgacatctcacaacattgtgaaccggatctcctgggcgttttgtgtttacttggaagccgtttcagtgctgccgcagttacgcttaatgcaaaacactaagattgttgaaccatttactgctcactatgtatttgcactgggtgttgcaaggtttcttagctgtgcgcactgggttctacaggttttggacacgcgtggccgcctgttgacagctctcggctatggtttatggccgtctatggtgcttctgtcagaaatcgtgcagacattcatccttgcagatttctgctactactatgtgaagagtctggttggtgggcaactggtgctacggcttccctcaggggtggtgtaagaagttcagcaggttacaaattccgcggttcacccattcttatgtacccagaataacagttatgctctagcccccgacctgcatcttgtgtctaatgtgagaccggagcctcctttagttgatgttgcaagttgtgactatttatgacagaattgctccgagggtcctcttaaaagataggttgtcattgagactgtttatagtgcgcgggccctgatacctagttcttagtttctgtatcactgtcgtggtcgtagaaccaggtggttaatggtctattttggattataatcttagcatgctttcttatcttttagcccgcaaataaattgggttgagccatgcagaacttgccatttgagaatcgtgggacgaaggtcataaacaaaaaaaaaaaaaaaaaannnnnnnnnnnnnnnnnnnnnnnnnnnnnnnnnnnnnnnnnnnnnnnnnnn

SEQ ID NO: 39173 - DNA, 192 bp, Setaria italica
  Peptide Sequence Number=SeqID_105147
tttattttatttagggagtttgtttctttagagatagatcttatgttttgtcgtaatcgactaggactagaagttttgatgtttagggtataaatagggaccctgcgaggtctggaaggatacacatcataatcaatacaaatctactatttttgcaatttactctgaagtcggtgacttcgccattgtttt

SEQ ID NO: 39174 - DNA, 533 bp, Setaria italica
  Peptide Sequence Number=SeqID_105148
gttgcatatagaatttagagcagcagaagtcggaataagatgagaagctgcatatataccatataaatgatgggctcaagtaaacatctatttttgtcagtgcatataggtatacacataccttaccaaatataagtcctcgcagagttaatgatttgatatcatcgctaggtaagaagtgcagataagaaagaaaatatgaaagctgcatttctctctaaatttcattgaagctaaaatatgtaccacacaaagtgtaccttgattatcatcgacgtgaactcacatgctccccaaaactgctgccatgtacattgtcctgtcaggtgaagaacaacctgcaaaagagatgtgtgcaataaggttgtcagattatatagtagctgaaacagtttgctgcaaaagagatgtgtgcagtaaggattctttggctcttcagaagagacagttctaactactgcgaaaaaggacagcagtagaaggattaaccatccatcttctttgattcattaagctgtgtgataattccaaca

SEQ ID NO: 39175 - DNA, 789 bp, Setaria italica
  Peptide Sequence Number=SeqID_105149
aatgtactcttagaaaggtaggaaacaacaatattacaaatagtaagtgataatgtaaccatagaaagcaaaagattgtattggctccatgaagggatagggccttagttgctcagtatgagccaatgtatatgaaggtagagctatcatcgcctattgcagtagcaaagttgagaaaagatgattatctgaatttcttctaagattgattccctgtagcttttgtttgcagcattgcagattcaaaatagggtgatgccccttggtaagaaacttggataaatctcatgataccctccatgcccattagcaatctatgtagaatttagagcatcaagagtcagaaaaagatgagaccgaagttgcatatagaatttagagcagcagaagtcggaataagatgagaagctgcatatataccatataaatgatgggctcaagtaaacatctatttttgtcagtgcatataggtatacacataccttaccaaatataagtcctcgcagagttaatgatttgatatcatcgctaggtaagaagtgcagataagaaagaaaatatgaaagctgcatttctctctaaatttcattgaagctaaaatatgtaccacacaaagtgtacctgcaattacattcagaatttaaacagaaaaagataatgaaggtaagttttggcaattcaataacatcaattaaatgtattctagatgagtaattgcacagaataaaattgcagtgcttgatcataatttcttgtagcaatgcagcaactaaatagacctaattcagt

SEQ ID NO: 39176 - DNA, 782 bp, Setaria italica
  Peptide Sequence Number=SeqID_105150
atcatagaatatagttcttattgcaggtagaagtcgatatatgatactacatgacataagcaagactttctactggtgcacagcttaaacaaatataagcaacatgcataaagcttaggtacggtaccatctacgcatacatgtgtcctttcttgaacacaaccacaaaaggtgaggcacttgtggtgagccagttctccttcttaaaagcatgcaatcccagatatttgcacggctctgtgccaatgcaagagactagcttgtaccccttcattgcaccattgttcctttcgatgcggaacaacatgtctggtgaaggtggggagggcatctcagcaccctcgtccttcccgacggcgatgaactgacggggctgtgatgttgaaaatggcggtaggtcactaacatgccagtacatgggttctgcacataccgtgatgacatcgaaactgatcttgacattagttgataggtgaaccgcaacgggatcactgatagaagcattaagcggctcaattcgcacggccatgccgactttagcctcgttgcgcatctggagcacgaggaagttgcagcgtctccattgatacgacttagtgaggccaccaccaacaccacgttctactgggagaacgtaataagaggaattgcttattagttcatgaccatctgtatcatagactagttgtgtggcatccccaatgatgcaaggaagggtggcggcaaggagtggaatgaggaggagtatgtttcatggcctaccgatcgatcaagctagcaat

SEQ ID NO: 39177 - DNA, 528 bp, Setaria italica
  Peptide Sequence Number=SeqID_105151
ggattgtgcgtgcgcaggtgcaggagatgaggcttccctcaacgctggtgttgctgatatttgcatttgttggaggaaatctgctcatgggcatctcctctaatgcaagaagcgccaagaactccacagatccagggcatggaaacattgagttaaacggcaggaaactaaaggaacgatacactatccggaagacaaggggcctggaaaatattaggacggatgactaccagcccgttgatccaagcccaagctccaaagccaccatcagaccaggtccaattgagcatggcgcaccgattcttccttatgtaccacagtacccaccgcctcctggtggccaccctcgagggtgtgtctcctgctggatccccttccacttagatgcacgctgaaatgtccaaatctgctatgaccccctatactgcggtcaaagtctgcttgttatgctgtttcaatgtttactagtgtaccatatgtctgaaatgttagtgtcttggggttacctgtaagtgtttgagtggtgac

SEQ ID NO: 39178 - DNA, 406 bp, Setaria italica
  Peptide Sequence Number=SeqID_105152
tataatactcctaattagtattcaaacatgtgacaggtactaaactttaggagggtgcattcatgcaccctcgtagcagttattaggagttcctagcagctaaaatagtgacaggagttccggtccgcgtgtggacacgccctcaacagactggtttctcatcaaactataacactcgagcgaaaaaaccaaactttagtgtagtgtctttttcggtgtctggaatgatgcaactcgatttgaccacaatattttctaataaatgtatgcgatcataaggatacgatttaatgaagtctacacatggattttacgttctaaaataaatattaaagaccgattgacggtcatcgtaagttgcatcaagtatttattgtgatgcgtctttcaagaaaaaaagtatggg

SEQ ID NO: 39179 - DNA, 1673 bp, Setaria italica
  Peptide Sequence Number=SeqID_105153
caatattttttaaataagcacaaagacaaagtataatgtctgatctaataaacaaaaaagaattgtgaatcacatgacagaggtcttctttttcttactcgatcctggctatgtgtggcatagcctgtcaattcaagttttgccctgaaattttttaaaaacgagaaacaagtcaatatttgtatataatatatgaaaaactattgtcatataaagttgtatccaaaattggacatgcccaataatttatgcacataacttatgcacacaaatatatatataatataatcccttagcctaacttcatgacctaacaaacatttatttacataccttatgcagaaaatataaaacaattctatcattttaatcttattaacacgaacataatttaattgcataacttatgaacaaaataatgtgcaataatctcttaacctaatttatctacataacttatgcaaaaaaattatatgcaaataatctttcgacctctaacttattcacatgacaaaaaatatgtcaaaatgtgaaaacaaacattttatgtaagcttattgacatgactaatatttataagcatcacttataagtaaaaaaaatatataaaatgatctatttgcctaacttggtgacacatacaaaatttatgaacgtaacttatacgcaaaatatgtatacataatagtttcttgtcccaacttattgacattgtcctaacttattgacatgaccaaaatttatctatataacttatgcacgaaaatgtataaaaaatctcatggtctaaacttattagcatgacataattatgtcaaaaaaagttgtgcggataatattgttctataaacttatatcaccaagttattaccatgacatgtaagttatgtacatcacttataagtaaaaatatatatataaaaaaatgatctatttgcctaacttgttgacacatccaaaatttatgaacataacttatgcgcaaaatatgtatatataatagtctctcgtcccaacttaatgacattgtcacatgaccaaaatttatctatataacttatgcacggaaatgtataaaaacctcatggtctaaacttattagcatgacataattatgtcaaaaaaggttgtgcagataatattgttctataaacttatatcacggagttattaccatgacatgtaagttatgtacattgcttattgacacacaatcatttggacaaaatatttaatacacataggtacctttgcaccgcacgaagaagcttttgtaagttatgtgcattacttgttgaagcactctcggacattactactcactactggacattggctacttttactaactatataaaactgttggaccgtttgtactgagcattaaacaaaaggtgctgaacatatatcctatgagcatactcaacatttttttgtccacattccagaaaaaatatatccccgcaactgcaacatgaatattgaaaaaaggattgcaaacctaaaccttctcccaaaaggctttgatcaataacttatcagtagaacttttgtcaacctttaaaagaaccttcttagaaaaacttctagaaaatactttgatgagtaacttataaacacaaatactatttataactcttaaaagaaaacttctgttagcaaaatcttgtact

SEQ ID NO: 39180 - DNA, 488 bp, Setaria italica
  Peptide Sequence Number=SeqID_105154
ttcatgtctactgatgtttgtattgtacattccttcattaatgacgcttgactaggtagtgaccaaaatctttacagagttggagctgcctgtgagacacttgcatgatactctgtgtggaaacaacaaacatttcatacttctctggactgttttgagtccaatgagctcaacctccgcaaagaatatgattgttcgtttggcctgaaggggatgagttactaatagtcggataaaccattggtaaactgttaatgtattggtattgccttatcgaactcatgactcagttactggtatgactcctggctacattcttgaattatcatatttggtttagtaatgaactacaacaaaattattgagtaggacatgttaatattttatttcagatatacaagttaataactgtgtatagctttatgtctatacaacaaatatggtatctatcctccttaatgactcaaactgtgagctatgcgcattcc

SEQ ID NO: 39181 - DNA, 502 bp, Setaria italica
  Peptide Sequence Number=SeqID_105155
tgtgagtagtgtcttgcagcttattatgccaaagcttgtgctggtgatgtgccccctgaagtccaactattgtcctgaaatatataatattcttggtatcattcaggtggattgtagaattgcaactcatgctcatttgttgtccatgatgcaaactttcgaatttttgtttcagcaatataactattctaatcgttgactagtcattgtccaagttttacctgtggttatctataaagcattggtttgagctattttagagacttaccggctatagtcacttcttcctagcacatgacttacattatcctcaaggttagctgttcttttgcagaatggtcatttttatagtacttaagctactagtaatatgatagtattagcttccccttttctctaaccatgtttgttcagtatgttttcatctgagcttatgtttagctacctcacactgtttttaatgaccccatatctcacactagccactgatacctctttgagt

SEQ ID NO: 39182 - DNA, 890 bp, Setaria italica
  misc_feature (66)..(66): n is a, c, g, or t
  Peptide Sequence Number=SeqID_105156
gttcctggtcttgctagcttattatgccaaagcttgtgctgactttcgaattttgtttcagcaatntaactatctaattgtcgactagtcattgtccaagttttacctgtggttatctataaagcattggtttgagcattttagagacttaccggctatagtcacttcttcctagcacatgacttacattatcctcaagagttggagctgcctgtgagacacttgcatgatactctgtgtggaaacaacaaacatttcatacttctctggactgttttgagtccaatgagctcaacctccgcaaagaatatgattgttcgtttggcctgaaggggatgagttactaatagtcggataaaccattggtaaactgttaatgtattggtatggaaacgtaaacatctacccgatgttcatcataggaacacaactacacaaagagaaactcaggcctccacctttatgattcaagaggcggaggtgctatatctgcttccggtgctgtactcgatgatgcaaccgctgatgttctttcataacttcagatgcactttggtctggttctggaacactggaccttgcagcatgtccaatgttttgggggttgactggcaaattcggcatgaggattgcaatctgctttcggcatttggtgtgctccgttcacctggagcatcatctgccccgatgaaggccattggggaagaagactgtggaaggacctggatagatattgtattttctttgtttcaggttctccgtttataatttgggaatgtagtgtgccaactcattaatctaatttcccgttcccataaaaaatgatgatcaatttttcttgaaaaaaaaaaaaaaaaaactaaaaaaaactagaaagtaactacgaaccg

SEQ ID NO: 39183 - DNA, 357 bp, Setaria italica
  Peptide Sequence Number=SeqID_105157
ttcaacgttgagctgaaattcgatgacaatcttgaataccagaggaagagctaactcgcatcctccaggccatcctgaaggcatgtgtaacacaacaaactgtttatgcttctttctaaaagtttgttgagaagttcctgtctaacagtgccacacatttggtgtgcaggtgatctttgagcacgccaaagataggcctatacttttctctagcttccagcccgatgctgcgctgctcatgcgaaaattgcagagcaaataccctgtctactttttgacgaacggagggacagagatttacattgacgtgaggaggaactcgttggaggaggccatcaagctatgccttagcagtgg

SEQ ID NO: 39184 - DNA, 396 bp, Setaria italica
  Peptide Sequence Number=SeqID_105158
acagaagccaagtcatgtagccgagtgtgtttgctatctttttcctttctgccgtgtctctggtacttgagtgctgaaagtgaattaatgtttccttccacttgtagtctgcttaagcttaaatgttgcaagaaacatactgattcgttttactctgcttcttatccttccctcctcgtctcttcaataattcggtgtgcatagatgttgagaagagaaccgtgaatatcggttttgcaggtcaccaaggatgggtgcccaatcatcttccatgacaacttcatctacactgaagaagatggtaaaatttcacagaagcgtgtcactgatcttcagttggaagacttcgtccagtatggaccacaaatgagaaggggaagattgggaagcccctgc

SEQ ID NO: 39185 - DNA, 380 bp, Setaria italica
  Peptide Sequence Number=SeqID_105159
ttaggaaatagtagacaagtacaagaaggatgctctttgcacgcttcaagaagcattcgagaaggtcaacactagattgggcttcaacgttgagctgaaattcgatgacaatcttgaataccaggaggaagagctaactcgcatcctccaggccatcctgaaggtgatctttgagcacgccaaagataggcctatacttttctctagcttccagcccgatgctgcgctgctcatgcgaaaattgcagagcaaataccctgtaagtatgctgaacacagcgcaagcattcgtttcatgtttatgaacagtagtacagcactgatcatctctttttatgctcttcaatcaggtctactttttgacgaacggagggacagaga

SEQ ID NO: 39186 - DNA, 747 bp, Setaria italica
  Peptide Sequence Number=SeqID_105160
atgaacgcgctggcgtccgcggaccggcggctgcaggaggtccgcgagaacaccgtccgctccttcaacgacgccgcgcgcttccccgtcgactacgtcgagttcgacgtccagatgttgagaagagaaccgtgaatatcggttttgcaggtcaccaaggatgggtgcccaatcatcttccatgacaacttcatctacactgaagaagatggtaaaatttcacagaagcgtgtcactgatcttcagttggaagacttcgtccagtatggaccacaaaattacgaatagaacaaatacttagaaataaccaaggaaggaaagaagactaaactacgacaatcctccaggccaatcctgaaggtgatctttgagcacgccaaagataggcctatacttttctctagcttccagcccgatgctgcgctgctcatgcgaaaattgcagagcaaataccctgtctactttttgacgaacggagggacagagatttacattgacgtgaggaggaactcggttggaggaggccatcaagctatgccttagcagtggcctgcaagggatagtttctgaggcccgtggaatattcaggcaccctgctgccataccaaagatcaaagaggctaacctctccctgctgacctacggaacattgaagtaaggcagttcacatatgtacatggtagcatcgtcgtactaacataccatcgaatgtctatgctaaaatttatcatccttttgtagtaacgt

SEQ ID NO: 39187 - DNA, 821 bp, Setaria italica
  misc_feature (776)..(776): n is a, c, g, or t
  Peptide Sequence Number=SeqID_105161
cttcctccatcgatcgccataaatgaactctgttaaatcctcctccccagtaaaacttccatcaaattaccaaccaggaggcagatcaactcatcaaagcgcgttgccgttgctggcccggctgagagaacagcggcaagccacacgcaccggggttaacctataacctaacctctccctccggtaattaaccgctgttaccgcttcacgccgtcgccctccgcccctcccgccgtccaccaccccggctgcgttcctccctcctcctccgccgagcggccgccggacgcggggaagaaagagccgttcgatctagcggggagaggagagagaccccgggcaaggtacggcgccgagcggcaggcggcggccggcgccctttctcctggcaacgaatccgcggcggcaggggattgattcggtgacgggcggctgcggcggaggcctgattcggcggccggttcactgacaacattttcttactttttatatggatggttgtacgcatcaaatttgaagagaagaatattttatattacagaacatcaataaagggatgaggcttggaagtataaatggattgcggttcaagcagcttaagcttgtcattcttgcatttttcatgttgtttcctttttggaaatgggacaaaggcacatactatgattctggaatcctccaacctgatccattggttttgactcatccagctaatcttaagcttgatgatcagcatttttttaaaaaattcttcatatcaaatctatctcttttcncatttttccttttaaacttctgcagctaactcaaagtttgtagat

SEQ ID NO: 39188 - DNA, 701 bp, Setaria italica
  Peptide Sequence Number=SeqID_105162
tttaccaggatctaaatttatacatatagtgatatcattagtgaataacagcaatagtatcacgtaaaagatatagagtctatcagagatttacagcttaatcctagaaacgaaggttctaaatttcacaggcaatcatttggaggttgcgtactcctagtactcagcaccatcttcacaacaaacttggtagccgtttcttcttctgagcaacgttggttatagcaagggtgagcacatgtcatactcagcaagtgtggagaaaatatgaatgcattaaaaggggtaccgaaatagcaatatcggatgcacaaccggtacttaaaaaggggttaggaaccagtactgaaggcattatgtcctcatgtacacgaggagttgattttaaagcagtttgtcgtatcaagttctctttatatcaaaggatgtgtatttagtggagaactccaatagttcgatggatttcaatctgatgtgtattaacaaatagttcttgttgacatgtatacagagctatcaggtattgatttgggtgaagctgagaaattgtaacaggtgccgatctgcatgattatattatatattttgttttatctgtattaattggtttcctcaggacggccgtcaggaactgcctggaaaagattcctgtaggccaacccacaggagaaatggacctttcctgactatgggctcctgtc

SEQ ID NO: 39189 - DNA, 533 bp, Setaria italica
  Peptide Sequence Number=SeqID_105163
agaaatgaatttattggactatttaatctgtaaagttcaattttatttatgaagaaaagatagatttctttatgatgtctatcaaaatatatacactgaaacatagttaggcattttccattgcagattacttcttcaatcattctttctgtaaacatcaatttttcatatgcagatatgcctggatatagtttaactgattggtgttcaatattcattagtgtatgccaaggtttacatgcttatgcctcgcccaatatgttatatgctgacattttatccctgtatcttaaaaaaaagcaaaaacttgttgggatatcatgtcaaattatgtttatttagatttcattgtgggaaattttgatatctataaagtttgagaacattattaatgaaattattaccaagggtttgcatgctggttttaaaatgatgtcagaatcgttgaatcaattttgagaatgaatcaatttccaaatctcgaatgcttgaccgtctgtgtctgatgccctattgtttgccctaggctgaga

SEQ ID NO: 39190 - DNA, 481 bp, Setaria italica
  Peptide Sequence Number=SeqID_105164
gtgtatcctggcaatattcccttttactattttacatttacatttctgtgatgtgcaaatgttatgggtcttggtgcaatgggctatagacctatggggccacttgacctggcaggctcggcggcggctaaaggctgtttcagggctgctgacctggccgaactagcagcaggggcgcgtgtgccataggggtaaaagggcccctgcctttcttcatcgacgtaaggtttaccaacgactgttttaggatgtttgaacattggcttggtttaggaaagtttgagataggatttggaaattagagtttgctctggactttggaaagttgagtttaggaaatgacgtatccaatatatagggattccatcgttaaggtttgtttgctcatcaagttgggtgggtggggactgggggtccctatgtagtaattgccaacgtactcatttaatgatcaaggaacataatttcgccatcctccttg

SEQ ID NO: 39191 - DNA, 1185 bp, Setaria italica
  Peptide Sequence Number=SeqID_105165
cggcaacagctagcacacacttggtctcggcgagtgacagagagaagcacagcagagacgaaggagaggtaatcgaggtagcaaccagctgcaagctagcaggtagctttggatcggcgccgagatgagcacgggcgcgcggccggggcggcggttcacggtggggcggagcgaggacgcgacgcacccggacaccatccgcgccgccatctccgagttcctcgccaccgccatcttcgtcttcgccgccgagggctccgtcctctccctcgggaagatgtaccacgacatgagcacggcgggcgggttggtggcggtggcgctggcgcacgcgctggccctgtcggtggccgtggccgtggccgtcaacatctcgggcgggcacgtgaaccctgccatcaccttcggcgcgctcatcggcggccgcatctccctcgtccgggccgtcttctactgggtggcgcagctgctgggcgccatcgccgcgtcgctgctcctgaggctggccacgggcgggatgcgcccgccggggttcgcgctggcgtcgggggtcggcgactggcacgccgtgctactcgaggccgccatgacgttcggcctcatgtacgcctactacgccaccgtaatcgacccgaagcggggcagcgtggggaccatcgggccgctcgccgtggggttcctgctgggggccaacgtgctggcgggcgggccgttcgacggcgccgggatgaacccggcgagggtgttcgggccggccctcgtcgggtggcggtggaggcaccactgggtgtactggctggggcccttcctcggcgctggggtcgccgggctcgtgtacgagtacctcgtcatcccgtccgccgacgccgccgcgccgcacgcgcaccagccgctcgcgccggaggactactagctagccgccggccgccgcggtggcgtctccttccttagtccgatcgggtcttgtgtttgttgtgcatgtgtcgggacagtgtgtgcgtgtgtgtttgcattatattttgtgtgtcgtgtgaaccagttaataaggggcccgtacgctacgtaccctgttgattgcccccgtgtttggagacggtgaatcaggcggtgtacattgcacggtgtgagtagcaagcgtgtaataaaatccgaggtaaaaggagcaacactacttgtaaaaaaaaa

SEQ ID NO: 39192 - DNA, 576 bp, Setaria italica
  Peptide Sequence Number=SeqID_105166
tctgaaacaaagtataacacgagtactatgataatcgaactatcgaagttatattatgcataaagtgcattactatcatcaaacagaaatcaagttaacgtacaagaagagctgataacactgaagtgcacaaattttaccaggcaagcactgttgtaggtagtccaactgaaccaatctcaagccttgctgtgtgcagaggatggtgggggagtagctggtgatgacgctgacgcagatgtcccgtcgcttctcccaggtgttggggctctcgctcggctgctccccttcgtgcaggttcagcgtcatcaccgtgatcgacaggctagtcatcccctcttctctcgcttcgtcccaccgccgctgctacagatttccacggcgctgtgctgttccctgggctcccgtaagaggagcaggcgggtgctgcctggcgccagcggttatcggaggcggctagcgagtagatcgccggcgatctgcagagcaggtgaagatttggttgggggtggggggcggaggcgtgacctttggactgctgcctgtctgagtctaagtcactaagaaattaactaa

SEQ ID NO: 39193 - DNA, 630 bp, Setaria italica
  Peptide Sequence Number=SeqID_105167
acgaccacggtcgccgcaacgcctcggcgtgctgttcgcggcgcaggacacgacggccagcgtcctcacctggatcctcaagtacctccacgacaacccgaagcttctggaagccgtcaaggcggagcagatggcggtctacgaggagaacgacggcgggaggctgccgctgacgtgggcgcagacgaggacgatgccgatcacgaacctggttatcttggagagcctgaggttggcgagcatcatcaccttcgcgttcagggaggccgtcgaggacgtggactatgaagggttcctgatccccaaggggtggaaggtgatgccgctgttcaggaacatccaccacagcccggagttcttccaggatccacagaagtttcgaccctttctcggttcatggtaatgcatgaggcctacctgatctacattaattgacatcgacccttccagtagatgattgcataaccttgacatcaacgttacatgagcgccgatcgatcgagtcgcaataggtttgcagctagccattgctatcagctgctgcaatcggtatcagagaacccaaagtcaaggacagcaattactttcactacctgctgcctgcggtactaactccaagaagaagacgaa

SEQ ID NO: 39194 - DNA, 1543 bp, Setaria italica
  Peptide Sequence Number=SeqID_105168
attctctcaagatcgcttccctcgtgcccctctcgccttaacaccaccgcgccactggcgcaaatcacactcggatacgaaagggaagtacagcgggggcactagcctagcctcccgtgtgatttatcttgagaggatcactcctcttactcttagaagctgcagcgtaggggaaggccacgcatggctttcttcctcgctgtagcttgcgtctacgtcgtcgcactcgccgtgctggtgctgctcgacgcgagcaggcgccggaggggaggcgccgccggccgaagcggaagccccccagacgcaggggctcaagctgccccccgggctctctgggcttgccgtacctcggcgagaccctgcaactctatctacagaacccccaatatcttcttcgccgccaggctgaagaggtatggcgaggtgttcaagacgcacgttctgggctgcccgtgcgtggtcttggcgagcccggaggcggcacgcatggtgctggtctcccgtgcgcacctgttcaggccgacgtacccgccgagcaaggagcgcatgatcgggccgcaggcgctattcttccaccagggcgactaccacctccgcatgcgccgcgccgtccaggggtggctcggccccgacgcgctccgcgccctggtgcccgacgtcgaggccgccgtcgcatccacgctccgctggtgggaaggccgcgagaccagcaccttccacaccatgaagaggctcacgttcgacgtcggcgtcgtcaccatcttcggccggcgggtggccgagcacgtgaaggaggagctgaggaggaactacttcatcgtggagaatggctacaacagcttccccatccccgtcgtcccctggacccgctacagccaggccatcaaggcgaggcagcggctgggggcgatcctgagcggcatcctgtcggagcggcgggcgctgggggacctcggcgacgacctcctgggcaccctcatgcggtaccgcgacgacggcggcacggcgctctcggacgaccaggtcgccgacaacgtcctcggcgtgctgttcgcggcgcaggacacgacggccagcgtcctcacctggatcctcaagtacctccacgacaacccgaagcttctggaagccgtcaaggcggagcagatggcggtctacgaggagaacgacggcgggaggctgccgctgacgtgggcgcagacgaggacgatgccgatcacgaacctggttatcttggagagcctgaggttggcgagcatcatcaccttcgcgttcagggaggccgtcgaggacgtggactatgaagggttcctgatcgatcagaatgcaaagtcacgcacgtgtagaacatggacctaccacagcccggagttcttccaggatccacagaagttcgacccttctcggttcatggtggcgcccaagcccggcacgttcctgccgttcgggagcggcgtgcacgcgtgccccgggaacgaccgtggccaagctcgagatggtcgtcctcgtccaccgcctcgtcaccaactacaggtggcaggtg

SEQ ID NO: 39195 - DNA, 414 bp, Setaria italica
  Peptide Sequence Number=SeqID_105169
tagtgtcgttctatcatctgccacctgctattgtccattagcttatattagtcagatattcaccagcacatgcacgcacaattgcacattattccatgttttgcagtacatcaaacaattgaaactgtcaagcatgaccatatcacaaggctactacagaagaagaatatacttgccctgttatattctgaaatatatgaagtagttatttatgttgtaaactcgtatcattgtttaggcatgccatggaaattcggtagtattcacttataaagttatggctcatcaatgtatgcactacacatctgtattacattatttcagttggaaggaagcatcatttttttttgcctgacaaacttggtgttcctttcagattcttggcaattccgagctcaagatggaagtttagta

SEQ ID NO: 39196 - DNA, 433 bp, Setaria italica
  Peptide Sequence Number=SeqID_105170
gcatgaaatgtttctattatggcatctgctgtttgcaaatatctttataaccagatttaggcatagtgtcgttctatcatctgccacctgctattgtccattagcttatattagtcagatattcacagcacatgcacgcacaattgcacattattccattgttttgcagtacatcaaacaattgaaactgtcaagcatgaccatatcacaaggctactacagaagaagaatatacttgccctgttatattctgaaatatatgaagtagttatttatgttgtaaactcgtatcattgtttaggcatgccatggaaattcggtagtattcacttataaagttatggctcatcaatgatgcttccttccaactgaaataatgtaatacagatgtgtagtgcatacattgatgagccataacttataagtgaatact

SEQ ID NO: 39197 - DNA, 423 bp, Setaria italica
  Peptide Sequence Number=SeqID_105171
ttgggatgcatgatcgccggcccgtccgcctgcagctgctgcttgctgccgtgcaggtacagggcccggcggaggggcgggagccttgatgtcgtgcacgctgtcgaggagcgcgacgacggggtcgcggaggtggtcgagcacgctgccctggcgcgaacccaggccgccgatgacgctgcccagcatgctgccctgcgcgcccagcggcagcggctgcgccacccacgacatgccgcgctcggggccgtagagcgtgactcccctgtcgccgtcgtcgtcttcagcctggggcggcggcgcaggtccgacgatgtactcctcgatggccgtgtctccggcggtgcccaggccctcgacgaggagcgccatctcgccggcgacgtcgtcccggcccctgagcatctggagcactgccccggg

SEQ ID NO: 39198 - DNA, 489 bp, Setaria italica
  Peptide Sequence Number=SeqID_105172
gttgttgtacagtactcgacatcgaaatgactgcgtgtttaatggagctgtccccagcatggttacagccttgaccctagctagagaagaaactgaattatggtgtttagcaggagcaaaaggcttatccttgctcgttgccagggggttgggtaattttgctgtactctcctttggttgggttgtctcctagttgtgactggtgattgtcggttttagttccagtgtgtgggtgtgtgtgtgagtctctctctccttcttttaatacaatgatacacagctctcctgcgtgttcgagaaaataagtacaaaatacaaaggctcttctttgatcttagagtttcatggaacaagaaaaattgtgactgaacttgtcgcctcgatacgatcaaatagaaggaaataccgaaataacatgatacatactaataaagaaccaaatgaattagtcaaccttttcaaaaaaaataataaaataagtcaactaca

SEQ ID NO: 39199 - DNA, 346 bp, Setaria italica
  Peptide Sequence Number=SeqID_105173
ctcaaggccaggcgtcgcgggcctgccgcggccgtacagcacgctgcagtgcgtggtggcgcacctgtggcggtgcatgacgacggcgcggggcttggaggagggccagagcaccagcgtgtgcatcgccgtggacgggcgggcgcggatgaacccgcaggtgcccgacggctacaccggcaacgtggtgctgtgggcgcggccaaccgccacggccggcgagctggtggcgcggcccctgcagcacgcggtggggctcatcaaccgggaggtggcgcggatcaacgacgcctacttcaagtcgttcatcgacttcgccagctccggggcggtggagaaggagcgg

SEQ ID NO: 39200 - DNA, 211 bp, Setaria italica
  Peptide Sequence Number=SeqID_105174
ctctgagatgatcattgttggaagaggttggcctcaggagctttggtgcttgagtcctcgtttcccaagggactgctctaagttgaccattgttggaagaggttggcatcaggagcgctggtgcttgagtccttgtttcccaagggtctgctctggtttggttgcgccttagcagggccatggcagtatcttggttgatatagtcctcgat

SEQ ID NO: 39201 - DNA, 558 bp, Setaria italica
  Peptide Sequence Number=SeqID_105175
taagacctgcaaaacaagaagctactcctatggatcacatatacctgaccagaggacccaaccataatgagcacaaggatggaactcaagtactgtagtgtgtccgagaacaagaatgaaactaacatggtccggtgatgactccttttctgcccggccttttgttaatggtttccacttcaggctatttaccccatatttttcagagatctttcctcaacagaggccagtgcctcaaattgatttgcctgaattttctccaatatagattgcttgcattgttcattatgcaaattaaagaaacttagaagtagaactctgcaaacaatgaatgtcaaacttatgttttaatgacaatagtcctaaccaggtaggatttaacatgagattgagatatctgtattagtgttcaaccagataaacagctacagaatcctatttaacaacaaacctcattgctgaaacaaaacataatcttattggaacaatctgcagatgctagggttttagaatcttccattgctttataaaagtaggacaggtcaggcatccaatact

SEQ ID NO: 39202 - DNA, 506 bp, Setaria italica
  Peptide Sequence Number=SeqID_105176
ttagtaaatagtaggttagtaggacaatagacaagttaattaaactctttttattgtgcttttgcaggattatcattttatacgacagaggaagaactcaaagatgtgttttcaccatttggcaatgtaaaagaagctcgacttatgcgggatagccaaactggaaggttaaagggatttggttttgtcaactattcatcacaagctgaggcggagaaagctgttaaagcaatgcatggaaggattctacgcggaagattgatttttgtggagatggcccaaggacgcaaaagctagtaggacaccctccattgttgaagattgaccattttcttctcagttcccaacaagccggcaaatgggcgagatgttatcgtactgcgcactctctataacactttttactagtgccagaatattttctctctgtaaaacataccttccaagtagcatatatacaagacatacagtatttcctgcaaatccaagtgcttagagatgagtac

SEQ ID NO: 39203 - DNA, 390 bp, Setaria italica
  Peptide Sequence Number=SeqID_105177
atttttgtggagatggcccaaggacgcaaaagctagtaggacaccctccattgttgaagattgaccattttcttctcagttcccaacaaggttgcttgccgaagcttgtcctcccaacgttttaatgctttctgtttttagtttttagttagagcatgtgtcttcccaatgtgctcctttttgtttttgtattttggactgatttatttttacttggaatatctagccggcaaatgggcgagatgttatcgtactgcgcactctctataacactttttactagtgccagaatattttctctctgtaaaacataccttccagtagcatatatacaagacatacagtatttcctgcaaatccaagtgcttagagatgagtacaaaaaaaaaa

SEQ ID NO: 39204 - DNA, 659 bp, Setaria italica
  Peptide Sequence Number=SeqID_105178
aattcccaaatccttctttctgggggagaggagatcatcccgatgatgattcgaggtgcaaggatggtgggtttgtcctctcaggttctgggcatgaggtgcttcagcacggagatatttgtgagcagattatcattttatacgacagaggaagaactcaaagatgtgttttcaccatttggcaatgtaaaagaagctcgacttatgcgggatagccaaactggaaggttaaagggatttggttttgtcaactattcatcacaagctgaggcggagaaagctgttaaagcaatgcatggaaggattctacgcggaagattgatttttgtggagatggcccaaggacgcaaaagctagtaggacaccctccattgttgaagattgaccattttcttctcagttcccaacaaggttgcttgccgaagcttgtcctcccaacgttttaatgctttctgtttttagtttttagttagagcatgtgtcttcccaatgtgctcctttttgtttttgtattttggactgattttatttttacttggaatatctagccggcaaatgggcgagatgttatcgtactgcgcactctctataacacttttttacttagttgtcctagtaatttatttttttctttctttctttgttttaaaaaaaaaaaa

SEQ ID NO: 39205 - DNA, 596 bp, Setaria italica
  Peptide Sequence Number=SeqID_105179
aacatgaggagtgggatgttggccgcgtgcgcgaacagccgcggcaccgcccaccgggcgtacggcccggcggcacgcgcgacggcggcgggctggcggaggaaggagtggaggatcggcgtggcgaaggcgtacgccggagcgagcgccgccgcggtggcgccgcagatgatccacgactgctgcgtgtaggtgcccagccgctccagctgcccggcgccgacggcctgcccgctcagcgtctccagcgcgctgcccatgccaaacaggaacccataggcggaggaatccaagatgttctcgacgacgctgaccgcggcgagctcgacctccccgaggtgcccgacgaagccggtggtgacgaacccgatggagaactggaacacctccgtgaggagcgccgggaaggcgagtcgccagagcaacctggactcctgccagcaccggatcacaagcctcttcataatcagcttgtttggctcattctccggctcatcctcaagctttggacttgatgccatattgtcatggcatggcataggaagaggcacatactcatgtctggagtagaaagagtcttgctctctctttgaagc

SEQ ID NO: 39206 - DNA, 660 bp, Setaria italica
  Peptide Sequence Number=SeqID_105180
ttaagtacttactaaaaatttacttaattactaaagtacctaaacttacgtaaacttgttttgtggaggtccatcttgagcttagagacgatcacagatgacattctcgaagatctaagtgctgtatctgacattgtcaacaagaaccaagattcaaatagttgtaagttggaatcattattgggaagtatgcacgacctttctcaaagacctggcctggcgaagttcctcagaaatgcgatactgcttttgcttgatgttttccctcgtaatcatgtcttggaggaagctattcttgttactaccgaaatgtttgctgctaaagagaattcttcctctaaagctaatacatcgcggtctttggcaaaaaatctgttgaagaaagacagacaggattttttgctttgtgggatatatggacgaactgaggctatgcacaggaactttgaacaagcaaggaagatatttgacatggcgctattatctacagaagcaactactgaggatcttaggaagaaggttcccatcctttatctttggtatgctgagatggagatagcagtgtccattcaagaacaattctgactcaatgcatcgtgcgatttacattctatcatgcttagggagtaatataaaatatagctcctttcattggcccta

SEQ ID NO: 39207 - DNA, 278 bp, Setaria italica
  Peptide Sequence Number=SeqID_105181
gcgatcaatcacttctgtgttttagattgacttgtgttgaccccattttttactggattgctactattggcattaataactgtatgaacagggcatcaattgttgattagtctatctgtactagggacaatgccacactgctcatctttaaattttgacagatgtatgttaacagcagcaattagaactctataaagttaggtgccttggtctcacgtgtaatttaccttaccccggtcttcacttcacagcgttattaactctgttgatcggatcct

SEQ ID NO: 39208 - DNA, 872 bp, Setaria italica
  misc_feature (723)..(723): n is a, c, g, or t
  Peptide Sequence Number=SeqID_105182
acggcggtgagagcttttacccaaaaccatgtttctgattactgaagattgcagtcactgtttccagggaaaatgcaggaacgaaattcagcttctttcttaggttctgcgctcactgtttgacgacaccgaaggatttacagaatcctatcagtgccctccagtcgtctttgtgatcggagccagccatgaacagcatccattaagtacttttacgggagaactagcaaggcaaatctgatcaaatcttgcacaaagccatcccttgtcacctggctgcatcgcttcaatatttatactctgatccctaaagtgaagctgcaccaattcagcatccacttcagcctcttacgtggtaagcgtgtcctcatgatattagccctgtttgcatgaaagttaattcgagattttctgaccatagatttgaatgcacgctgttgttgcagcatctgtgtttatagtcatggtaatgttgtccatcacaaagctcgctctgtcatgcagcaagcaggcacccacagagagaatgtgcatgagtgatgtagctgctgagatgcggcggataagggactgccatgttaaaacaaggcacaagagaggaagctccatgcagtgacatgcgttaggctaggcgatggcgggttcctggcaaaaatatagaaaagccacaattaagtatatatgctccttgccgttttagcttctcaaggatttaaaaatttntattattgggttgtgtctgtgatagtatggaaatgcaggaaatattgtgtcactgaagctactttatgtaaatcggtattattgaggtacaactgtaactgcagtgccattgaaaatgaggcttgattccaccatttcaccttagtact

SEQ ID NO: 39209 - DNA, 411 bp, Setaria italica
  Peptide Sequence Number=SeqID_105183
gctgtgttgcagcatctgtgtttatagtcatggtaaatcgttgtccatcacaaagctcgctctgtcatgcagcaagcaggcacccacagagagaatgtgcatgagtgatgtagctgctgagatgcggcggataagggactgccatgttaaacaaggcaaagagaggaagctccatgcagtgacatgcgttaggctaggcgatggcgggttcttttatgtaaatcggtctttatttgaggacaactgtactgcagtgcccattgaaaatgaggctttgattccaccatttcaccttagtactcgctgcgattccattcctcatcaggtctgacttttttgcctgaagaaactgcggagtaccttactactagaagtccataaaatctatctaagagtagccagcaaccctta

SEQ ID NO: 39210 - DNA, 1174 bp, Setaria italica
  Peptide Sequence Number=SeqID_105184
cgctcccgccggaggcgcgcggcaaggtgccctgcggctcgtcgtgcgggtggctggcgctcatggacgaggccgcctccgtcacgctgctcaaccccttcaccggcgccctcgtcgagctccctcccgccgacgaaaacattgcggccgcctccacgatgcagacgatgctcgtgtccaagaagggcggccggtgggtgctccaccccgaggacgacaatgccagcgccatcgcgctagacgagatgaggcaatttttcttcaacgagatcgtgctctccgcgccgcctgacgccgacggccgaggctgcgtggccatggcggtgctcgcgggctccacggaggtcgccttctgcagggtcggggtcgacaccgcctggacgctgctgcagaccaacctggaatgcaccgtgggctccgtcgtctactgccaagggaggttcttggcgatcgacagcaccggtgagatctccatgttcagcgacatcgctaacactgtaactccaacggcgacgccgatgccgtcgctgtcgccacctgaggatctcagcaaccgcagctacctggaatggaacggcgagctatacgtggtcggagccatgctggatctgttccgctggggactgaaattcgactaccgcgtcgtagtctgcaggtgcagcaacctcctggacccgacgccggcatggtccagggtgaaggacgccggcgatctgacactgttcgtgtcgacccatttccgtcacagcttcggtggaacaagcgtctccaggttcaagaggaacagcgtctacttctcggaccctccgtatggtgatcaagattacttgggccattctttggagatcgcaaacattgccaccggcaaatcggaagtgacgaagcctttccaccccaaggtgcaaggtttcgaagctctgggttggatccggccaaatctctggaggggaagaagaggggacgtcgaaccggaggaaaatccacaagaggaagcagctcccggtcccgctcccgcctgatgctcaacttgaatcttcaggggaaggcaagcttgagaggatttatattttgtcagagctgctgctgccgcctcatgttgttccgagaactagataaaagtctagacaagtcttacataaagaacaaacatagttcaaaatagcggacatgttcg

SEQ ID NO: 39211 - DNA, 369 bp, Setaria italica
  Peptide Sequence Number=SeqID_105185
taacgcccttgtcgtccgtcctgggcttctcgggcaccttcctccactcatccaagagcttgtcgacgaacgtcgccgacggggaggttcttgaacttgttgtccgttgaggcacatcacgtagcagcctttggcgtgccatgcgccccacatgacgatgcccctgacgcccgggtgcccgaacccctccctcatcacctcctccaggtactccacctgcttgggccccttggtgacgtcgacctcggtgagccagacgggcacgtccgccgccgccagcgtgtccagggagcccctcatgtaggggatgttgggcttgtcgaagtggctctccaggccgatgccgtacttgaggcccttgttgccggg

SEQ ID NO: 39212 - DNA, 287 bp, Setaria italica
  Peptide Sequence Number=SeqID_105186
gaataatctctaaaggctaggctcccgtccacggcgggcagcggcgaagcatcggccgcggttgggacttgggagctagcggagcagagggagtgagcgagggaggtgggtgatggcgtcgcggaagtcgccggtggcggcggaggagcgggtggggaagcagggggagggggagggggagggggggtgggagcggtgcccggtggaggaggtggcgctggtggtgccggagacggacgacccgtcgctgccggtgatgacattccgggcgtggacgctggggctgg

SEQ ID NO: 39213 - DNA, 456 bp, Setaria italica
  Peptide Sequence Number=SeqID_105187
tcacccgggcggtagtacagctcgtagcggtcggacgtgccggggagtgaggcggaggcggccggcgagcgggtagaaggcgcggacggcctgttgcaaggatttcttgaggttggagacgatggtggcgacgtcagcgtcgggagagaggcggtagaagaagaggcgctcgacgggtggggagttgagccagaagatgtcgaagaaggtgagcgggagagaggcctcccgcggtgatggagacggcgacaccaaggtggtgtcgtggacgcggatgcgaggtgatgaggatgcccctgcaggttgctggtgctgctccggcgccacagccatggccgtcgcgtccgctgatatcaacgtcgtcggactcggacgtacttgccgcaaggagttggggacgattggtgcctagaagcctagtgagcaaaaaatttgcaagagagaagaggtgattcg

SEQ ID NO: 39214 - DNA, 603 bp, Setaria italica
  Peptide Sequence Number=SeqID_105188
ttctcagacgacccacatctttttccatccaaaggatataagagcgcatttgacttataatctttgctccttggggtgttccaggctctaacaaaaccaatacatcacttgtgaggtcccaaagctggcgcactattgttattcggtcgctcaaagaaggaatctctccaagtgcgtaagacgatattacaagatcatgccctcgctcatgtttttctatgttgcggttcaactcttggatgctatcatagctgtggatgagtggcaaccccttcaaattgtcaagtagactctgccctgctctctgcatttccttggaaggctcgaccaggttaacccgctctattgatttttggccacactgccctcattgcccaaagcgctgagcttggcccggcaccaaaatccaacaccttggcaggcgcaaactctggcaacctccgtcgaacctcgcgcagtacgcggtggcatgcggcgtagatggcgggcatgcgtgacgcgacgtaggcgactgtctcgtcctcgcggtaccggaggccgatatcgccgtacgcggacctcaccttccagcgcgccgcccgctgctcggcgcccgagggcgcg

SEQ ID NO: 39215 - DNA, 720 bp, Setaria italica
  Peptide Sequence Number=SeqID_105189
gtattgatagtatccacagagttcattgacgaagcttgatttacttgtgtctggagcataacgggtggtttcttatctggcaccagtgtcaagggtgcagtcccgtcaagcatcttgactacccttcgcatgccaggccgcttcctgcagtctggatgcacacaagagagacccacaagcagaacccgccgcatctcctctgcaacaaatcggccctgaagccgctggtctgcagcatcaaccagcctccgacgaccccatagaacccacacccagtcaacaacagagattcccctctctgtgggccttcggccagtggccacctccagagcaagcacaccgaaactgtacacatcagaccgctctgttgcaacacctgaatgcacatactctggagcaaggtagccaagtgtgccagctggctgtgttgtgtgtggtaatccaccgtggctcactaaacgagcaagcccaaaatcacccagtcgggcattgaactctgcatcaagtagcacattagatgacttgacatcacgatgtagaatccggtgatcacacccatcatgcagatattcaagcgctgaggcgataccaagcactgccctgaatcgtgcctcccagggaagtgttgctccacccattgtgtgcagtgcacagtcaagattcccattgggcatgaactcataaacaagcacgagctcatccttactgcagcaccacccg

SEQ ID NO: 39216 - DNA, 1625 bp, Setaria italica
  Peptide Sequence Number=SeqID_105190
gcaaggagagcccccgctgattcgcaagcgaattctctggctggtgttcgtcacttgttctctgctgctgctgctgtgtgtgtctgcttagaaagaaggagagggagagatggcttgccctgcgcagtccatgctctccgccagcggctgcatcttcctgaggagcaagcctcaggcgagcctcgtgcgaggcggcataatcggcggcgttagcagcagcaggccgttcctgctctcgtgtaacgcttcgtcgtctccgtctccttcgtcgccgccaccggcgccggcgcaggaggactccgactgcaacgaggtggagtgcgctcccgagaaggaggtcgggagcctgagcgccgagtggctggcggaggagaggaccagggtcgtcggcaccttcccgcccaagaagagaggctggaccggcctgatcgagaaggacaccgccggccagaccaacatctactccgtcgagccgatggtgtacgtggcggagagcgccatcagctccggcgcggcgggcacgtcggcggagggggccgagaacacggccgccatcgcggcggggctcgtcctcatcaccgtcgccgcggcatcctccatcctcatccaggtcagcaagaaccagccgcaggtggcggaggtcgcctacaacggccccccgctaagctactacgtcgccaagttccagccggcgcccgcgcccgcgccggccgagaccctcgaggcccccgcccctgccgaggcggtcgaggcttccgtggcggcaccggaggcagagcagctgtcctcgtgagctgatgttgtacttgtacctcaaaattcagttttggggcagcttacagatgagcttgtagtgcatgatgatggaagatatatacatggtacttgagagcatttcagaattgtataagtttcgtgtatatatacaatgcgcttatagtgcttatatgaaacatcacacggcaatcgcacaaaccaagcatattgttcagctataacacgatgaacgtaccatttttcacacaaacatcgccctctgacatgcattcccaaggatgaactcttgccgtattctgatctgcatcagacattattcatactgccccaagaagattgaaatcttcatactccgatctgagcccccaaactcttgtgatcgctgtacaatgctgttgccacaatcgtattaagattcagtgattgaaacattcacaacaactgcctataccacgggccatggacctgttctgacaccattgctgctttcataagcacttcagctgccttcactactcgctcagtgagttttgttgccccgatgcgcctcagggatgcatcggccagcttcctgcctttctccccactgccacccagggtgactgcccggaacgcacagtacacggactgagagaccttcttgaagacagtgtcatcggtctggaggcttttaaggaagaccctagtcaaaatctgcttcctggtctcaatcattttgtttgacgaagagctcgttgaggttgatgaatgcatcatcgcctcaatgatcttttcagtaccaacatctacaaagttgtctagtagactggtgagcatgttgaatagttccaaggttacattctccagtt

SEQ ID NO: 39217 - DNA, 1076 bp, Setaria italica
  misc_feature (1)..(21): n is a, c, g, or t
  Peptide Sequence Number=SeqID_105191
nnnnnnnnnnnnnnnnnnnnnggggacaagtttcgctttcagctggtacaccgttgaaagatacatatatatacaagaatgcaataggactgcgacaaaaggacggtttggaactaagggtaaatacagaaaggttcacatccatctttacagacgaaatccggcacacaaactatctgcgatatagcagtcggaatcacacgaagcgctctctagctcagggtggcaaacagggccacgttatttcgtgagggaggaggttggcgtcttgagtctcagaagtctggtccttgctggaagaactctaggtctgggtgggtgctcccgccaggaggccgccttggacgcctaacaaagcttgatggttcaaatcctggaacaccaggtgggccaattggatcatagcgaccacccggtggaacactcccagggccaccaaatggggcagggaagggatttgaaggaaagaagcgtggatcattcggaccaacatgcatgctgccaccactcccaatcccaccgtgagggtagaagcctgcaccaggcccaggaaacaggtcatcagaaccaagtggagctattggaggatatattaggctgttagggtcagtagttctaggacttggattttcagagctgtgtattgatgaactgctctcagcatcagtgttcttggcagcagcatcagggttcttaccagccacagcaccatcatccttcccatccaatttgcacagcacatttgaattcacagtctcaatgaggcctgcaaaattcttgtacatatccccataattcttgggctgctcttcggagaagaaatctttcacgttgatctggatattgtacgggcccttatcttgtgcctcaagatccagaacatcaacagcaagtaattcaccgatcaccagacatttcactagcacccgtttcttcttgcctttctcctccttgctatacaaaaacgcgtagcagttctccatgctgttccaaccatcgattcccacctcctcatcacctgagggcggggggtcggtgagcgcgtcggggccgccgtaccatcgtctagtagtcgt

SEQ ID NO: 39218 - DNA, 427 bp, Setaria italica
  Peptide Sequence Number=SeqID_105192
cttgaacaaggatgccgcctccactgccagcttcgtccaagggtttcattcccaatgatggcttgatggattggtccagtcagccagcagggaggggcggtacaagtctgtgtttcagatgcaatcggcctgggcactgggctaaggattgctttgtccgagccacttaatgcatcggctcaggcaatctcaggcaggaagtttgcttttgacttaaaaaaactatcagatcagtagtcctctgaactttggtttgcttattatcagtatggcctcctacgttatcatgtacagtagttatatggtcagtgtgccctcgcctcctcggctagcttgcttttaccattctggaacctttgttagtatatataagcactttatgtttatgttctagactatttgaatgtaatgcccttagtgttatact

SEQ ID NO: 39219 - DNA, 514 bp, Setaria italica
  Peptide Sequence Number=SeqID_105193
ctcaagtaggagattgcaaggtagccatgtagtgtagtggtgtcatggtaggatagccatacaaagagtgtgcaagtgagtcttgtatcaaattgagtagtgaataaatgtttgagtttccttgttgcgagttggtctcccacattggtgtcagtgcgaaggtcttctcgaagtagtgtgggtaagggtctataaaagaagtggtagcacactactttggtatcacttttaggaagtcggtgtcaagttcggagcatcaatttctcaacaatatatataagactccaaaaactagtagaagagcgaatcaattaactttacctgataaaagaggcgaatttcacgatgtcaaccaaaccaaaacgataaagaccaaccatttaagccagattcgattagatctagagcaatagaaagagatgcacatgtgtatcccaccttcttgacacgcggtaacaaggtgcccacctccgccgcgaaggccactggtacaagctcggtaaagggcatccat

SEQ ID NO: 39220 - DNA, 414 bp, Setaria italica
  Peptide Sequence Number=SeqID_105194
gctttcacagaaaggcatggaatagcttagagggatagtatttaacaaagaagcacgtaccggtataggcatctggttaggtcaacaagttgttggttggcattcaaggtatgtgtaactttgagaaacaggtgctaggtatgaacgagtaagctactaaaaataggcgagatatggtttcaatagcctaagagtggcattcatggaaagggattcacagataggcattcagtgggcatgggaaagtcaagttatgtatgcaagagacaggtatgcacggaatagggataagcgagcactgggagagatatgccagtaataggactaggtttagagaaataggcatatgtgaatagggagattaggagaacaaaggaagaattgttgaccagtctggataagttggagctttag

SEQ ID NO: 39221 - DNA, 167 bp, Setaria italica
  Peptide Sequence Number=SeqID_105195
ggaatattttgtgttgctaaatgtaacaagagcttgagattttgttttgcatacgttgaaggtgatcaaaatggtttggcgcttggtaaactgcatgtaaattgctgcatcactgggtaaactgcacattatcggtgaagtacaatttttgatcgggttgatgcgtc

SEQ ID NO: 39222 - DNA, 487 bp, Setaria italica
  Peptide Sequence Number=SeqID_105196
atctcaggttgcagcacaaaacacaaatcttctaaattattttgttagaaaactaatactatgcattcaattttcaaattgataaagcatagataagtcacaaaatttgcagtagctcaattgaaaactcccatgccatgtcaatgaacgatacaatcaacaagagaacgatatgatgaggtaaggcaatagcatggaatgccagttttagtttaaagtcattggaaaagaagtgccatcaaataagataaagatgtgccaggttgtaaagagatacattcagtgttatttccaatcatgagatgctcataacattaggtttactgaattacaaattgattcctattttttcactcctctacattcctgtatcgactagctaatatacattctccaccacagcacactttcagaatttagaaattgtcagagttgcaaaaatcaaatcaaacttcatagctcaaaccatcaaggcaaaaacttcatg

SEQ ID NO: 39223 - DNA, 602 bp, Setaria italica
  Peptide Sequence Number=SeqID_105197
gaatgcatgtcaacttgctcacaataacccaagattctgacaaatgtttcttgcaccttggtacgtccacctattcttatgtctccttcaatatatcctccggttttccttcctgccagtacatctagtagtgttgtcttcccagctccactgacacccattaacgcagtaagaacaccaggacggaatacaccagtgacactgttaagtagttgaattcttcttacagggtagccttgttttagcatttcctttggtgtgtcaacatagtagttcaggttgcggaatgtaagtgcaagttgcatagtaggcataaccatctttgcttcttgggtcatgtttgcacgatcattagatttttttgtggatatcaatctcttcttcctgtccgttaatgcagcactttctaggaatgcttccattatattcaatagctggagcggatagaagcatgctctgtttcttcagtaaataatataatttatagtatcctatgcacttttagtagtgaacttacgctttctataagctaacgctaatccaaaagcaatgtaaaacaaaatgatgtatccaagcaacgctccaactgattattccaatta

SEQ ID NO: 39224 - DNA, 626 bp, Setaria italica
  Peptide Sequence Number=SeqID_105198
ttttaaacgttttactttttacctttaaactttagaataataccaataaaaataccaattgtagtagagaccatgattagtcaagatttgattccctattgttttggtctgcatagtttccttttgccatcttggtgctaagaattcatttatggccatgctgatttgtgcataggccaatggagatatccaaaaatccccagcttaaccatcctggcatagatgctggaatatacatataacagtaacatagaagatcaaaagtgttaagtgatataggatgggtctgtaagtgcgctttctatgatgatagttatcttacatttggaaagaacgaagcctccaaacactaggaagactgctagggaaataaattggtagaagaaagtcaaaatatgtgtttgagcataagaagcgataaatcgatacgatgatgatactgattgatggagaagacaaagtatcagaaattggcagaagaacctggaagctgtagctgtgtaaccaataccataataagtgatgcatatccacacaattgagtctaataaggagatagggaccttcaggatcgatgcaggtattagcataagcccatgaaggatagaaataatatctttttttgt

SEQ ID NO: 39225 - DNA, 496 bp, Setaria italica
  Peptide Sequence Number=SeqID_105199
gcctgttcaattgctgtgaagatgcacatgaagtattcatgcatcaggctctttctttttttctttttggggcattagccttaacgctcaaatttgtgtactgtaacccaattgtgatgccaccaaaggagcagctccaattcccaataaaagtcacaaaatagttgagtggtatcatatgaaagatcaatcaactgtcatgtagccacattcctgtagccactacaattgtgcacgcacgcgcgcacacgaacaccgtaatttcgtagtgacatagcacttgtatgacattttgtttgcctaagtttgccacagttgtggcagtagccagccacacaaaagattaaccacccttctgataagctactaaacaaaccctataaccggcagatcacaactcacaaggttcagaaaaattgtagctggcctttaattaggtcacatagcaaagcactggtatgaaaggttaaactttactactcactgcttacggtct

SEQ ID NO: 39226 - DNA, 229 bp, Setaria italica
  Peptide Sequence Number=SeqID_105200
atgagcctttcttcagataccttttcagatattccaccagtttgagcagctctcagcagaacatcctccacccctctagctttgtcaggtttgaccaaagctatgcgggagagcctttctctggcttcagaagataatatctgggcaagcatcatctgtcggcgttcctcagctttctgtggcatccattctttgctaggtgcggcttatgcttgtccttgctcctgct

SEQ ID NO: 39227 - DNA, 870 bp, Setaria italica
  Peptide Sequence Number=SeqID_105201
ttttttttgtttggccacgagcaactgcaacgcaaccaaaattacgatactgtgcggcggcaccacatagcacaggaagaactcgaccacaacaatacgaggctgggtcgacagggtaggagcggatacagacattttttaggccattaatgccgtaacttaggaagaagaacaaagtgtttctgggataaacacagccaatatcgaccgtcctcaatgggcacaccaataagacttggatcatatacaaccacagatccatggaataatctaccaagttttcatggctgatgatggtcgccccagatcatcgtttttaagcaaacagttcagtgccgctattgatccatcaccagcgcatcatacaatagcaggaagcgggtcacatctaatcgtcgtcgtcaaggacacttcgacgcctctgaatcgtaactttggtttgcttgcttgtgtgggtgttaatttgctccagaagtgagatgagcctttcttcagataccttttcagatattccaccagtttgagcagctctcagcagaacatcctccacccctctagctttgtcaggtttgaccaaagctatgcgggagagcctttctctggcttcagaagataatatctgggcaagcatcatctgtcggcgttcctcagcttcctgttttgcatcttcctgagctttttgttggcctgcattttgctgatttgccccaccacgttgtgccattagctcctgcatcctcctctgcctgatagcttccaactctggatcagccatcttgcgccccgcagcagggatcgcaagcctcttcactccggacctcacttgagcggcgacggcctccgcggcgagatgttagcagagaacagcga

SEQ ID NO: 39228 - DNA, 674 bp, Setaria italica
  Peptide Sequence Number=SeqID_105202
ccaataacatgattggagcccaaaacatggtaacacagatctgacagggactctatccacatattgcagctaacttcactttaaacatccgtctaaccaaagaaccaaatcaaaattcaggagagaaattaacagactccactagttacagagtaaaggaattttcgcaaagtgtttcttccaactccaacaggtagacttgcagagttgctttgaaaaattaaaacacataaggatccaagctatagagacaataataaactcaataaaagatgaaacatacaggacaaaactagtacctccagtaaccgtttgagtgtaaatgatttaaaacagcaattaaaacatcaaaagtgtcatcaattgaacttcgggagagcctttctctggcttcagaagataatatctgggcaagcatcatctgtcggcgttcctcagcttcctgttttgcatcttcctgagctttttgttggcctgcattttgctgatttgccccaccacgttgtgccattagctcctgcatcctcctctgcctgatagcttccaactctggatcagccatcttgcgccccgcagcagggatcgcaagcctcttcactccggacctcacttgagcggcgacggcctccgcggcgagatgttagcagagaacagcgaatcgagccttttcttct

SEQ ID NO: 39229 - DNA, 579 bp, Setaria italica
  Peptide Sequence Number=SeqID_105203
tactcctgatgctactgtatacacagtgctgatgaatgggtactgcagggctggtcagtttcaagaagcatggaaattatttgatcagatggtaaaacttaacattaagcctgatgtagttgcatacacagtcctattgaacggtaccctaaaggaaaccatacaaagagggttgcagggctttgctaaggagaggaggcgctatcttcttagagaaaagcatcagaagttgctgagctctatggaaggtgaggatatcgaacctgatgtacaatgttacacggtattgatagatggacggtgcaaggcagaatttcttgaggaagctcgggtactgtttgatgaaatgtttcagaaagggcttactcctgatgttgacacatacagagtgctaatagatggatatcgtagacagggagaaataagaaaggctgaggttcttcaaaaaaatgaaagataagactcacgagtccagatgttttagacatacagagctcttatatatggatattgtagccagggagagagagcgaaggctgacgatattttcaagaaatgaattacaaaataagaaaacaa

SEQ ID NO: 39230 - DNA, 810 bp, Setaria italica
  Peptide Sequence Number=SeqID_105204
tttctttccgttactttcttagttgttgtagttagttccttgtaagtcttcgtagtagtccttactcattcatacgatgttcattcccgcggtcaacttagtgatgccgccggcaggagatttcctgaagctcgagagcctctcccttcgttcatgcgatgtcagcgtcgatagcctgcttccacgctgccctaggctgcgcaagctttgcatccagaggacgagaatcctctcaataactggccactcgccatcgcttgaggagctggatgtgacaacacatggggtgcttctgcgtgtcgacatcgaggccccattgcttaagaagctaagcatctatgccgttgtgggtatcagcaatgagtttagcatttcatactcagcaccaaagctggaggagctgtcatggatgtgcgggcacaattccaaatcaggtgtcggtttggggatttggcgcatgtcaagcttgacattggagacccgaaagcttcttggagacaagcagcttgccgatgacaaggagagcacatgcttgcagccgcagcactgccctcgcgtcgatacggtgtcagtgtgcatatggactcgtgctcattacaaagatgcaacccgaagctttaggcaacatatgtcccatttaccagttgccaatttttctattttggagctggacatcttgacgcgggggcatgcctatggaggagtagtgctggatctgcttatgatttgtagcactgtacaaagtcttaagatgaagctacgtgaagtgggccccggtagaagaatgcttagtagattgcacttgtgatc

SEQ ID NO: 39231 - DNA, 335 bp, Setaria italica
  Peptide Sequence Number=SeqID_105205
agtaggtgagtcgaagaaagagaagtgcattgtgatgtaaaaaatatcttcgaaacagaaggaaaagaaaaaaagaagaagagataagagatgcgttatactgtagagaattggttcctttgcggaggcagtgtccgtttttcgccacctttgaggctttccccatttgagcttctttggtttttctatgttgttgtctctggtgcatgtaaataacatcgacaaataaagtgtagaaacagatgctgtcaaaatgatagcccggtgcaacatgatttgattcgtaacccaactaaacctgttcgtttaaaggttgtgacttttccataaaaaaa

SEQ ID NO: 39232 - DNA, 476 bp, Setaria italica
  Peptide Sequence Number=SeqID_105206
ttaaggattttaggaactaatctattctacagcacacagtagcggtttttaaacgccaatgttgaagccatagtttgacgttgtatctgttacaaatcttatttggtgtttgttttcctttataaatagaaatgcattcacaactttgtattgcagttctgtatgcttattatttttaatagttttgaaatgcaatttctattattaatggaattcaatgttcatgttttttatttgtaggtaataattgtttgtggaggatcgtatagacgtgggaaagctacttgtggtgacatggatattgttataactcatcccgatggagaaaggtataccaaaaagagtttggatactttatcctcttcactatcttatattttttaaacacaagagtagaaaatgttctatttagcttttaaaattttcttcagtcatgtaggttttttacccaagtttgttcaacggctgaaggaaat

SEQ ID NO: 39233 - DNA, 457 bp, Setaria italica
  Peptide Sequence Number=SeqID_105207
taatatatgagcacagggcttgaacctaccagcaatctggatccttgaagcagtcatctgtcatgagatataaacagattttatcgaggaaggcatgctttgcagaacaggccgtaaaagtggttatctccgaagtagtgcaaagaatactatgcatcaaatattttgttccaaagctaggatatgtaagactaaagggtcatgagcttacagctgcaacgtagagaataattttggtggctaatactactaatccaatgaacttttcattggaacaatatttcaatggatattttctcaggtctaatagacatcagataaattatccaatttaaaatgcactcattaataaagatctaaagtttgtaccatagccagagtgcttacagggcatcgaagattcacagagacagaatcagccacaacttcaatgtcactatcactgtctgcattattt

SEQ ID NO: 39234 - DNA, 836 bp, Setaria italica
  misc_feature (1)..(20): n is a, c, g, or t
  Peptide Sequence Number=SeqID_105208
nnnnnnnnnnnnnnnnnnnnattgataatcttgaacattttcttagtgtctgcaatgcacccggtggctttattttcatatgtacaaaggagcttcgacaaaagtctggacttactaatcgtaataatatagaacatggcatcattcgtctttgaaaatactacttacttaatacagcatataatctacaacctctactaatatatgggaaacggaaaataacagccagcgatatcccaaaaattcttctatttttattgtactgcactggccttcagaattgtcggcatggccctttcatgaaaatatttggcggaacaatgtacttgtttccatctttatcattccttttagactggcgaagctttcagactccatggaatagtgaactgatctggcagccccctgtacagctttccgagagacccgacggcagcctacaacggtcagagactccaatttccatgaacgtgccagctcatccatcccattatcagttactttcttgcattgtcggagagtgagactgctcaaggatggcgtagacgtgatgcaactgatcccagcatcagtaatcctttcgcaatccacaagctcaagtgtctccaggaagtgtgcggacgagaggcccttcattccctcatcgtcaaaattgttggcgccattaagcatgagaacacgaataggacaagactgaaccagcattacaataccctcctgtgtgaagcctatttctgatggatacctactggaacaaaatgtaaaggtgagctcaataacttcaagcatatggcaggtcagacctagggccttaaggctttcatcagtcagtggtg

SEQ ID NO: 39235 - DNA, 1014 bp, Setaria italica
  misc_feature (971)..(1014): n is a, c, g, or t
  Peptide Sequence Number=SeqID_105209
ccaccggtcacgcgtccgccggtgacctacccgccgatcaccggccctccgacgacgccgccggtcgtcggcccgccggtgacgtacccgccgatcacgggcccaccggtcacagtccctccgatcaccggccccccagtcaccgtccctcctatcaccggcccgccgtcgacgacgcctccggtgaccggcccgcccgtcacctacccgcccggcggcggaggcgggggcagcccatcgacgccgtgcccgccgccgcctccctcgaccccgacgacgccgtcgtcgccgacttgcccggcggactcgctgaagctgggggcgtgcgtggacctgctgggcggtctggtgcacgtcgggctcggcgaccccgtggtgaacaagtgctgcccggtgctggaggggctggtggagctggaggcggcggtgtgcctctgcaccaccatcaagctcaagctcctcaacatcaacatctacctacccctggcgctccagctcctcctcacctgcggcaagacgccgccgccaggctacacctgcaccgtctgatcgacaagttcatgcaagtgacatacgcatgctagagtgactctgtgtttctacgtgcaaatatgcaggggttttgttgtgggtttaatttctttgctagtttgaagagagatggacatgagaggatgccatctgcttcctagctaggctccggaagaggatcgctctagctatgcttggttgtttaatttctgtcgtggtttcgttcttaagctgctcagtcaatgaccggcagctagcttgattatttgtgtggtgtggttttcagtttgatgcatgcaagatgcatggtgttgatgatggttgatctctattgccatgaggtcatgagatgaagaaagttaggagacattgttgcgtaatgtctccaataatttgtgcaaaaaaaaaaaaaacttctactacttgtagttcggtagtannnnnnnnnnnnnnnnnnnnnnnnnnnnnnnnnnnnnnnnnnnn

SEQ ID NO: 39236 - DNA, 517 bp, Setaria italica
  Peptide Sequence Number=SeqID_105210
agaacaatatcattcaaatggttggccgcaacaactattctgctgatagactggcacaggtgttcaggatcactgttgccaatcatatggtcgaggtgcaagcgcgtgtgctgcctccacctgtgctgaaataccatgaatccggaagggagaaaactgtggcaccaagcgtcggggagtggaatatgattaacaagaaaatggtcaatggtagaactgttgacagatggacttgtttgagcttttcgcggatggtacatcatgatgtagtcagaatatgctatgacttggttcagatgtgcaagtccattggcatggatttcaatgcaacaccagtgatagaagttcagtcagcttctcccaacaacatagaagctgctctaaggaatgttcacattaatgctcccaatctccagctgcttattgtgattcttccagaaatttctggtcattatgggaaattaagaagttgtgtgagactgaacttgatatagtatctcagtgcataatccaaagt

SEQ ID NO: 39237 - DNA, 670 bp, Setaria italica
  Peptide Sequence Number=SeqID_105211
ccaaccccaacgcagccttttcggacagggatcgtttgaagattaagaaagccctgcgtggagttcgtgttgagaccacacaccagcagggcaaaaggagcatctacaagataactgggattacttctgtcccattggcacagctgagcttttcttgcaatgatggccctcagctgactgttgttcaatactttgagcaacggtacaagtaccggttgcaatacactgcttggccctgcctgcagtccggcaaagattctaagccgatatatttaccgatggaggtgtgtgaaattattgaagggcaaaaataccctaggaagcttagtgacccacaggtggccaacatactgaaggcaacctgtaaacgtccccaagagagggagaacaatatcattcaaatggttggccgcaacaactattctgctgatagactggcacaggtgttcaggatcactgttgccaatcatatggtcgaggtgcaagcgcgtgtgctgcctccacctgtgctgaaatccatgaatccggaagggagaaaactgtggcaccaagcgtcgggaagtggaatatgattaacaaggaaaaaaatgcaaacaaaagatttgtgttcctagagttggcttttgttggacttggaatactctacctactgaggttcactttatgtttt

SEQ ID NO: 39238 - DNA, 436 bp, Setaria italica
  Peptide Sequence Number=SeqID_105212
gcattctaatgggtctgagttcatacgcagcgagttgcaaatacgtgtctctaggggcagttcttacattaggctctttgttccgaaatcctttggggtggaagagggtaacgtatcatattgaacatttgttaagtgccactggtgttgtgcacacactgtgtagaggatgcagccaggtgggatgtgtggatcctgagtgctgaacaggtaacagtaacgagatgtcctaacttggaagctgagatgtggggaagacaagggttgatgaatgagatggatgctaaatagaactctgaagggggaaatcaaaccctattagaggtagagaagacttagatggtattgaatgtatcaagagaaacagagaccgagggcaagaggaaagaatgaaagaacaaaaggaaggaaggaaggaaaagaaagaaaagaaaga

SEQ ID NO: 39239 - DNA, 492 bp, Setaria italica
  Peptide Sequence Number=SeqID_105213
aatttaagccaagagtgagttaagtatataaaatacatccttttaaatcttatacacagaccggaaggagaccacatataaggctttaagctttctcacagccaagggaaatactgtcagttccacaattaggtttccagaaggcaaaaacaaatggggataataaacaagggaaacacaactataccaggtgctaaaaccaaagaaaaatattttctagatattgtcagagagagtaaatatagcaacaagtttcatggctcctataaatcccttaatgtaggcccgaagtattataccacaggggattctttaaggaaatctgaggggaggaaggagccatggcatggggtcaggggctggagagggtggggagggggtgttctaggccctatccaggggcaaaaatgtcacaacagttggccttgacattgaggctcattaccagggtgaccatgtaatttattgtctaactcaggacactttgagaat

SEQ ID NO: 39240 - DNA, 410 bp, Setaria italica
  Peptide Sequence Number=SeqID_105214
gtggctttctacttcatcggcatgccgctggcgatcttcttcgccttcaagctcaagctcaacaccatgggtctgtgggctggcctgatctgcgggctggtatgccaagcctgctcactggtggtgatcaccgtccgcaccaagtggtcgaagatcgcggaggcgatccaggaggagaaggccagctacgggatcgcatagtacggggagtttgtaattgctgctcgagaagagactatggctgagatgccgttccccgtcttcgcatcacggaagagaatcagagaatagcatgcccgaggtagacagtaaaacgacgcgtgagctttttgtatgtccagctcggccttctattgaacaccgttggccgacaattttgtttccactagcatgctaacagccttgaagac

SEQ ID NO: 39241 - DNA, 292 bp, Setaria italica
  Peptide Sequence Number=SeqID_105215
cggagcgtctgatcgcagcacttgagcaaaatccgcagcacattcttcatagtcggccgtgtcaatggaaaggttgcggtgcattgcacgcctaggctgaacacagtctcaatctcgctagggtatcctgcatacctgatgcttttgtctataacatcgaggatggccgcccctgattggtagtggtgccgagcccattcggccaggcaaccaagctcgccgccatcgttggccttcttgccggttgtgagctccaagagcacgactccaaagctgtagacatccaccttct

SEQ ID NO: 39242 - DNA, 519 bp, Setaria italica
  Peptide Sequence Number=SeqID_105216
aaggtttttaggtctcaagattacaacgctattatgtactgtcttaaacagttctttgagaaggttgaggcaactaaacctacagcaagtcggtctacatctgctgaaatttatatcatctgcctgaaatataaggctcccgcaaagattcaaccagaactccttgatataaagcacttgttcagtgtggttccggatacgaataaatctagggatgttatggatggtaggcacaagagacatcgtgatgggtatgaagaagggaatacaacattgcggaaagtcggtttggcatcagactttatatggtctgatgcccagacaccactggagtttttgggctcttacaatgcgatttcatttgataatccagaatctctgcccataaagaatcatgagcttactaatgatgatataaaaaatttctagtgaggatttacttctgtttggataaaaatagtttcaagcatatcttgaaatggcggatccgcttacgcaaagcactggcttcgtcatcac

SEQ ID NO: 39243 - DNA, 878 bp, Setaria italica
  Peptide Sequence Number=SeqID_105217
tcgcccccaagggtgcctttatcaccaaggtttttttttctcaagattacaacgctattatgtactgtcttaaacagttctttgagaaggttgaggcaactaaacctacagcaagtcggtctacatctgctgaaatttatatcatctgcctgaaatataaggctcccgcaaagattcaaccagaactccttgatataaagcacttgttcagtgtggttccggatacgaataaatctagggatgttatggatggtaggcacaagagacatcgtgatgggtatgaagaagggaaatggcggatccgcttacgcaaagcactggcttcgtcatcacaaatcaccccaaaggttgatgatgatgcagagaccacaaaggtcaaggatgatgatcaacttctccaagagatggaagaattgacaagtgttattgataggaataaaaggagagagaaaaagcgcctgtcaaagcgtcgagcaaaggataaagcacgcaaggctacaggaatgcagattgacgctacaggagatgattacggtgatcctgacttgttttctatcagtgttatcaagggtggaaaagaacttcaagctgttgaatcagcagagcttgatgtggaagatgacattgaagacagtgagaatgaggacatggattctgatgaagaacaacagaggtacgatgcacagcttgaggagatgcttgatgaagcttatgagcgctttgtaacgaaaaaagggtggtgaagtaaaacaagaacgtaagcgtgcaaagcgaatcaatcctgatgctgatgctgacttgttagagggtagtgaagatgatggtgatgacgttgaaatggatcaaggttttgacgacgatcaagatccggagaccaa

SEQ ID NO: 39244 - DNA, 322 bp, Setaria italica
  Peptide Sequence Number=SeqID_105218
ccataaagagtatgccaagttgactaaagctaaagcaaagatatttggaagcggacgacttgagtagaacagcaagtgaaactggatagcagttagtatcacaaagaacacttcagcttgatgaccaaacttctttttcacctgaactcgaagaagtctcaaactcaacaaggtaacaaaactcaatagtaatcgaactgtaagaagactataaaactttggaacatgaagtaaacgcattacaaagactgctggtgatgagaaaatagagataacaaatgctcctataaacgttcgaggaacaactccaggaattcctaaa

SEQ ID NO: 39245 - DNA, 671 bp, Setaria italica
  Peptide Sequence Number=SeqID_105219
tttgttacctgaggtttcttcagttgcatcaatgagaggggatttgcaataatatatgtaaacaccaacagcatcaatgatgcaactgaagaaacctcaggtaacaaagatgaagaaacctcaaagaacaaagacaccacttccgcaccaccacgcaccatcactggacagacctctcctatcatgattggaatgtggggtgggatggaggggaggagtttgatgtcacagagccaccgaagcgcctcgacagcgtgatgattcgagctggtgaaatcatcgattcatttggcttttcctatattgatcaagctggtcagaagcacactctaggtccatatggtgggaagggtgggaagcttaccacgatccagcttgccccaacagagtatgtgaagggtttctccggaacaactggacttatgttggatcacaggttgtagcgtcgctagcgatcgaaaccaacttaagggagtatggaccatatggagaagagcaggacatgcatttcagcattcccctccctaagaacgctagcgttgtgggcttctttggaagtgctggcaaccttcttgatgcaattggcgtttacgtgatgaatggttccatcccaaactagttgttgtagtctagtcgtcccgttaaaaggttcttacctttaaattaattaa

SEQ ID NO: 39246 - DNA, 595 bp, Setaria italica
  Peptide Sequence Number=SeqID_105220
cgttccctcgccagggaaggaaattccttttagcatccctctgccagaggacactagcattgtgggattctttggacgtgcaggggctaatcttgaagccatcggcgtttatgtgaaatcgacaaacatagacacaatagaagaaaccacaagtaacctggacacttgttccccggatgaaccgatcatcattgccgaggctgttcccatcaagattggagcatggggtggggacggagggaggagtttgatgtcacagagccaccgaagcgcctcgacagcgtgatgattcgagctggtgaaatcatcgattcatttggcttttcctatattgatcaagcttgtcagaagcacactctaggtccatatggtgggaagggtgggaagcttaccacgatccagcttgccccaacagagtatgtgaagggtttctccggaacaactggtacttatgttggatcacaggttgtagcgtcgctagcgatcgaaaccattcatcacgtaaacgccaattgcatcaagaaggttgccagcacttccaaagaagcccacaacgctagcgttcttagggtaggggtaattgtcttgtaaattg

SEQ ID NO: 39247 - DNA, 1948 bp, Setaria italica
  misc_feature (1945)..(1948): n is a, c, g, or t
  Peptide Sequence Number=SeqID_105221
aagaacaaacaaaaccaacgacaaacaaacaagacaacaaaccacgcaacaaaccaagtagacaaaagctacttcgatcttccctgcgaccacccatcatggatagaattagagagacccttcccatcaaggttggaccatggggtgggagtgaagcgaatccatttgacatcacagaggaacccaagcgtctcgaaagcgtgacggttcggtctggcgctgtcattaattcatttggttttacctatgttgatctagcaggccagaagcacaccgttggcccagttggaggtaacggtgggaagcttactacgatccagtttgcaccaacggagtacgtgaagggattctgtggatccgttggtccgacacaaggaacatgggttgtgacgtgtctcaatattgaaacaaacctaagaacacacgagatatatgaccaagggaacatgtttctatctctgccagggaaggttccttttggcgttccctcgccagggaaggaaattccttttagcatccctctgccagaggacactagcattgtgggattctttggacgtgcaggggctaatcttgaagccatcggcgtttatgtgaaatcgacaaacatagacacaatagaagaaaccacaagtaacctggacacttgttccccggatgaaccgatcatcattgccgaggctgttcccatcaagattggagcatggggtggggacggagggacggagtttgatgtcacagagccacccaagcgccttcaaagcatgactattcgcgcaggagattctattgattcaattggattttcctacattgatgaagcaggcaagaagcacagtgaaggtccatttggcggtaccggtgggcaacttacaacgataaagttcgcaccattggagtatgtgaagaagttttctggaacgattgggcgagctgttggctctggggaaatgttgtttgtagcgtcgctagagattgaaacaaacgtcaaaaagtatgggccatacggaaaagaggacaacgaatatccattcagcatcccgttgccagagaatactagtgtcgtgggatttttcggacgtgcagggaggctcattgatgctgttggtgtttacatatattattgcaaatcccctctcattgatgcaactgaagaaacctcaggtaacaaagatgaagaaacctcaaagaacaaagacaccacttccgcaccaccacgcaccatcactggacagacctctcctatcatgattggaatgtggggtggggatggaggggaggagtttgatgtcacagagccaccgaagcgcctcgacagcgtgatgattcgagctggtgaaatcatcgattcatttggcttttcctatattgatcaagctggtcagaagcacactctaggtccatatggtgggaagggtgggaagcttaccacgatccagcttgccccaacagagtatgtgaagggtttctccggaacaactggtacttatgttggatcacaggttgtagcgtcgctagcgatcgaaaccaacttaagggagtatggaccatatggagaagagcaggacatgcatttcagcattcccctccctaagaacgctagcgttgtgggcttctttggaagtgctggcaaccttcttgatgcaattggcgtttacgtgatgaatggttccatcccaaactagtgtgagcagcgcccgaaaaggcacctaaaataataaagtcaggatttccgtcctcagcgagttcagctttccagtgtttcggtcgtaataagatgatcatgcatttatgcatgagcatggtgtgtgtttgtgagaccttttgtggatcgagagtgcttttgttgtcacctaagttgtggaataaaatctctatgggattgcctcttttggatgcagaaagaaaaacgtaaaaccgaaaacaagagaactagccaacggannnn

SEQ ID NO: 39248 - DNA, 1116 bp, Setaria italica
  misc_feature (1113)..(1113): n is a, c, g, or t
  Peptide Sequence Number=SeqID_105222
tcgcccacttgcagcaacaaacacttgtggctagcgtgttcaaccaagtgcctttggcgaaccccatcactactgcctggcagcaacaacaattgctaccaaatgtgttcaaccaactagctttggtgaggacgtaatcatgcaagagccagtggaccacgccgccaaggacgaccgcgacgtcgtagtggtcccccgtcgaggccaagcaacgcggcagacgcggagccctagcgacggtcaccgggctccactcgcccccagcgtccgacgacacagtctgcacacggatgcaccttgcgcatgagcgggcctggtggagaccggccaggtcagcggcgagtagcaggaaggagcagccgatgccgatgccgtcggcggcggtgagcaggacgtacgtgcaggtagtgtagaggtggtcgtctcttccgacgtccggcggcaaggggaggaaggtgcggccgccggtcatggggtcgtacacgcacatgtcggattcgctgcgctccaggacgacaagctcgccgcgggatgtcagcgcgggatgtcacggcctcgtactcctgctccagtaggtcggcggcgctgcgcgacacgaagggcgcgaggctttcctcggcgaaggacgcggcggccggcgtcgacggggtggacgagggagaatgtctcgtcaaggaagccgagaagcctcggcggcacgacgccgtccggcgctctgcagatgcgacggacaaacgcagggctgaggatctcgcgccgaaagagcttagcttgcacgccgcgtcgcaccggaagagggtgtcggcttccgagcgcgcggcgatctcgaggatgagctctgccgggagcgtcaccgcggccgtcggtgacgacgtgccgcgcggagtgcatgcacggcgccgtttgtgcggcggcatggttcttcttgcgtacagccgtatacggtatccagtatccactactagtatttatagaccagcagattgggagtttgggacaggacaaggatggagatgccctcggtgcatattgggattggtgttgtcccgtcggcatgcaacttcatagacggtataggatggcacctcacgacaagtttgaggaccgctagtntta

SEQ ID NO: 39249 - DNA, 1074 bp, Setaria italica
  Peptide Sequence Number=SeqID_105223
gacaacatcagcaacaccggtgcttcctcacccgcagaagcccaaatttgtaaagtataattaacgactagtaaacgatgtgaaataatccatacaagcttgggcaagctcatgaatcaatttcctgagtaacgcaatttgaggcctaagaacaataataatctactgcttataccatatcacatcagagagcagcttttggtgccaacagagacgttttcaaagggctgcaagctgcttggcccagatatagtcaatcggtcttcccttcctgtgctccaacctcctgcaggtagtgctctgcatccaaagcggccatgcaacctgatccagcagcagtaatggcctggcggtacttcttgtcctggacgtccccggcggcgaagacccccttgacactggtatgcgtggagccgggcttggtcaccacatacccatcggagtcgagctcgagctgccctccaagaaatttggtcgccggctcgtgcccgatggcgaagaagagcccggccacctggaggtcggagacctcgccgctgacgacgttcttgaccttgacgccggccaacgggcccccttccgcgccgccgtaggcctcgacgacctcggagtcccagacaacctggatcttggggttggagagcgcgcgggcctgcatgatcttggacgcgcggaaggcgttgcggcggtggatgatgtagacctgtgagccgtacttggtgaggaaattggcctcctccatggcggagtccccgccgccgacgacggcgatgggcttgttccggaagatgggcgcggccccgtcgcagacggcgcaggcggagatgcccctgttccagaacgcgtcggagccggcgaagtgcagcctgcgcgcgacggcgccggttgccacgacgacggagtcggcgtgcacgacggtgtcgtcggaggcgacgcggaaggggcgggcggagaggtcgacggaggtgacggtctcggtgaggatcttggtcccgaatctggcggactgcgcgcggcagcgggtccatgagctcggcgccgaggatgccctctggaaaccccgggaagttctcg

SEQ ID NO: 39250 - DNA, 634 bp, Setaria italica
  Peptide Sequence Number=SeqID_105224
agtacaacacattacagtatacttattaattagcttctatatgcttcgtcatcacttttccctatcacaaatgttcctccttaagttaggacctcaaattttcagtggaaactgcagttaattacagatactagatgatgcattcctcaatagtagtaatgcagcattatgcataaatcgacctcgctagacgaacaatgcttattaaaaattctactattgcgtgtgcgaatgtgcgcatttgtgctagtcatgcactgagaacaacaaattgtgtaatttgatttctggtttagatgcttgctttgttcgtctagagcaggattagagtgcttgtaccaatttagtaggttctttcattgcacactctagttttggtagattattgcttgtcagatgattttggaataatttcaatctgaagagaatataattggtacctgtactatgtcttcaatcaaattaggagtaggctatatatatacacaatccgttagttgatacctccgtttacaattatagatattagttctagtatttgataaaatgtcagggaccacatgaaattaagatacatctgcacttcaaattactccactctgctatttgctaaataactgcgcgcatgctccat

SEQ ID NO: 39251 - DNA, 572 bp, Setaria italica
  Peptide Sequence Number=SeqID_105225
gatcttttgttgatttcgctgaagaaaaccgtagtgccttgacagaatttcatgagatttatatgaagactgttgccaaatagtacaagtgaacttggacggagaatggcaagaggatacctaagatatataattgatatgtacaagaaaggcctttgctggcaaggagattggaaggacagtgatatgaaagttcgaagtgatggcagagaatttaccataacaaaagtgccagagtacaatatatccaaggatggcatgaaggaggacttcaagaaattctttgaaattctgttcccatactatatgcacgagagtgaagaaaccaattcagtttctggtaaaattgaaaagagaaagtgcttccctattattttctgcaatttcagcaagattgtgcagaagtacctcatccacaaagagagtcagtaaagtttgagaatttccagaaatttttgggttctcatccggcatttatgtccccattagcaatgaccaccttcattggcgatctttttatcagtttgtgacaatctgcgtcaccataatgctgagttcttgccattgcaaga

SEQ ID NO: 39252 - DNA, 374 bp, Setaria italica
  Peptide Sequence Number=SeqID_105226
ttgccatgccctaacaaaactatcagctttccaccagctacagcagagagaacacggcgggaaagcaagatgtctcctgaatcagtgacacgtgactgctcaaccaagtcctcacagacaagcagggtgactttctcataatcaatactggtgtcaggagcacgaccacggggatctctggtaacacgggcaccaaattgaccatgaaaaccacatcgccatgacccacccatgacacgaacaaagattgtggcctccaccgatgaacgaatttgtccaagtgtaaaaaacactgtgctacgcttgctaatgaaagctctctctaacaggcgctgacattggattgtaggagagactcgtaactgctcagcttg

SEQ ID NO: 39253 - DNA, 415 bp, Setaria italica
  Peptide Sequence Number=SeqID_105227
ttcatcaggcgtcacgggtgctcagcagcaagccgactgccgatcgtacggccgccaccacccccagcagatacagagtgtggcacggcacgccgatcctcgtgatcatcagcatgctcgcctacttctgcttcctggaacaactgctggtcggcgaccatggcaccgcagctctggccatctccttgcccttcgcctgcgtcctcggcctattctcctctctaaccacaacaaagatggtgtccaggagatatgtatggatctactctgccgtgcagttcctcttcattgtgctcttcacccacctcttctacagatatgtaagatcctctctgtagcaatctgtgatggccatctgcaccctgaccttcaattcttctccaggtgcggatgcaaagtctgtactaaagtacta

SEQ ID NO: 39254 - DNA, 464 bp, Setaria italica
  Peptide Sequence Number=SeqID_105228
tactaagtaattaagggtaacatagaaagcaaagagatagtgaggctgatgggcagaagcaagatgacgaaggcaccccaattcaagaggattgaaggcatgcggatatggtgtaggaccattatttgagttaggtttgccagttttcgtgggggcaggggaaaaagaatcgttgttgaagttgcaatgtaccctcccaggatcgcatgcctagcgtcaagtatttatgtaccttgtggatgctaacaagaattttcaataggtggtactgctcgctgtgttgaggagagaacagttgattgttgtaaactatacggtcgtgaatgttggcgatcctttctctttcgaatgtaacgcttcggtgaccgatcgcagagatgttttgttgcatctcctcctatctgaaattgttacgggattaaatctgaaatccctgttgagtaaaggataatgattgttttctt

SEQ ID NO: 39255 - DNA, 771 bp, Setaria italica
  Peptide Sequence Number=SeqID_105229
actttactagttaacaataacaggatcacacgtatcaatcccaatctcggtgagtttttgccaaagctgcatactcttgtgctcacaaacaaccgtctgacaaaccttgcggagattgatcccctggcatctcttccaaacctacaatacctcagcttactggataacactgtaactaagcagccagactacaggctatatgtcatccataaattgaagcatttgcgtttgttggatttcaagaaagtgaaacaacaggttgtttattcatttcctttggaatggctccaaattatgttttggaatggaccacggcagtgctggcagcaaaagggacaaacaagcagctcttttgactttgtattttcattaattagatgcatgcacaccatgagctttggctgacatgttttcccattgtctatgtctagtctatatagctgttctttctgtttctgaatctcccttcgagatatcttttctgttttgtaggagagagttgcggcagcacaaaagtttcactcgaaggaggcagaggaagaggcaaagaaggtacctgttaaggcgtttactcctggacagccagatgctcaagacaccacagaggtgcagggtcctaaagtagttgctccaactgctgaacaaatcacagctatcaaggctgctattgcgaatacccacactcttgaggaagctgcaaggctagagaaggcattgagcactggtcaagttcctgccgaatttgcaatgcccaaaatgatgcacacatat

SEQ ID NO: 39256 - DNA, 1164 bp, Setaria italica
  Peptide Sequence Number=SeqID_105230
acaaaacaagacaaacgcgtgcgcgacaccccacagttaaccaaccatggaagctgcagaaagcaagcagcagcaatccaacacaacttccttgtttctctgcaacatcaactccttccttccttctctgcaacatcaacttccttctctgcctgtgcagggggcgggcattagcagaagcagctctactttgcccatggaacacgcgcatggcggcacattatgtgcagaggaccaaaagaagccactgacggtgacgagctgcctgctgccagcacgcagcctgagatcaacagcagccgttgcccctgctgctcaagctcaaagccaggccgacggcgatctcggcatccggtcgctgtccttctcaaagatcttgagcttcagaatggccagggcgccctcatcgctgtccaccaactcagacaactatattgatcaacttgatcatcatgtcgccgccgcaaagggtaacagcaccaaacaggagagggaggaggaggagaagctgaagcaggtatgccgctcgcagtctgtgcctgcaagcgtcagccggttcaagctcacaaaggggttgaggagagtggcggcggaagaaaacatccgagtgttccggctcagagtggttccacttgttcctccggaggcgggcgtcaccgctgccggagaggaagcagccgcggccgaagacattgcggcggaggaggcggtgtgccgcatctgcatggtggcgctgtcggaggaggcggtgctgaagttggagtgctgctgcaagggggagctggccctggcacacaggggctgcgccatcaagtggttcagcatcaagggcaacggcacctgcgacgtctgcagcaaggaggtgctaacctttcccgtacaaccctagcgccgcctccatgaccatcctccatccattattcatcaggctcagggtgctcagcagcaagccgatgccgatcgtacggccgccaccacccccagcagatacagagtgtggcacggcacgccgatcctcgtgatcatcagcatgctcgcctacttctgcttcctggaacaactgctggttgcccttctctccgtttacctggaacagctgatatgctgcttaccagatcgatccaactcatgaaacctcccaactgcatgcaggtcggcgaccat

SEQ ID NO: 39257 - DNA, 1112 bp, Setaria italica
  Peptide Sequence Number=SeqID_105231
ccagcaccgccctccagggcctcctccgcaggctcggcgccggcctcgacgacctcctaccctcctcctcctccgccccctcctccgccacctccgcgcacctcaagaggatcctcgccggcctccaggcccacggcgacgagtcgcgccagctccagtccctcatgcagctctgcgagatgctctccatcggcaccgaggactccctcgccgccttcccagtcgacgccttcgtccccatcctcgtcggcatgctcggccgcgaggacgagcctgccaccgccggcgccagccctgacgtcatgctgctcgccgcgcgggcccttgccaacctcgtcgacgtgctcccctcctcctgctccgcggtcgtgcactacggggccatacagtgtttctgtgctcgcctgctaaccatcgagtacatggacctcgccgagcagtctctacaagctcttaagaagatctctctggagcacccaaccgcgtgtctgcgtgctggggcgctaatggctgtcctatcgtatctcgacttcttctccactggtgttcagagagtagcattgtctaccgctgcaaatatctgcaggaagctgccgtccgatgcttccgagtttgtcatggaagctgtccctctgctcacgaatctcctgaaccaccatgattccaaggtactggagcatgcttctgtttgtttgacacgcattgctgaagctttcgcccattacccggagaagcttgatgagctctgcaatcacggattggttgctcaagctgctagcttgatatctgttggcaactcctcaggccaggcatcactgagtacatccacatacacaggcttaatccgtcttctctcaatatgtgcaagtggatcactgctggcagttaaaacactacttcttcttgggatcagcggcactcttaaagacatcctttctggctctggtttgatttctggaacgtcagtggcccctgctctaacaaggcccgctgatcagatgtttgagatagtgagccttgctgatgatttgcttccacatatgcctgcgagaatcatcaatttgccaacgtactaccatgcttataaaagctcttcaacaaagaaatctgct

SEQ ID NO: 39258 - DNA, 582 bp, Setaria italica
  Peptide Sequence Number=SeqID_105232
tggttgatcttccaaagattggaggacttagggtttgctccggatgctactacttttggaattttcatatttcatagctttagagaaatgaaactgaaatctgcattcgtatatttatcggagtgcttttctagacatattaaacctagagtgtgtgcttataatgctattttaggtggtgttttcagggagggactgtacagacatgcaaagtatatctttgaagatatggttgaaagaaaagtaacacccaatatttcaacatataagataattctggcaggatattgctggtacagacagtttgatgatattgagcaagtcttgagggatatgaaaaccattggtgtaaatgatttcccctctggaaactgtgctttctctaaggccttatcattcttggggctagatcacctaggagtgaaaattaagagagataatgccactggtttcccgaaagctgagttttttgattcagttggcaacggactgtatttggacactgattccaaaaagtttgagatttcattggcacatattttggatacggcaattcacccagttgttaactcagagcctcct

SEQ ID NO: 39259 - DNA, 461 bp, Setaria italica
  Peptide Sequence Number=SeqID_105233
tggttacagtgggcagtatggtgctagcttcggctatctggagaaggtggaaggcttcaggagcatcttcacacgccgggatgtcggtacccatgccgtgcactcccttcaggaaggtgatcttggggcgctttcgcatcagataccggcaaggaaggtgaccaagggtgagggatcagcgctgcctcctggggattgctgggaacttgatcctgcatccttgcctcctgagttgctgcgcctcgaaccacagaaatgacttaattgctgatgacaaaggtggacatgtagaggattgactgcatagcatacggaggaaggctgttgctttggtctgccatgtcaaatggtgtgagggtgcatctgctttgccaactctagctgggcatttgctccatgtttatgatccttcaggtaggtgcttagatagcatgatgatacttgtaggtgtttccaatgtt

SEQ ID NO: 39260 - DNA, 272 bp, Setaria italica
  Peptide Sequence Number=SeqID_105234
taaaaaattttgctctcgaaggaatctggtactagaaaatcggagaaacaagtcaaagtattaaattttctttctctttctccctttaaccatgttgttataagtccaatatcgttacgtggtaagttcatgccagcttctgcaatgctagtttgccaagtcattcaccacctaaaaaaaacgtgttgttgaattgctctcaaaggaatcgtaggaagtaggaacagggggctgcttttttttatcatgggatcggattttgtgtttagggg

SEQ ID NO: 39261 - DNA, 1561 bp, Setaria italica
  misc_feature (1558)..(1561): n is a, c, g, or t
  Peptide Sequence Number=SeqID_105235
gtttcacgtcgtctagagttccagacaccggcaggagtcgtcgagcatgacaaagaccgtggttctgtacccgggcctcggcgtcggccacctcacgccgatggttgagctggccaagctcttcctccagcacggcgtcgccgtcaccgtcgcgctcgtcgagccgcccgtcaaggcccccgacttctccgctgcggtcgctcgcgccgcggcctccaacccctccatcaccttccacgtcctgccgccgctggcagcggacgcgccaccagccggttccagctccgacgacacccccaagcaccacgtcatccagatgttcgaccacctcggcgccatgaacgcgcctctccgcgacttcctccgctctctgcccgccgtcgacgcgctcgtcatcgacatgttctgcgccgacgccctcgacgtcgcggccgagctcaagctgcccgcctacttcttctacgcctcgggcgcgggagatctcgccgtcttcctcaacatgccgagcgtgcgagccaacatgaccatgagtttagaggagttccgcgactccgtcctctccttgccgggcgctcctccgttcaaagcttccgatttgccggcggcaattctcacggacagcgaggcagccaaggccgtcctccgcatgttccagcggatgccagagtcaaatgggatcctcatcaacactttcgagtcgctggagacgcgtgcggcgcgcgcgctcagggacggcctgtgcgtcccataccgtgccacgccgccggtctactgcgtcgggccgctggtctcgggaggcggagagaaggagcacgagtgcatccggtggctggacgcgcagccagaccgcagcgtcgtgttcctcaccttcggcagcttgggcacgttcccgaagaagcagctcgaggagatcgctgctggcctggagaaatcagggcagagatttctatgggtcgtgcgcagcccgcgcagcgccgaccaaaacttaaacgagccacttggggagccagaccttgacgccctcctgccagacggattcttggagaggaccaagggcagagggctcgtgctcaagtcttgggcgccgcaggtggacgtgctgcgccatagagcgaccggagctttcgtcacgcactgcgggtggaactcgacgctggagggcatcgtggcagggctacagttgctgtgttggccgctgtacgcggagcagaggatgaacatggtgttcattgtggaggagatgaagcttggggtggagatgagaggctacgacgaggagatggtgacagctgaggaggtggagacgaagcttcggtgggtgatggaatcggaggacggacgtgcgcttagagagcgtgtgctggtggtgaaagatagagctgccgacgcgctcaaggaagggggctcgtcttatgctgcttttgtcgaattcctagaggatttagagactgtcaatcgatcgtgaagggagtttatctcgcacaatgaatgtcaaattgctgaaacacttcgatctcgaaaggatcttacttttttgcactaaaaaaaaaaaaaaaannnn

SEQ ID NO: 39262 - DNA, 255 bp, Setaria italica
  Peptide Sequence Number=SeqID_105236
attgcttttcagcaagcacaaaatattgcttttcagcaagcacaatggaaaagaaaaagaaagctgccgatatgattcgactgattctgtctactatatgcacaaaatggcttttgtttatggcaaaccttatgttaaacagtgtttgtagcaacttttgcgtactgctgtacagaagccatattccattgcacagaaataactgcaggaaatgaacaagtgggtccaacttaaaattaaaataaggttgaatct

SEQ ID NO: 39263 - DNA, 447 bp, Setaria italica
  Peptide Sequence Number=SeqID_105237
tattgcaaattatgtttatcctatgtacgcagctaatgatctagattacatttctagttgtcttagaaataatgataacagccttcatggtaaatgtatttattgcgctttgtgccatcacttttccaaaatacacgtaggatgcccttttttgattaattacaattggaaatgattactcaatgaaatattcaattatgctttacagtatcctttgaagagattactgatattatttcaaggtaatcgcttaccttcatatctgcgctcttcgacttgtgaaataattttcaccatttttctgcagcttctggaatgggttgaagaatccaaactgcttgagtttgtagagcgtgattacgcttcacgcgttgatttgacggctaaggtttatggccttcacaaagcagaacagtatattgagaaaattcctgcagctcatagggg

SEQ ID NO: 39264 - DNA, 445 bp, Setaria italica
  Peptide Sequence Number=SeqID_105238
acaacaaaaatgcccataccatctagtatcatactatggagtcagcgatgttgggctcgttctcgtgccctgccaccaccgtccttggcttctggtcctcggcgacgtgcctaggagacgatacggcggaggacgacgatgaggatggtgacggcgaggctaccttgcgcgggctcagcggcggcatgtgcatccttctcagctcgctcatggggctccttgggctcaggagcagcggcggcggctgcatctgcggctgtgggggttctatgggcggagggtgatggtgctccggttgctgctccgctgccactttgttcaccaggttctgtatcgtcggcaggagcttcgccgacacagagatgatcccaggaaccaccccattttggaattctctgctgacatctagctgcaccgccaatgctttgaatatcaagtagcccac

SEQ ID NO: 39265 - DNA, 951 bp, Setaria italica
  Peptide Sequence Number=SeqID_105239
tggtgatgaacggttcttgatatatgagtacatgaagaatgggagtcttgagatgtggctcaggaaccaggctgatgccatcgaagcacttggatggccagaccgcctgaagatctgtctcggttctgcccgtgggctttcgttcctccaccatggcttcgtgccccatatcatccaccgcgacatgaagtcaagcaacattctattggatgagaactttgagccgagggtctctgactttggccttgcaaggataatcagcgcatgcgagactcatgtcagcactgacatcgctggtacgtttggctacatacctccagagtacggcatgacaatgaaatcctctaccaaaggtgatgtctacagcttcggtgttgtcatgctggagcttctcactggacgcccacctacagggcaagaggagggggaagggggtggaaacctagttggctgggtgcggtggatgattgcacatggtaaggagcatgaactgtttgatccttgcttgccaatatcaagcttgtggcgggaacagatggcctgtgtgcttgccattgcccgggactgcactgctgacgagccatggaagaggccaaccatgctggaggtggtgaagggcctcaagatggcccagacaatggaatgtggacctctggtggtgacagttactagggacgtgtaatgcaggaggtgaatgttttcttgctattgatgtaataatgtaagttccttgtagctgtagagtgagctgtccggtggctgtaatgagagaaactaatgctgctcatgttcaggctgtagttacttatgtaaccttttaatctggccccagtcagtttcttatctggtattcaattggcagggtgtgtttcacaagctcagaagctgcagtggctaagtttttcgttttccctgtgttgaattacttaatagaattgacagtactagatt

SEQ ID NO: 39266 - DNA, 593 bp, Setaria italica
  Peptide Sequence Number=SeqID_105240
gcccttgcgaacttgagaccacctgcttccatttgtgtcgtcatcagattctctcaaagcatgttgaattgaagataaagtcttaagatcattggaaatttctgactgatctgcttgcagtatttcctcactatattcatcttccatgtgatcattttcatcatctttgtcttcatcataaccagaaatgccttcaaattcagtactatcgacaatgtctattttagcatcagccatgccttcttcattatctgtaatattctcaactggaaatgatgatgagccatcatgagtttcttcatccgcaaactcatcatcactcatatcatcatcttcgtcataagttggaaggttatcttcatttatagttaagaattctattctaactaggtattcttgtcttcttactgttctttacaacttgaggatacacaaaaggatctcggttttgctttatgctcataagtgaaggccttaaaattccaatatctacaaatgctcctcccatatgaggaacaagctttgttactatacctaagtaaatactatcacactgtacattgttcttgattggttccagcaggagttcaact

SEQ ID NO: 39267 - DNA, 691 bp, Setaria italica
  Peptide Sequence Number=SeqID_105241
cccctcgtctctcatctgcttccgtaacttcacaacacctatcccatcggtttggcttttgcatacacgttagagagcaaaacataggttccaatatcattgggcttcaactgaagaatctgttcggctactcgatgacccaggccataatttctatatatctggcaagaacttagcagtgatcgcgaagcaacaacatctatgccaatgccattatccactatgaaccgctcagcctcatctagccgtccagctctgcataacaaaccaaccatacaagtataatgttcgtttccaggtgtaactccgacttccttcatcatcgtattcaagtagtagaatccttcatcaacaagacccaactgagcacaagctgacaacactccaatggaagtaacataagacgggacttcttctgcagaccatgatgcgcatagcctgtgatgatcaaattccaagagattacatcacataatggcatggaagtgaagactctacatgcatcctcgatgctgccactctttgagtacatgttcatgagggcgtttccgactaccaaatgggcccagtgcccagtcttcaaagcacaggaactaagggcgttaccatttctcaaggctgcaagaccagcacagctattgagagccacagcataaagtgaaattcaatttggcttaatctccatttccat

SEQ ID NO: 39268 - DNA, 482 bp, Setaria italica
  Peptide Sequence Number=SeqID_105242
taattgtaaactaattctatttctttcttcatgatcaattgatgctactcattatttattcaacacacttttacttaacaagtcccaacacgcatagagtaggcaaaagatactagagtgtcctcaaagctactgcgcacacaagactaccgaattattcttgaggcagtacagggacaaggagaagcttctccgtccggtgcacggtcaacccaaatgattctgacatatcaatccctctatccttcgattcaggtggcagctcccagttgaaatggtacacgaggttcgccagcataatctcaacaacagaaattgcaaagcttatacctgggcaaatccttcgcccagtcccaaatggaaggtagatgaaatcattccccctgtactccatagcaaaggcacttgccgccttccatgaaccgctccggcatgaactcttctgcgctctcccaatagttaaggaatacctaagacaaaga

SEQ ID NO: 39269 - DNA, 458 bp, Setaria italica
  Peptide Sequence Number=SeqID_105243
ataattaaacagtctgacacaccagctccatggttacatgaagacgacatcactctccttaccataccatatgtcttcttacttttaaatcacttgacaactaaaattaaacggaaagataaattttgttttttttaaaaaaagggtataacttttgttttggaaataaaaggataactgatgatggcgagataggctaaagctgttaagtaaacgccagtctgcgttgagatcgagactaaaccctataaaggtagtagcttcacgtcagctcacgcgcatcatcttgttgcatgcagcaggtcagcggtcgagctcagccacggcggtcggcgcgggtcttggagttccccagggtcagctccaggccatcctcgtcggtgtagtcctcgcggctcacctccccatcccacgcgaacgagaactcgcgcggctccatctccacgtcgccgtcgccg

SEQ ID NO: 39270 - DNA, 477 bp, Setaria italica
  Peptide Sequence Number=SeqID_105244
ctgaacagtttacgtctgagtttatcagctccagaaaatgtcgcatcttgcaaatcagctaaatatggttgtgtaccaaagggcattgtttgcaaatccaccatacgcaaatccttgcttctgtatttttcttatgcatattatctgaccagatctaaaatagtttatttaataagattacatggcttaaattttaaaaaatcattcctttctgactagctataaagaagctcctgttcttgacaaagctagtctttttattatgtattggccattagatcttctcaatattgctcaacctccaaatgcgttcatttatgagacgtgcatatgattaacatattttgtgctgtgatgttctttattgatcagttgaaagctattcaatcctgtcgcctgtttctgtaattttgtggactcttagctaaatatatgtgtatgcattattgataaatatctcacacgtttgcattcttt

SEQ ID NO: 39271 - DNA, 1343 bp, Setaria italica
  Peptide Sequence Number=SeqID_105245
ggactctcgagtctcggcacaagaacgaggccaaccaaaccccaacctgctgctgctccgggacaggtccacggcggcgctgcggcatggagaaagaggcggcggtggcgaggaacaggaaggtggtgctgcgcgggtacatcgaccgcgcgccgagggaggacgacatggagctcgtcgacggcggcgccgtggcgctgcgcgtccccgggggagccggcggccccgcggtgctggtgaagaacctctacctctcctgcgacccctacatgcgcggcaggatgcgggacttccagggctcctacatcccgcccttcaagcctggatcccctcttgaaggatttggcgtggggaaggtgatcgactccactcatccaggattcagtgctggtgactttgtttcggggatgactggttgggaggactacagtctgatcaccaagcctgaacagctcaggaagattcagcaaagcgacataccgctctcttaccacttgggcctacttggcatgcctggttttacagcttatgttggattctatgagatctgttcaccaaagaaaggggaatttgtctttgtttctgctgcatccggagcagttggccagatcgttggtcaacttgcaaagctccatggctgctatgttgtgggaagtgctggaacaaatcagaaggttgagctcctgaaggaaaaacttgggtttgatgcagctttcaattacaaggaagagcctgacttgactgctgccttaaaaaggtactttcctgaaggtattgacatctacttcgagaacgtaggtgggccaatgcttgatgccgtactactcaacatgcgaatacatggacgcattgcagtgtgtgggatggtttcccagcacggggtaactgctccttctgggatccacaacctgttctccctgataagcaagaggatagagatgaagggattcatccagagtgattacctccacctgttcccacggtttgtcgatgacatcaccaaacattacagagatggcaagattgtgtatgtggaagatatgagcgtcgggctggagagtggacctgcggcttttgttggcctgttcagtggtaaaaatgttggcaagcaggttgtgcgcgtgtcacaagactgaaacctgtgtacactctggtaaattataaggcatcctaataccagaatctctgttggaaagaaataagaaaaatagaaacctctattcagtggagcaattgttgtatgttttcctgatcatgttcagagttcagacttgatcttcactttctccacttgttgggaacttggtagtacatcgtctctttgagactacaatgtgaagtat

SEQ ID NO: 39272 - DNA, 1046 bp, Setaria italica
  misc_feature (1)..(82): n is a, c, g, or t
  Peptide Sequence Number=SeqID_105246
nnnnnnnnnnnnnnnnnnnnnnnnnnnnnnnnnnnnnnnnnnnnnnnnnnnnnnnnnnnnnnnnnnnnnnnnnnnnnnnnnngttgcaagcttaggctagtgcatacattaactagcatatgtaatgctaacttacaagcatgtatagtgtctactacactgctttcttgtagcattaaatagaccaaagaatccgatagaaggggcacattcaagcaccaatccaattttgcaccacctaattctagtagatttaacaaagatgctagttgccccatacttggaagatcaagttctttctgaacattcggaggagttaccacaagcatcaacctcagtacttggtagcaagaacagatgactccacaaaacagggaacataggggtaataaacctatagccacctcataggctgcggagaggatgaagttccttagtatccatgttatacaataccagtttacggttccaacgctgaacaaatattactgaattgtggtctggatgaatggccacgatatccaagtcatgggatgggcaactcagaaatccaaacaactgcgaacagctcacattgtgcttcaggatccattcttgtgtatcattgtcctcaagaacccaaactgacagctgagtgaagtagatacggaagccttttaattgcgaatccatactgatgcactgcagttagccttggcattgagcaataaaagcagcatttgcaagcttgtgcttatcatgccagcggatgatcctacatgctttcccttccccatccactgcaagtatcagggcctccgatttctggacatggtagacgataaaatacagcagaccattgataaaagccctgccaaacgtcaatttcagtatggcttgaccccactgtccccattcaccgccctttccctcgcttccacttacttgccctgtcactccatgccctggtttcagacgagtacgagtgcaccgcttctatctcctccccatcgaacatcatcccagaactggaccaagtggaagtgcgacgagtcggcagggtcaaa

SEQ ID NO: 39273 - DNA, 649 bp, Setaria italica
  Peptide Sequence Number=SeqID_105247
aaaaactgcacaccggggccaagttttcatctccagcgtgagtagaaatatttttctacacccgtaatacaaagtatggagtgcacacagcacattagaatcgcacccccttgtacttgctgttcaacttgaaacaaagaacacctttgcatgcaaactgagcaatgccacgtcgataactctttatatacaacacacattggcgccattttcataacctcagctgtcaggcatgccacgtctggaagctgccatggacaaagtcgtagcgagcaccaatcagcttgagcgttcccttgcccaatttgtccttgacgaatgggtaggtcgtcaggtttctaagggacaaattgacggcctcaatttccaacatggtgcattggtcatcaaaagacaataaggcatgttctcgctccacctttttcttgatagccagaccgatcttgacccaattgtcaatgaagtggtaggtttgaggtctatcttccttcagagagaggagttccctgattccaccacagcagctgtgaccaataaccacaatgcacttaaccttgaggatggtcacagcaaactcaatggctgaagcaacgctggagtgcatattctgatggtaggccggaacaaggccggcaatgttacggacagt

SEQ ID NO: 39274 - DNA, 354 bp, Setaria italica
  Peptide Sequence Number=SeqID_105248
gccctctgaatggaaaaaaaggaggtaagatttgttgtcatgcaacttacaaatatgttgcaggaagagccgtgccaagccaggaaggaaatctggttcagggaaagctgaagtaggtactagtacaccaaaataatagaaagttgcagtgaatgaaactacattgaacactactcctgcaatgaatactagaaggcaactagcattgaacaaggaagctggagcagggacaagtcaagaggtgaacaccaccaccactatggaggtcatcacaactatggaagttactactccaattaagaaaaagagagctgtcaagaagcagctcactccaaggaaggcaaacaattgttg

SEQ ID NO: 39275 - DNA, 466 bp, Setaria italica
  Peptide Sequence Number=SeqID_105249
tagtaactaattcacatgggtgcatccacatcgtacgcgaggcatggaggagcattcatcttttgtgactaagggggtgcttggttgttggccacagctcgccacagctacagtacccacgccacagcatagccaacagcatttgcgcccgctggctgtggcgccttgaaagcctgccacaggctgtggcgcgggcgtgcgtggcgtggccaatggaggccaggaaccaagcagcccctaactgtgatcgctctgtacagctattagaagtagcagtcgagcagaatctgtagtggtagacgacagtctgtgcataaccttttaaaaccagtattttgttttctaggatagatagcatagtcttaggctcttagctgctactattatggatggcacaggcctaactgtacaaatctttcacattaccttgtttggatcttacctttgatgaggagattcatgttct

SEQ ID NO: 39276 - DNA, 147 bp, Setaria italica
  Peptide Sequence Number=SeqID_105250
ggaagaaaaggaaatatcttcgtataaaactagacagaaacattctcagaaactgctgcgtgatgtgtgcgttcaactctcagagtttaactttctttcattcagcggtttggaaacactctgtttgtaaagctgcagtggatattt

SEQ ID NO: 39277 - DNA, 374 bp, Setaria italica
  misc_feature (49)..(49): n is a, c, g, or t
  Peptide Sequence Number=SeqID_105251
ctggattctgggtcaacctgaacattgtacatttgtacatctgcagcangttttaactgacgctcacaacatggagccaacggtggtacaatgcaaacttctgataaggcatatcatccttgagcaatccctttctaacctgaaacactgcaaaaattggtagtatcctttgtgcaattaaccaatccgggaaccattagtagacaaaaatgtttagaaatagattttacaaaaaattcaatttctaccttggcatcttggacatggcaatctcatgattctcgatgcgtcaaacaactgaccagaggctggaagtatgttgctacctggacctggacagcagtcagtctaaagtctatttggttgtcgtacct

SEQ ID NO: 39278 - DNA, 469 bp, Setaria italica
  Peptide Sequence Number=SeqID_105252
atccaaaagctttttacattttaactaggacgtgcatgtgcgttgccacgggcaaaacaatagttaacgaaaacaagcttgctagcctcaatatgatatcaaagtgctatttctttatgaactaaaaaaggaaatatagtatcgtagcaattgtaggctcaaatttcattcagctatgactaaactagattctgggtcaacctgaacattgtacatttgtatatctgcagcatgttttaactgacgctcacaacatggagccaacggtggtgaagtgcaaacttctaatgaggcatatcatccttgagcaatccctttctaacctgaaacacagaggctggaagtagtatcctttagccaattaaccaatccgggaaccattagaagacaaaaatgtttagaaatagattttacaaaagaattcaatttctactttggcatcttggacatggaaatctcatgattctcg

SEQ ID NO: 39279 - DNA, 590 bp, Setaria italica
  Peptide Sequence Number=SeqID_105253
agagggatagaatgttgttcccttcatcgactccaattaccatgccagattcaaatggaaatctggaggattattcggacaatgaaccagcaaaaaggctaaagatggatacaaaagataaagagcaatctacagatgaatcatgctgcggcgacttgtctgaaaccaccagaccatatctctgcacaggatttgatatctaccttgtttgggagccatgtgcaatgtgtgcgatggcactcgtacatcaaagattcaagcgcgtgttctacgctttccggaatccagttactggagcgctcggtggagtctacaggttgcatggggagaaaagtctaaatcatcactacaatgtatttcaggtttcagtacctgagacatacctgaatggttttgagtgactgttaaaaaaactgctgactggacctcctttttattttatttagaaaagaagatccatgaggtttcattttgcatcatggatgccatttttggtacaagggcatatcaggcttccatgatactgtcttgttgtatcattaaaaattgctccttcggttacctttaatataattggatgctattgaccc

SEQ ID NO: 39280 - DNA, 920 bp, Setaria italica
  Peptide Sequence Number=SeqID_105254
taaaggttaaagtaaactaaattaaggtaaagttaagttaattacttaggtaagtaattagtaaacaacacatctgagtgtgtggcatcaagatcaccgaccttattggaatataaagagagacacaaagacgtactacacaaggcagctttaagtggatacgatatccaattattcagcacaaggacgatctagttggatgcatttgcttaagcaaccacggtggcgctgccaacatgcacgctgcagaagctagagcaggcttggtcgcaactctcaacggcatcgttcgcctcttcatttcccagagcagcgttgatgttgttgcacacagacgaagcaaggataaggtggctaccattgatcagactttatgcatccatccaaagagctttcttggtaactcatttctaagaagatatgattcaacgtcaacaatggatggttttaagctgtcttggcctgctcaaagatcattcaatccaaacgtgccacttgaagatgaggactccaaaacatacgaaagtgcaagcgctttgtccttggccacatttgcctcacttctgattgagtttgttgcccgactagggaatgttgttgacgcattcaaagagttgagtcaggaggctaactttaaggatcctgtggaggagcctactacagttagcacaagtgatggtgggtatttcgataaaatacgcaaattggtaggattctagatttgacactgatgatgacactgcaaggtttcagatggccttgcaatcctttttggcatccaattttgtttttaaaagaattttggggtacggaatgtacactaaaacttgtaattgctgatctatgcatccgctgtattgtgtttttagcgccctgtaataatattaaacctggctgattgcacgtatgtatatcttacg

SEQ ID NO: 39281 - DNA, 427 bp, Setaria italica
  Peptide Sequence Number=SeqID_105255
aggaggtcaggctggtcgtcgccaagatccgcgaggcggccgccgccggcaccgccatggatctcagcgacctgctcaactccttcaccaacgacatcgtgtgccacgccgtgtccggcaaattcttcagggaggaaggccggaacaagctcttccgggagctcgtcgaggccaactcctcgctcatcggcggcttcaacgtggaggactacttcccggcgctggtgaagctgggcatcgtcaagaggatggtgtgcgccaaggcccacagggtgaacaagatgtgggacgacttgctcgaaaagcttatcgatgaccatgcaagcaggccaccagcgtcggaacgcgacggcgaggagaccgaattcatcgacgtgttgctctcagttcagcaagagtacaggctcacgagagaccatatcaaggc

SEQ ID NO: 39282 - DNA, 757 bp, Setaria italica
  Peptide Sequence Number=SeqID_105256
cctgaaaaatcagttgcattatatgctttcatcatcatcatcaattcgtagactgttgcctctttacctcaatttcagcacgcaaaacatcggggtggttttcatatttcttttgaaggatcttatgctcattcataagtgataaatactcttcattcatgaattcttcagttggtaaagttccatccatgagactctcgagcctagcaatttttccttccagtgtttgtgcaattacagcattacattcacgttcatgcttatattgttgcaccagacgatttagttgttgaatttctgcagcttgctttgcgcactgttcatcacgcgccatctctcgcctgatagctccagccaagaccttctccacagctttcagaaagtgttgctgcttttggtcatcagatggtactgccccatcagcaggtaccaattgtagatccctacaagcactgggatccctactctcatttgcagaagcttcaagtagacaactaggaatcagagctagagggttatctctggcttcagattcttcaggatctgtttgaattgcaacatcaaccttgcaaggctgaatatccatgattctagcatttaacacaaccgatgctctcctccatgcactattgttttggtgactttcaatgacttgaagtcccttctgtatgcttgcagcaaggtttaacttgctatttgccatctccaacatcagcaccagtgctaaatttattagcatcacagcaggatctttttg

SEQ ID NO: 39283 - DNA, 1338 bp, Setaria italica
  Peptide Sequence Number=SeqID_105257
taagtccttctagatttacaagacaaggatacaacttcgtcgaggatcaggaagaatctgggcgtgcacctcacaagacggtgaggaggcaccagcatctccaggggtatacatccttccccttctctgcttaccaggtgtacaacattatagtaacaccatttcaatggtacaaaataggaccgaacgaatttaacagcgtatcctcagatgttacacttgtcgtatccatagaaccacgagttgaggtccgtgctcttggatacctcaaatgatccaccttgttgcaaggtgtccaactccaccttccattgctggctgccgctggggctaccagccgtgtcgtacctaggaggctccagatcgctcggttcttctggctgcacagcaccatccttgcactgagactgagaggactcagcgagacgctcgtttagcgagaggatttcctggtcgtagttctttttcaacttctcaatctcctgatacgccttctcggtctcctgctctgccacaagcctccgcttctttgccagtgcttcagcttcctctgcatccttcaatcgtacaagtaattcaccagctgcttgaacagcttcagcagtatcccttagctggccctgaaggccttcattttgtgcttttagaactgagatttcagctgcaagggcattgatgaagcgcaattcagcacctttgataccagctttttctgctctcatcttcacgtcctcaacaccctcacgcatcctcctatgcagggcaagcaaacggaaatggttctcttggagatcagcatactgttccaggtgtcttgcagctccctgaattgctgtttgtactgcctccttcagttcttctgagcatttcttctcagattccaattctgactgcaacttcccaacaagggacttagttgcttcaagttcaactctaagctcttctgtgagtgtaatccatttactctcagcttctgtccaatcaggagcatccgcaacattaatatcaccatccttatcttttgtgccagggccagaataagctccctgagacaatggcagtggaggcaacagtctacgaattgatgatgatgatgaaagcatataatgcaactgatttttcaggtcctgtatctcctcctgtagaacttctttctcgtccccggagttcctgaacatatccaattcctcctggagtctctttacctcaatttcagcacgcaaaacatcggggtggttttcatatttcttttgaaggatcttatgctcattcataagtgataaatactcttctatttctattgttaatttctttctttagtttggtttaaagtttcct

SEQ ID NO: 39284 - DNA, 825 bp, Setaria italica
  Peptide Sequence Number=SeqID_105258
tagacaaacaaactagaatagaatgatgcctactactacgacacctatgcccgccaacttccccaacgtgctcccgacgttcatagtcagcaggcagcggcagcttcggcgagctccccggcagtgaccaccactccctgcccttcccaccattgtctctgccttccaaccctacaggcacgatgccatctttagtcggcattcttagaggagggtttcctgtatggcgggatggcggcgctgccatttcttccggtgccaccttcatttggtgcgatgcatcagcatgggcatgggatgatgggtggctcatctgaccaacagctggtggggcccctgcagggtatggatcaggcactgaagctccctttggctgctgcttgcggtagtgggccccagcagtggccgtcgtcagcagcgccggagcagcaggttgttggtggtgatggccgtgcggacaagaacaacaacaacaatggcggtggggcaacaggcagcagcagcggggtcgagtactactggcaaggatcgatctgatcatccatgtcgtcgtctgatcatgatcaataaaaaagaagaaaataaaggaagggaaacccagcagccaatgcaattcagaactagtagtactggtctagttaataattagcgagtttgtggtcatgatggcaaaatagtcatcgtgcatcacacatgcattttttccttcatcatttccatgcgttagttcatgtatgggagaatttagtttgcatattcaactagataattgcatttataggataatttcatttccagtggatgatattctctttctaaaaacta

SEQ ID NO: 39285 - DNA, 459 bp, Setaria italica
  Peptide Sequence Number=SeqID_105259
cactgcacactctgctttgataatctttcatgagctatgatgattggagttacatcatttatgtgaatataggagtcgatttccacactgtagttatcgacaatcaaagtgactggatgcatcccaactctgtcattcttgctgcatttgagctacatgaaatcgtgaatacaccaccattatatttacacagtagccttagcaatttttttaggttcagctgcttctggaaacatggctcaacttgtgtgcttgattcttgagtcgatatttactctgccacttttgttaggatgcctgtgaagttaaaacataaaaggacattaacaccgaccatcagctaatgtttattgtttgtaaacattcgcatggatgatagaagaaaagggatggttattgaaatctaggctgaacagtcttcaaatttctggtgatcaaaatcaagaggcataaaagggt

SEQ ID NO: 39286 - DNA, 447 bp, Setaria italica
  misc_feature (295)..(295): n is a, c, g, or t
  Peptide Sequence Number=SeqID_105260
tcgaggacgcctggcgcgcgcgcgccgaggagcgggaggagcgccggcaccagctcgtcgccgcactgctcgccaagctcggtggcgattcctcgtgatcaatcctcgtccatccgcacactcaccggagcaacgatgtttcaccgcgaagcgtgcatcggccggctagctacctttagatgatcactagtgctcgatcaatgatctttgttggttagggtttttctagacatcagctagtgagagcaggccaggaaagatggctgtacatgttcagatggtgaaaaagggtttntgcagctcatgcaacctttgttagccagcagccattagctagcagctctagcgctctagtctcatcagtctggtctcgtcagcttcaggagctggctgagcttccttgctttcaacaagtgcatggcatggctgtatcacatccctttgcta

SEQ ID NO: 39287 - DNA, 619 bp, Setaria italica
  misc_feature (572)..(572): n is a, c, g, or t
  Peptide Sequence Number=SeqID_105261
caaagggaggcagcaagcttgagacaacaactgcacaacttgcaagaaaatcatcggcagttgatgggacaagatctttccggattgggtgtcaaggaacttcaaaatctagaaaatcagctagaaatgagcctacgttgcatccggacgaaaaaggaccaactcttggttgatgaaattcacgaactgagtcgaaagggaagtctcattcaacaagacaacatggaattatgcagaaaggtcaacgtgattcatcaggaaaatgtcgaattatataagctctacgagaaagaagcggcaggtgaagtcagcggagattcaactactccatacaactttgcagttgttgagaatgccaacattcctattcatcttgagctcaatactctgccacaagaagatgttgagcaacctgcacctcctaaattagggttgcaattaaatccatgaagacatgcagtatggcatagcttatgttctcattgtccttaaaatctgcaactcaaagcagccaggaatgactagtcgaaatgggcctaaagccctaagcgcacagcaagacagataaagtntgcatgcaatggacgattggcaatagtagtgtatatctatctacaaa

SEQ ID NO: 39288 - DNA, 308 bp, Setaria italica
  Peptide Sequence Number=SeqID_105262
tttatattaatttactccagcttccttttcaaaatgtttaaatgaaatgttgagaacttctgtgttgtcttaacttgtcttattcgaagcaccattattttacttttgtacttctgcttttgaggtattttgtgctttaagtgctgttcgaaacttaaaatggtattttggttgccaacttgatatttgggaacatttaacaactgtaaatcgaacatttccaggtggaattaaattgacattactttgaaattccttgccatggtttattgatctgtggtgagcactataagcaacccctgtctctt

SEQ ID NO: 39289 - DNA, 413 bp, Setaria italica
  Peptide Sequence Number=SeqID_105263
ggtggtcccgcccatggcgaaggagtccctggcgctggacgacgacgagccgctcaacggaaagcacatccacgtcaccaaccgcacgcagacgtggatggggcccgcgcagatcatcaccgacaagctcaccctctacgccacgtaccaggtgtccgcctgggtccgcgtcggcgcgctgccggccggcgcctcgccgcagaacatcaacgtcgccgtcgccgtcgacagccagtggctcaacggcggccaggtcatggcgcgcgacgagcgctggtacgaggtcggcggcgcgttccgcgtcgaggccaagccggccacgcgcgtcatgatctacgtgcagggccccgacgccggcgtcgacctcatggtcgccgggctccaggttttccccgtcgaccggaaggtccgcg

SEQ ID NO: 39290 - DNA, 509 bp, Setaria italica
  Peptide Sequence Number=SeqID_105264
aatatgtgaatgtacatgcctgaatttctcagcagtcgtttccaaccgtctacgcttcttgaatctcgaccggtaggaaaatgtttggtgccttggatcaactccctctgccagaagctggatataaccagcccattagatattataaatacaaatactaatgaactaagctcttcagtttaaagaaataaacagtattcaccatgcatgaatgtaagaccttatctgcagaaaatcagcaaggcatactgaatactactcgaagaattttgaaggaaatgtaagtttctaatgtgaaccaataattgtttcctgcactttcagctcgccttcggtctctgcactcaagagtgcaagaaaacaacagctaacagctttaaaactagcgcagccgcagtaccggcgggacacagtgaggatgctgacccatgtgtgtgaaggaagatagtgtgcagcccaaagccttcagatgtccgcaccatgaatacgtgtaacataattctccaaag

SEQ ID NO: 39291 - DNA, 518 bp, Setaria italica
  Peptide Sequence Number=SeqID_105265
tttgtttttttttttttttttttcacaactcttaattaaggaaacatcactaatattcatcaaatccaagtatcacccaggatacagtatattgttacagtttgggaggtgcccctgttacgtcatctcttttcagcaacaattaatacaatcgacatcaatcatgaatgaaacaatgaccctcctctcttcccccaggaacagctttacgaacagttgttccccccgaagcattgaaattacttcttgtcttggaaaccttggaggattgtgttgcacgtgtccatggtgcgagcgtctagaaggctgtggttccagagtttaatcatgaagaaacgccagccccatagaagagcagggttctgtacaagttgctgtccatgggactgggagaatgcctcgcaggcccaaggtatatggccatcagctagcaccctttgttttcgaacaaatgaattccacatatgcataataagcttctcatcttttgtaacatcaacaaaatcatcaagcattct

SEQ ID NO: 39292 - DNA, 2691 bp, Setaria italica
  misc_feature (6)..(6): n is a, c, g, or t
  misc_feature (23)..(23): n is a, c, g, or t
  Peptide Sequence Number=SeqID_105266
gtgtcncttgttttttttttttnttttttttttttttttttatttcttagcgcgcgcagacgcaatagatgttcaacgacgctcaattgtatacaggaaataagaaacactacagtgaatgacaaattattcatcatccattaccacactccaccagtaaacaacatccagtatcaataaatacaatcgatcagtcatgaatgaaacaatgattgtctcggccacggatgcagcctaatcccttgatttcttcccaggaggggagctgttcttaaaccttcccctgatttcttcccaggaggggagctgctctcaaaccttccctccaaatacatgccgctatggtaccttccaagttattccacaaaaggttttttctttctttcttgttcagaaaacttcttcaattaccagacctacaactgatgccattttacacaagttgactagcagtttctttgcatggaatttacttggggtcagaacttcagtcttggtagctttggagaattatgttacacgtattcatggtgcgggcatcaagaaggctgtggttccagagtttaatcatgaaaaaacgccagccccacagcagggcagggttttgcacaagttgttggccatgggacctggtgaaggcctcacaagcccaaggtatatgaccatcagctagcaccctttgttttcgaacaaatgaattccacatatgcataataagcttctcgtctttcgtaacatcaacaaaatcgtcaagcatccttctatcctcaaagtcggcaatatcatcatcaacttcgtcttcactatcacgatctgagaacacttgttccaatgccattggctgtgccctatgtgaatggaagaactggcgtttttgcaggagttgccgatttctagggtcagatctctcaacagatagcttccttgacttcccgaactgtagcactgttggtggtggaagattgctaccaggtacagtgtggctaggatcaactggagcatctgctacagaagacccgttctccctttgcacataatcatcttcagacaatgcctgagcatcttcatgtgatcctgattccataatatgtgaatgtacatgcctgaatttctcagcagtcgtttccaaccgtctacgcttcttgaatctcgaccggtaggaaaatgtttggtgccttggatcaactccctctgccagaagctcagttcttgaggcatcggctttcagacgaacattaacaacctgatactcttcagatatccaaaattcaaagcagaattggtcatgcgacgagtttaaatgacatcccagacccttgaaacttccacatcgtacgtaacaaaatggacaagaaaaatcttcagtgacttcagtctcatgcatcgtatcatagtagtacttgtaattaaaaattacattgccagctcttaaccttatgatatctgaaaatgatgacggtggaagatcattatatgagtaactattataaggagacaaagacatgtcttttgcaccagcctcttgtgcagacatgcatagttgtaactgatatgaacccgtagcatcaaccttatgggagcaaaatgtcaagcaactgtcttgctccagaaattttgcctctaagaagcttggtctcattgtaactttagaagccaactccacaattgttcccaagcttaaagtcacacaactctccaaagatgaagcaagtaaattagttggtattttaccccaggaacatttcccttcaagcttttggagagatgagctctccacatggttcccagagcagtaatcttcaccagtactttgtccaacttgcccacagctaataaggataatgtcaaggttgcaagaacgggaggttgacagattcttcacatcaggaatgatgaatgtggcttcagtgttgtctttatttccaaattcactaaaagaagtaagcaaacaaactcggctgaaccgataaattggagaatgcccttcaagcaaaacattactagtaggtctagctaaaagaacataaagaggaaagatattctgtgcttgcaattcggtatttgcacttccagaaagtgatatggttatctgaatcctctttttcctcttcgctagtatattgtaaagaaggcatctttgcataaaagggggatttttaatggctcgccgctgaataatattgtagagctcaactggtttgcagtacagcgccagatctttttcagcagcaagtttctcatctggagacaatccagctcttgatcgctgacggaagatgtggcccgcaggcccaggatgagcatattcgcattcagtagtctgtgctggaggttgaggtagaggcaggccgggcatcctcgccgccgacgaacccctagggtcttgcggaccgggacccccgacgaactctgtccgcacgcaggaacccaccctacggacggatcacgtcatcagcagcgcgagcaagggcgggggcaggagcgggcggcgaggcgcgggagtgtgggcgggatcggcgacggcggcctagagcggtggccacaggactggaggggcggagaggaattaggcaaaatcgcagacgggaaaggaggactgctgcactgcggttttcccgttgcagtgaaggaagttttttttttccttctcgtaccgcgtgattggtaaggtgcgcgatgcaaatagaggag

SEQ ID NO: 39293 - DNA, 649 bp, Setaria italica
  Peptide Sequence Number=SeqID_105267
taacaaaaataagacaagacaaatacttaggaccgaaagacaatgaaggccatcttcctgttcacggaagataactgtctcaaaagccttccaatgagtgggaagggtagcacccttgtaatcttttactgatgtcagataccgaaaaggatatagctggacgaattctattgttccctgcagccaactttactgcttccagatttatttccagcaacttctttcgagtcccccatgctgtgagccatttctttctttaactgatcagctgcattgtcatctctcttgtaattctcctccaactcctgcaacttctcacggtcgttactcttgatggaatcaaatcccttaagactctccacaggaaacactgggtatgatgaggtggggaagcatgtaacatggtaccacttggattttcgaagccacgggtatcatgaaaagaggcaccaaggcggagggtggctttggcaatattctcattgcagcccttacatgtagagcggccagacttcgcatactcaacagagacgcttgccttatctgacacaccctctgcaggggactgagtctttactttctttggacttggttcctacaatggactgactgcagtctgttctctcttaggattcttctctagctcatg

SEQ ID NO: 39294 - DNA, 1047 bp, Setaria italica
  Peptide Sequence Number=SeqID_105268
cctatcccctgtgtgccttgcctatcgcctgttgcgtgtctcaggggaccgaagtattcctcaggaacgtgaaacttcagaccgatgaccttagcaaattctatatcagcatcgctatgatcgttctccctcccagcagcgtcaccaacatagaaagatttatccatgtcgatttcaattccggaattaaaatgctgagccatcaagcaccacattccaggatttggtttgcggtatggatcatctggagtaccttttcctttccctaaaccacaagcaatgaaaacctgaatagggactttaacacactcaataaagttatcgaggcgtcccactttggagtcaatagcttcctgccgcttattcttccagcgatcaatgtttgactcattggtgaatatgaccagtttgtaaccatcaatgtacagcctttgcaatttttccggaattgatttatgctgtaaagaccacttatctgcaccaatgatcctcactgaagttttggcaaggcatccatcaaaatcaaatgcagcaatcttggccgaagcatgaaggccatcttcctgttcacggaagataactgtctcaaaagccttccaatgagtgggaagggtagcacccttgtaatctttactgatgtcagataccgaaaaggatatagctggacgaattctattgttccctgcagccaactttactgcttccagattattttcagcaccttctttagagacccccatgctgtcaaccatttgttccttcaggtttggctcactcgattgatcagctgcattgccatctctcttgtaattctcctccaactcctgcaacttctcacggtcgttactcttgatggaatcaaatcccttaagactctccacaggaaacactgggtatgatgaggcagggaagcatgcaacatggtaccatttggtgctgtcataaccacgggggtcatgagcaggccatgtgaggccgagggcacctttctatattggttacctattttggttgttctttgtttcttatttaaccttacgggggttt

SEQ ID NO: 39295 - DNA, 1237 bp, Setaria italica
  misc_feature (1)..(31): n is a, c, g, or t
  Peptide Sequence Number=SeqID_105269
nnnnnnnnnnnnnnnnnnnnnnnnnnnnnnnatcaaccaattaggtaatctaccatagatgctttaaaggctgtcctgaatcctaaaaaactagctggagtcctgcgttatctcagcaagtatttagcaccacattttccaactgcgaatagccaagatattactagacggtttgaacggccaaagacagatttccacatcagggtagctctcaacatcaaaaactacatatcatcgtagcataaccatcttgctctcatggatctgatctcagaactcctagggaccgaagtattcctcaggaacgtgaaacttcagaccgatggccttagcaaattctatatcagcatcgctatgatcgttctccctcccagcagcgtcaccaacatagaaagatttatccatgtcgatttcaattccggaattaaaatgctgagccatcaagcaccacattccaggatttggtttgcggtatggatcatctggagtaccttttcctttccctaaaccacaagcaatgaaaacctgaatagggactttaacacactcaataaagttatcgaggcgtcccactttggagtcaatagcttcctgccgcttattcttccagcgatcaatgtttgactcattggtgaatatgaccagtttgtaaccatcaatgtacagcctttgcaatttttccggaattgatttatgctgtaaagaccacttatctgcaccaatgctgcacttgcagaaggttcaaaattactaactgagttattattaagaaacagcattcagaatagaaagtggaatcagaaactccacttgtaacaaattgtcaacttgggagaacaatttgcctcaagtgggttctgtcattatgctcatgggcattggcctcaaggccatgaaacatcacctttggcaatattctcaccgcatcccttgcaggtggagcggccagactttgcatactcaaccaaaacgcttaccttttcagacacccccttcgcaagcgaagccatgtgagtctctactttctttggactaggcttgcccaatggattctttacttcttccggattcttttcagtaacttctttcgagtccccaatgctgtgagccatttctttctttaactgatcagctgcattgtcatcatgatcgcgagaagctgcagaagttagcagagaatcacaagagtgatgacaatgcagctgatcagttaaagaaagaaatggctcacagcatt

SEQ ID NO: 39296 - DNA, 714 bp, Setaria italica
  misc_feature (676)..(714): n is a, c, g, or t
  Peptide Sequence Number=SeqID_105270
acgtaactctaccgactgacgcccacgccgactaccccgacgccctacgaccccaacaccccgcccttcgccggcccgtgcacctactggatgacgcacccgggcgttgtctggggcctgttcgggttctggtgcccactggtgcggctgttcggccccagcgcagcggtgccgttcgggcacgacctgaccgtgccggaggcgctggcgaacacgcgccaggacggcgtgggcgcgctcttccgcgagggcacggcgtcgctgctcaactccatggtggacaacaggttcgctttcaccacgcaggaggtgaaagacgcattcggcgccgcgctcagctccggcgacaacggcgccgccgcggcgcaggcgcagctcttcaagaaggcgaacgagggacgcgtcaagtagaattgggcgacggccgtatgtcccctaggcatgcagtcgcagtgcggcgatgcacgagcagttcagggttgaagtgctttccccgcacgtgtgttgatcatgggtttgaagttgctagtaccctctagtgtattaggcgtgcatgtcagcttgtggtcttaagtggatgcagggggagtgcttctgttgctttcttctcttttctgaatttgtgatcctttagtttcgcgcagaatgtgagtattcgggcttcttttggttaacnnnnnnnnnnnnnnnnnnnnnnnnnnnnnnnnnnnnnnn

SEQ ID NO: 39297 - DNA, 434 bp, Setaria italica
  Peptide Sequence Number=SeqID_105271
ggaagaggcgcgcgcatgcggaggaagagaggaaagtggggagggggccgggtgctggtaaagaaacgggttatcccgtcgttggagccattgacatgttgtgagaagttatcaccattgctgaggcagaagcttgtggtgtttttaagtagctctaatcctggagcagctgaagattcctgtgggaaaccaactgatgtagtttctaaggaaacagagttgaagaagagtgtttgctcaagctagacctattaatcaatggttttgtcatgtcacagtcttctgtctcaggaacgaacactgcaccaattcagcagttgctgagctttagcaacacacgtgaagtggaatctcaatgtgctctgagagtctgagtttcacaatgagaagaaagaagtgaataagggatgtggagtaggagtatgcagtcattc

SEQ ID NO: 39298 - DNA, 404 bp, Setaria italica
  Peptide Sequence Number=SeqID_105272
ttttttttttttttcatatggaaaattgaacatatagcataatccaggccctttgtggccataataatttctatacatctaaccatgagcgaaacaatgcttcttatggtacaatagaagttcatctggcaaaaagtttggtgaagaagtttgccggttttgggttctccaagcatgctacatgcacgtatctccctagtttgtcaacctgccttggctccccccttgtgtccttcttgcagatcttgcaggtcttatcaacccaaccatcctccacgtattccccatcgactgtatttgaaaccaacttggttggtcaatactaactattaattaactttatattcagtctcttgttcagaaaaaataactagcaattcagtattgtagtttttgacattata

SEQ ID NO: 39299 - DNA, 801 bp, Setaria italica
  Peptide Sequence Number=SeqID_105273
tacctaaagttcctaatcaaagaccaaatagaaacttagacagtgaaacgcactacctggcggctgctcggctctctagcccaccttcacccccacgacagcgctcgcacccctctagcggctgcgcccttcccctccatctttgcatgcgccggtggcccctcccctccatccgtgcccgtggccatgccgcgtcatcaggcagggcacttctcctcccccacgccgccgttggtcgcagccaagcccagggaggtggagcggatgaagcagaggcacatcagaggtccgctttggagtggggagctgtgctatcagctctcgccagaaccagtgacacttagcggcccgttgcgagtccgtgaattaaggaaattaaatgtgtgctgcaaattgaaggataataattacaatagattaagtgaattagggctgcaaggttttattcgagttgtccgcgactcgcattccttggatttaacattgcaatatttccggtgataggcgacgtcagtcaacaatgaaacagctacagattagagtttttagaagaaaagggatgtacaatataagtcacagggaggctacgtgcagggcccaccggccacgccgaagagctcgccgtctttttgtcaccctcctcaccgccggtgtgtttgcatatgggcacccgggagccagcgtcaatggcagtaggacggtcggcgacaaaagcggaaacaaagagacgtgttctaccaggactcgcaatacttagacaagaacttaagtaaccgaaacctaagaaacaaacgaaaacaa

SEQ ID NO: 39300 - DNA, 774 bp, Setaria italica
  Peptide Sequence Number=SeqID_105274
tgtcgtacgttctagttctaactaattgtaaactagtcttactagtatttagtagtttttagtaagtaaaagggtattgttactaattagtccgccgctagtcagccgagcccagggaggtggagcggatgaagcagaggcacatcagaggtccgctttggagtggggagctgtgctatcagctctcgccagaaccagtgacacttagcggcccgttgcgagtccgtgaattaaggaaattaaatgtgtgctgcaaattgaaggataataattacaatagattaagtgaattagggctgcaaggttttattcgagttgtccgcgactcgcattccttggatttaacattgcaatatttccggtgataggcgacgtcagtcaacaatgaaacagctacagattagagttttagaagaaaagggatgtacaatataagtcacagggaggctacgtgcagggcccaccggccacgccgaagagctcgccgtctttttgtcaccctcctcaccgccggtgtgtttgcatatgggcacccgggagccagcgtcaatggcagtaggacggtcggcgacaaaagcggaaacaaagagacgtgttctaccaggactcgcatcttgcagcttgtccgacctgacacgaacaaggccccggccggcattatgtcctgatttattgcagcacatcattgataatatattaacgtttaagtgagctttaaactccacattcgcgtgaaaatttcccatacggacatctaaattgcgtgagcatgca

SEQ ID NO: 39301 - DNA, 556 bp, Setaria italica
  misc_feature (2)..(2): n is a, c, g, or t
  misc_feature (9)..(9): n is a, c, g, or t
  Peptide Sequence Number=SeqID_105275
cntaaaggnggttaatctagctagtgtagacattgtgctcgaggatagtccttggaatgagcggaataccgaagttctggcaattacaagtgaagtgatggaagatgtgggtgttgagaagcctttagaagttgaaaatgatgttgtagcagttgaagacattggtgtcgagaagcctacagagattgaaaatgttgctgctgtagaacgcaacaatttcaagcttgagcctgcgagcgaggttgtgcacgatggaagcgtaaaggaggttgatccagctagtgcaaatagagtgctcgaggatagtccttggaagaagcagaatgatgaaggcctcgtaactacaagtgaagtggtggaagatgttggtgtcgagaaacctttagaggttgaaaatattgctattgacgtagaagacattggtgtggagaagtctatagagattgaaaatattgtggttgtagaagacgtcgatgtaaatcctgagccagcaagagaggcaagtatagtggttgtgtatgatggaagcgtaaaggactatccttgagcacattgt

SEQ ID NO: 39302 - DNA, 434 bp, Setaria italica
  Peptide Sequence Number=SeqID_105276
tgtccttggaatgagcagaatgccaaagacctggcaactacaagtgaagcagtggaagatgttggtctcgagaaggatttagaggttgaaaatattactgctacgatagaagatattagtgtggagaagtctacaaatattgaaaatattgttgctgtaaaaggtgatgatgtcaagcctgagccagtgagcaacacaagtatagtgattatgaatgatggaagcgaggttgatctagcaagtgaagacaatgtgctcgaggatagccctaggaaggagcaaaatgccgaaggactggtaactacaagtgaagtggtggaagatgttagtatcaagaaatatttagaggttgaaaatattgctactgcagtagaagacatcaccatcttttgctataatagcaacattttcaatcttttgttaggtcttctatt

SEQ ID NO: 39303 - DNA, 455 bp, Setaria italica
  Peptide Sequence Number=SeqID_105277
tttcttttagttttaattttgtttatttaatttaattattcctagtaaaacagttacagcagtcgacgctcagaaagagagcctagttcaagcaaactgcagacagatcaagaccatgagcatgtgcacgagtatccggaggaagaccagagcttcgacgaggagacctttgtgcggacgaaacgctgcccatgtggtttttcaatccaagtagaggagctgtagcttgagtgctagaaacagaccaggttctaactgtatgtaacatatggtccatttgaaagctggaacccagtacattcagctaggttaacattagtagtgttgtatctgaatacaatgctgatcgtggtgcgcttattattttacatagtactccctccgatctaaaatgtaagattattttaagttttttgttctttaagttaaaactttattcttaaaaaaaaaaaaaa

SEQ ID NO: 39304 - DNA, 239 bp, Setaria italica
  Peptide Sequence Number=SeqID_105278
catccactctctcactcacacagcgagcgagccccatttccgagacaggccacggagagcggcggcgcgtcagccctctgctggttcggtcgagaggagtagaaggaaggatggcgagcatggaggccggtctggtgcgcaagcacccgtcggacgccggcggcctccgcgaggcgcggtacgggccgcacgggcactcggcgagcgcccgcacggcgcacagcatgtcggcgtcggcg

SEQ ID NO: 39305 - DNA, 288 bp, Setaria italica
  Peptide Sequence Number=SeqID_105279
cctcaattccctttgcctagcttctcaatggtggtcgacgtctgaagaattgtacatgatcagctgatacaccactacatactgccgcacccttcttcttccttgttcttgctagtctagcaatagcaagtgatcgatcatgagcatctcggtgaacggacagtcggtggtgccgccggggttccggttccaccccacggaggaggagctcctcacctactacctcaagaagaaggtggcctcggagcgcatcgacctcgacgtcatccgcgacgtcgacctcaacag

SEQ ID NO: 39306 - DNA, 761 bp, Setaria italica
  Peptide Sequence Number=SeqID_105280
tgtcctttgttctttctttccttcctaccggggtcggttggtaagtcgtccgtccctagattcgccggaggcgaccggcgacctctctaactccgaccgggaggctttgtgcaatcagcaaccgttcctggcaacacaacatgggggtgccgagctggagagcggtgtgcctatcggtgctctgcgccgtgctgttcttgcgcccggccgcgggcatccgcttcgtgattgacagggaggagtgcttctcgcataatgtggagtacgagggggatacggttcatgtatccttcgtggtgatcaaggctgacacgccgtggcattacagcgaggaaggcgtcgatcttgtggttaaagatcctaacggcgctcaagtccgtgactcgagagataagactagtgataagttcgagttcatagttcagaagagaggtgtccatcgcttctgcttcaccaataaatctccgtaccatgaaaccatagacttcgatgtgcatgttggccatttttcatatttcgagcagcatgccaaagatgaacattttgcaccactgttcgagcaaattgccaagttagatgaggcactttacaatattcagttcgaacagcactggctagaggctcaaactgaccgacaagcaatatgtggtatcatcccatgaacaggtaatctaatcatgcctatcctgttgcgtcacagtgaacgagaacatgagcaggagggcagtccataaggcgctcttcgagtcagcggcgctgat

SEQ ID NO: 39307 - DNA, 698 bp, Setaria italica
  Peptide Sequence Number=SeqID_105281
ggccaccggccgcgacaaggccattataacgccgtgaagcgcatcggcatgcgcaagacgctcgtctcacaagggacgcgccccgcacggccagaagtccgactggataatgcacgagtaccgcctcgacgacccctccggcggcagccgggggagggtacggctacggctacggctacggcgggtacgaggggcccgaggagcgcaagtggtggccgtggctcgtgcccaccgtgatcgtcgcctgcatcgccgtcttcgtcgtcgagatgtacgagaacaactgccccaagcacgggagcccgctcggggagtgcgtcgccggcttcctgcgccgcttctccttccagccgctccgggagaacccgctcctcgggccgtcgtcctccactttggggaaaatgggagctcttgactggaacaaaatcgttcatcagcaccaaggctggcgccttattagctgcatctggcttcatgctggtcttatccatttggttgtgaacatgctaagtttgctgtttattggaatccgccttgaacagcaatttggatttggtaagcttatgaccgttctgaatgattgttatgatttctaacctcttgacattttggttggttggtaaggttttttttttaaacaaattctttcttctttccatttcttcctaattaaaaaaattcttctcttcattctccaa

SEQ ID NO: 39308 - DNA, 547 bp, Setaria italica
  misc_feature (55)..(55): n is a, c, g, or t
  misc_feature (508)..(547): n is a, c, g, or t
  Peptide Sequence Number=SeqID_105282
aatcgcctgacagcaatttggatttgttcgcattggtgccatatatctactatcnggttttggtggcagcgtgctgtctgcactcttcctacggaacaactacatctctgttggtgcatctggagctttatttggcctgcttggatccatgctttctgagctactcatgaactggactatttattccaacaaggtaagtacaggagatagataagcatacattttgttctgtccagctacttgataattgtcttacacatctacttaacttctcatgcaggcagcagccataattactctcctgtttattattgctctcaacttggctattgggatactacctcatgctgacaactttgctcatattggtggattcgcgacgggtttcctcttgggttttgttctgttggcaaggcctcaatttggatggatggaacgccacgagttgtccttctagttactttagttcctttaaccttttcccttttaagtttttactttttaaagnnnnnnnnnnnnnnnnnnnnnnnnnnnnnnnnnnnnnnnn

SEQ ID NO: 39309 - DNA, 430 bp, Setaria italica
  Peptide Sequence Number=SeqID_105283
cgctcgtcttctacaagggacgcgccccgcacggccagaagtccgactggataatgcacgagtaccgcctcgacgacccctccggcgacgccgccgccgccgccgccacggtcgctgctgctgctgcggcggcgtcggacgccagccaggaggacggctgggtggtgtgcagggtgttcaagaagaagcaccaccacaaggagtcatcgggaggtggcggcggcggcggcggacgaaacggcggcaaggaagcggcggtgaaccacggcctgcagtactcctccagcgacgacgcgctcgaccagatcctgcagtacatgggcaggtcgtgcaagcaggagcacgagcagctcctctcgccgcagcttctagtcggtcggtcggtcggtcgtcggggtagggtcggtcgtaggttaccttccggtcctaa

SEQ ID NO: 39310 - DNA, 1842 bp, Setaria italica
  Peptide Sequence Number=SeqID_105284
tggaagtgcaacacctaggcgcctcagttttcacttacacttccggcgaaatatgtagcgttcagattcagaagaccattttttatgctgtttgtctgtagatatgaacaaagttctttgttcttttttttttagcttgcgcacacacgagagacaaagtagaatacgaatacagcagcagagatcaatgagcatctcggtgaacggacagtcggtggtgccgccggggttccggttccaccccacggaggaggagctcctcaactactacctcaagaagaaggtcgcctcccaggagatcgacctcgacgtcatccgcgacgtcgacctcaacaagctcgagccatgggacatccaagagaagtgccgcatcgggtcgggcccccagaacgactggtacttcttcagccacaaggacaagaagtacccgacggggacgcgcacgaaccgcgccacggcggcgggcttctggaaggccaccggccgcgacaaggccatctacaacgccgtgaagcgcatcggcatgcgcaagacgctcgtcttctacaagggccgcgccccgcacggccagaagtccgactggatcatgcacgagtaccgcctcgacgacccctccggcggcggacgaaacggcggcaaggaagcggcggtgaaccacggcctgcagtactcctccagcgacgacgcgctcgaccagatcctgcagtacatgggcaggtcgtgcaagcaggagcacgagcagctcctctcgccgcagctcagcggcggcggcggcgcggggagggcggcgaggtacctccggccaatcgagaccgtgctggaccggcacgggttcatgaagctgcccccgctggagagtccgtcgtcggccgccctgacgacgccgcagccgcacgtctcggcagcaggcgacgcggcggcggccaccgccggcggagacgacctcctcctccacggcggcgtgagcgggatcacggactgggccatgatggaccggctggtggcgtcgcacctcaacgggcaggcgcccgacgccgcggccccggcggcggaccacctctgcttcgacggcggcgccgacgacgccgacgggctcgccttctacaccgccgccaccacgaggctgctcggcggcggcggcggcgaggacgacctgtggagcttcacccggacgtcgtcggctccggccacgtcgacggagcgcctgagccacgtgtcactgtagccgtctggttccggccgtcgtcggcctactacgtacgtaaagccccctagctagctacgtgacatggcgagctgcatgccctgctgcgctggtacagtaaagagacaacgccaacaacaccaagaagagagggagagagaaagggaagaaaaaaaataaaagaaagatctctagagagagagagagagtgattttacaaaggtgattagagtgatgagagagaaaggagctgagcaagaaatgggtattggagattgctggtttctgtaaactacttcgttgagcgttgtatgtttataactcgaggttgataccttttcaaaaatgttgtctagaacgccagattttcgcacgttctgcttgtccgtaattcgagcttcaactgtaatcatattgtactgactagtaagtcttagtttaacaacgagcatccatagccgtcctagctcagtggtagagcgcgtggcttttaaccacgtggtcgtgggttcgatccccacggacggcgctcgttttattatttgttactttttagcagcatttttcagcgcctcgttaagggggacgaaggtttctaccggttattgttaaaccgtttttccttaacttagtttcca

SEQ ID NO: 39311 - DNA, 864 bp, Setaria italica
  Peptide Sequence Number=SeqID_105285
gaggaggagggaaaagccatggcgagcaacggggacgggaagggccgcgtggcggcggcggcagccgggggagggtacggctacggctacggctacggcgggtacgaggggcccgaggagcgcaagtggtggccgtggctcgtgcccaccgtgatcgtcgcctgcatcgccgtcttcgtcgtcgagatgtacgagaacaactgccccaagcacgggagcccgctcggggagtgcgtcgccggcttcctgcgccgcttctccttccagccgctccgggagaacccgctcctcgggccgtcgtcctccactttggggaaaatgggagctcttgactggaacaaaatcgttcatcagcaccaaggctggcgccttattagctgcatctggcttcatgctggtcttatccatttggttgtgaacatgctaagtttgctgtttattggaatccgccttgaacagcaatttggatttgttcgcattggtgccatatatctactatctggttttggtggcagcgtgctgtctgcactcttcctacggaacaactacatctctgttggtgcatctggagctttatttggcctgcttggatccatgctttctgagctactcatgaactggactatttattccaacaaggcagcagccataattactctcctgtttattattgctctcaacttggctattgggatactacctcatgctgacaactttgctcatattggtggattcgcgacgggtttcctcttgggttttgttctgttggcaaggcctcaatttggatggatggaacgccacgagttgcctcagactagccaacctcccaagtacaaaccctaccaaaagcaagacaagcgctaa

SEQ ID NO: 39312 - DNA, 756 bp, Setaria italica
  misc_feature (746)..(756): n is a, c, g, or t
  Peptide Sequence Number=SeqID_105286
gtggcagcgtgctgtctgcactcttcctacggaacaactacatctctgttggtgcatctggagctttatttggcctgcttggatccatgctttctgagctactcatgaactggactatttattccaacaaggcagcagccataattactctcctgtttattattgctctcaacttggctattgggatactacctcatgctgacaactttgctcatattggtggattcgcgacgggtttcctcttgggttttgttctgttggcaaggcctcaatttggatggatggaacgccacgagttgcctcagactagccaacctcccaagtacaaagcataccaatacgtgttgtgggttgtggcgcttgtcttgctgttgatagggtttgtgatttcactggtgatgcttttcgaggggaagaatgggaacgatggctgccactggtgccactacctgaactgcgtgccaacatcaaagtggaagtgcaacacctaggcgcctcagttttcacttacacttccggcgaaatatgtagcgttcagattcagaagaccattttttatgctgtttgtctgtagatatgaacaaagttctttgttctttttttttggattggagtttgctggtttctgtaaactacttcgttgagcgttgtatgtttataactcgaggttgataccttttcaaaaatgttgtctagaacgccagattttcgaaaaaaaaaaaaaaaaaaaactggacgagaactannnnnnnnnnn

SEQ ID NO: 39313 - DNA, 1079 bp, Setaria italica
  misc_feature (1055)..(1079): n is a, c, g, or t
  Peptide Sequence Number=SeqID_105287
cacgcggtacaagacttagcttgcttcgtgagttttcctctgaatcgattgccttgcttcttcctccaccggggcggtggaagcgccgcccagatcgccggaggcgaccggcgacctctctaactccgaccgggaggctttgtgcaatcagcaaccgttcctggcaacacaacatgggggtgccgagctggagagcggtgtgcctatcggtgctctgcgccgtgctgttcttgcgcccggccgcgggcatccgcttcgtgattgacagggaggagtgcttctcgcataatgtggagtacgagggggatacggttcatgtatccttcgtggtgatcaaggctgacacgccgtggcattacagcgaggaaggcgtcgatcttgtggttaaagatcctaacggcgctcaagtccgtgactcgagagataagactagtgataagttcgagttcatagttcagaagagaggtgtccatcgcttctgcttcaccaataaatctccgtaccatgaaaccatagacttcgatgtgcatgttggccatttttcatatttcgagcagcatgccaaagatgaacattttgcaccactgttcgagcaaattgccaagttagatgaggcactttacaatattcagttcgaacagcactggctagaggctcaaactgaccgacaagcaatattgaacgagaacatgagcaggagggcagtccataaggcgctcttcgagtcagcggcgctgatcgcggccagcgtcatccaggtctatcttctgcgccggctcttcgagcgcaagctggggacatctagggtgtaacactctagtagccgcaccccctttgtagccaagatcatcccaacgcgactgttataccgaactaagtggttgctagatctgctaatactacttgcttgtggacacctgttacatgtaatcttttgtggttccatagatgacaactctgaaagttcaaactgtcaatttagtctccatttcacctccaaattttcaccttgctctatagtcccgaagcacggtttgtgtttgttgaatgagttnnnnnnnnnnnnnnnnnnnnnnnnn

SEQ ID NO: 39314 - DNA, 546 bp, Setaria italica
  Peptide Sequence Number=SeqID_105288
tatcatttgattaattggtcagaatctgcaaattgtcgagtatataaacttcctttttgccaaacttaaaatatctacacttcacatggatgggctaattagtacagtgaaaagacccaagtggccatataggaaagaaaatgcatgtattggttgcgtcatgaaggccgctgctaaatttccagaggcttcccggtcgctgcagtgaccgggactggtgcatggccgactgctctaacaacctgaggtggaaagacgtcgacatgccataacttacaattaagacccaaaggtaggacgatgaagatgaaacgaaatttcataccatactgtacatgtcaggactcgggaggaactgatctaattttttcctccggaacatggaacaattttacctcatataccatatcagaaatttagctttccttcccattggtgtggctcaggatcactcccatctaccatgattcaaatcaccatatccatctattttagattagatgtttgtatttgtatgcatatcctcggtttggtgcggagggctag

SEQ ID NO: 39315 - DNA, 570 bp, Setaria italica
  Peptide Sequence Number=SeqID_105289
cgagcactcgtgaaggcgttgaggagaggctgctgccccggctgacactgtcgatccgtctctaccgacggccgcaagccaagagcacagccgacggtgaggttttccaggtgccgcacgtacgtcaccgtccgtaagagcacttggccggaagatacgcattctcaaggaagttagaaagcaactgcgctttactcaaggccccaaaaaatcaagcaaggacttggtatccaccaatcattcatggtccaccaccagctcgtcgacatcggtgatagatggtgggtggctgcttcaatccccacatgagcattatgttggtgaaacggtatgtgaatgcatctccaacacgccaagttgaaggaagccctaaatgaaggtgaatagggttgcttagcttgtgagctattctagggccatgaaagcatctatgccgaaagaggatcgatgcctcaataatcattgtttagattttgttgagtttgaggttgttacctattgttgtaataggatcataaagtttcatgtgcctcttgaagcaatctagaatggcatatatttgtatctgtt

SEQ ID NO: 39316 - DNA, 636 bp, Setaria italica
  Peptide Sequence Number=SeqID_105290
ccagagcatgttttggagttgctgtttgcctaataattctaggctgattcagcgctgattttgcttggtggaatgattgtgcgggaccaagttcatacatcatttctatcagaagatacatggaacctgcaaatatttaaacaaatgccatcaccgtctgctttgtatttcattgcttgttacttctcaaggataggctttcagggtgacttatccaattctatctttattcggaagaatctgctaagatcgactttggagctagttcattcaaaggaattctctcttttgaatgagcaaaatgttgttctcattcctgaagctattttctcactgtgtgctgctttttcgtcattaccaattaattcatcagatacattacagctgtttggtgattgtaaaatttattccaagtctcttgagaatgagagctgggttctcaaagatgaactgctctactcagtggaagctttatcagaaatcactctggatagttctgccaaggttatttctgataaatgccaccgcgtacaccttcctgggactatccagcaaccaatgcttcttgagctcatggacttcatcaaaggatttgtggcctcaaatgagcagtttgagaaattggacttatctaat

SEQ ID NO: 39317 - DNA, 341 bp, Setaria italica
  Peptide Sequence Number=SeqID_105291
tgttgtacttccttcccgttcgttcccctaagcgactgcgcgacgggtgtcgccgccgtgccaaagttctgccgccgccgtgccgaagttctgccgccgaggcacaatgagagcagaattgcggatagggaatttgatgcctgtgatgcggatgaaaattataacccaatgcctagttcttcagcatcaggatggccagaagatgaacctcttgttgaagatgtcaacatgaatgccttccgtgatgagttggctcatgctttgttcatggagtgttattttttttttgttagcttgattgaggacttgtaagtttgagtgagacatctcatttgtatgga

SEQ ID NO: 39318 - DNA, 247 bp, Setaria italica
  misc_feature (20)..(20): n is a, c, g, or t
  Peptide Sequence Number=SeqID_105292
cgcgcagtagtcgctcacgntccccaggaacgccctgcgtccagagacagccaggtgttacatgagcagccgtgcatcatccaaattccacgtgttgcgaaacgagcggccgccacgtcacgtgcctcttgatggcgccgaggccgcggctaccgacgacgagcagcccggcgcccatgtcggccgcggcgcggcacagcgcctccctgggctccccttccaccaccaccacctccgttcgctcacc

SEQ ID NO: 39319 - DNA, 439 bp, Setaria italica
  Peptide Sequence Number=SeqID_105293
gcgtggcgaattcctgaatacatcgacatcagaaggatcgctacacggacgacggatccaccaggaacaggtgaggtgcggacacaacggccaagggaataactgaacaaccgtaacggatcgagaagtaatactgctcgtgttctttcctctggccggcgatcagctcgcctccgtccgctgggcgtggtcgtcgtcgtcgcgaggcggcttgaccaccatgatcgggcagctcgcgtggtgcgcgcagtagtcgctcacgctccccaggaacgccctgcgtccacagccaggtgttacttgatggcgccgaggccgcggctaccgacgacgagcagcccggcgcccatgtcggccgcggcgcggcacagcgcctccctgggctccccttccaccaccaccacctccgcgctcaccccccgttggtggcaggtccgct

SEQ ID NO: 39320 - DNA, 623 bp, Setaria italica
  Peptide Sequence Number=SeqID_105294
ggaacattttcttcacattaaaggaacctgtgtgtctatctctgtaggctgaagaaggtcctgcttatcagttgatcatggaagctgttaaaaattgtttgtagatttttttcccgagatgttagatgtaccactattctaggtttcaatgcatgcccaaattcactgttactaataatgtggaagctaaatttactttcagattccaaaacacaagacgtaatacggttacgccaaaaagaagttgggcatgcaaaagaaattggtgtcaggttctacgtgacagaacatttcagaggtcgcagtacatggagcaggggtgagcgggaggttattgccaggttaaggataagaaactgctggcaattgaagttgatgtgcaatttctacagtgtttacttggttcccagtatgttaactaatgtggttcctaagatacgcttgattttggtcggcgccgataattttgcgaggagagtttctgtagaaattcaaacgggtcccaactcccaacatgctttctgcaacaaacacgcgaaagagttgttgggcctgttgtggaccacggcaaaggattgtgggccggcaattctctcgatttattgataccaaaaaaaaaaaaa

SEQ ID NO: 39321 - DNA, 377 bp, Setaria italica
  Peptide Sequence Number=SeqID_105295
ttaataaattaaagatagcatttgaattaggtaccatggaaaagcacgggcgtggttataaaattcgagtagtaaaactaaactaaaaccgaaactaaggaataacaacctaataatgggttgatttccaaccgcgtttactttctctttccagctttcgtaccatctacgtcattatttttttcctcattcccgacacgagcatacacatgcacacatgtgatgatgctgcaaccgactagtgcccccgtcagatatgtccatcgtagatgttgcaaaaatttcataaacaatattttgggatagaaactcaagaacaaaaatcaacaaaaaatttatgcacgaaaaaaaaatttatacgaaaaaattcaaagaac

SEQ ID NO: 39322 - DNA, 1499 bp, Setaria italica
  Peptide Sequence Number=SeqID_105296
aaacaatggacatagtagactaaattaatttaattcgagtacggattaacacaaactgtacaaagatgcccttgactaaaccattaaattaagagctggagtccgttaatcagttcccccattctcaccaagtgcgctaacaatgctcactaccattcaaactgctctacgactggtatcaacaaccaacatgcacaaaggcccaccgttgattgcacttacaacgcgactttaggccttcaaggcagcatgaaacttctcgatctccatcagtcccacaaggtgcgtggttggcagcaggaggcgaagcagagggagcatggatacaccagcggggactctgggcctaaccttattaactgcagaagccacaacatggggaggtgggatgctgtaccactggagataccaagagaggatcaccacatcgttttgggcatcaggccatctgcctgtggtcaaataacggccaaggttgtccttgaggttaggcaattccgcaaagatgtctcccatgcgcttcataagcgactccaagaacatggactgaataattcctccatttgtgattctaccatcaactaatgcttcattgtaggccaaagccaccttcaagttgggaaggaaaagggaatcatagaaaggaaaatgtcccatcttcaaatgctcccacattgattcaattattgtgtaaaaactgatgtagacctgtaacagtgatggtctatctttgctcatacattcatacagcacttgagagcagaattctcgaaaattgccattgcatctgttcttccatgactcggaacacaattttgcaaaagcaatcaagcttggattggctgaaaaagtgcttacgatttgatcaactctgaaggagctatgatcagtgctgtttggttgattactgcagctagcagatggcgtatcacaaacctcatgcattgcccgtgaaatcaaagactggcagccaattggatcatcagagtaggagcatgatccaacttttcgctttatgtagagtactcccccattgaatggatctgtcttgtctccagatctccaccatggcttgtcttcaggtgtaagttttatcacctgaggccaatatctaggcccacaaactcgaatactcttaagcactgagcgttctggcagaagacaaggtgtcacctcgcaatagttggtctcatcataatactctgtttcagcaatagtcacttccaatgggcaaaatacacaggaagttctgtgtcaacatccaccgtctgaacccaacgaggctctgtagatattacgtataggtgtctgaatgcctggagatgacagcgattgtcatttggtccagtgggcaaacgtgggtaaagtgagaccaataatgcagcaattccactattttgagttgaaaaagtgtgtgtcccgcctccaaggaacaagaatcctatcgccaagctcacagccatctgcaatccataattcatttgtccttctgcagtaaa

SEQ ID NO: 39323 - DNA, 465 bp, Setaria italica
  Peptide Sequence Number=SeqID_105297
ttggtccgaatatgcccaagctgaccacaggctccacagataagagtaccatactttccgcattgtctctttccttacttaaattgacaaatttaaacttcattcccactactcaacttcaattatcactctcgacttctcgaggcactttttgcgcaggctgatggtaaggagttcaccaccaatacaacataatcgcagagtacaccatagtgatcacactcaagcgcatccattcctagagcactccttttaactaagaggatgtcatttccatcgaatgtcatcgcagccttcagttttaagggcaacctaccttcagcaaaagaattccaggcctctttcacttctgttgcagtactaccctttggggtcaatgcagcagaatgagcagatgatttaatcatttgcccagcctcactctgcttggatttaatggcacctcgaccatatatagatgtgcca

SEQ ID NO: 39324 - DNA, 629 bp, Setaria italica
  Peptide Sequence Number=SeqID_105298
ccctttgaaagttatcaaggatccatcattttccattattatgcggttgctgctgcttctttcctccaggctcgacctacttccatgcaaggaattcatctgacctgattctctatcacaccagtcttctctgcttttgttctcagaagctaaaaattcaacatgtctttcttggtctacaagaaccttaggttgcttgatggtgatcatcttgcaaggtatatccttccctaattcagcaggaggctgaaatacaacagatgcctttagagtgtcaggaggataatcatccccacatttgaactttacttggacagattttttcttttcaatacattctggccctctggtttcaggaacttcagacaagaccatagttgtcaacttcttacttggcgtctttattcgcatctggctaacttcatctagaggattagacttggttgaatttgtatccattccagagttttcttggtcctccccatacttagggcacagtttgttggtccgaatatgcccaagctgaccacaggctccacagataagagtaccatactttccgcattgtctcttttcctcaagcgcatccattcctagagcactccttttaactaagaggtattgttcta

SEQ ID NO: 39325 - DNA, 666 bp, Setaria italica
  Peptide Sequence Number=SeqID_105299
cgatccttctgctaccacagctgtcttctccacctttgaatgaatagtagcccttacccacaaattagtccagaagaaatgacattatttttcacccatatgggtttaacttctgtacatataggtatactgtgcatgcactgttaccccatcgaatgccttgaatgcaaacatttataattaaatcaccgaccaatatcctgatgattgctggtccaaatgtaccttattcttttctgtttttctgttagaatttgccaaaagaataaccatcaccattatagttcaatattgacatctattgaaatggctctgtgaggatgtgcatggatgattctacagccttatcatgctttcagaaggtggtcattggataactctaccgactcttaactgtaagctaccacaaagatctataagactacagcagaacaacagctagcgacccagctactagtagagtagcagaaaaccaccggacttatttgcagttgattttgtaaaacaatttaactgctggtaaacctggctggaagtttgaaaacactggacactgtaggttaacataatgcagagtttccttacatcagaagacgggataaactgaagttgataattgttaataaatatgcatttttggatgcaacttaacatgggattatggga

SEQ ID NO: 39326 - DNA, 522 bp, Setaria italica
  Peptide Sequence Number=SeqID_105300
gcattgctaagaataggatggttactaaataattgaacaggtggcaaagatgtcctataaacaaggtgggatcatgcacaagagtaggttgcaatcaactcctagacttaatgcatacataaggaaataaccaataattgaactcatgaataataatttctaaaagtagatagacttagatgcaccgagacttgacttgattcataaaaaagttagtatcctctgaagatccttccacacaaggggccaattcaacaacctcttcaaaatcctgagggtcttctcagaattccaaaaaatccacttccagagcttctgtttctacgatatgatgtatgccatagtcaaagatgcaaaaccttttcgaacaaaagactatacaccttatcttcatgataaagttgcaaaccaacactaagctatccataaaaggttcaccacaatttaattcttttaactacctaacttaagctatttctttattagaaaagtattataattaattctaattaaaaacttaat

SEQ ID NO: 39327 - DNA, 646 bp, Setaria italica
  Peptide Sequence Number=SeqID_105301
cgttaaaccaggaaagcctcctcaaggttagaaaaggaagtgggaacccgaacggtgttggagctaaagggttttttgtttgacttgccgtattggacaactttaaagctgccacataatcttgatgtcatgcacatggagaaaaacatatgcaaaatccttattggaacattgcttaaaattgctgagaagacaaaggacacgatcaatgttagggttgatttggaagagataggtattagaccacatctacacatgctgaatactacggaagaggagtcatgcaaaatgccagaagctccatatacaatgggtaaaaagaattaggaaacttctttcggcaactatgttgcaaaactcttaagttggatattttgaataaactgaaaatagatatcctaataattttgtgcaagcttgagaaaattttccctcctgccttctttgatgttatggtgcacttggctgtccatttacctgatgaagcaatcataagaggcccagtacaatatggatggatgtatcctgtcgaaagaaggtgttggcgctaaaaaatcggccgattgatccttagcgtcggagacacgacctgggagaatctgcttagctcatgttcaggttatcgcctggtgcggtttgacggcgt

SEQ ID NO: 39328 - DNA, 413 bp, Setaria italica
  Peptide Sequence Number=SeqID_105302
atgttcatttgtgtgttagatcaattttggattacgatttgtacgtcctagttaacttgggtgtacatgcatgagtttgcgttgtaattgtgcgcagctgtttagacgacctgacggtacatgatcctcaggttctgatcgatctgctgttctcttgggatggtggagtcggtcccactgtagtcgaggtccagcgtgaacggtggctggtgagcagggtttcgcctctcgtcgtacagcggcgaggacatgttggcgtagatcgccggcagtgccatgccgtcgggcgcgtcccagttccagaacggcagtgcgaacgtgtcgtcgttgatgagcttgccgaggatcctctcgtggaagtacaggtagaacctgtgccacgggaagaagagccagcagttgtgtatctggag

SEQ ID NO: 39329 - DNA, 1243 bp, Setaria italica
  misc_feature (1)..(60): n is a, c, g, or t
  Peptide Sequence Number=SeqID_105303
nnnnnnnnnnnnnnnnnnnnnnnnnnnnnnnnnnnnnnnnnnnnnnnnnnnnnnnnnnnnccccttgaatgtattattttgtcaacagcactttgtaacaacaacctaattattagcttacctatattttatatttatgtttttttatttgacgcaaatcacattatcaatagagtcaacacataaaactcatatctccaagcaatacacatatgcaagggcgcaatggacaattgacatcttctatacattctaaaaagctaggagaagccgttttgccaaacgttttcgtacaaaataagccagagccagaaaaagctgcttttccatacgagccagagccaaagctgttttttcacgagccagagccttgccaaacggacccgtagtatatgttcatttgtgtgttagatcaattttggattacgatttgtacgtcctagttaacttgggtgtacatgcatgagtttgcgttgtaattgtgcgcagctgtttagacgacctgacggtacatgatcctcaggttctgatcgatctgctgttctcttgggatggtggagtcggtcccactgtagtcgaggtccagcgtgaacggtggctggtgagcagggtttcgcctctcgtcgtacagcggcgaggacatgttggcgtagatcgccggcagtgccatgccgtcgggcgcgtcccagttccagaacggcagtgcgaacgtgtcgtcgttgatgagcttgccgaggatcctctcgtggaagtacaggtagaacctgcgtccaattttgtcaaatcattaatcaatgtgcttctctcacttttagaacacattgctaacacacgaacacattcacaaaaagaactgcacacgcatggattcgtgcagcagcatgtacctgtgccacgggaagaagagccagcagttgtgtatctggagatccaggttcgggaacccgactggtcgtacgcggcgtcgcagtaggcacagtgcacgcgccactgctgcccgaagctgcgggggtcgtcgtccggcagctgcttcatcagcgacactgcccgctcgtacttggccaggtgctcctggtccaccaggtgcgcggccgggcgcacgcggagcggcgcggaggccggcggcggcttgaagtcgacgatctccgtgcccgtgcgggacgtgaggcagcagctgaggtcgggcgccgaagtacggggtaattagtttagggttacggggtttaggtacttaagtttacta

SEQ ID NO: 39330 - DNA, 657 bp, Setaria italica
  Peptide Sequence Number=SeqID_105304
aaatctatgccagcaaggcctaaatctggtgggcatgcagattgtgatgatgacaatgatgataaaaattatgatccacctcccaggaagcctattaaggctgatgaggatgatgaggccctagttaaacccgtggtgaggagcagtccagatgatggcagccatacatctgtgaaggctcacaagaagccaaagctacgagttcgaattagctttgcgaagagtgttgcttcagctagtgtgactgctagacactctggtttggaatatgaggaggaggtcgcccgctcgccttctacaagcacagaaagttctgaagacagtgatggtttaggaggtggaagcccaggctctcagcatcaactacaaaagggagaggacggcaatgacactgctgaggattcatcccccaaaatggttctagataccgcaaaatcaactgattcagagcctaagtgagatgggactgtacttttctcacaatagacttcaacaacctgccgttccttgtgatgaaaaggagagtgcacattctgctccagagaatactggatccataatgtgctaaacttggaacctgcaagaacgatcggagatattttttcgccacagtcgtgtacatctgactgtaattgtggctgagttacgagcatgtac

SEQ ID NO: 39331 - DNA, 1887 bp, Setaria italica
  Peptide Sequence Number=SeqID_105305
atctccgatttgctgggcctagatatgccgatgtgggtggtcagcgcccagagcacggtgatgaactcacctccttgcaccagggcctcctcatgccccttcacacgctcctcgtcgctcgacgggccaagtatataatgatctccgtccacacgtccgctaacacctgccacttgttagtttttgtcattagtgaccttgcaagatttacaccgtcttgtacaacttttattttgtcatcatcactctggcctgcagttgaagaaggttggctttgccttaggggtgtggttttctcgtccatgatcttctggactcgtttgtgctgcgacgagagatagtagtcctgacaccctagcatggccttcaactccgctttcatgtcctcaaagacacactcgaccttttctggattgtcaggcagaagctccgggtggaaagccaccaagtaagcacagtatttggacagcctaaaggctaccttcctcctgcttatgtcctcgccattctgaggggtgtcacacttgacctccatgatgctggtggcaatgtgccacgtgaggatcacctcagcaacactattgcttctgcatgcccatgagaggtcctggcaataaaggttgttgttcctattatgtagtgtggacatgccattggtaagagggtttgcttggggatcgtcatgctggttggcaaggtacttcatgatggattctttcacactacttggcaccaccactgtttttaccgccatgctggtgaatgtggcgaagagaggtaacttgggtggccaacgaaggttcaacacagaaaattgcttcatcctaaggtcagcatgactcatcttggtccgcagccacatgataatactgaagccccccaatacaaggccccccggaaaggtggacctcttcagccaacttggttttgcgatgtagttatagaccaatgataccatgaaccagttggagagtaggaaaacaaagaactcccatatttcctcataaaagaagattatgaatagaaggatagtgatggaaaggtctactatggaaaagaaggctgaaggtgaacttgtggctttgagcagaaggcatatggctatattgccaacaccatattgtaaggtgtagttatctgcaccgaggctgtggagtgcgtacctgacatctccattgccacagagaataactgtcatgaagcacaagaaagctacgactatgttgacaagaaagtagtttatgaagaggaagaaggggcttgcaagaaccactgggacaacagagtgataatactcactaaggaagttgacctcatcattcagaacttggaacactgcttccgccgacgagctggtttggcctttgttgtataggcctttcaagataaggttctgggagttgcgagcttcttctttggtcaccgccggcaggtgctcgaaccttcgacggagcagcttgaagagagcaaatgagaggcagattctcttcaagctttgaatttgctgaagggagaagaacttgtccttgtcatcgagctcccaaactttacgtacagtgatgatgctatcattttcttccagcaatttgacgatgctatcataacctggggacttggcctttcccagcttgtaaccatctgcagtgggctcaatatccaccagcttctcttcgcccatgacaatgtaattgcacgtcttgatcaacgtgtcgttgtcatcctcctgctgcaggtgggcatcttgaggcggctcccattctagcatctgggacatgtaggagctgatgagccgggcgttcttgccatgtgcgtatgaacgcttccccacctcggtgaaggcgattctttgcaacaccttggtggcacaaaggatccagagtatgctga

SEQ ID NO: 39332 - DNA, 1055 bp, Setaria italica
  Peptide Sequence Number=SeqID_105306
ttttggtgatgtaatcttgtcagcaataattattaataattagtacctatatgagtgcccgtgtcaccagttacaaggcaaaggcaagtacctaaaacaaaacaggtaactgcattgcagttcatgcagtattcagaatgtttggcccagatgatgatcatgacgtggcatcagcattcagtagagtcaaaacactcgaggacggacgtggctgctggctgtgttggcgcgtgtactcccacacggcgatggcgccgctgacgtggacgttgagcgacctcaccacgcccagctgcggtatctccacgcacgcgtccaggatgtggatgatgtccacggggatgccttccttctcccggcccagcaccagcaccgtccgccgggggaactcgaaccggtccaggggcctgctgtgggccgtctgctccagcccgatcaccgagtacccctgggcccgcttcctctccaggtacgccttcacgctgtccaccgggagctccgtgatgggcagccatttctcagcagtcacactgatcagttggaactgcttgtccagaagaatgctcttgtcggcaacaaccaagccagctgctctgaagacctcgcatgttcttgtcagacccgcaaggttaggtatgcggtctaccagtgatgccactacaatcagttcttgctggctttgcttgatcgtttccgcagcgtgcaatcttgcttctagtgctaggttgaaaagctggtcatcttcctcaatctcggaaattaatcttgagtggtccctggcgttcaagttcaatgcttgctcagagtccctgcgaggcgttattttcttctggaagtccagtgcatcttgacaaccaggttgtaacaacacagacactttctcaccacttttatcctcgtcgccgtgcccttccaccgcgagaccctcattcttgattgttactgtatcttttgccatagcatgtctcaagtcctctctcacatcgttcaggaattcaatcacacgctccatcactgacacaggaacacactcaaattcagacacctcagggcga

SEQ ID NO: 39333 - DNA, 334 bp, Setaria italica
  Peptide Sequence Number=SeqID_105307
taattcttggcattgcatgttgctataatgttactaggctttatattccctagtaatatcaccattattaatgacttttatatttgatactagtttttcccttttgttggtggctcacgtaccgacgtacggtttcatcttagcctacccaggttgcctgtgactaaaatgctttgttgtcgtctcgtaaatatgctatgtatattgctcttgtagtattgatcattatcgcagaacaatttgttaacttaccactgaaccacctttattaaccacaactccacaagcccttattgcagctgaaggttttttttggttgacaacaataataaga

SEQ ID NO: 39334 - DNA, 508 bp, Setaria italica
  Peptide Sequence Number=SeqID_105308
acaaggtaggatatgttctaattgcaaccggtggggatatattgtactggtctatacagtatacttacatattttagggctataaatctatatctatgagtcgcttaaagtagcacgagtaccgcttgtgcacaccatgatggcgtaaaagtccaattgcaatctatattgatacattccacctggtctatatgtatatggccatctatatgaagttctctctcttctcgcgtggtatttctataagaagttggtagattgtgtctatgcatgtgctggaatccatcctatcttatagtactaattcacatataactatttttcaatatctctgttttttgggtaaccaaagttcattagtgaaaccattatataccgttaaaaacattggatgtgtttacattaaaaatttaaatcattctaactttcagggttctgcacagtgcaacgtccgaggtttgtaggcatggggcgtcgaaaccatagccaaaggggctgccaggcttag

SEQ ID NO: 39335 - DNA, 486 bp, Setaria italica
  Peptide Sequence Number=SeqID_105309
tagactagtactactagacctgaattggtgaagcttgcatgattggttttgtggtagtgacctgtttagaaacatttactgcttttattgctgttcctcctacagctgcctgtgcaccagaagggtctgagttgtcttgtagtagcaaggcatataaactctcaatgtcctcagatgatgtagagtgcattgaaggacagggcaaagcaaatggagcacaccctgaattggtaacggatgaagtagcttctataacaccagacttggcaaagggtgatggcaatgctgaatttgctgatgcacatggtgtagcagcttgtatagtagcagactcagtaatagctgatggcaaagttgagttgaccgaagcatatgatgaggaaacttttacaacacctgacctggtaactggtgatggcaatgtgaactttacagaaacagaagatgaggcttcagcttttgcagcacctggtgtagcatcgggtt

SEQ ID NO: 39336 - DNA, 436 bp, Setaria italica
  Peptide Sequence Number=SeqID_105310
cacaaaatctgatggtatcacaagcaatactgtaaatcttgaggtatttgaacatctgaaagtcagtttacatcatggcaggattgttgatcatgagaatgaagtagttgccaatgctattggagtaggacctcatgaagttttcagggcagcagatcctgatgcacctattcagattattaatgaagatcaagaagtagtgaatttgccggaagtagtggagttcttgcaggccacaggtttaaccgatttcgggttacaacaattgattgaatctgcccaggatgagcaagtgtttgttctattctggaatagatcatttcatacaatgattaagcacgatggcaatttgtatgctctacacaactatatggataacatatctacaaacattgtatggagagagttcaatttacaaggtgaagggcaattcttt

SEQ ID NO: 39337 - DNA, 371 bp, Setaria italica
  Peptide Sequence Number=SeqID_105311
cggcggcgcggtctgcggcggggtcggtgccggcggcggcgccggggacgcgagcatgtccgtcgtgggcggggtcctgagcgggatgagcagcgtggtgaaggggaagatgatctggtcggcgtcgaggctgttggcttcgagcacgtcccgcgcggcgacgcggaacctggcggcgatggaggtgacgtcgtcgccccacatgacgaggtaggacaggaggtggcggacgccccttgcggcctgcgcggaggacgggcacgcgcatcggagcggcacggtgaggctgagacaggccccggctgtcgtggagcgggttctgcgcgatgagcgcctggcaggtggtgaggccctggtaggtgatgttggcg

SEQ ID NO: 39338 - DNA, 484 bp, Setaria italica
  Peptide Sequence Number=SeqID_105312
tttctactagactagtactcgcttcagattattaactgttctaagcttatggtacattccaataactaagctgcctagttcagtgacaaatctcctcaatctgcgctatcttggcatccgttccactctaatcaaagagcttcctcatgagttgggacggttacataagttgcaaactttagatgccaagtggtccatggtccagaggttgccaggtagcataacaaaactcaaaggtctgcgtcacctgatattgtttaggcgtgttgctgcagattttaggtttctgtatcctggtaaagcagttgtgcttccaattggaatggaaaatctgacctgcctgcagactctgaaatcattgaggctgatgagaagacggtcgaatccttaagaagcttgaaacagatgaggagcttagaattatttggtgtccacgagggaaatattattcatttgccatcatccatctccaaaatgagccacc

SEQ ID NO: 39339 - DNA, 1081 bp, Setaria italica
  Peptide Sequence Number=SeqID_105313
tactaactacttcctactgatgggtgctcttatttaccattcattgaaatgcatgaagctactaattaaggctggtgctgatgtcaatggcaaaggctctttgatatctcctctagtaattgctacgatgcggggaggttatacgaatgaagttcggttactgttaaaggctggagcagaccctaatattccagatgatttgggtagattgccagtggagcttgctgcattaaatgattgcatggaagaagttgaaatgctctttcccttgacttcaccaattccaggtgttccaaactggagtgttgatggagtaatctctcatgcaaaattggaacataaaaagccattggaggaacgtcacattgcaagaagaaaagctatgttcaagtcacaggcaagtaaggcattcaagctgaaggattatgacttggcatcaaaatgttacggtttggctatagatcatgcaccagatgcaacgctatattcaaacaggagcctctgtcgactgcaaatgggtgatggcgaaggtgccctgtcagatgcttacaagtgcaggatgatgcgacctgactgggccaaaggttgctatcgtctggctgcagctcacatgctactaggggagcacaagcaagcctatgacgctcttctggatgcgcagaagttggatcctggaaacgaagagattgagagagaactacggaaggctatggaactaatgaaggcctcacccgatgaagatgagctgtgaagcgtggccgtctgactatgagcagcatgtgggggtcacagaagggagtgatcaattccaagtgattatgtttagttagggaaaaggaatgccaaatgtctaacgaattgtaaggagaagcacgcgagaatgtgttctgcacactgcaactgaattagtctgaaaagttgggagggcgctctgcgtcaagacatggtagaaattgctggtgaaccctacgtacttgcagctgcaaatactaaattactaaacgcgtggtgtgaaattgctttaaccggcgcacggtattgctgctcggtggctgaatgattttatcgagttgacttttac

SEQ ID NO: 39340 - DNA, 792 bp, Setaria italica
  Peptide Sequence Number=SeqID_105314
taaaatacggaccaaaacaacaacacttgaatgcacttggttatgctgaggttgagaaggggttcaaggaaaggactggaattgtggctaccaagggtcagatcaagaacaaatgggacaagttgaaggaagatttcaaagcatggaagaaactaatgctaaggcaaacagggactggttgggatcctataaggaagactattgctatggatgatgaatggtggaaaaaagctaagatctgagattccgggttgtggcaagttccaaaagaagggccttgagaatgaagatgaattagccaagtgttttgctgacattactactattggtattgatcattggtctccttatgttgcgaatgttgaagcactagaaaatgttgacgagacacaagatgaggaaatcaattgtgagccgcaggatgatgaattcattccggatacacaagaggaggatattggtattactcctccacccgcgagtggcaaaagattggcaaggtctattgatagaagtggtaagaaggcgaagtctggaaatgcactcctaattcaagaagcattaacaagtatggcaagttcagccaatgaatatgtttctaagagacatggaaaatattctattgatgaagtcatggaggttgtgattgcttgtggggccggctatgatagcaatgaacattacatggcgtctgaactgtttgtgaagaaggagcaaagggagatgttcatgaccttgcctactaatgagattaggttcaattggcttagaaggaagtacaaggataaatat

SEQ ID NO: 39341 - DNA, 305 bp, Setaria italica
  Peptide Sequence Number=SeqID_105315
accttacactttggatcaattagttcagttggattcaacatatgactgcaattgtcacattgatcacctcgcgcagcttgattagtacatccttctgtagggcatgctccttctacaagtctgtctgccaaaaatctttgacaagtatcacaataaagctgctgcatggtattttctgtgagacaattgtttttcatcagtttatggaaaattgcttggcatatttctgtctgctgaggagaggacgttcgtccaaacttgtcaaattttatgtcaaaccacttgtaaacctcattatggatagc

SEQ ID NO: 39342 - DNA, 2359 bp, Setaria italica
  misc_feature (2312)..(2359): n is a, c, g, or t
  Peptide Sequence Number=SeqID_105316
ataaaaattttagataagttttgggcggcacgtcctctcctgagcaaacagaagtctgccatgcaattttccataaattgatggaaaataattggctcacagaaaataccatgcagcagctttactgtgatacatgtcaaagatttttagctgatcggcttgttgaaggaacatgcccaaacaaagtctgtaatgcatcagcacgaggagatcagtgtgaatcatgcagcactttgttgaatccaaccgaacttatcgacccgaagtgtaaggtttgtaagaatactccacgtattcgtgacactgatcacttattcttggagcttcctctattgaaagacaagttggtaaactacatcaatgaaacttcagtagccggtttgtggagtcaaaatgctattcaagcaacaaatgcatggctgaaggaagggctaaagccgcgctgcatcaccagagatcttaagtggggtgttcctgtaccccacgagaagtataaagacaaggtgttctatgtttggtttgatgcacctatcggttatgtttctattacggcatcctatacacctgattgggagaagtggtggaaggatcctgataatgtagaattgtttcagtttatgggcaaagataatgtgccatttcacacgatcatgttcccttcaacactacttggaactggggaaaagtggacaatgatgaagacaataagtgttactgaatatctaaattatgaagcaggaaaattctccaagagtaaaggtattggagtctttggtaatgatgcaagggatacaaatcttcctcctgaagtatggcgatactacctgcttatgaatcgccctgaggcatcagatacactctttacttgggctgatttgcaagccaaattgaacagcgagttgctgaacaacttggggaacttcatcaatcgtgtgctaagtttcgttgcaaaaccagctggagctggatatgattctattgtacctgatgctcctaatgcggaatcacatccattgacaaaggcgcttgcagaaaaaactagtaaatgggttgagcaatatctcgatgcaatggaaaaggttaaactgaagcaaggactgaagagcgcaatggccatttccagtgatggaaatgcgtatctgcaagagagccagttttggaaactttacaaggaagattcggcagcatgtgcgattgtgatgaaaacttcagttggtcttgtctacctccttgcctgtcttctggagcctttcatgccgtcattctctgaagaagtattacgtcaattgaacttgtcccctgaagaaaacctgtcattcagtgaagaaaaaggagaaattgcaaaggccaaatctccttgggattttgtaccagcagggcacacaattggaaagcctgcccctctattcaaggaattgagagatgaagacgtagctctccacagagaaaaatatgcgggtagccaagctgagagaagctcgaaagcagcagctgatgctgaagccaacaaagtcgctaaccagctcaagggcacgaaattatctggtggaggtccaaagaaggaacaaaagaaacaatctggtggttcaaaatcgaagacagcagaggcagatattactgttgcaaaattggatattcgggtggggcttatcaggaaagcagagaagcatccagatgctgattccctttacgtagaggagatcgatgttggagaggacgcaccaagaacagtggtcagcggtctcgtgaaattcatacctcttgaagaaatgcagaaccggaaagtttgcgttctctgcaacctgaaaccggtggcaatgcgcggtataaagtcacacgcaatggttttggctgcatcaaatgaggaccacacgaaggttgagttggtggagccaccggaatctgctgccgtgggggagcgcgtcacctttgctgggtactccggggagcctgaggcttccctcagcggcaagagcaagacgtgggagaagttggccgccgagctgcacagcaacggcgagcttgtggcgtgctacaaggacgtgcccttcacaacctcggctgggatctgcaaggtcaagacaatagcaaatggagagattcgctaggcacatggccgaactgcaaccagctgaccgaatctttgcctggtttcattggaagtgatagttcctgatttccattttgcaaagttttggtgtttccatttgaaaatttgcattgagtcaaacaggtacagacacttcaaagaaatcatgatttaaaagaacaccgagaatgcccttctactaaaaaaaaaaaaactaaacgtnnnnnnnnnnnnnnnnnnnnnnnnnnnnnnnnnnnnnnnnnnnnnnnn

SEQ ID NO: 39343 - DNA, 532 bp, Setaria italica
  Peptide Sequence Number=SeqID_105317
tgcttgatttgtctggcaataagtttgtgggtttcatcccagatggtgggttagatgccaaggaggagcaaaacagtggaggtggtcaggggattccatcagagggtgtgcttccacctcagttgtttgtgtcagcatccgtggatacggtttcatggcagttggatctggtgtatgatcttcaggcaactactgggatagatctgtcaaggaatgaactccgtggggagataccggaagggttggttgcaatgaagggactggagtatttgaacctctcttgtaattacttggctgggaagatccctgcagggcttggtggaatgggaggttgcatacacttgacttctcacataatgggctgtcaggggaggtgcctcctggcattgcagccatggcagagcttgaggtccttaatctctcctacaatagtctgtctgggcctttgccaacaatactaaagttacccaaggaagacaattaggacaaaggaaaaataaccaaggaaaataaataagaacaaactaagaaa

SEQ ID NO: 39344 - DNA, 847 bp, Setaria italica
  Peptide Sequence Number=SeqID_105318
tttttgttttttctttttttgggtttttttaagtttttttatttttttccctttttttgttttttcttttttagggtttttcttttttggtttttggttttaatttggggtttaggtttgtcatacacttgacttcgcaccttgtgggctgtcaggggaggtgcctcctggcattgcagccatggcagagcttgaggtccttaatctctcctacaatagtctgtctgggcctttgccaacatctaagttcccaggagcattggcaggaaatccaggaatatgcactggtgaaggatgctctgaggatgcaaggatgccagaagggaaaatggaaggaagcaatcatcgtggttggcttggtggctggcatggagaaaatggatgggtgtctcttggtgcattctgtatcagcacgatgactagcttctatgtatcattggcgaccttgctatgctcccctaaggcaagaaactttgtgtttcggcctgtccgggttgaatatttacaataggaggagaatttcgaaattaggatgtcatgtaaataagcggatatttgtgaagcctgagtgactctagtgtgcagctgatcatcaagaaagatgatatctgatcatcaagcagatcttcagccaagaggtgatgcctgattgttttctaatgttattgctccagagatttgtagatccagttgcaacatacttgcttctgttgtacaatgcaatcaggtggtagacctgccatgtttgaggggattgggcaccagtttctgcttgaccagatcatgagtcttgataccaaggatgcacataactaggtggtgcattagccacaatcagaactgttgt

SEQ ID NO: 39345 - DNA, 1093 bp, Setaria italica
  misc_feature (993)..(1093): n is a, c, g, or t
  Peptide Sequence Number=SeqID_105319
gtggcccccaaggcgtcctccaagctggttcttgtcgtcgggggcaccggcggcgttgggcagttggttgtagcatctttgctcagcaggaacatcaagtcaaggttgctcctaagaaaccccgaaaaggcagagtctctatttggcaagcaggatgagagtgtgctgcaggtttacaaaggggacacaagaaatcctaatgatttggatccacaaatgtttgagggagttacacatgtgatatgttgcactggaactacagcatttccttcaaagcgctgggatggagataacactccagaacgtgtagattgggatggcatccgaaatcttgttagcgctcttccacggacaatcaagagactgatttttgtgtcatccattggtgttacaaaatacaatgaaataccatggagtatcatgaatctctttggtgtgctcaagtacaagaagatggcagaggactttgtccgcagttccgggataccgttcaccattatcaggcctggaagattgactgatgggccgtacacttcgtatgatcttaatacacttcttaaagccacagctggagagcggcgagcagtagtcataggcaaaggtgacaagcttgtgggagaagttagcaggctggtggtggcagaggcctgtatccaagctctagatattgaatccactgaaggacagatatacgagattaattcagtgaagggcgaaggacctgggacggacccggtgaaatgggagcagctattcagttctgcccaatcaacatagtggcactcacggggaatctctattgcacactgtatatcatactgtagcgtgcataattccgtagaagcaggcaagcagcatatgtagtaactataattgtagcagccgtgtacagagatttaggtcattagccacacgcttgcgagttgcaaggactatttatttggtcgtttgcgtgcaattgtactggatcactggatggatcttcttcaaaannnnnnnnnnnnnnnnnnnnnnnnnnnnnnnnnnnnnnnnnnnnnnnnnnnnnnnnnnnnnnnnnnnnnnnnnnnnnnnnnnnnnnnnnnnnnnnnnnnnn

SEQ ID NO: 39346 - DNA, 470 bp, Setaria italica
  Peptide Sequence Number=SeqID_105320
actcagtgtgagtagtccggtatattgctcaatatggcagacatttaaaccaataaatcagtcttacaaaaccaatatgttcctattgggaaaaatttggcatgcttaagtacccgttaaataaaatgacgaaaataatacatagtttcagtaaggaggcatcttcgttttctcctttaatatagcaaactagaagatcttagtgtaaagtttcatgatgtcaccaacgtacttccctatgcttctaaaatgcgcttgcattggccacttgttcagttgtgcaattgattgaaaactaagataatttacgagtttatgcgtagttttattactattgcatccctttaagtagaaataactcttctgtccttgaaattagagatatgactgcaaaatgccaaaaacttaagaaaacttggaatgcacacactttttgatacttcaggatagtcactcgactttctttagtg

SEQ ID NO: 39347 - DNA, 1140 bp, Setaria italica
  Peptide Sequence Number=SeqID_105321
cccttcaatacaaagcatacaaaagagagaattttcaagtgtaagcagtcaagtttccaagctcctgctgctgtgtctggttgttttacaagatcaacagcttaagaaaaaaaacagccggtacagcaagctagtgaaagctgctagaaagtaacactacaggtgtcaaacctcacaatgacattgccaaattggccagtgtcattttagctgcatatatacttccttcaaccaaacaaacaatcataaagaaccgagctccaactacaaaccaaaagatttctagcttaaacttttcatacttttcaccaacacaccaaagacaaggacaactagtagtatacaatcaattgcaatctacataatttactctgcaactacaatcaggacaagtggtaatcagtcacctcgaatttaattccagctcccacccatccaggtggctaggccggcaataggaaccttgttcccatcaaaatgtgcatgcacaatgccacagagatggtgaagatggccatggacttggcaccgaggtacttgacggcaactagccccctctcagcgacctcatcacgggcgatgacaatgctcttcctggccccatcagacatccgctgtgctaggaagtcaaggaacgaccggacagtttccgctgtgaccctgcctgtgacatccagaacgaacctcctgttgctcggcacagccagcgtgcttgacaccttctggatcacgcagttggtgtctgaattttgccccacacgctccattgctaacgcctcaatgcgagcaacggaagcctccttagccagctgccgcgacgtcctgaggaaggtttccacggcgccgttgcagacggagacggccaggtccttgaccttggcctcgtgccttgggtcggagaggccagtgagcagctggtcgttggtgcggacggcggctgtgcggtcgaggtaggcggcgaccgcggtgctgacgaagactcggacgaggtccgcggcggcctccttgcccgtggcgctgcagagcgcagccaaccaccgcggctcctcgcggtcgccggccgccgcagtgcgggtgtcgcaggaggacaggacgaggttcctggcgaagcttccgacgaaacgaacaagaccggaagga

SEQ ID NO: 39348 - DNA, 164 bp, Setaria italica
  Peptide Sequence Number=SeqID_105322
catgcacagcacagatgctacttgtaggacaaacaaagtttaggagtatttgttcaacaacaacataaacgctcaacaaactcagatgaccaagatgtataataatgagttttattgcctacacctactagctacttggtgaacaatctgggcttggtacagat

SEQ ID NO: 39349 - DNA, 794 bp, Setaria italica
  Peptide Sequence Number=SeqID_105323
ggccatcagggcggcgcttgttgaccccaacagagttctccgtgactgggacgtcaccgccggcggcgacccgtgcgcctggcccatggtcacctgcaaccaggggcatgtttaccaactgtctctgaggcaccaaaacctctccggaacattgtcgccggcgatcgagaagcttacgttgttgcaaaatctgtttttgtgcaacaacacaatttctggccctatcccggacgtcataggcaggatggagtttctagaaagtcttgatctgtcaaataatcagttcactgggagcatcccaagtacactgggtggtctgaccaacctccagtatttgaaattgaacaacaacagcttatctggacctatacctgattcactagccactgctcccatgatcttaaacctggatctttccttcaacaacctgagtggcacctggccaatttttcatgagaggattaatgtcttacttgtaggtaatccattgctaaatgcccccgcaaaagagccgctcgatctccccatacacaagccgacagatacagaagacatcatagacatcagggtccgcatcatttcggtccttgcacttcgtgtagcaattgtttgtgtggctaccttgattaccgtagtagtcgtgctatttcgtcatggacgtcggcgtgagcaggtcaccgcggtagatgatgtaccatcggctataagtgttactgactctgggttatcccagtactctatttcttcttccattcttatcctcccataacaaacttgtttaaacataaacatat

SEQ ID NO: 39350 - DNA, 416 bp, Setaria italica
  Peptide Sequence Number=SeqID_105324
ataacctcctccaggaccataatgtgacctcccttttgtaacgtcaaacactgagcccaaaatcccgagtagtatgggcaacccctcatccgttccattgtacacggatagctcctccactgtccacaacctcggcttcctaagacggtagagctggaggacgacggctagcagcgcggcgagcagcgcgagaacaaggaggaggcgagcgccacgcgccatcgcactggctcccaagagatccgcaaggcccttcgagtccaccagatcaaaccgcctcctcggcaacgctcgcgagctagggctgcccttgggacctggtggcgtagttccggcgaggtcgaatttcgctggtagcagctaccgatcgtcgtcggagcggaagacgggggcggtggatttgcaggaaacgcagg

SEQ ID NO: 39351 - DNA, 415 bp, Setaria italica
  Peptide Sequence Number=SeqID_105325
gaactgcagttccagtgtgttcagctaggccgaatgcggtgaatacacctggtgaagcagcttaagtacgacccattgcccagaactgcttggacccagaaactcccaggaatacgaataatggagaaagagccccgaacagcgagctctgaactcagtaagctccatgtctgagccacagttttggttctgctgagctttagttaggtctgccacttggcagcatctcagtttttgttcctcctttttcccttctcattttttcccctgtgttttagttagattctgaattcttgtaagaattgtgtggtaggagtcggtctccgcaccgcttttagattctacggataaacttcctccttgtcaagataagtgaacgagttataatatagatagtgcgtacagttttttcctc

SEQ ID NO: 39352 - DNA, 834 bp, Setaria italica
  Peptide Sequence Number=SeqID_105326
ccgacatgggaatctttagccaggtaataatgtaatatagcatacttcgctgcctctggattaccattctcattaccttggagtgcataactgcatcctaatgaggatcagtttggcactgaaaatgttctgccaatgcatttgttgtctcaaggcttgctcagtgttcagtgacagtgagatggaagcggtcctcactagctgtggttcagtttatattgctattggataagtgataggtacatcttttgctcatttatttactttgagtgcccacttgcagagggaaaaaagtctatgaaccaccaagattcgtgtctgtaaacactgcaataagtcagcttttggaggtggaggaatcgcgtgggggatctgcatatggcaggaatacactgtgcataggagtggcacgccttggaagtgatgatcagcagattgttgctgggcctatggagaagctattagacgttgattttggcccaccccttcactgcctgattatagtgggggagactcatcctttggaagaagagatgctagaattttacaagatgtagtagtttcagaatttttttaatgtgtgtttgacattttgtatcgatgaagggaatcatgggacaatttcctgtcagcattgttagatcaatacatgttttctcacttagttgtcaaaggagcaacttgtagccaggtggatagaaatgccctcaaacaacactttcaaggtttgctccatctcttcgattgggtgcactagtagtttacttgctcagattacaattgttatacaagaatgtaattgtaaagtagtgtatgttcttctcaatgcaaaat

SEQ ID NO: 39353 - DNA, 371 bp, Setaria italica
  Peptide Sequence Number=SeqID_105327
tttttttgatacaagactttgcaagttcattgcttcggtaataaaatttgtccggtgacccagactcaaaattgaatctcgagatgtccacaaaatacatgttaagtaactcgatcacaggccttaggtccaaatacatgaaatacaccggcccactactctcgataaattacagggccgaaactcagaaaaggccgcggcaaattgaagttctagtattatcaatagaagaagcgcggtacagatgcatgtcgttccatctagaagttgctggattctggccccgcctgaccttgggtagttttgtccttcactgcacctggatgttgacgaccttgccccccgctgacagcttggggatggtgaggtag

SEQ ID NO: 39354 - DNA, 887 bp, Setaria italica
  Peptide Sequence Number=SeqID_105328
tttaatataaccagagccattaaggaaatggatgatttacagcaagatttacacctcttgcacagttgcacaataaccaaggaaaaatgttcagttcaatttcctgaatacaatgtctgcaagtaacagctagtcccgctcttcactagtcctgagcatgcacacagcacaccgaagaaatggattaaccctccatcgacttactgggctcatgccagcgaactgaggaaacagaagtaaaactagaacttggttgacggtcaaagtgtaaccagataggctgataaattttcatgaacacactctgagataggatagttggtaatggtaaacttgaactcaaacgttggcgactgtttcgtcagatgtacacgaatcagagattttggtagcaagccggagatgtggtacggacttccttggccagcatatgtactcggagtcaggattctcgacaaggggagcagagcttgaacaacgaccacagcatcccaataaacatcatattctgcagcaaggaagaagacttggtatctgaaattctgtatgcatggcttgatttctagttggtcaataaatgtctagtagaataaatcatactacttaccattatctaaaaatcatacttcttatagctgaaatcaagatccaggatgataaacaaaatctaaaaaatcatactacttatagctgaaatcaagatataggatgataagtgttttagagaaaactgatgacccgatgagcttgctggctgagctccttgcagttttcttgtgatcctaggcttaagctgcatactattcaataatcttgttaaaatccattgctgtttggagatgcacaaatataaatacatactattttgaaattcaacacattcccac

SEQ ID NO: 39355 - DNA, 293 bp, Setaria italica
  Peptide Sequence Number=SeqID_105329
gcccgcgagaggtcaagactcgcctccgacgacgccccacgccaggtccggcgaccatgggcaccgcggcggtcgacctcgaggcgcgtcagctccgcatccttggccggatcgcggacctcgagctcgccgtgcagcagcgccgcatcggggcgctctccatctccgcggcgtccccggaggacggtgaggccgaggcgggagctaccgaggcgcggctctcggtcctcctggccgcgcgcggcgtgcgggacttcgccttccggcgcgtgcccgcggaatactacgaccgt

SEQ ID NO: 39356 - DNA, 348 bp, Setaria italica
  Peptide Sequence Number=SeqID_105330
aagcaaaacaaaaagcaaacaaaacccatcatgggcaacactgctaggagtttataaaaatttaaattcaccttttcgttcatcttcagtgggatctgaaccatgctattcaccaggatggtgtcttactaaatggaacacaaaggttggcataaagctaaaagcaaggacatgctcatactctgtgtcatgatttgaagtagacaacctgctaatgtctaagtttagatccatattaatgtataagcaaggttacaattattgatgatttgactctttatactttatgttttgttacagttctagtcttcagtaactaagaatatgtgctaaactagctaattacca

SEQ ID NO: 39357 - DNA, 581 bp, Setaria italica
  Peptide Sequence Number=SeqID_105331
gtttcctccttcccctttctacttgctcttctatttgcataatattgtctatcctgacattcaagaaagtggtgaagaacttttcatttcctcacgcccaatgctgctaaatatgtcttgaaatttacctagagcgattaccatgttgtgaagctccttaagcattgcctttccaaagaacagacccaatagatttgagttttcgcagttccagagacaattggaaagctatgaacatcttaacagaacaacctgcttatcggaagccaacctctcaataatctcatcaaatctcaaggtaacaacgttaatggaaaataacaaacttgatgggatcaatagaaagtaagaatgaatatacccaatgatttcattctagtaaatggatttcttctagttggggatgaaatttattgttaagcttctcagcatcaagttgttccttcaatttatatatgatcctcgccctatttcgtagttcaagcaggtagctagtaattttatctcccaagaaactaagtttctctacataatgaaataccagaatgaatacagattacgcaaaagattctccataagca

SEQ ID NO: 39358 - DNA, 584 bp, Setaria italica
  Peptide Sequence Number=SeqID_105332
accgacccgcaaggtgagcttctccagattaggtgaactctgaagaaagaatcccaatgtgcggaagtcacccctgagatcacagttgcccagaaataagttcctcaggttcatgaattctaggaatgtgggttccttaccgagcaccttcttcccaacagctgacaactctaaactggtcgcattagagacactagaaagaagcttgaattgattgccgccaagtttattactttcagatacactatttctgtgatctcgtagatgaatcgaagctttcacaagggacggcatctcatttgttgaaataccaccactaaagaagtaaacactcacagccaggtgcagataagaaacagcaggggtcaagataaccagcacacaaccatcagtatttgagctgccatcaataaccaatgtcttcagtgtgggcgatgtaatctcagaaagattacaccatttgcaatttttcagaaccagggtcttcagcgagtcggaggtgactgaccgaattgacaactgcaattgtgcagctccaaatcctccaaaattgccggcacactgaagtaacatgcttcgcaaaa

SEQ ID NO: 39359 - DNA, 948 bp, Setaria italica
  Peptide Sequence Number=SeqID_105333
atgcactagtggtgtctacggagatggtctcataccagttctacacagggaggaaccgtgcaatgttgctaccaaatgtcctatttcgcatgggtggggctgcagtgctattgtcaacatcaaggtctaaatcccgtttcaagctcatgcacactgtacgcacaatcactgccgcccgagataagtcttatcagtgtgcattcctacaggaggatgacacgggtgaaataggagtcaacctgtctaaagaccttgtagctattgctggcgagacgctacaggccaacatcacggcaatagggtcccttgttctcccattctcggagcaactgctattcgttctctctctaattgctcgcaagttgttgaacaggaagacaaagccctatgttcctgatttccggatggccttcgagcacttttgcatccatgccggtgggcgagcggtaattgatgctgtccagcgtagcctttgtttatcagatgaggacgttgagccttcacggatgacgctacaccgttttgggaacacgtcgagcagctctgtgtggtatgagcttggatacattgatgctaagagtcagatgaggaagggtgatcgagtatggatgattgggtttggatcaggattcaagtgcaatagtgtcgtgtggcagtgcatccagcctgctagcaccctagatggaccttgggctgattgcattcatgggtaccctgtaactgtaggcataaccaaagtggccagcaggtaaaaatgctttggtcgaggattaagacacccatgcacgtttgtaaaggtcttgtgatagtatagtgttaggtatatgtggtgtgatccgtgagctgtacttgccgacaacacgtaataaggcgtctattttcaatccaagtcttccttaaacattgtatgtttatctatggaataattgaatttcgctcataatatag

SEQ ID NO: 39360 - DNA, 1898 bp, Setaria italica
  Peptide Sequence Number=SeqID_105334
tctactagtagtttgtacctagttgtaccgtcttctagtttccttctagtctcaaagctgcagcaacccgccgccggtgccgctgcgcgaccatcgggggtgatggaggcgccggcaccatggagggtgctcgagttctacagcggcatcggcggcatgaggtactcgctgatggcgtcgggcgcgcgggcggaggtggtggaggccttcgacatcaacgatgtcgccaacgacgtctacgagcacaacttcggccaccgcccctgccaggggaacattcaaacgctcactgctagcgacctagacaaatacaaggcacatgcatggcttctttctcccccatgtcagccatacacacggcgcttcagaagcattcagctgatgctcgtgcattttcgttcatcaagattcttaacctgatgcaaaacatgagccaccctccacaaatgttatttgtggaaaatgtagttggatttgaggtgtctgatacacatgatcagttgctggaggtcctttcaagtctcaattttaacttacaagaattcatcctaagcccattgcagtttggtgtcccatattctagacctcgctacttttgtttggtaggaacttttgagtatcttggcatgccaagattttgtcatactgttatggcattcttacagctcttatattcatttttatttgctcataacttcttaaactctctattacctgagggaagtccagggaatgtgttgtgatactttccaagcatgttgacaaaggcataactagtgacagcaaacatctgtgtttccttcagaaacgagaaactgtgtctttgtggtgcattttatgaaaactccactggattgtgtggagcaattatgtaactactgccaattttgtattgacaggcgaaacgagaacctatggggtttcaaaatgcatcattcaacaagaagctgctctggacacctatgtgcgtaagccagacaatgaacagtacatcacaggatagtgacctccgaactgaagaagagctggatccagtatgtaaaccagtaaaagactttcttgtcaaggaggatgatggaggcattcgtaatgaaacaattttgcaagattacatagtcccactaaacttaattgagcggtgggggaatgctatggatattgtataccctgaatccaagcgttgctgctgtttcactaagagctactatcgctatgtgaaggggacaggctccttgttggctacatctgaaaacttcaaatgtgttcctgaagagaagcttgcagtttcttccctgaaggagttaggtctacgatttttcacccctcgagaggttgccaatttccattcatttccttcaagcttctgcttcccggatcacataagccttaggcaacagtatgctatgctgggcaatagtctgagtgtagcagtcgtgggtcctttactgcgctatctgtttgctgaggcatagagaagcccaccagccagctggtgatattaacctgacacaaacactttggccgctagctgttgtggtcaaatttttgtcatcataacttaatcaaggttttgggatgtttggttccgtcaactggtgggaacactttgaatagggggctgccacccgcaaaggcgcaacatgtatcacggcaactctggcgtatctaacctgccagagaagaagtttctgcattgcctttccttccatgcgcacattgtcatgtcaaatatttgaatgaaggttggattgtgacatttgatccattttccattgatgtgtaccttagatgaggttattgtaatgattgttggaacttccactgaatcctgtaaggctgtaaccaatgtaatcgagcaaatcgttttgcttttctttttaacaaaaaaaaaaaaaaaa

SEQ ID NO: 39361 - DNA, 759 bp, Setaria italica
  Peptide Sequence Number=SeqID_105335
atggtgggatctcgcccacattcttgaacatccgcctcaacctcgccatgatttcctttgtactgagttcctcaagatacatcctatatgggtcattgatactagagtactcgtagctctattggcatcgctgctgcaagggctagattcgtcgcttcatgaagctgaaagctaccccaactccagctagtccttcttgcttcagtttcgatattctgtccagaagctcaagtagttgaaggcaatcttcgtgatttggctcatccagccactggttgttccaggtggggcgatgtctggtcagcttggggactttggggtcgtggttaccaatatagcaccacttctctttccacccagcaatttgagtctattagctcataatccaagtacaggctgctgagcttcttccacatctgaattccagcaccttcgactacttgggtgtgctccctcttcggttgcgacttcactcgaaaaaatttccggaaaagttggaaatggagcctgatccccaagaaagcttcgcagagatgcacaaaaatagcagtgtgtagaatgtcattggggtttagatgaactagctccaacttataatattccaagagacctcggaaaaaatcggatgccagcaaagccagaccacacttgatgaagtaagctaagattattgtttcatccgactactactccaatggccatgggttgccgtagatggatatccagttgatgaaatattgatcttggagtagattggcg

SEQ ID NO: 39362 - DNA, 395 bp, Setaria italica
  Peptide Sequence Number=SeqID_105336
cgaagagttggaaactgcttcaactcacgtgtctccttgatagccctgtgaactagctccttgagtattgcatggaccgcgtcaacagctgcctcagctggacctttgatactaattagacatgactctataagacgccggtatccttgctctggagctattaagtgtggttgatatccatcggcttgtgttataagcttctttacattttccattgcaagatgtttttcaaattgcaaccgtttaagagccactggaaattggttgtcaaaaaacatagtagatcttctcaccaccggaacgcgctccgtccagatgctccttgtagatactgtcaaacatgcgacatatttccataatagtgtacagctttccccagcatctgcagcaatggg

SEQ ID NO: 39363 - DNA, 254 bp, Setaria italica
  Peptide Sequence Number=SeqID_105337
agttgactctttatgttcattatcctgctgaattcttgccacctgaatatcagcaaataaccaattttatggtcattccaggggaaaaaatgtaaggtcttatcaaactagctactgtgtagcatttaaagatactattttctacaccatgtaaacaataatcaacaagattttttcaactactattttactagtgatgcaatgtaggtccatacactcctattattcacagtgagagtagctcgagcggaaag

SEQ ID NO: 39364 - DNA, 331 bp, Setaria italica
  Peptide Sequence Number=SeqID_105338
taaatttgctgacctagcattttcctgcataagagggtgctgcctgtatatctactttacttcagtggtacgccggcatgatcaacctgatagacctgttgagcagaacgtttgtccatgccgtccaaatgttctgaagttattgcatgctgccatgctcggtgaagaaggtaagctgtgacggagacgaggttgttgctagggaaggtaataggccgatgcggtgatgccagattgccagccatggtgcttttgctttgttatttggctccctaccaaagcacccgtttcctgcgccatcgcgacccgcacgagcacaactctgctgttg

SEQ ID NO: 39365 - DNA, 571 bp, Setaria italica
  Peptide Sequence Number=SeqID_105339
aagaagattgtgaaggagccccggttattcttgtgaggggtcttgtgctcacctcgttggagcggtgaagagcaactctagtggaatcgaggtttagagaggttctttgattcaagccggctcaaacatcaagtggtgccttgatagaggagcggttgaaatattgaatccacctcaacatggattagggatgaccagcaagtcatcgacaccacgggataaattcgtcactcgtgtttggttctaacattgctcaatttctttattgcattttactttgagcaaattactttactagagattgaatagtatcttgtcaccctaggttgcaaaccttcacctagttgtagagtagctagaaatagttttcctcttgtgttactaatcaaatttttaaagtgttgtgattttagttgaaactgcctattcacccccctctagtcggtatcctagatcctatcagagccgtggtctccatatttcaaggatttaatcatcccggagtaggataaatggctagtcataacaatgttcatgtggggaaaccacctttctttgatggaaacaacta

SEQ ID NO: 39366 - DNA, 252 bp, Setaria italica
  Peptide Sequence Number=SeqID_105340
acagcagaagtattttctgcggcaagacggggacggtggcgtctttgttgctgaccaccaaaccttccagcagctccgctctctccttgcggttggtgaacatcacctgcgatgcgtgcacaaacaaccacactcgaggtagtccctgtggaggcggtcggggaaccagagcttccggtgggtggcgatggagagcagcgccttgagccccttgacggactccggcagcagcagctccgccgacgacttgac

SEQ ID NO: 39367 - DNA, 428 bp, Setaria italica
  Peptide Sequence Number=SeqID_105341
gtcggtcatggccacgacggagcccgacaccacgagcgaccgcaccaggtccgggtgcgcctcaaacatcttgccacaatccaagggttccttttatttttttcccctgttgccacattcacaaagagagtgttccggtagcattggctctcacacgtttgtaaactcgaaagcgcaaggatggtgaacctggtggaggcgcagaagccgctgctgcacttcctggtccggagggccgggctgcggcagcacaccgtcgatgtcgacggcgcaggcacggtcatcaccttctgggtgcccaaggacaaggtgcccaaggagaagcccaccgtgcgggacgtcacgcccgggccagcttctgccgatgaggccaccaacaagctgccgccgccgccgccgccggtggcgaagaatgacagggcccgccg

SEQ ID NO: 39368 - DNA, 768 bp, Setaria italica
  Peptide Sequence Number=SeqID_105342
gccttccttatgctctgcagcatcgtcttctcgcccagctgctctttcattgccttggcgagctcgatgttgaagatgttgtcgttctctccccacagcagaagtattttctgcggcaagacggggacggtggcgtctttgttgctgaccaccaaaccttccagcagctccgctctctccttgcggttggtgaacatcacctcgaggtagtccctgtggaggcggtcggggaaccagagcttccggtgggtggcgatggagagcagcgccttgagccccttgacggactccggcagcagcagctccgccgacgacttgacgccgatccgctccagcgtcgtctcgctgatggagtcggtcatggccacgacggagcccgacaccacgagcgaccgcaccaggtccgggtgcgcctccgccatcttgaacgacaccatcccgccgtagctgaacccgaccaccgcgcaggaccccacgcccagcttccggagcgccgccgccaggcactccgcctggaaccccggggaccggtccgacgacggcgacgtcgaacccccgaagtagagcaggtccggcacgtacacgtcgtagtgcttcgccagcgcgcccacctgcaactgggtgcccaaggtcacgatgcccaaggagaagccgtgcacgagcacgacggcgggcctgtcattcttaacgaccaaccggcggcggcggcggcggcagctgtggtggcctcatcggcagaagctggcccgggcgtgacgtcccgcacgg

SEQ ID NO: 39369 - DNA, 316 bp, Setaria italica
  Peptide Sequence Number=SeqID_105343
caaaatccgagaagagtctaaaaaagctcaaaaaaagctgagaaatggagagagaaacaaaattaagggttccaaaaaggactggcagataattaaaacctggagaaaaacctcctagaaaagatcagtttctggttttgctgcattattcctgggctattggatcaactctagcgcaaagcaaaggcgacgacgtcctagatgagctgacggaagtccggccctatgcggttgtggatcaagaagtcgtcgccgatgagtggccccgttggcccgtcgaacagcagcgggctgggcgcgtgcattaggccgccgg

SEQ ID NO: 39370 - DNA, 400 bp, Setaria italica
  Peptide Sequence Number=SeqID_105344
gcggcgctcggcgcctcgcgcggatgcgttggcgagcggtgcgcgctggtcgtgttgccgttcttgtcaagcggcgctgctcacggcgacgtcggcgagcggaccgcacgcggcggggctgggcgtctcaagcagatgcggtagcgagtggaagcaacgaaggatatattattcaattcagctcggttcaactgctctagtgttgacggttcggtttgctcatcccattgttcgatttttcagcaacactggagctgctcttaggcccctcactctcagcaggttgcaagtcaggctcccccttggccccttttgtacttcgaaaaggtgtgttgtactaaatcaaattaaacccataggaagaataaaacacctacaccaaagaattggaaatattatt

SEQ ID NO: 39371 - DNA, 880 bp, Setaria italica
  Peptide Sequence Number=SeqID_105345
tcaggtttcaatgacaaaccttatatcaggacagaggaaggttactttcctaccagagaagcctcacacgaagggaatcataaacaacatcagtttcatgccctggtctgatgcatgctttgtgaccgggggaagtgatcacgctgttatactttgggaagacaaagatgattcatggaaacacaagagagtgcacaaggatttccattcttccgctgtcatgggtgttgctggattgcaacagaaaaaaactataatatcagttggctgcgacaagaggataataggatttgatctctctgctggaaggacagagttcaagaacctaattgatagcaaatgcatgagtgtattaacaaatccatgcgatttcaacttatacatggtgcagacaggggcgccaggcagtcagctccgcttgtttgacatcaggcttaggcagactgaggttcatgcattcggttggaagcaagagagcagcgagtctcagtcagctctgattaaccagtcatggtctcctgatgggtggtacgtgtcatctggctctgcagaccctgtgatccacattttcgacatcaggtatcatggccagaagccgtgccagtctgttcaggcacaccagaagcgagtgttcaaggctgtttggcaccaaacatcaccatacctgacctccatatcatcggaccttaatattggaatccacaaatattcatgaaagtgccatcacgttctgggctgattttgctgcctagaaatggcttttgcagtgatatagtaatgttccagaaagacctgggaaatttgtttccctaaaggaggagtttgtactgaacttggtcaaagagaagtagaggatctgttgaagaaacagcaaaatcag

SEQ ID NO: 39372 - DNA, 466 bp, Setaria italica
  Peptide Sequence Number=SeqID_105346
cccgtttacccggatccatgtggttgtcacctgcaaggcgtgtcacaccgtaattgccaagttgtctgaatggaagaagtcaaagagtgaattttgaggagataaaaattcgtcagaaggatattgtgctttccatcataactgaatgtgagattttaaacacatcaacattgacaattctgcaacacaacgttgatgagcttcacaaccaaggcaggcgctcgtacagccctcacagctagtgccaaatgccatcgtcaacacaacgttgcggtgaattaattgctgggaaggtacgtagtatccatttcaaaatgcatgcaagcatgcatgacgcgaactgatcaaaatctgcagaagcacaaactactgtgaacgatcggttccaccagtctacttacgtactttattaggtctgattattaactgataggtatgtttagctctatatagctcatttaaccag

SEQ ID NO: 39373 - DNA, 1173 bp, Setaria italica
  Peptide Sequence Number=SeqID_105347
ggcagcggcgagctggtggcggtaaagaagctgtgggtgtcggcggcgcggcggaccaagcagcagcacgacgtgcaggtgctgacgagcaccaccagcagtggttggctgggcgaccgggagctgcggacggaggtggagacgctgggcagcatccggcacaagaacatcgtgaagctctactgctgctactccggcgccgacagcaacctgctggtgtacgagtacatgcccaacggcaacctctgggaggcgctgcacggctgcttcctgctgctcgactggcccacgcgccaccgggtggcgctcggcgtcgcgcagggcctcgcctacctccaccacgacctcatgttccccatcgtccaccgcgacataaagtcatccaacatcctcctcgacgccgacttcgaacccaaggtcgcagacttcggcatcgccaaggtgctccaggcgcgcggcgccggcgccgacagggacgcgtccaccaccaccatcgccggcacatacggctacctcgcgccagagtacgcctactcgtccaaggcgacgaccaagtgcgacgtgtacagcttcggcgtggtgctgatggagctggcgacggggaggaagcccatcgagccggagttcggcgacacgagggacatcgtgcactgggtctccggcaaggtggccgccggcgccgaggcggacgcgctggacaagcgcctggcgtggagcccctacaaggaggagatggtgcaggcgctgcgcgtcgccgtgcgatgcacctgcagcatcccggggctccgccccgccatggccgacgtcgtccagatgctcgccgaggcggggccacggactcccaaggacaagctggacagcaacaaggactccaagggctccgccggccagcagctagcagcccaagctaccagctagtccataggaacgagttgaagccatgcaggtgatataccgatcgattaaacgagtaagataagaggtgagctgactgatcgaggtcgtccaattcatcaggcaacaacattatattaattatcgctacactaattgatcagaggatggtttcatttacacaagaagcatgcaagctgcaaggattgttcgctcttgcactacgacatatatatatatatatatatatatatatatatatatatatatatatatata

SEQ ID NO: 39374 - DNA, 575 bp, Setaria italica
  Peptide Sequence Number=SeqID_105348
ttgaaccctaaaatgccagtcattctatatctttcttttgagttttgaggccttaccatcttccaagtcattgtcatcagcacaggaggacattagcatagatctagagaaaatacaccatctggaaacacacaagattgtgttaacttacagcatagtcactggagacattttcagtcataaaggatatcattgtttatgaatgtgttgtaacttttattttaaccatctatggtcagataaccaatgaactttcgtggcaaaagaaaagaatagaatgaacggttatagacatgcctatttccaatttctctcttgacaggtcaacattgatgagagggctacttagactccttgttacacttaggcctcagaatatgctgaaatgcctaactgaaggactctacaggataaaagagaatgactggaagtaataataatcaaatttatttgttgaaagtctacatcaatcatcaattacactgcattgtgttaacaggaggccatgttagctattatgtatccaaaaagatcaaactaaatttgaacctgaggatcaagaaagagatgaaacg

SEQ ID NO: 39375 - DNA, 303 bp, Setaria italica
  Peptide Sequence Number=SeqID_105349
gacagcaaatagtgttataactcttttcagctttggagatgctgttgctaaaagcaaaaggtcccctgaaaagctgtttgtattgctcgacatgtatgaagtaatgcgtgaacttcaaccagagattgaggaaatatttgaaggtaaaccttgcactgagatgcgagaagctgcatcaagcttaacaaagcgcttggcacagactgctcaggaaacatttgcagaatttgaggaggcaggttgaaaaagatgcttcaaaaactattgttcaggattggaacagttactacccttttgtactta

SEQ ID NO: 39376 - DNA, 1156 bp, Setaria italica
  Peptide Sequence Number=SeqID_105350
catgcgaatagctgtcaaattactactagcaggggaaagaaaaatctgtgatcagatttttgatggtgtcaactttaacaagggccattgttttgctgaactgacagcaaatagtgttataactcttttcagctttggagatgctgttgctaaaagcaaaaggtcccctgaaaagctgtttgtattgctcgacatgtatgaagtaatgcgtgaacttcaaccagaggtaaaccttgcactgagatgcgagaagctgcatcaagcttaacaaagcgcttggcacagactgctcaggaaacatttgcagattttgaggaggcagttgaaaaagatgcttcaaaaactattgttcaggatggaacagtacaccctttgactagctatgtgattaattatgttaaattcctattcgattatcagtcgacattgaagctactatttcaggaatttgataatagcacggaggcagaatctcagcttgccgctgttaccacaaggataatgcaggccctacagaataacctggatggaaaatctaaacagtataaggatgctgcactgacttacttatttcttatgaacaacatccactatatggttagatctgttcgcagatcagaagcaaaagatatacttggtgatgactggattcagagacatcgcaggattgttcagcaaaatgccaatcagtataaacgtgttgcttgggcaaagattcttcagacactctccgtccaaggtgcaggcagcactggtgaccttagcagcagtggagtttcaagagctatgatcaaagaacggtttaaatctttcaatatgcagtttgaggagcttcacgcaaagcaatcgcagtggattgtacctgatcaagaactgcgagaatccttgaggcttgctgtagccgaagtcctgttgcccgcctatagatcttttatcaaacgctttggtaatctggtggagaacaacaagaacccgcagaagtacgttcggtacagcccagaagcggtggaccaacttttaggccagttcttcgaaggacagcaatgggcggagcaaaagcgctgagcacggatagagacaacacgagtacagccagacaccaagcactacctaattttcttttttcagtaaagcaaggctaattctcactagtgcg

SEQ ID NO: 39377 - DNA, 1013 bp, Setaria italica
  Peptide Sequence Number=SeqID_105351
aggtatccaaacagctgaactaaaaataagcaactccaaataagcaactcaaaccaaacaggctcataattttacaatagggggaaataaaaatcaggcaacaaattgttaaatgtccacttcatagttttcaggtccacacaaatgtagatgatcaatctccacatggacaacagagccacgctgacatgacaacgtttgtcatctggccaaccggaacacaaattcactttcaaccagtaacactacggtagcacattccagacaatccttttatgctccaggaattttttgaacttcattatcatgtccagtattaacatgcatacctggggtgtagaaacttgagaatggatgaccaactttgaagggatatgttttaggaagtttcttaaccttccttgactcaagattcaccacgtagacaactcgactactagtctttctgaaaagcacattaccatcaccatccgacgatagtattactaggtgcatccacaaatcctctggcagcccaagagaaagaacgctgctcagatcaatagtattcccaagcatccatgttgcaacaccatcaccatcagacgtcctcttccatacatgtacagtaaagacctcttgagccacgaagctgagaccaccaccatcagacagcttaatcaagaattgggacctggcagtgataaagtcatagaagtcgagtgcatacggtacatcaatgattactaggttttgcctagaccaatcaaactcaaggatggcaatcttctcttcaataagcaacaagcaaatggaattcctgaaaagttggctaccataggtagcacgggttgtcctgatttgcggcggccgcattatccagaacaaattgccccatgccctggtctctgatgagtaaatacagccataaaatcgttcactgtctccagctactacgaccacctggaagggatccgagtggcaagcaccgtgtatgtggccttcgtcggtggaagcgcaaaggacattgctgc

SEQ ID NO: 39378 - DNA, 236 bp, Setaria italica
  Peptide Sequence Number=SeqID_105352
gcaatggcgggggcagctttgaagagatcatcactggttccccattcttgtctatcagtaatacctcgaagatggacttgatgggtctgtcggacatgatctgacgctcgaggaaaatgagaaatgatcattacttatggctgctatctcataggccccgcgcgggtagaagtttattctccacacttgccccgcccacagagatggggtcggatttgatggcctggccagcggga

SEQ ID NO: 39379 - DNA, 1127 bp, Setaria italica
  misc_feature (1072)..(1127): n is a, c, g, or t
  Peptide Sequence Number=SeqID_105353
ggggatcatccgcctggaattgggccgatcgcttcgttccttggtgctgggtagctgattgaggtggatataaccatacagagatgttctccttgttctatggcctgtggaatcatgtgttcagcaaaacggagttccatgtgcttatcctcggagttcataaggctgggaagacgacctttctagaaaagttgaagtcgatctacctgaagggagaaggtcttccgcatgatcggattgttcctacagttggtcttaatattgggcgtattgaagatgcgaatgtaaagcttgttttctgggatctgggaggtcagcctggcctaagaacaatatgggagaaatattatgaggaggcccatgctgtaatatatgttatcgactctgctgctgcagcatcatttgaggatgccaaatctgctcttgagaaagttctccgccatgaagatctgcaaggagcgccaatactcatatttgcaaacaagcaggattcaccagcagctgtctcagaggaagaattggctagacatctgcatcttaaagagttagatgagaggccatgcatgttccaggctggatctgcttttgacgggacggggatcaaacatggtgttgactggctggtagaagaaatggagaggagtaaacgcaccgagttgctgagggtgcgtacagaagcagctgggaagatttaacgcctcaactcaggctatcacgcatgattttctagagttcaaagcatctgaggaggatggctcctatgaattccatgaatatggatagatgcttgcccccttctcaatggtcaattgagccacatcctatcaagtcaggccccccgagttggccccagaaaagattttttggttgtgctgctcttgcagttttgaagttgtaggatgtccattgtagcaatggcatagatgaccgttcctggggtttcttgacctgcatatagcacattaaaattcgtatctaaagttgtagggattcatgttcatatgattgttggtttggatatactgaaagtgacagcatggagcgtaaaagatctgtacattcgtgatgaacnnnnnnnnnnnnnnnnnnnnnnnnnnnnnnnnnnnnnnnnnnnnnnnnnnnnnnnn

SEQ ID NO: 39380 - DNA, 588 bp, Setaria italica
  Peptide Sequence Number=SeqID_105354
ctcagtgtgagtagttttttttttgagcaaagccggtgctttttatatgttacaacttataagcaagtcacacgcatctccactgtccattgatgttacaacataagctaacagggccaaatgggacatacaggaactgaagttacaatacaaagcacaaagagtggtggtcacaccgtgctccatttgatctcgacttgtatcatcccgttccttgagttgatcaggtggtatttctcgttgattcggccattgttcaccacgtccacaaggtttatattcacatgccccagggattccttgttggggtaaggaagtccgcggcgtttgcttttaacttcaatgtggatcttgtcttccacaggaggctcgtccaacatgaactggaactcctcgctccatcttggatctctcgtcttccttatcacctttgttttcttccgttctcccctgaaaagaacctcagcatatggattagtgtgccgcttcccttcgacatcttccgcattttctacagaaaccaacaacaccccaccactggaatcaccgtccgcttcccttcttgcactggcagtaccttcaccatct

SEQ ID NO: 39381 - DNA, 286 bp, Setaria italica
  Peptide Sequence Number=SeqID_105355
gggtgaactaaggcaactccaaattactttgatgtcacatacactaacaatagtcaccattccagcgtccatcactgagctgaagaagctgcaatacatccatgctgtaccagccccacctgcgtattcatctgcacctcatactgtagcattcaagtcgtcgaagctccacagataccttcaattagttggtgtccaggtgatgtcagggattggaaaattgaccgcattgcatacacttggggttgtcaatgtcggtgctgcaggggcaaagtcatcctgaaag

SEQ ID NO: 39382 - DNA, 510 bp, Setaria italica
  Peptide Sequence Number=SeqID_105356
aaatcttaggcgtaagtgattggcggttaagtcgtcatacagatacactcggttgcttacccaacctctcaagcgacggtgttttaagctgaaaaggaaaacccatccttgctgtgaagtatttgagggaagcaaacagaaaattgaagacaccaagttttcagccaactacatttgataaatgcaaaggggaaactgactcttgacaattcaaggttcgatgctgctgtgctatcgaaaatgaaatagatggtagaaagtcatatatacaacacctgcatttttatctctagcagatgaggcagttgagcgtcatggtaagagatctgaagacaaggagtgcattgatctcgacatggaaaatctcagcgtgcagctgaacggtgccattcgccactgtttggggttggtttagggctaagagcgagatgcacatgcccctgctgacttggtaatagggggccagtctcatattctcatcaactggaatcacctcgaaaacgaatagag

SEQ ID NO: 39383 - DNA, 504 bp, Setaria italica
  Peptide Sequence Number=SeqID_105357
aaatgctgcctgatgacaatgagaagaagaagagcagcgggaagaggatccctgccattggtatccatgtcatcccaaagacgagcaggagataaattagctggaagagcgtgaaggcggatattatgttgaaaggcaccgactcaacaaaggatgcatgtgcaccttcgaaaaccttgtagcgcctttgaggtgtgatgaacagaagttgtatcctctcccagaactggttcccaggaacactgtcgatggacatataggcaaagtaaccccaaaggactgatgttggtatcctctggatgagtggtgtaactccgatgcaaccagcaaccagcagggactgcaacaaattgcttagtctctgctcattcacccggacaggcaagtaagcctccacatgcttttcaggatcaaatacttcaggtacttcccttctccatcccctctggaataatggcattcttcaagtccttcagctcgttgtgggcagaaacagagtcgcct

SEQ ID NO: 39384 - DNA, 230 bp, Setaria italica
  Peptide Sequence Number=SeqID_105358
agcagagaggatattccaactggaacataacaacacaggatgctatgttgttctgtcttccatgtatgctgatgctgggagatgggaggatgtcgagaggataagatctctgatgaaggagaaggggttccaaaggacagaagcaagaagccttgtcgagcttcatgataaagagtgcagttttgtcaatggggacatgtctcaccctcagagcgaggaaattcatgtaa

SEQ ID NO: 39385 - DNA, 313 bp, Setaria italica
  Peptide Sequence Number=SeqID_105359
acttgatgcagaagctaattcatgatgcttcctcaacggtttgttcgagttcctaagagagttgctccaattgaaatgtggaagcgtgacaaagaatcacatttagtttccaaaattgcagcagtggtaaattctgttgggtctaggttaaatatgtaactttgtactcacttaacaccaatgccatcatcgctcagcggtgttactgcttggttgtaccattcagaataaagatgtcattcattttaaatcccttttttatttcaaaaattttaaatcccttttcagaagtctgtaactgtattgtatttgt

SEQ ID NO: 39386 - DNA, 386 bp, Setaria italica
  Peptide Sequence Number=SeqID_105360
ttaggttcatgatgaatccaggtagcaaggtccggaaattatgcacgaaaacgcacaatgtcggaggtgtgcttgcagttatttggcaaaaggatcaaaacagggtaccatttttggactgtaccatctcattctcatctacgttgtgcatactttttacaagcagcgtatcaaacttgggggcaaccgagttcatccgggctactatttctgccgatctccctgcgtctcctcgcatttgtgcaaatgtccaagcagggttccttgagggctttgtcagtatcaagaggtggaggcggcactccaaagttgaactggcagctatagtcttcaaaatttggctccatgtataaatcaacgcccatgtgatctttgaagaaagtctg

SEQ ID NO: 39387 - DNA, 613 bp, Setaria italica
  misc_feature (1)..(2): n is a, c, g, or t
  Peptide Sequence Number=SeqID_105361
nnttttttttttttttttttaaagtccagtagtattatatgaactgggatctcaattagtagcatcaggaagtcaacatgaaagaaaacgagtattctgggggtgtccaaaactactcatggtttcagagtcaacaacttacagaagatactacagacactatgctctagtctattacaagtctgaaaacaaagcaccggaaaagcatgaaaagaataatcagtgcacaaaaccttccaaagttcagcaagaaactattttcctcacccttttactcatctccattggtgtcatcatcattatcccttttcctcttatttggcagggaagacccacctgctttgctttcaatgttctccttgtcttcttcatcagcatcaagttcgtcatcatcagcttcatccgcttcgtcttcagcctcttcgtcgccttcttcttcttcttcttcttcatcatcatccccttccccatcctccgcatcttcttcatccccttctccctcaccatcaccatcatcctcgtctccgtcttctccctccccttcttctccctcctccccctcctcctcgtcctcctcaacatcctcttcgtcatccgtctccaaacgactaca

SEQ ID NO: 39388 - DNA, 483 bp, Setaria italica
  Peptide Sequence Number=SeqID_105362
cagccctctgcttacagaatgctttgtgttgttgttgctgtactaaatgtgcaattttgttgatatcaaacagtttgtgcattcgccctgacctacgttatggggcagagatacctagaaacttcaaaggtaatgccagctggtgttgttgctggtctcagcgccttgatgtctgcattctatctattcaagattgcaaccggtggcaaccacatcccaccaaagaaagagtaaaccaagatttaacttgtaatatatgtttgattggatgtggttgccaccggttgcaatcttgaatagatagaatgcagacatcaaggcgctgagaccagcaacaacaccagctggcattacctttgaagtttctaggtatctctgccccataacgtaggtcagggcgaatgcacaaagggtctcgagcgcgagggcgaggtaggagttgcgccgcttctcgaaggcctttgtgcattcgagaagcggcgc

SEQ ID NO: 39389 - DNA, 305 bp, Setaria italica
  Peptide Sequence Number=SeqID_105363
gtttctggtagaggcatcaattgctaagtgcaaaataaacgaatgaatacctttctgcttctgcctgcaaattgctttgttgcttatcgtttctgtactaaatgtgcaattttgttgatatcaaacagtttgtgcattcgccctgacctacgttatggggcagagatacctagaaacttcaaaggtaatgccagctggtgttgttgctggtctcaggtaatgtcagcctcgacactttgaatgccacactggatttcacacaccacaatttgttttcctcccgcaaataagaaaaatagcttccc

SEQ ID NO: 39390 - DNA, 617 bp, Setaria italica
  Peptide Sequence Number=SeqID_105364
ccttcgccgcaagccgcgcaggccgccacgcgcacaccccaacctggtcgacgacgacttcctccctcccaccctcgccccccggacgaaaaacaaaccaaaagaagaaagcagctagggagcagcctcgccgcgagatctgggactgggagatagagagagaggcgccccgaagatgcacgacttctgcttcacgatcccctacgggttcgccgtgctggccggcggcgtgctgggctacctccgccgcggcagcactgcctccctcgcggggggcgccggcgccggcgcgctcctcctcctcgcggggttcgtcagcctcaaggccttcgagaagcggcgcaactcctacctcgccctcgcgctcgagaccctttgtgcattcgccctgacctacgttatggggcagagatacctagaaacttcaaaggtaatgccagctggtgttgttgctggtctcagcgccttgatgtctgcattctatctattcaagattgcaaccggtggcaaccacatccaatcaaacatatattacaagttaaatcttggtttactctttctttggtggatttaacttgtaatatatgtttgattgaactcaaaagatcacgaccgat

SEQ ID NO: 39391 - DNA, 340 bp, Setaria italica
  Peptide Sequence Number=SeqID_105365
ttttatgtgtcattcatgtaaagtctcatgtaagatatcatctgttatatttcttcacggaagaacagtttgtgaaggtctcataattgtttgagctattttcatgattctatttgtagccacttcgttaaaaatcttgaagctaacattcaacaaacatattgatctatatagttgaatttacttcgcatcactactatcaaaatagtaagattattgttccgaagtttaagctatggagaggcagggtgccattgtggaaatcctcaaatgatgccgtcaagccatctttgatagcgtgcaagaagatttgataaaactcaagaggaaattgtctatg

SEQ ID NO: 39392 - DNA, 483 bp, Setaria italica
  Peptide Sequence Number=SeqID_105366
ttttgaagtgaaagaagcatgtctgcacattatcagattattatacaaaagtaggaacagcacgatggctggaacaaagagtacagagccgtgtgaaaaactagagcaacacactgaaaacaacatgaacagcaggaacaccatgcctagaagaaggcgtgcaatgactgatcccaaccccggccggcttcctcacagctcgtcctccgaccggtacttgtccgcgtccgccctccggtgcttccccttgttgtcggcgtcggggccggcgaccttctccttgacctcctcgatcctttccttggccgtgtcggccgtctcccgcgccttctccttcaccttctcgtatccctcgttggccttctccttggccgcctccaccgtctcccacgccgcgtccttggccgacgccgccttctccgtggccttcccttcggccgcctccttcgactgctgcgccttcttgcccgccgcctccgcctt

SEQ ID NO: 39393 - DNA, 493 bp, Setaria italica
  misc_feature (482)..(493): n is a, c, g, or t
  Peptide Sequence Number=SeqID_105367
cgtctactacaacctccgcctcgcgagctcggtgccccgcgtcgccggccctcctgccgcccagcatggcaagctcactacccagctgggcgactgggtctcagcatagcagcacacccatgcggccatgactgcttgctgctggtttgtggttgacgcggcgaccctcctgccgcccagcatggcaagctcactacccagctgggcgactgggtctcagcatagcagcacacccatgcggccatgcctgcttgctgctggtttgtggttgacgtcgaaactggctcgggccggtctggtgtgactttgggccggtggttcttgtatttgtgtatgtagttctgtacactacgggccggcccatgaaagaaaccggaagcctggtgacttgtgtttgttatactcgcattcttctttttccggccggatgattaatttttccatgaatgaaatgattttgctggctgaacaacaaaaaaaannnnnnnnnnnn

SEQ ID NO: 39394 - DNA, 807 bp, Setaria italica
  Peptide Sequence Number=SeqID_105368
taaaaagaagctcggggagctctccgctgcgacggcgaggccgagaaaactttcctcttgcagagcatggaggtctccgctgggctccggcagccgccagtcgccccggcggcgtcgctccgagggcgtcgatccgtgcggccgccgttgcgtgcggtttccccttcgacgcggtccgtgtcccgggcggttaaggttagagcaagtgcaatttatgacctccaaagaagtaaaagtaacctcgaatcattattctgctatgacaaatctgttccagaagaggacattgggaaaccaactggtctaaatttggaaaagaagaatgttggggagaatcctccctgctcaagctgtgaagctaaaggtgctgtgttgtgtgcaacttgtgctggtacaggcttgtatgttgactcaatactagagagccaaggaatcattgtaaaagtcagatgtctaggttgtggaggaactggaaacattatgtgctccaaatgtggaggacgtgggcacacatgaatgctaaaactcttgaagatcgtctcatcaagacaatttaactctatttctgcatattgtgacaagcaaaagagttcttctcatatggctctacgagcgattcctttctgttaaatatatgccaattcagctgctgtaacttgagaatatttacatgtatacatgcttagctgttgaaccatgccgcttttcgttttcttctcttttgtaccttgacatttgggagcgcgatgctttggattattttggtttgttgctgtgcgataaaggtataatggctcgtgaaagatg

SEQ ID NO: 39395 - DNA, 689 bp, Setaria italica
  Peptide Sequence Number=SeqID_105369
ttagttcatagcatattgtttaggtaggtcttctgaatattgaagaataatcagtacagtattaccatgggctatatgttcttcctcaaaattgagcatcagtacagttcgaatttgaaaaactcggttatcctagagatgtcgatcacttggtattggattagatatgtagtgttctgacccatttgtgaaaatccaaccaagtgaggccacttgctaggttaaggcgcttactgttctgatccattttggtccttataagaattgacatgcaaagcttttccgtgttcacggaaagagagtcaatacttgatattacgagaaaagagaggttctgttgctataatctgatgtaagttttcttgtggtctatatagatatcgtgctaggttgcagtgtgctttaatttgtttagttttggacgtatccatttacttaaataattttaatccattccaatatcaaccgagatgtctattagccatttagtctctgtattactatgttgcttctattgttttgcaagctcaaacttccccagattatgatttgtcactgttctcagtttggtatgtggttatctctgtccttgcattttttcttattattatcttgatgaactctgaattttgatttctcacgtatagttatctccaaactatgtgtgatttctgtaagaagtttttttt

SEQ ID NO: 39396 - DNA, 1889 bp, Setaria italica
  Peptide Sequence Number=SeqID_105370
aacaacaagaacgaactagtagaagtaaacaaagtaatcggtaaaaaggcccttcccttcatagaaatcatccagttgccttccaagggttctcacagaaaaagcataaggcgcaatgtcactgcttacataagccaaacagctagtgaaggagatcagccttacattggtcacagtgtcaaccaaactggcagtccactaacgcatgccgaagtcttcaggagatggtaagcacgctagaggctaacttttatttaagttcataagagcactacactagcacattacaagccacatagttctcataaagcgaagagaatagcttgtcttccaggagcgccaattcagagaaatatgtacagaaactacaatataaagatagccgcatcacatttcagaacaccttcaccatattgtaacttgtaagcctgcatctgtcgctgtcttcagctctcagaagagtgtggagcaccttcatcatcatctgatgaggatggatcagagaagagtgcgctcaaagcagagaagataggactatctgagcggttgtctccattgcggttagtaccctctgtatcactactactgcttgcagcagcattgtctccatcaccgttcatagccccagcaccactggctgattcacatgggttctttgtctcctcggtaggcaactgaaatcgacagactgggcaagaactatgaagctccagccatggaaggatgcaatgagggtggaatttgtgctgacagggcatctgctttgcttctgcacccatctcaaagtcctcaagacagactgaacagcccaacagttccttgatgttcacagttggcaatgaatccactgcttccttcttggcaggtggtgtgccagaacgactgagatcactctctgccaaacgctgcaagagaatatctaagcctggaccaagaaagtaatccccaagtgatacaccagaacttgtgttgcttgattcctcctggttgtcatcgcgtccaaatgttccttggagaataatagcctcattgttggagttgatcagtattaggctttctgtcctctccctcccacgatcgctcagtctctctatttcccttaacctctccgccctcctctccgccctctgcctctccaccctcctctccgccctctgcctctcccttctttctctctccatgtctctctctgtatcactgtcagtgtcatccaagccccttatgtcatcatggatagtttggagcagcctggcaagcgctgatgagcccctcctccttcgcctcctactgggaacttcaagctcacggtctgaatcatcctcgtcatcatcctcatcagcatcggcgtcctccatggccgccctcctgagtcttgatctgcgcgacgaaccccccagcacaccaagaagcagtggagccaagagagagagggagcgatcagacctcgtgttcgtagctggttcaaagccttcagagtccatctcttccacaaacccgccctcacagttcgggcacttcatctcaggcataggatcgatcacctcctcgcacatgtggcaccagtacctcactccctggccttcatccattttgaaacaaactctatcgacaacttttgtttcacttcagtatcttatcttccagtccgaattcacccctgagtacttatagcacaacccagcaaccatcaaaagctctgcagcgtcaagaagattaaggtatcttatcttccttccctggcctgagaaagctatccttgtcacccttggagcgtcgcggtgcgggatttcccttcaggccatgatcaccccctgcgcagcgccctgcgtcgaggagcagttcggagtggcgtggcgctgagacacgcagaggaatgggataagcagtgc

SEQ ID NO: 39397 - DNA, 394 bp, Setaria italica
  Peptide Sequence Number=SeqID_105371
tgctttgaggttttctcagcggtaacctggaataaacaagggagaaggttggagatattcttttgcagggggagagaggtgctcaggtccttgttgatccagaacttgttgactatctgatttctactcttgaaaaggtgggaaaagttggtgtttcatgcacacagattcctttgcttgctctagaatatgaaccaccaagaaccaagtcatcaaaaactgtagaagcatccctcagggttgatgccttggccagtgcgggatttaaaatctcacgcacaaagcttgctagcttgataagtgccggggatgttcgagtgaattggacgccagttctgaaaatggagttaccctcaaatctggagacattgtttctgtcagtgggatgggaaga

SEQ ID NO: 39398 - DNA, 933 bp, Setaria italica
  Peptide Sequence Number=SeqID_105372
gccgactctgtcctctccgtccaacgggtcaggccagctatgttcgattgcttgagctactttgcagcggtagcggctgcagctgcaagtccaagcagcagccgttcggctgcaacgtccagaaaagttatttttcctactctcgtttccattagctattcccattatgtaatttttttagtggttgcagcaattgaacacgcttgtgtggttgcagcagaggttcttgaccggctgtagctgcagcacagtcgcagcctcacagcactgcagaaaagcacaagcgaagcgatcaatatggatcgtcggagctactctacttggacgaacaacacacttgacttgggcgacttggaccctgggtcccggtcgaccggaaaactagtaacctatcaagaccagaaaactagtaacctatcaagttgtctgctacctactttttttgataaaagcaaaggagcagagcaagcaaagtcgccggcggcgacgacaagcagcaaagccaagtggttgggctgctagaggcgccacaaacacatggaggcaaagtggaggaaccacgccaagcgacggttcaaagtggatgaggtagccgacgatgtccatcttctctgacgaaccaaagatttggttaaagcgatcgtcggagctttcttgaacgacaacctcaaagccgatggaaggcgtgctgctgcaacagagacgacgaggtcgcaagctagttgtagttgagcttggggctgcctcggggtgggcggcatgaagtcgaaggcgacggcgagcatcgaggctaagcctgctggagcaacgccgatgactgagcaaactgaagcagagacgcacgtaccaacgatgatagcagccgaaatcgcctccagcacagccgaatcaaaggtggaggagagtggatccaagcggcggcgggtggagtgg

SEQ ID NO: 39399 - DNA, 466 bp, Setaria italica
  Peptide Sequence Number=SeqID_105373
aggtgctttgcctaaataatcgactactgctgcacactgtttactgcatctcaatcatcaatcagctctctgtatacatcattaaactgctcaaagaagaaggatgtttttcttatttcgtccacataaaaaataagacctttctcaaaggatatctatcatagctacataatcaacagtgtgatattgcattttgaaacatactttatgtactaattcatagtataatttgaccaggggttggtcataaaagtttgaattctcgaaaaaatatatgatttgtatttttttatcaatggagtattagggcaaattaaagttaaaaataaagtgcaccagaagctaaaattctaacaaggcttggccactttcacctcttcttaacagaagaaagtagctcgaatacagctaacagcttgggaacccctttaactccaaattgcaaaatcacttaaccttattaatt

SEQ ID NO: 39400 - DNA, 1260 bp, Setaria italica
  Peptide Sequence Number=SeqID_105374
gatcatgccagattggccacatcagcaaaggtgtcctggtattataatctgcactttctgggatggtctcttgagggtaacgctagacatcatgaatttggcattgaccatctaggttaccttaaaggacacacaactctgctgaagtttctgaagaaagtctctttgaatgggagaagcaaagacatgctgacttgcgcgaactgcattgagcatgctatacatcctagttcgccaagtgtgacattaccagaagaccttatgcagctgatccatctcctgaggaactttgatcctaaatactatccattggtactgggtcatgtgtgccatgaggttgaagctattaagtgtgcattatatgtgaagatgttcaacagattgatggtcctcaagagggcaaacataacaacatatttcaagatcatgaaggcactcccgtacagcaacgtttggatcagtgaagcttctaaaaatgtgcacctggctcatgttctgcactatgacggacgtcagatgagcaaaaagatccagaaaatcgttgtacgattccttactaccagaatcaagtatgacacaggggctgaagggttactcaattttcgacggaatggtgaagcacaccttgagaaggattattctgttgactttggaggtcatgtcgaagcggctctgaccggtgcaaaggcagtacttgatctgcagccaggtgttgcggcaggacctccaaatcctatcgttagaaaactggcctctcgtatagggtcggcagtagcagccgtgcttcagaagtcgtactcatcacctgaagcagcaaaacaagctgcaattgcagcagcgactacagtagcgcaaaatcccaatctatgtaagaaaattgcacaaaacagagcagcaacagcagcaaaagctgcagcagcaaaggcagcagtttggcctccagcagtcccccaagcacctctgatgtttgactccgaccaaattgagcacatgtttgatgtatcaacacctctattacttgctcagttccaaaaagcgatgtttgatgaatggcaagtttttcagctagatgacggacaaaaggttgcctgcctcttatagtttctgcaaggtttcggtggaagtacagtgtttgcaaggtttcagtggaagtagtagttggagactgataagtatctgcagggtttcggtcgaagtagtagtagtaatctattaggtaatatgtccagtttatgttgtgtcaattgtcagattcatctg

SEQ ID NO: 39401 - DNA, 387 bp, Setaria italica
  misc_feature (377)..(377): n is a, c, g, or t
  Peptide Sequence Number=SeqID_105375
aagaataccgacctgtaacggcagcaatgacgcctcttcgtcatcaccacgtgctcctgctgtcgccgttgccacggcgacgttgccgcaggacggccgccgcatctcggaggacggctccgtttacggcgactacccgcatttcgacctcatcagagacatggttgatgatgagcgagaaagctagggccgtgcatggtgtccatgcgtgcgttgggatgggtcggctccgcgccaggtggaggtgctgtggacgcgagcaagatggagacgtcagcagagacagcagcaaagccgcttacaaaacatgtgtcagatgtatatgtgatggagatctccatatgtctctgcagtgcggtgggtgtgcatgtacttanaaacgaatta

SEQ ID NO: 39402 - DNA, 683 bp, Setaria italica
  Peptide Sequence Number=SeqID_105376
cctgatgagcccctctcgttcccgcgccgggtggacctcgctatgcaggccatgctgggcaagatccgcctgtacggcagcaatgacgcctcttcgtcatcaccacgtgctcctgctgtcgccgttgccacggcgacgttgccgcaggacggccgccgcatctcggaggacggctccgtttacggcgactacccgcatttcgacctcatcagagacatggttgatgatgagcgagaaagctaggtaagaaagtggtaaactaccgcacgagaatccgtgcatgcgtccacaccagcatctacgttttagcgtttctgtctgatgctaacacttgacatgtcatcagggccgtgcatggtgtccatgcgtgcgttgggatgggtcggctccgcgccaggtggaggtgctgtggacgcgagcaagatggagacgtcagcagagacagcagcaaagccgcttcaaaacatgtgtcagatgtatatgtgatggagatctccatatgtctctgcagtgcggtgggtgtgcatgtactttataaacgaattattcgtaaattgacttcctatgtaattgtaattgtaattgtgtgggcgtgtatgtacttgacaagtgaatggtttgtaaattcaccaatattaccatattgagtacaaactcatattttctgatttgacttaaagaaa

SEQ ID NO: 39403 - DNA, 554 bp, Setaria italica
  Peptide Sequence Number=SeqID_105377
gttggtggcctgtgctcaaggtggccacaaaccatgcgtccaagcatttggggctgaccaatttgatgagaatgaccctgaagaatgtgcctcaaggagctctttcttcaattggtggtactttggggcttatggatccaatattgtcacagtttcaatcttgaattacattcaagataacataagctggcagtttgggtttggtatcccttgcattgccatggctgtttctcttacaattttctggcttggtacgaagaagtatcgcttctatcctccaatgagtagcggagggctgtttggacatattggtaaatcacttcttgcatggattcgatgctggtgcacatcatggtctgcaaaatcacctgatgattctcactgtgcaacagcatcgccatccaagggagacaagtacaaagcagaaaccaaattattttctgacaatgctgttgcagtgcttaaattgctcccagtaggggcgacctgcctgatctatgcagttgtctttgcccaatggatgacactcttcactaagcaagacaaaagtaaac

SEQ ID NO: 39404 - DNA, 429 bp, Setaria italica
  misc_feature (3)..(3): n is a, c, g, or t
  Peptide Sequence Number=SeqID_105378
acnggtttatcaaagctgtacatatttcagaagactgcattccatttgatcacaccagtttctcacaagctcatggaaaaggtcaacatcatttttcaaagctgtattgcagttcctagttgcctcttgcaggtgtctgatacattaagcgatataacaggcaggctgctgaagctctagatctttggatatgcttacaagtataatcattacggatagaaactgtgcaattatctgttgtggcgacaaacaaccaaactagagctgccagaaaccagtagacctttaacctgtatggaatatgattttcatcatgtattagctaacttcacctgaagactgaagaaatttgatgttacaatcagacagcacaaattggtacctaaaatcggcaatggctgataaatcatgttgaaccctttgttgaat

SEQ ID NO: 39405 - DNA, 1261 bp, Setaria italica
  Peptide Sequence Number=SeqID_105379
agtgaaataccggtggctaagaagcccattgatcgcctgcttgatgcagtgcgaacttcatcaccatcaatgctttgcagtgcagctaattctgtctactcagtcctcaacatgaatgattatgtaccacctagggaaatagatgcatttcagtattcgcagcagggtggatctaacacagtgaacaaaatgaagcgtgttttcgaaagtacatcattatgttctgaatcagcaccactgggcagcatggatggaagttgcatgacatttgattggactatctcggaggctgaatacagtgcagaacgtggtgctaagaggcagaaagtacagaatgctaaggatactctgttagacgagataaactctgtgaacaacatgctattagatacctttatcagcatcgcccaagacaatggaacagatgggatggcttctggcaatggtgggacactgatcgagctcttctacaccgccatatcactaacgccagaccttgcatcgctctttgcaacatctggaatgtctattgtcatgccagtgaaggtcttggtccccgtagattatccgagaagctctcctgtgcttgtctgtgaccagggcgatgagcaaatgagtgaagatgaaatgaggaagaggttcagtgaaatttctggtgcggcggacgtggccttccggcgcaccctctacggactccaagagcccatgtcggtggtggacatggcaagggcgtgggatgcttccgtgcggaggtccatcgtggattttgcacagcggcacggcggggggatgttcagctccaggtatggtgagtggacttggtgctgacggtgcctgggaaatggagacagcgtgtgccgcttgttttgttgtatacaacggaaacaaaggaagatcggaagtcggacgacgcttcgtcagcgttccaccattagtagataagaccgtgagaaaataccgtgcggtggaatgaaggaccatgttgacgtgctgcgccacgcgtccgtccggagggattcactgcgtcggacgtcttgcacggtagaattaccggaggaagatataacatgctggtcagtttaagatttgaatatcggaacaggtgcaagagaagtacttttttatgtacttttgtgaatccatgcttctatagatggatgtatgtatattggtttgtgaatccagttatttgtattggtaagatatttataattttgaccgttggtgtatgttaataaataatcaagtagactgatgaaag

SEQ ID NO: 39406 - DNA, 783 bp, Setaria italica
  misc_feature (736)..(736): n is a, c, g, or t
  Peptide Sequence Number=SeqID_105380
cgtaaacttccccgtgcttattgagcacaacaattaacacgaagtcgtcgatcccttaaggttgggatgacgttccaccacgcaaagccctctgatttctttcatgataatcggagcttagattagatccatggcgtcaagttcaagctcctccaacctgctgctcggcgttcatatcaccgagaagcttagcaagggcaatcgtgccctctagcaggtccacgtgctcactgttatatgcaatgcgcgcatggagggccacatcaccggtaagaccggtgctcctgaagctgagatcgatgagaagcaaacagacaacaagattgtcaaggctccgaatccggcgtatgaggagtggtttgctctagatcaacaagttcttgggctaatcttcacatccgtgggaaagatgtcctcatgcagattgctcctgcaaagacggcaatagaggcatggtgattggtggaagagatgtacactgccaagacccgtgccagatttggtgaatgtacgccttgcgcttgcgacaacaaagaaaggtacattgactattactaagtattttgcaaagatgaaagaacttgcagatgagatggctgcctctagaaagccactcgacgatgaaggagttgcctcctacatcatcaacgggttggactctgagttcaatccgtaggcatcatcggtgatggcaaagggcggaacccagtctcaatctctgaactctactctcagntgctcagctttgagactcggatcaatctccagcaagaaggtcacagc

SEQ ID NO: 39407 - DNA, 351 bp, Setaria italica
  Peptide Sequence Number=SeqID_105381
cggctactaacctcgcgtaacgccacttcccatctgctcgtgtcagttactcggctgcggcggagcgcagcggagtggccgaggcgatggctccgagggaccccaaggacggaggagccggggacggcggtggcgccggcgccggcgcggcggatccggaggccgacatcgagaccccgctgctcgcctcctccagctcgtccttcttcctggacccggcgggcgaggacggcgacgatggcgccgacgagcggcgccggcggcggaggcggctcctcctcggcagccacacgcagtccaacaccacctcccaggtcgcgctcgtcggcgccgacgtctgccccatccaga

SEQ ID NO: 39408 - DNA, 511 bp, Setaria italica
  Peptide Sequence Number=SeqID_105382
catgctgtcttgcctgagcctggcgcaatggcacaacatgaattttatgatgtctcactctaatcagattacatgcttgtgatacatcgtaatcaggattctcaattcccctctcatatgcaatgtcaatatggtggcccctccattaatattcatcataaatcattcgaattagtcatcatgtacttatctttacttataatccacattaactgaatgtctgaatactgaaattatcattgcttttaggcaataacgtaatgggatttttgtataaaagtaataggaaatcattctgctgatttttagatgaatattattctgttgataaccctgctttgcattgaatttgatctgttctcattgctcttttcatatctcatgcttcagtggtgcgaaccttgcagatgtaccatgcctgctgtcattgcggcaaatataatcatgaattcatgactaactgctaatttttgctgataagagtgcaagtggtaatgtgtgtgaatgtagt

SEQ ID NO: 39409 - DNA, 1146 bp, Setaria italica
  Peptide Sequence Number=SeqID_105383
tatattttttttaatatgctcacttagcctttttttttctatcataagcatggcaggcatgcagcacatgcacatgacttaatttgcttagaaagcctagaaatctaggtgaaaaatgtctcctgctaacacctccaaatacccactatattgatttgtatgtatgtatatctatatatctatatataggaatgattatctgaagaacaccaaaataacatttctgtggagatatttattaacatatatgcaacagcactgataataagaaacaataaattgttttaaaaagttagatataagcaagtaccacatttaactgtaagttctctactaggactgtagttcaatattttgtcactagtctgccatgctatccaaagaggaccaatgctcagaacattctaaccttagtatgttgtcatctttcttgagttgatattgcttcatatattaatccctggtttttaatccctttatgtatacatcacgtcactgatttccttttccattctcaatgctgattcataggtcttgctgcatatgcaggtagaaaatattaaattacttgaaaagtaattatatttctattgtagttttagtagtcagttctggtatacttattatattttttctatttataaaatatatgtacttattaaattttcgaattatgaaacgtatcaattgtcttcagtagtagttgataatgattcttacaggtatttataagtcttacatacaaatgtttgaaaatcaaatgattgtgtggacttttttccaatgtaaaattacatagtagaaaagctacctaattatacgcactgcatttcataccagactgatctttgcttatgcctaaccaataaagtttagtgtatccttaccatcatcatgctgtcttgcctgagcctggcgcaatggcacaacatgaattttatgatgtctcactctaatcagattacatgcttgtgatacatcgtaatcaggattctcaattcccctctcatatgcaatgtcaatatggtgccctccattagtattcagacattcagttaatgtggattataagtaaagataagtacatgatgactaattcgaatgatttatgatgaatattaatggaggggcaccatattgacattg

SEQ ID NO: 39410 - DNA, 477 bp, Setaria italica
  Peptide Sequence Number=SeqID_105384
ttcacattattttcatcaagtgctataggcagaaactatggatggatgaaagctctattacctcatcaagtcatccattccttggcagtaaaatcatttcacagattatacacttgctgttgtgtattgttgtgttgtttggtgttatacagacatccccacacattctcagatatttttaatcatgcatatgtcaacagtttcatcatcaaatttgatacttatcggtgcttatcatatgagtatgcaaaaatatgtgtcaccatgaaatcctaaagtagtgtgtagcttccaaagtggcaacttatgaacaaatggtgattcttaaagtcaacctttcaaggggccaatgcttgggctgttgggcagtggctgaatctcagaaaaataatatatcgactgatcaaagtaatagcataagaatgtcactttagaaatcctggatatgacaattttacttataagtaggtaaaatta

SEQ ID NO: 39411 - DNA, 776 bp, Setaria italica
  Peptide Sequence Number=SeqID_105385
aggatatcttccacaagggcatgaggcttccacaaggaattgaatcaggagagacttgtgaatcaaaagaggagatcttccacaagggcatgaggctggggaagcagctggaggggatggaggagggcgcccggtggaaggtgctagcagatttctgggcggagatgttgctctaaagaaagccctcaggtagagtgaacgaccacgttgagtgcctggcaaaaaggaggggagttcataacacacctgtgggcgttgctcacccacgcaggtatcctggagaggggtccaatgattgtgatccccaacaacaaagaaaatgcagaagggcagcagccacatcaagagcaagcgcaaggtcttcagcctgaccagcctcacactgaaggtacacaaaatcctgtgaaccatcatgagattgaagaagaagaagacggaggggcacatattcatggcaacggtggcttctctagtttgcctgctcaaggcaactacgactccaatgcaatcagctccgcaaataaccagccaccagtggaaactgtgtgaaatattcttgaaagctctgcatctttattccagaattatccatactcgctcgaacctcatattgtcctgcagagttcttgattttgtaaattgttacataatcgcaagttgtctctgctgcctgctttagtggttttatattactcaagtgcgtgcttggaaggatgctggagtggtcggtctccattttgcagttttggtttagttctttcttgtgctacgtattt

SEQ ID NO: 39412 - DNA, 417 bp, Setaria italica
  Peptide Sequence Number=SeqID_105386
gttatgcgcataacaaaattatgaaaaactggttgaacggcctgttattgttgttgtgaggaaaatataccatcacaaaatcatgtgaatctcatcatacaatttcctcagtcatcctgcagcatttctgaatggagatgcatgcacgtagtgctgcagtatttgtagttgtatcggtggaatggcactttgccggccaaggaagcgaaacagcaggaacaggaattgtcgtctggcgctgccttctgcgcagagtttcctgctgctggtgctgtcgcacctgatatgccggcagattgagcagcaagggcggcgagtcttctctctgctgctgctgctctcttctctctttcttctgctagcttcctttgtcgttcctcctcctttgcaataaggatctgttgcggggtctgatgc

SEQ ID NO: 39413 - DNA, 421 bp, Setaria italica
  Peptide Sequence Number=SeqID_105387
aactatgttgatcgattaatattgcctagtagatagaaggtaccagagtttgcaaaggtcgagacaccagtgcctttgatattttctttttgtagttccaagaagaattctaatgaaattggattgatttggcaacaactttggatagattacgtaactctactgatcattagaaggtatactggccatcattgtgtggactaagcttcgatgacagaatcagaatatggaagttggatgtaaatacatatgccatctgagagtcacattggatagagagggcttccataaatatatttactatttccagggtgtgatctttgaataacctaaggatcttccacactggggctttcgaaagcaagttgattggccagtttattttttgttactctcccttgctctgtgacccatcatttcc

SEQ ID NO: 39414 - DNA, 288 bp, Setaria italica
  Peptide Sequence Number=SeqID_105388
tctatcagctactcacatagagctttttctcttaatacaaagatacgcagttctcctgtgtgttcgataaaaacatagagcttcaaacaaaggagaagacctactaatcaactgaggcaatagtgaactttacacctgcagctgttttatttggaacagaaagcctagaactaggttgaccagtagttgtggtaaccagtggttgtaccaacacaagaccatcttacccatagccagaaagaatggcagatagttttttcaaccagtagttgtggtaaccagtggttg

SEQ ID NO: 39415 - DNA, 599 bp, Setaria italica
  Peptide Sequence Number=SeqID_105389
tttcgttttcttcaatcggatagccctacttataatgaatataacttcattctcaaaacgttaatatacttcccactttactctgactttttttcacgctttttgtgggctggattcgatccataccgaaatgcagtaagaataatgcttaaaatatattttgttagtcctttactgtgcgtttcttagactctacctggattagtaaacacagtgggtgctcctggtttgggtgacactgcaaggaaaaacactaaatcataatatttttccttgcaaatattgaagaacagctttctgggcatagttcttatccgattcataatgcttgctttgaacatgtcgtattgctttcagtttgttggtaataagaatataaatgatagttttcttagaaaataatgaatctatttgtaatcttatattcatgtcctgtgaggctgtaaccatagattttctttgctgtttttgtctgccatcacttaaaaatctaattttaacgtttgtatcaatgagatttggatggacttgaactccacagcttggtttttttttccctctagtttgatttgattattcaacaattttggatgtaggga

SEQ ID NO: 39416 - DNA, 802 bp, Setaria italica
  Peptide Sequence Number=SeqID_105390
ccaaagtatgagtataggtgctttgatggagtcaagatcaagaggcctatcgaggtgtctgcgccaaaatacgtggagtacctgatggattggatagaagcccaactcgacgatgaaaatatatttcctcagaagcttgggactccttttcctcctaacttccgtgacgtcgtcaagacgatcttcaagcgcctcttcagggtgtatgcgcacatatacctttcgcactttcagattattatgaagctccaggaagaggcgcatctcaatacttgcttcaagcacttcacgctcttcacattggaattccggctgatcgacagagtagagctggctcctctcagcgagttgattgaccccataatacttgggtgctaaaccagagagaagtttgatgaggccaagtgtggatagatttttttttcctttttcttttctgtctctcctgtttattttgatcattccggatggaacaactccatttacattttggaagcataggctagcagtttgcaagtcagatgtgtttcgtagttgctgctgctaactgcagtgggtcttggtggatcgtgtatatagtttcagacgacctgcctgattctgaccgttgttgggctaacggtttgggcctgaatttagcccaattttggatgagcgaagctgcctggcgctagtggcaacaccctgcgagcgtcaaagaactagcagtcggttttagctgataaaaacttgagtgttgttgctaagaactatgatgatttgatcaaggacctactacggcctgctacacccaccggtcatg

SEQ ID NO: 39417 - DNA, 345 bp, Setaria italica
  Peptide Sequence Number=SeqID_105391
caggatatgtggcaggcagtagtagttgatgagtttcaggataccagtgctatgcaatactgtcttctgaagattctagcttcccacaatcacataactattgttggtgatgaggatcagtccatcttcagtttcaatggtgctgatgtatctggcttcgattcatttcgtagagatttcccaaatcacaaagagatcaggttgagcaagaactaccgctccacacgtgcaattgttgaagcagcaaccgctctaattcacaacaacactaaacggcatcatcacacgcttgttgagactgataacccttctggttgtaagatcactgtgaaggagtgccacagt

SEQ ID NO: 39418 - DNA, 509 bp, Setaria italica
  Peptide Sequence Number=SeqID_105392
cggcgtgccagctgcagtacctccgccgccgccgaggccgacgtcaccagcaggtacgccgacgcctgcaaggggcaccatgtcgtcccgggcaatgtcagatcgagaacgtcgcatgattctcctaacgatcttcacagcaaacaaataaaaaaatatatgatcaacttgtgtgcaagggcagatatctgttgctggtgtccattgtgaaacacctgtgtactctgccctgagatgaattctctcggtcatgaattgtcgcctaccctgttctgaattttagttttcaacttttgctctgttctgaatcggagctcgcatgatcctatacaattcctaattcctatctgccaccagtagtccactacttctgagttctgaccagtttcttgatggacaattatctactcagtcctcaccaatcaattggacagcaactacctaagattgcattcggagtagtcaatctcaaaagcgaaaaatacagagaaggtgttgggtcagacaga

SEQ ID NO: 39419 - DNA, 930 bp, Setaria italica
  Peptide Sequence Number=SeqID_105393
tttacctaaagccaagggagagacagtagtcatgttgactgatgaggctgaaccctcatctgcataatattgcttgctttatagtagtcataatcatgccaatcttccagaactatcaaatatactcctcccaaatgtaaatgaaggctagcatattgatcagctaattaattagacaatatatagtccatgtcgcagttatttttctccatgttgtcacagtgtatatatgatatacccaatcaataatcatcagtgtttatttcaccccgatcgacgagctcacattctcctgccaccagttcctgactccctttggcaattgaagtagacggcggcgaccggcaggccgaggttgtagagctcggcgaagtcacgggtgctgaagttctgccgccaccctggggcgtacaccgtctgccggccgagctgttggaagagcaggaacaccagccgatggattccgagcaccggccgtgggctctcgtagcacacaatctcagtaccaaaagaaactcctgtcgtcgccgggatatcagtgaccagccagtgcaagtactccctgaggttgggatcgctggggcttggcgcgtccggatcaaccagcaccagggtgtagaaggtgcgcatgtcggggccgccgacctcgacgcgcggctgttcggcgatggcggagggccggagctcgcagccgttggagacctcccgtgcggcgtaggccacgcgcagcggcacccggcggacgaaggggtcgacgacgtcgccgatcacccgacccaccacaagcggatccccacgctgcatgctgctggcgctgctgcctctcgctcccttcttccccctcgtcgccgtcgtcctccgctccggcggctccgtccagcggcgcacacgagcgagagcccagcaattaattggtattcgtcgtcgtct

SEQ ID NO: 39420 - DNA, 504 bp, Setaria italica
  Peptide Sequence Number=SeqID_105394
caacaataaggacccaagcattgacagaaaaatgtaaggaccgctggtctaactgtaatgacagtctgcttcgtgccggtccagcagaattagtgcctaaatcaggaggccttgcattttcaccagctgaagtagatgcaccacctgaagatggtgagggctgggtagaggtggttgaggacattccttcaacagggaaatcaggattgacgaagcggcggtagaacttgtgctggaggtggcgcggacgtaggggtcggtgaagaggtgcgtcggcacggcggagctcgcccggtactccgcccaccgcgggtcgcgctcgtagtcgtatgccgctgccgtcgccgtcgccgccgcgcccctggatggccaggacgaggaagacgcctcgcccattcgctcccgagtcccggacagctcagggggagggagctgtggccagtggcctgcggcaaattctcgtgtgcgccgctcgagctgcccatattctgtgcaggcagacat

SEQ ID NO: 39421 - DNA, 1379 bp, Setaria italica
  Peptide Sequence Number=SeqID_105395
taactaaagtaattgcacaagaatagtttcccttccgcaataaagcatgctgttaggaatcactgaggtcaaaaggacaatgacacaatcataagctaccaatctaatttcagttcatgacaaacaggtcataagctcaagatctcgactagttacaagagtcgcgctgatcatactaaccaaaaaatatcatcagctaaaagctgcaaaacgaactaatacacatcgctcacaagcttcaactttctatttaaacgatcatccttgggtcaaatgagaaatgttgccaaagacatacttttgcctctttacatgattactcttaacggtgccgcattcatccctacctgaaccaccatctcatgccagcatttatcggatcatgaaggaacggggtgtaccggtggatgtaggggttaattgtccggccaattttaagccagatagctctatggtaagcagcagtgaagggagaatggtacatgagcttcagcaactgccaatacatgaatgtttgcatagcatttcgttgtcgcgagaacagagatatgatcaaaagaaagcctaacaaaatctctgcatttgaacgtagaaagtggactgcagttgtgttcgcctcaacccatgtacaaggctgctccaagtatgtcctgtataaagatgaactagtaaaatggcgccgtagaaatctggcaacatgttcaagtgcccaacaaattacaggtaccaaaacaagcttcaaatgcagtttagatgtaacaaacataaggcagtacatgaatggtataaaatcctttgacgaagttacatggtgacaccatgcctgaacagcctgcaagttccctgctcggggtagcctgtaaagaggaaacaaagcatagcctgttgtacatgttgtgccaagaagtgacaacctgtatcccttgtactgaagagatcgtggtgccaatggaaagatgccaatcaaggcaacaataaggacccaagcattgacagaaaaatgtaaggaccgctggtctaactgtaatgacagtctgcttcgtgccggtccagcagaattagtgcctaaatcaggaggccttgcattttcaccagctgaagtagatgcaccacctgaagatggtgagggctgggtagaggtggttgaggacattccttcaacagggaaatcaggattctgcgtaaaataatttcggcctgcactgctggaagagagcgccaatcgcggcttccgatgcaggccaggcgagaagagagagagcggggggcgccccctccccgaatctaaacttggcaagactccgacgcaaaggcgcaggcagcacggggacagaggaagacgactgacccctcccggtctccctctcttcttctttctc

SEQ ID NO: 39422 - DNA, 363 bp, Setaria italica
  Peptide Sequence Number=SeqID_105396
tcaagtcagggccatcaacctctgtccagttgcatagtatctgtatttctgactggtgccgtctgtctgcaggtgaatacggtttttctattctgcagtctgcactgatgtgagaaaactgcagcggcaccatggaacagctttccgggagctgcgcagtgccgatgtccacactcaaacgagcatctctgcacagtgccgggagtcgtcagatcgaggctaggacagatccagcggggcatcgccgaaggaatctgcgagaagcgaacgttgcaacgctcgggaaatgagggcaacggcgaccgggattttctggcaacgcgtccgaactgttgtctgtttatttttttctgtcgctcttgg

SEQ ID NO: 39423 - DNA, 770 bp, Setaria italica
  Peptide Sequence Number=SeqID_105397
tccagtggcaggtggggcctgcatgtgactggctatggcttctagggatgtagagatagtggagtatacctcaatgcccatcgctcggactagcttatatatatgtgcgtggctggcacaacgggacggtagggtggacggcagttctttccgtttccatgattttcgtggggtattttttaagttttaccatagttcaagtatatcttcatatagtagtaattaacattatcttggatgattctataaatctatgtatgtatagtagtaattaatgtgtgctgattttgtaaatctctgtaggtatagtagcaattaatgtgtgctaatttgtataatgtggcaaatatctataattaagtagtaataattaaatgttgccgattttagatgaccttgcaaatctatgtacttcactagtagcaattaattactacttagtggtgtgcaacatttgcaagatcatctaaattaaaattggcacattagttcatatagtacttgcaaggtcatattgattactactcgaaatcacatatagatttacagaatcattaaaggttggcaattttaattactactagctagcgaggtacatgttttgtaaatttgtatcctcactatcttcagcaataatattgccagctttataagattttgtaaatcttgatgcctatctctagcaataattagtattgccagctttataagatattgtaaatttatgcactgttcttgtttttttgggttattggtctttttatttcttt

SEQ ID NO: 39424 - DNA, 413 bp, Setaria italica
  Peptide Sequence Number=SeqID_105398
caagaactccctccatcggaggagctcagaaggagaggaaagcttgtgagagctcgaggcgtgcagccatggctgtcctcggcaccgcggctatcgaggtgttcatccctgtggcggcgttgatcggcatcgcgttcgcggttctgcagtggtatgtggttgctagggtgcccgtggctgatcacggcagcgccgcccgaggcaagggccgccggggagaaggaagaagcggcgcgctggaggaggaggggggaggaggaggaggaggacggcgtggaccgcgtggccgcggaggcccggtgcgccgagatccagcaggccatctccatcggcgccacgtcgttcctgctgacggagtacaagtatctcgccgtgttcatggcggcgttcgcggcggtgatcttcgtgttcct

SEQ ID NO: 39425 - DNA, 2490 bp, Setaria italica
  Peptide Sequence Number=SeqID_105399
gccattcttgcactcggcacactgttgctgccactgttagcttgcagctcaagctctcgccactagcgtttgggtcagttcttggagaaatcggacacttggttcgcccatcattgggagaagcttgtgctagcttgagcagggagggggagggggaggcaatggcgctgtcgacgacgttctctgttccgcggggattcctcggcgtgccggctcaggactcccatttcgctccggcggccgagctccatgcccacaagcagcttcaggccaggcctatcaagcctcggcggaggccggcgtgcgtgtcggcgtcgctgtcggagcgcgaggcggagtactactcccagcggccgcccacgccgctgctggacaccatcaactacccggtacacatgaagaacctgtccgtgaaggagctccggcagctcgccgacgagctccgctccgatgtcatcttccacgtctccaagaccggcggccacctggggtccagcctcggcgtcgtggagctcaccgtcgcgctccactacgtcttcaacgcgccgcaggaccgcatcctctgggacgtcggccaccagtcgtacccgcacaagatcctgacggggcggcgcgacaagatgccgacgatgcggcagaccaacgggctagcggggttcaccaagcgcgccgagagcgagtacgacagctttggcacgggccacagctccaccaccatctccgcggcgctcgggatggcggtggggcgggacctcaagggcagcaagaaccacgtggtcgcggtgatcggcgacggcgccatgacggccgggcaagcgtacgaggccatgaacaacgccgggtacctcgactccgacatgatcgtcatcctcaacgacaacaagcaggtgtccctgccgacggccacgctcgacgggcccgtgccccccgtcggcgcgctcagcagcgccctctccaagctgcagtccagccgcccgctcagggagctccgtgaggtggccaagggcgtgacgaagcagatcggcgggtcggtgcacgagctggcggcgaaggtggacgagtacgcccgcggcatgatcagcggcccgggatcctcgctcttcgaggagctcggcctctactacatcggtcccgtcgacggccacaacatcgacgacctcatcaccatcctcaacgacgtcaagagcaccaagaccaccggccccgtcctcatccacgtcatcaccgagaagggccgcggctacccctacgccgagcgggccgccgacaagtaccacggtgtcgccaagttcgacccggcgacagggaagcagttcaagtccccggccaagacgctgtcctacaccaactacttcgccgaggcgctcatcgcggaggccgagcaggacagcaaaatcgtcgccatccacgcggccatgggcggcggcacggggctcaactacttcctccgccgcttccccaaccgctgcttcgacgtcgggatcgccgagcagcacgccgtcacgttcgccgccggcctggcctgcgagggcctcaagcccttctgcgccatctactcatccttcctgcagcgcggctacgaccaggtggtgcacgacgtggacctgcagaagctcccggtgcggttcgccatggacagggccgggctggtcggcgcggacgggcccacccactgcggcgcgttcgacgtcacgtacatggcgtgcctgcccaacatggtggtcatggccccgtccgacgaggccgagctctgccacatggtcgccaccgccgcggccatcgacgaccgcccatcctgcttccggtacccgagaggcaacggcatcggcgtgccgctgccgcccaactacaagggcactccccttgaggttggcaagggcaggatcctgctggagggcgaccaggtggcgctgctggggtacgggtcggcggtgcagtactgcctggccgccgcgaccctggtggagcgtcacggtctcaaggtcaccgtcgccgacgccaggttctgcaagccgctggaccaagccctgatcaggagcctcgccaagtcccacgaggtgctcatcaccgtcgaggaaggctccatcggagggttcggatcgcacgtcgcacagttcatggccctcgacggccttctcgatggcaaactcaagtggcggccgctggtgcttccggacaggtacatcgaccacggatcgccggccgatcagctggccgaggccgggctgacgccgtcgcacatcgccgcgacggtgttcaacgtcctggggcagaacagggaggcccttgccatcatggcaatgccgaacgcgtaggaaatgtggtgattccggcctatagagatgcttgtacatttgtcgttagatgtcaacagggagattagtctgctttggatgatgaaaatgccgtgggagcaacaacgagcgctttcattatgtattttgacaactaaaaaaaatacagatatgttcttacggaaaaaaaaaaaaa

SEQ ID NO: 39426 - DNA, 581 bp, Setaria italica
  Peptide Sequence Number=SeqID_105400
gcgtgtggcgcttgggcctgcccggcctcctccatccgccggtagtcctcccgcacggcggtcatcatgccctcctcgctcggcagcgcggtgtgccccgacaggacggcggcgacccacttggattccagctccagtgcctggaagatgatggtctgcaaaagcacgtcaagctttggtagacacaacacaaacatagcattgtgctgtccgagcaatgaatttttgtaagaaaactctggtttttcatctcagctgaggctccgccgtagtgccgtaccttgaatggtagcccgacgaaggagaggttgggtgcgtacttgggcgggaagacgtgcctgtacaatggtccgacgcggttgtcgtcgacagtgagcccgtccaggtcgaggaatgggaaatggtagcgatacctgaaggcaaaaagaatggtatctgcagctactgctgaaccttcagcaaaatgcactcggccatcgtcttggatcgcatctatctggtcaacaaatattcataacggtgcatagtttcatatactcatacatgttagcttggaggctaagatgttcaagagagctaac

SEQ ID NO: 39427 - DNA, 1153 bp, Setaria italica
  misc_feature (40)..(40): n is a, c, g, or t
  misc_feature (64)..(64): n is a, c, g, or t
  Peptide Sequence Number=SeqID_105401
gttttcgatgcaacgcttatccacttccggaatacgtacnggaacccatcaatcggttcgcacnctaaaaaaaattacctgttccaatgttctcgtctataaaaaggggacgcagtattggttccattccagtttaacgacaacttgtttgccagaagattactggcttactgctcaatcatcatctagaggaatcacgatacgacgcttggcagattgatcccttgcgttgcagagtcgccaccgtcgcgctttcttcctcctcttcccatcgatctctgtacctgtcgtccagagaccagatgcacttgagcaccctgtcgtacacgtcgcgccgccgcgcctccaggtgcggctcccccacctggtccgccagccagttcatgtactctacccattcaggccacagcgcgtgcgtgtggcgcttgggcctgccggcctcctccatccgccggtagtcctcccgcacggcggtcatcatgccctcctcgctcggcagcgcggtgtgccccgacaggacggcggcgacccacttggattccagctccagtgcctggaagatgatggtcttgaatggtagcccgacgaaggagaggttgggtgcgtacttgggcgggaagacgtgcctgtacaatggtccgacgcggttgtcgtcgacagtgagcccgtccaggtcgaggaatgggaaatggtagcgataccctgtgcagtaaagaatggtatctgcagctactgctgaaccttcagcaaaatgcactcggccatcgtcttggatgccatctatctctgcgtgcatccagacattctggtagagttcgatcttcccaagcctgtcttccgagtatcttgccgcgatgtgcacttccttggcaacacgcgagatttctgcagcaatgtcaattccgctggctgcgaatcctaccacaacaacactctgatctcgaaatggttctgggacgcgatagttgtggctgtgaatttgctttccccgccacttgtcaattcctcggatcttgggcaccagaggcgccgtgcagtggccattgcagacgacgacggcgtcgaacacctcctcagcgacctcgccgtcctccccgcgccacgccaccgcccaccgctctccctggcctaggggcgccacgcgcagcacctc

SEQ ID NO: 39428 - DNA, 480 bp, Setaria italica
  Peptide Sequence Number=SeqID_105402
gacgaagtgaaggagggatctgaacacgtgtgcttccatgtcgtcaacagctatgacaacaccgcctgtggcggcctccttgccctccttcatttcaccgaagagctgtgcccggaacaccggtgaccgcgccgcgagaacgcaccggtgcgcagagaacgtgccagtgccgcctcctcctgctaccttgaaggtcacgtccgtgccatcttcgcacgccagcaggttgccgaggtgctggtgcagatcagaagggggcaccgtaacaaatgcatcggtggcctttgccgtgaagggcttgatagcgatgtcgcagctgacggtgaaggagccatcgtcgagatacttctggcgatccaagtcttccctggtgatgaagtcagaacagacccactcccagccctcgtggggtgaccagttctggaacgagcaggctcgagtcctgcaaggcaccggtcggacttcgcggtcagtcgctag

SEQ ID NO: 39429 - DNA, 538 bp, Setaria italica
  Peptide Sequence Number=SeqID_105403
ccgtgcgccacgggtccggggagctcccactcaccccgctccggctcgccggctgcgtgatgctctggccctacttcggcggcgaggagctgacgccgtccgaggcggcgtccccgcccggcgagcccatgggcatggcgctgttcgaccagttgtggcgcctggcgctgccggcgggcgccaccaaggaccacccgatcgcgaacccgctcgcgccggggaggcgtcccgttcggcgacctcggcggcgacttcccgccggtgctcgtcctcgaccccgaccaggacgtgctccacgaccgcgtcggggagtacgtcgcgaggctgagggcggccggcaaggaggtcgagctcgtcgtgttcgaggggcaggggcacgccttcttcgtcacggagccgtgcggggaggcctcggacgagctgatccgggtcattaggcggttcgtgcacagtggttaataattggtgaatgaatcagaaaattaaaaggctgtgttatgcaaataatatttgtcactgtaagaaataatggaggcac

SEQ ID NO: 39430 - DNA, 538 bp, Setaria italica
  misc_feature (474)..(474): n is a, c, g, or t
  Peptide Sequence Number=SeqID_105404
cgtatcaaatgtttgtccatttagaaattaaaggagactttcaatagaatataacttctatgttagtagtgcaatatagatacctggttgtagcatatgtcatttaattaatataatagtcttactatgtcattaatctacttataatcatgataggcctaaataaaccaaatttagttttctatcaaaaagtttttattgcacaagtttacattttgagcattagcagatgtttgaggtaggatctagcctgcaagttgtttatgagacaattatccttttgaatacaatcctgtttgctctttcctctaaagaaaactataaccctcccttttgcgattcttccctcagcgcacatttctcttttgtcatctccttctaatagacaacatgattttccaggagtatggaagaaaataagggtttagggcttgaagatccgttgatgctacctcaaatccatttgcctaaagngaaaatttcaaaatattgataattcagaaatctgcaaatttcatgttgatcatataagtttttg

SEQ ID NO: 39431 - DNA, 631 bp, Setaria italica
  Peptide Sequence Number=SeqID_105405
aggatattaagccaattatcttccatatctgaagtctgaaccaccatttttggtactgtaaactatgaaacacaaataaacatcaggccacaaatcatacattatcaaagtagtttcaatcaaaactgtaaatcatgttgcttacggaaatttatctaaagttagtccacaaagagttcctcaaaacatgcgatttttttaaaaaaatagaacttgccattttcacatggcaatactgcaaattagaattgataacaactacatgagtattgagtagcagggtctaccctagctagatagctcattgtagagtagatctagcaaccgtggttcaactccacttttgcatagatattaagtcatctaatatggaggggcacccctatagtcgttacataagtctttgatctactttgctgctaatgtaggcatatcaggataaacactttctgcttcatatgttgataactaagaaagttagtcaaggtataaaattagttgcattttttgttcaaatagagcccaaaaataacactgtggtgaattcattttttagatgctaataacaaatactagcatgccaacaagcaacacaaaagaaattctgctagcaaatgaagttctggtggcg

SEQ ID NO: 39432 - DNA, 1403 bp, Setaria italica
  Peptide Sequence Number=SeqID_105406
gtgaagccgttcgtggcgcacctgcgggctgcggaggagcaggcgtcggcgcagccaccgccgccggccatccggctgcagctggagcggcgcgccccatggttcagcaagggcaccctcgagaggttcgtgcgcttcgtgagcacgccagaggtgctggagttggcgaatacctatgatttggagatgtcgcagcttgaaggggccaggaagatttatgcgcagggaggtactggagatgctacctcgggtgcagctgccgaaaatgttacaacctcagcagcagcagcagcagcagcagataatacaaagaaagaactacttagagcgattgatgtgcgtctaagtgcccttaaacaagatttggccgcagcttgttcccgagcatcatctgctgggttcaaccctaacagtgtatctgagcttcttctttttgcaaaccattttggtgccaaccggctaagcgaagcatgcaccaaattcatgtcactttgtcagcggcatcccgacatcagtcctcagaatgcaccgccagcagtttcatcacactggaagggctttgatgatgggaatgtccgtggttcttccagttcagacatgtctatagatgagccacaagttgatcttggcgaatccaacaacaaatctacagttggcggaagtgactctcagatccacagactaagcaacagccaaggttcagtacatgtttcatctgaaccagttgcagaacagcaaaccaagtcaaccatccaacaggcagcagataaacaagaaacagaaacagacgcgtctcctgcaactgctataggtgtttcaaggcggctgagtgtgaaggacaggataagcatgtttgagagccagaaaaaggagcagactccaagttctggtaacagcacctcagcaggtactggtagggtggttccagggaaaggtgagcaccgcagggttccttctggtgcctccatggagaaattggttagaaggtggagcagtgttagcgacatgagtattgatctaagcaacaatgacagtggcaacttaaatgacagaaaggagaatggaactccagttgcgactccgacatctgcagatttggaagccaactcaaaagcaggagtagacgagggttctaatgagctgaaggattcggtcacatcacagtcttgtccatgtcaaaaggataatgtatcaatggattcgaccactaaaaatttgtgcccagccccaaatttgagcaatacgcctgctcctcataatgagagtacatatagtgcagaagatgacatggttataaactctagcattgagagtgagtcatcctttgggaaagaaccaggattcattcaaggacacacaaggatgtcaaataaggctgattcaaacgtttccactagaagccg

SEQ ID NO: 39433 - DNA, 337 bp, Setaria italica
  Peptide Sequence Number=SeqID_105407
ttgtaacctattttgaaccattgttatcttaatctccttcctatatctaggtttcactagttttattttgctttgaaagcattataattacagattactgactatttctacttatggatattatttactttttgttcctgtgggatcgttagtgatcagttatcataaagaggtacctcagttatttgctatataaaaaatcaatctagagtactcaattcattgtggagcaaaggcacacgccgccaaaatcactgcatacccatcattaattggctatgcaattgtttctaggatctgaactgagcataatttaatagttcgttcatagtggcct

SEQ ID NO: 39434 - DNA, 334 bp, Setaria italica
  Peptide Sequence Number=SeqID_105408
cggggaggcggtcggactcggcggcctcgaggtgggacggccacacctccgggcccttgtagcagaggaacacctggcgctcgtggaaccccaccgtcccggccagcttctccttcccgagctccgggcgctggaacccgaactccgcgtccggatccggcatcgcggccgcggcggcgggggccgcatccgtcgcgtcggccgccggtgcgtgcgccgcgagggaggcgtcgccagccgtcggggaggccatgaggaggcggggtggtagcagacggcggcgggttggtgcgcgctgcgaggaggagcggagtggtggtggaaatggaaattg

SEQ ID NO: 39435 - DNA, 1567 bp, Setaria italica
  misc_feature (1)..(14): n is a, c, g, or t
  Peptide Sequence Number=SeqID_105409
nnnnnnnnnnnnnnttttttttttttttttttaagagaaagtcgttaacttcagattaagacgaacatatctgccaatcaacctgacaaatagttttagcaacccatatgctccagaacatccaaaatccaaacaaaatataacatcagagtaaatgtttgatacccaggccttgccttgcttaagataaacggcagctaaggcaataaaaactttggtcgcaatggagtttcacattggagttttcacgagaacagtaggtgcaacaccttttcatcaccatcccctgatatgctactttaaggttctaatcctcgcattactatgcacaagtatattattctcatcgcagactgttttaccgcagtagacttgtttcaggtacttcttcaaggatctcaagttcagttgaggttcttgtagattctgaaagcgacaaacaccgaggcagcagctgcaacaacagcaagagcggcataagtgtcagccctctcccaggtctcgaaccaggtgggcatcgggcatgtctttgtgtgccccttcttgctgccggcgccgctctccttgtcattctccttctcagagcccttctggttctgctcagctgcaacgctcttgtcctgcttttcctttggcaggtcagtttggcagcaagtaaagccaccattgccctggcagcatccaccacctgttgcaggtgggatgcaagaagcaccatctgttccagtttcttcaagggattctttggcaccatttgtcatgttcctaagctcgagagcttgcttctgctgctcctcagataaacccatctgccccctccatagatggtccacaatttctccttctgcaatatgtttatgcagcaagacaggcacatcatcaggaacaacataaccataccaatgaccagttacttctcccttgtcatcagatctgaaaatgatgacgtttcctgcgtacttgtgacctcccacgtgtgagcatgcactgacagccaccttaccatcaagtcccagaccatttatctcttccttgaaccttttaatcaaagcaggtccacaaacaccacatcttttgtccctgcttccatggctgcaaacaaagacgtaggaaccgctgatagcctcaggacatccaggaagccactcagtatctttcacaagtacttcttcaacaaagttgtcgacgtcaaaatgggtcagacctttgtatctgatcatatctggaaagatcaacacatctccattagatgactcagtgccatcttctccttcacagatggtcaatttggtggtcttcttcaggttgggcttgcgggccttgattgcggcggcgaggaggcgggggaggcggtcggactcggcggcctcgaggtgggacggccacacctccgggcccttgtagcagaggaacacctggcgctcgtggaaccccaccgtcccggccagcttctccttcccgagctccgggcgctggaacccgaactccgcgtccggatccggcatcgcggccgcggcggcgggttggtgcgcgctgcgaggaggagcggagtggtggtggaaatgga

SEQ ID NO: 39436 - DNA, 716 bp, Setaria italica
  Peptide Sequence Number=SeqID_105410
cgggtaaactaatctactattttttggctttttctggactatgggaaattaaaacagcaaagaactagaagtctctcaccgataaaccttgctctgattaccaacttgctctgattaccaactgatatgaaccccctagggttgattcccgatctttcaatgagagaggcgtggataactcgattggtggatggaggcaacgttcacggtccgactacagccttccaagctgcgccttagcaaccgatacacgacctccaatggctgccgcgatcttgtggagcgcgtcacccggccactagggcactcgtcctgcaagcaatcgaagaacaagcaagaacaagtagaacaagcaactcaattggaaatatggagatgaaaaccaattcttgttccttctactggggttctgaatcgagtagaacggatggtctagtcgacacacgcgtctataaggaagtagcaatggctaaactttcaacaaaacaaaacccaatctgttcgtggtagctctaatccttattaatacctaggaggacgaccagaggggtgttagggtcgtgctccaaccctaggacatgtccctaatggacccaacttgatacacggcccattgggacaaaataaggcgacgcagcacctgtggacagaaaatctctaggtagtatttcgtattgtatttgtcgtaccgtacttctagtagtaagttatttatt

SEQ ID NO: 39437 - DNA, 916 bp, Setaria italica
  misc_feature (894)..(894): n is a, c, g, or t
  Peptide Sequence Number=SeqID_105411
aaggtggctctaatccttattaatacctaggaggacgaccagggggtgttggggtcgtgctccaaccctaggacacgtccctaatggatccaacttgatacacggcccatcgggccaaaatagggtgacgcagcacctgtggacagaaaacctctcggtagtatttcggtgattgcggccgcctcagaatagatatggacatgagtccggatccatatgaaaatagacttcataaggattccaaggagtacttgaacgcccaaaacggagtccggatgaggtcgtggcggccgttgcaagttgggccagagctgcagtccgaatccagcaccaaaacgtgttggattggatctctttctttccttgggccaaaagtgacgtggtggcctggtggaggacgttaggaatacttggacttggcccccaatctacttctttggtcctccatgccttccatgtgtgtttaacactatttttgatccatgtatgtatttctgaaattgacaacgaatacacatcatggtgcagcatcaattcatcaaatgtatcacatataagtatgataaagaattgtttcacctcggaatcaaaagatactaatatggttgtatccgagcaggtgatgtcctcatcaggatgcctcaagttgagagtaacaggctattttaggtattagtcggaataagatgtcaatatatctattttggtagtactgtaaataagatatcaaaactactacttgatattgagagaataacaaaaatagcattaattaagagttttagaaagcaaatgctagttgtacagttgcatcacttcacatcatgtaaacagttttgcaatcaccaggatcaaacacaagttcatgaccaatatggattgacaaatttaacnccttcaatttaataactaatta

SEQ ID NO: 39438 - DNA, 463 bp, Setaria italica
  misc_feature (55)..(55): n is a, c, g, or t
  misc_feature (58)..(58): n is a, c, g, or t
  Peptide Sequence Number=SeqID_105412
gtcatgctatcatctgctgctaggaactcctgcctatgtgatgttgtgcactganctncattgccttttccatgagctgcatcagattcctgcctctgtagtgctgttgtgatgcgagggacatcaccttgtgcaccatctgaaatagatttctgccttggtaacgttgttgtacacagggcaacagcatcttgtccatcatctggattaagttgttgtcttttgagtgctgtcgtgcacggcacatcaccaccttgttcatcatcttgagtaagttctaatgttggtgtgaattgagcagcagtatcttgtccatcatctgcagtaagttcttccgtctgtaaagtggttgtgcactgggcagcatcaccttgtccgtaatctgctccaagttcttgcatcagtaatgttgctgcgcactgagaagcatcaccttgtacatcatctgctatgagttcttgca

SEQ ID NO: 39439 - DNA, 510 bp, Setaria italica
  Peptide Sequence Number=SeqID_105413
cccatctccacacccaaggttgcacccgagaccaccgtccccaccgaggttgcggctgaacatgtggttgagaaggtggtggaggaggccaaggaggagccggcggcggcagcggtaacagagccgcctgccaccgccgagcccgagcagaaggctgaggaaccaccagaggcgatcgtcgagcccgagcacaaggaggagcaagtcttggagaagatcgttgaggaggatcagaagcctgcagcccctgtcgaggagaagaccgccgctgccattgaggtggcggaggagcccacggaggtgaagaaggacgccggggaggaagaggaggagaagccgacgcagagctgaccgactgtccatggcgtcagttggctcctgcctgaaatctctagagtcgtcggctcatatatagctcgggagagagatccactgtgtctaacattctttgatgcctcccgtttttcctccacggggttctgataaacgatattattgggcttattattg

SEQ ID NO: 39440 - DNA, 457 bp, Setaria italica
  Peptide Sequence Number=SeqID_105414
ggggggggggaggtggccggtgaccatggagggggcctgtgcaggaggcgcaggggagggggcggtgcaaggagagagagctttagggttttaccccgtaattctttgcttgattcatttggtacatgaggcctctattatatagaggggacatgacttggttctcaagtaactttaacttacttggcttgcaagccatcctattatctagactcttcctaattcctaagtagacgggcagcacccggcgtgctacagtacccgcgacgtgggtccttttgggccagttctgggccccctttggctcagccggcctcgggccagcctttggcccaaccggcctagctgggtcctccaggtccctaacaggtatatatgtttgtcgaatcctttcctatttgcagtacaaaaccaaaacgaaggttctcttaaactaagggggcgtttgattcccttg

SEQ ID NO: 39441 - DNA, 737 bp, Setaria italica
  misc_feature (142)..(142): n is a, c, g, or t
  Peptide Sequence Number=SeqID_105415
gggcacttcggtgatgtactcctgtagccatgtcctaagcaattgctacactgcacttgccacttgcctttggacttagccttgttgcccttgttccccagacagctaggtatcctatcttcctctgtctcccaactgctcncttttgcaaagtggccgcaacttgaactccaagcccacatgtgcccgctgagacttgttagttaatggtttaataacaccagaatatgcaagtctaaaattcctcactaagaagtaaggatgcaagtactcttccatcttaggatttctgcttgttattatgagtgccaaagcatgggatgagtttccatcatctagcttggctgggaactgagaaattcgaacacacaatctaaatgctgcatctggatcgatcctaacgagtaccaacaaaaaacacgagtatacatatcagtcagttgtatcctaatcgtcctattcggtcacggatgcatattcccaattcaaacagacaagttgagaggaaagggattagaaattgctgcttagcaggagattcaaacagacaagttgagaggaaagggattaggaattgctgccttaccaggagggatctcgaaggggatcatcgtgctcgttcacgttgctctgtacacccaaagctgccgttccagttcagctggccaagcactagcggcggcggcggcagctagggttcttcgttgagagagagaggacgagctgagatgcacgag

SEQ ID NO: 39442 - DNA, 583 bp, Setaria italica
  Peptide Sequence Number=SeqID_105416
ccgagcccgcctccgcacgcctccgcgtcgccggacaagtccgcgccggcgcgtccggcatcatggcagcggtgatcgcggacctcaacggtgacggcacgagcgacaccgaggtcttgatcgcctgcaagcgctgccaccgccgtttgaacgacagggccgtctacctttacatggacaagggattctgcatgccggagtgcaggtacgagtacttccaacaagaactctacgagaagaggcggaggctcaccgccgagacacgggagagcaggagggcctcgaggaatggcaacgcggacctgcatacggaggcggcagatcggagctccaggtccatcttcttcgtcgccgacgactccgtggcattcccttgaaacacagctgcatcgttttcgtcgtatatatgcagtaaaagcagcagtctcgtgtttcaatgttgtaaaaagtgagtaccatcgatctatggtatatgtttccttgtgtggtgttgtacatgtgtctgcgtgagagagttctagctaggacaacgatggagattgctttttggaggagaacatgtgcccaaccttgaaattacaga

SEQ ID NO: 39443 - DNA, 379 bp, Setaria italica
  Peptide Sequence Number=SeqID_105417
ccctacaggaaattaaaggacaaacccgaaggagatgagaaagatcatatgatgcatcagcctaacaaaatctgattatatcaaaatgaccagtttcaaaactatcagtccagtagagcatttgtttttctaactaaaaagagcatggttgatttagttgcgagcaaaaggtacaccaaaactctcaattaacagaacacataaacacatatgatcccccaaagtggatgctatctctttgtttatcaatggaggcacaattgttatacattcttccatgtctaaattcatagccatgtgtgaatcaccaagctatccaaattcttaataatgcccagcttagatcacctaatattttgcttccaaaagaaaagcacct

SEQ ID NO: 39444 - DNA, 408 bp, Setaria italica
  Peptide Sequence Number=SeqID_105418
ataatgtatgtctaaatccataataatatctatgaatttagaaaagtcgaaacaagttggaacggagggagtatagccttgcgctcaccctgcttattgatgatgcccagaggctagagtaatcagataaaagctctgccgatgtgagatctagatgcatagcaggtttctagcttctagggtttaatctagtcagctgcgtatgaactgaggcaaaaacacttattcagccacgagtaaggaaaggattctgaccgttttcaagtagctgaggccgtgacaaccaagcctggaaggcaacagaagcatgacaattgacaactgaaggtacggtgagatggaccaccatcatctaggaccaatttgataggctccagctcctcctaaaaggagcctgagccgaaggag

SEQ ID NO: 39445 - DNA, 1345 bp, Setaria italica
  Peptide Sequence Number=SeqID_105419
gcagactgcagaacctgaaggtgaggagagactgcaggcaacacctacttccctctcccataaccccagctctgcacctgaaccaaattactgtacttctttagttcttttccctcccaactcgatgttctgctgttcccaattcctgccattccagcacaccacatccctgtaagaaactgtctgacgcgttcaggtggccgagccaccgctgccgcagctccgggaacgcgacctccagccacggtttccgcggcccgctgaagtgcagaacggcggcgaactccaccagcttggggtccggcacgcgccagccgaggcccggcagatgccacagcggctcgatcgcctgcacgcgcccgtcgaacgcgattagagccggcggcagcgaggccatctgccacagcctgaagcccgactcccggttcttttgtagccagaactggtacgtctcggtgacgtttgttcgtcgccacgcgtcgaggtcgacgatgttgatgccccacgaccacgcgcattgcgagctgtggacgcccgacacggcaggatccgagaaattcaggtggtcgccgaaggtcttgtcgatgcagatgccgcctccttcgtgagcgccgaccgcgccgatgactttcccgtcgaggtcctgctcccacagcccggtcaagtccttgcgcaccacgacgtcgtcgtcgaggagcatcacccgcccaagctcagggaagaactctgggagatggatcttgagatagttcaggagcgagaacgtgctcggcttggacgcttcgagccgtctgtgctccctctccgctgatccatcacactggtgatagtccagcgagctcctctgcacctcctcgaccgtcctcatgacggaggcgatgacgccggcgtcgcgccagtcgaactggtgcaggcccctgacctcgacgacggcgggcgacaccgggtgcagcgcgaaccacgagtgcaagggcacgtagctcttcttgtccgtgacgatgtggaacaccagcctgccagggtcggcggcgctccgcacggcggaggccaccgccacggcggccgcgagcacgttgtcggggacgttcgcgacgtggaggtacgaggcgtcggtgaggcggggcgcgtgctccggcggcggcaccggggagcgcgccgcggagttcaccgcgaactcctcggccaggcgcagcgtgaggcagtgcacgctcttggggacgcccagcgaggccaggtgccggttgaacagcgcccggaccctcgatgactttaccttccgatccatcttcaacaacatggccatcatcttgatcgccacggcctccatgtcgagccgggcgtcgta

SEQ ID NO: 39446 - DNA, 178 bp, Setaria italica
  Peptide Sequence Number=SeqID_105420
agctcaacgctaccttgttggagatagtctaagttcaagccaagtttctttaatggttgggggttcaaacagttaaataattgtggaataaaaatagacgcagtcaatagttgaaggttgtaaaataaattttctcagtaaattatatggaggagcgtaagatatgaaaaaaaaaaaa

SEQ ID NO: 39447 - DNA, 670 bp, Setaria italica
  Peptide Sequence Number=SeqID_105421
gcgaggtagaagaagagcgccgtggtgagggccatgtaggtgcccagcacgatgccggtggcgaagatctccttgagcttccacgagtccggggtcggggacggcttcacgcggtccttggagatggtcatgatggtgccgtcgttgaggatggcgatgatgagcaccatgaacggcgcgaagtcgaactcccagaccaaggccacgaggaggaaacccaggcacgatgcggatggtgatggacaccgcgtagatggtgtaattcttcatgcgctggaagatggcgcggctggtgagcacggcgctcacgatcacgctcagcccgggctccgtcagcacgatgtccgacgcactccgggccgcgtccgtcgcgtcatccacggcgatcccgatgtcggccttcttcagagccggcgcgtcgttcacgccgtcgccggtcatgccgcagatgtgcttccggtcctgcagccgcttcacgatctcgtacttgtgctccgggaagacgccggcgaagccatcggccttctcgatcagctcgtcgatgggcatgccgttcaccgtgctgttcttgtcgccgaggagggtggtggagggatacatgttggtgcccatgccgaggcggcgcccggtctccttgccgatggcgagctggtcgccggtgatcatcttg

SEQ ID NO: 39448 - DNA, 496 bp, Setaria italica
  Peptide Sequence Number=SeqID_105422
gtgcccagaagctgtgggaaaatgtttcagtggaaacagtttgtgatgctttagcttgtgccgagatctacaattgcccggaactgaagggcaagtgcattgagtttgttgtggcagataaaaacctcaagaagattgtgcttacagatagtttcatgcagctggggcagaagttcccatctattatcactgaggtgcgaaggaggcttgctgggatatgacgtggtgctacatctgaagcctcttggaacttgaagaccatggttttcgtgaggcgggaaattaatctttaaagttgccttctttgttatatatgctagttcatagctcattattgtgttcagtttgtttgcagacatgtcctgcagttggtttaatttatgtttgaagtttgtgagaaatgtttgcttttgtttgcttccagtattacctagaaacaagtttgttttcttaaatccatgaacattatcagatctcttcaagtaatttaaaaaaa

SEQ ID NO: 39449 - DNA, 221 bp, Setaria italica
  Peptide Sequence Number=SeqID_105423
ccacacttcgacttcgagatcctgcaatcacggcggccatggcgagcaccgcccgtctctccacctcctgcagcctggcgaccggcagcatcaccatcagaagcaggaggacaaccatggccgccattggatgcgctcccagcggcagcaggacccaccggaggagttgctggactttccctgtgccgctcctccacggccggagctgaaggggcaggaag

SEQ ID NO: 39450 - DNA, 537 bp, Setaria italica
  Peptide Sequence Number=SeqID_105424
cccggtctcgtcggcctcccgtggattccgcgctagcgcgcgccggctgctcctcccactgctgcccggccccggaccagctggtgttacgcttgtgtgccgggtgccgcggcggcgcgcctccgccggacacgtgctgcagcttggtgatgacgttgcggagcgcgcggctcggtgaggcgcggttggcgagcatgatctcgccgagctcggcggggctgaggcgtgcgccggcgtggaagccctcctccacctgcgggtagagcttgtggtccttgagccccaggtagttgctggccagcgccttgaacgcctcgaagtcgcagagcgtgaagtggatgtgcacgtctagccgccccggccgcaccaccgccgcgtccacggcgtccttgccgccgcgcatcgtgaacaccatcacccgctcctcgccgcagcaggaggcgacgccgtccatgaagctcagcaccctcgccgtcctggccgccgccgtctcgccgtcgccgccgcggaggtaccggtcgaggtcctcgacgagga

SEQ ID NO: 39451 - DNA, 513 bp, Setaria italica
  Peptide Sequence Number=SeqID_105425
actttgactgataaataagctcatgacttcagagacaggaggataagttcatcctgttttagccaaaaccccataccaaagctgcaaattcttgaatcatgctctaaagaacagtgatgtctcctccagcacatgacaaacaaccaaattcaagaagttccatacagaaacatgttgccttgaccaaggatgaggactgtatccttggagagaggtacaatgtcctggactctttcacttagaaagattgcttcaatagctgagagcttgatagtcgctagctctcgttcgacgataacaccttcatcgtccccattagtggattcaatatccaatgctgacattacatgtacagaatgtccaccatctgaaacccaaaaaatctgtgtttctgcacaaacactctgaacatatttattaatgaagtaaaccataatgtgaaagaggacagaaaattcagaacaaaaactcacttatagagctacttggaaagacagcagacagttgcacttt

SEQ ID NO: 39452 - DNA, 488 bp, Setaria italica
  Peptide Sequence Number=SeqID_105426
ggttcatcccgctccacttctccttcgccatcctctccgctgcagcgcttcctgcagtgccagatgaagaacttcgtaaacgccgccgcctccgccgtcgcgctcgccgtccacgtcctcgtcagctggctcctcgtctccaggttccagttcggcctcgtcggcattgcgctcacgctcaacttctcctggtgggccaccgccaccatgctcttcgcctacgtctcctgcggagggtgcccggagacgtggcacgggttctcggtcgaggcgttcgccggcatgtgggagttcctcaagctctcctccgcgtcgggcgtcatgctctgcttggagaactggtactacaggatcctcatcttgctgaccggaaacctcaagaacgcggctattgcagtcgatgcgctctccatctgcatgacaattaacgggtgggagatgatgattccgctggcattcttcgcaggcaccggagtgcgtgtggcgaa

SEQ ID NO: 39453 - DNA, 341 bp, Setaria italica
  Peptide Sequence Number=SeqID_105427
tgtgataaacgagtcagtgttacagtaatggtcgatttccccagtctgtttccagcatcctctatgtgtatgtcaattttgggtggtaatgatgacattaattcctttatatgattgccaaatggataattgcgccctgttactgattctatctttctagcatcagcagctgccaaggtgtcaaagtcacaaattccagcactcttcagagcctttgctgttacaattccaatcccaggcagttgtttcagaagaaatggactcctctcccaaagcttttgatgtagactatttgcaaggatcatagaatttatagcagatctgtaactctttttgtatat

SEQ ID NO: 39454 - DNA, 1781 bp, Setaria italica
  misc_feature (1)..(45): n is a, c, g, or t
  Peptide Sequence Number=SeqID_105428
nnnnnnnnnnnnnnnnnnnnnnnnnnnnnnnnnnnnnnnnnnnnncggtcaaaacacagacacagcccttgacataaaaaccaagaattcagtttggacagcaacactaagactagtgcagatcgccactcagtgaccagctcaaaaaaaaaaaaaactgtagacatcttttatcccgcgacaaaaccaccactagtatgaaatagtccagccattggtgatatgacgtaagcaaatgacccagcaagctctcatggtacacaagaacctacccttattttacttgtacagactcgtatcaaaatgacccagcaccgaaaacaccagaacacatgctcatcctctccaggttctaagcaggcagggtttagtacggctccactggtgccctgaaattttctccggcatagatggccgcggcaccgagctcttcctcgatcctgagcagctggttgtatttggccaggcgctcagaacggcagggggctcctgtcttgatttgacccgtagacaggccaactgagaggtcagcaatgaaggtgtcctctgtctcaccactcctgtggctcgccatcactccccatccagcacgcttggacattctaacagcctcaatactctcagtcaccgagccgatttgattcaccttcaatagaagagcattgcaggtcttctcactgatggccttggcaaccctggtgggattagtaacaagaagatcatctcctacaatctgcacttgctgtccaatctcatcagtgagtttggcataggtggaccagtcatcctggtcaaacgggtcttcgatggagacaatagggtactcagaaacgaaggacttgtacagatctttcaggctgtctcctgaaattttgtttgaaccatcgttgttatcctccttgaagttaagatcataagtcttatccttctcactaaagaattcagaagcagcaacatccattccaatgaccacctttccagtgtatccagccttttctatagctgccttcaacagctcaaggccctctttgttttcctgaatgttaggtgcaaagccaccttcatccccaacatttgtggcatcttgaccatacttcttcttgattatgctcttcaggtggtggtacacctcaactcccatcttcatggcctccttgaatgaggaggcaccggttgggaggatcatgaactcctgcatggcaagcttgtttccagcatgcgatcctccattgatcacattaaaagcaggtacaggcagcaccagagttttgtttccagcaagatttgcaatgtgctggtaaagaggaatcttcttcaccatggctccagctttgcacacagcaagtgacacagcaagaatagcatttgctccaagcttttgtttacaccagccccagtcgttggaggttccatcaagctgctgaaccatgaagttgtcaatgtcaacctgctcagtggggtccttttccaataattgctggtccaataatgctatttacattgttcacggccttaagaacacccttgccaagataatcagatcctccatccctcaactccaaggcctcatatattccagtggatgcgccgctgggcaccggcccccctcgcgaagctgccgtcgctcagacccacgtccacctcgacggtggggttgccgcggctgtcgaagatctgcctcgccttcacggacgtgatcgtcaccgccatctccttccgccgatccttccttatctccaaaaaggtctctctctctctctctctctctctctcgagtagtt

SEQ ID NO: 39455 - DNA, 461 bp, Setaria italica
  Peptide Sequence Number=SeqID_105429
gccacggcatccgcgtcaactgcatctcacccttcggcgtcgccaccccgatgctgatcaacgcctggcggcgtcgtggcgacggcgacgaggacgacgacgccatggccgcccccagtagctgtagctcgtcgtcgttggatgtggagaagatggaggaggtggtgcgcgggctggccaatctcaagggcgccacgctgcgggccagcgacattgcggaggcggcgctgttcctggccagcgacgagtccacctacgtctccggccacaacctggtggtcgacggcggcgtcaccacctccaagaacgtcatcggattgtaagcaacaagctgctgcaatctgtttctattaatttgtgatggattattggtgggtggatcatattgttagacaatgcttgatcgagcgagtccgtgttcgatctgaatgaatgtcggcttgggtcgcaaacgccgcttg

SEQ ID NO: 39456 - DNA, 420 bp, Setaria italica
  Peptide Sequence Number=SeqID_105430
tcctctttagctaacggatgcttgggttaaccttgattgaaaatggagcaagatcattgaaccgatcataatcttatgagatgtcagtcttgtcctaaactccaacgatttttctttcctctggaacaactatgtggcgctttggctggtcatttgaacttattagcacccttccttattggtttgcatgacatgtccttcatgtagaaaacttgagtcacatcattagctaggacgaatggttcatctctatccaatcttgttgaggtccactattgtcatcccatggttgtctgtcgttacgcctcctccagtaagtttcacccattggcaccaaaacaagggattttcaaaggtccatagttcagttcccatatctcctcaatgacaccataacatctgtctttttttccattgttg

SEQ ID NO: 39457 - DNA, 467 bp, Setaria italica
  Peptide Sequence Number=SeqID_105431
tttttttttttttttgtattcaaaacattttttcattattgaatgttggatatcatagtgaccacaagttttatgttttagtaattagtagccgatgtatcttgtttgcaactcttccacacctcgttcggatgggggacgagaaatgtcgcagagatttttaaaatcaaggatcctttcttggttgtatctcttcttctcgctatctgtaagtagggcgacgacacagagcatgttcctatttggcaccattctaaccgccatacaacagggaccatttttgggaacccatgcggatttgtccacgatgagttttctacactttctcatgatcagtttcttctgtgttacgctacatgttggatattttcccagcactggatcgataaaaactattgaacacactagcacaaggacaattgctcctttcccaagaaacatcgtcatgatgtttctggtggtgcttt

SEQ ID NO: 39458 - DNA, 525 bp, Setaria italica
  Peptide Sequence Number=SeqID_105432
cgagattggctcaccttgctcgtccgccccccaaaccgcggaggatgatgctgtcgctggcgctgggcctcagcagcaagcgcccgcggacgacatcgcggtctccggccacgcccgatgggccggaccacctgagcccctccccgtcgagatggtggaagagatcctccggcgcctgccgcttgatgacgccgtccgcacctccgccttggcgaagccctggcgctatcgctgggccgagtgccccggccttgagctcgtcgccggagatccaccggctgccgtagatgccgtcctcaacaggtacacctgcaacgtctcccgtgcccagcttgatgtcccggaggaatcctactgcaagatcgacggctggctccgcgccctcgccaccaagggcatacggtacctagtcgtgtgcttcactcctgtgctcttgctgcgattgccccttcttccgtcctcgctcttctcctgccgcgaacttacctcgctgctgctcaagcactgcgatatcccaccctgccg

SEQ ID NO: 39459 - DNA, 1968 bp, Setaria italica
  Peptide Sequence Number=SeqID_105433
ttttttttttttacaccctaacatgttattgttatttcaacgccttgttgcatgtttgtacataccacatacatgagaatatattttacttttttattcacaaaaacatccttcgacaaatcatcatctccaaaattctaaatagcatagtaatatccatgctactccctggcacatttatcttgtaccattcagtggaggccataatgaagttggattgcctcctgaagtcagaactttgaacaatggaatctgtgtgctgatattggattgcctcctggagtcagtagtgctggcaatggaacgtgcatactgacattggattgcctcctgaattcagaactgtagaccatggaatgagcgcatgatctgctggcttcgtccaattcgcatcactatatctgtagggccctggcctctaaagatcagtatcaacatgaactacagactctgagcatgatagctgccgacaatggaatgagcgcatgatctgctggcttcctccaatttacatcactatatcagtagggtcctggcctctaagatcagtatcaacatgaactatatagaccctgaacatgatatgctggcaggctccaatttacatcactatatcagtagggccatctgagatcagtatcaacataaacccagattggttagaatttcattatgtacagaacactcctactgtacatcaataagcctcatgtagagctaatctttgttatccttgaatagtcaccaacgttggcaacaaaaagtgggtctttctcgtcgccgaaggtatttttttcactcgtttgctctaattcttttgtcaaatcttccattgtcttctttaagttggccttgctcatctgtccaccttcactcattgagatgccaaccatggtgatcttggggagaagagggtttgattgtaaatcagttttcatgtcagcatcatatctgctaaatttgctgtcgctttcttgttctttaaactttctgtcatgccctggccatatatttggaagcagattgctaaatggaaagtgaaattgattatgatcttggttactgtgacttctgtagctgttctcaatacttggatctgaagattgagattgctggtcattttggcagcagctatcatttgaagcagtaaagctgctggtagtagctatgttggcaatcgaaacagcagtcctttcttcaaatgaatcaacaacataagggaaccgtggttgtatgccggcagcttttctcaaccatttatttcctagaagaactttatcaacaacatcaagaagctgaatttctgcagcttttgttacaacatttaatggtattccagctgggccaatctcattcatcaattcttgcacctctgggggttcaagcaagctatcagcactttcttcaattatttctgatgttaaactatcatcaacgatatctcttctacgttgcttatggcgattttgcattattgaatggaaatgttgatccattgaagcttcaagaatattgtccaacaagtttttatcaaaaaaatacggtgtgtaccatctaattccatcatttgttgccactgcaatgtttaggttttgagcactaaaaacagggacaccaccaagtcttttccttctgcccctttgtggaagtgatttcagcagcttattggcagcttttacctgcttttcatttggaacaaactggaacatgtgaggcttttccttgaagtgttcataggctacatcaaggcgacaagctcccaccatgccacttggcacatttagccgcttaacgtaggatactgcatcattcaaatccaataaaaaacctaaatactgggccattttcactcttcttcaacggtgatagaatctttttgaaccatgtaggagtcctgtttgtgaggaagcgcgggagctcgaagcgggtggtgacggccatgagcccgttccagaggggtcgagcatg

SEQ ID NO: 39460 - DNA, 748 bp, Setaria italica
  Peptide Sequence Number=SeqID_105434
ctttgtttttgttttgtttttctttttgcgaattgtggcgatttctggtgattccgattgaattagttgtgcaatagagtcgtcttaaggtatggatatgcatcttagcacttcagtggagtgttggatcaggtttatcaatgcgtgagcttgttggtaggagttaaatggttgctgcagtatgccagtatcttccagtctttttataaagacctatcaaacctgacacaaaattgatgataaacaatactgatcctttcttgttaataaaaaggtttcccagagagttcttcagggttcaaacgcctgggatggggaaagaaaaggaaactggcacatgatagtccactgagagcagataccacttggactctgcctgcaatagatgtaaatctgagatcaatgtagcccgactctcgcgggaacaaagcagaattaatttgaggtggaatttctcaggaatcaagtattagtatgaatttgaatagggggaaattgccttgcttggtgaggcaccattgctgtataaaacaagcatgccaagctcttcattaatttattgaaaatggagctgcagtaggtccttatctattatatgtacttgccctaggttgatgcttcttaggcattgaaaagggtagataacagtttaacatagtccttttcaaaaagaaaacagtttgacatagtagtatgttcctatttatagctatactggacatttcatcctgttccatggagcagttag

SEQ ID NO: 39461 - DNA, 187 bp, Setaria italica
  Peptide Sequence Number=SeqID_105435
taaattgaaacaaaaacgatgttctgaaaagttaaaccagaatctaaaaatttgttaggccactaagactatcttttatgctatttggtattttctgattgggcgcgattttaaattatcgctccattggtgatcatgcagagaacagtgtgtggctgatctccagggcctgtagctagtgcgtttc

SEQ ID NO: 39462 - DNA, 284 bp, Setaria italica
  Peptide Sequence Number=SeqID_105436
agggagtcatttgataggtttcgctggttatttggttggttgattgcttgattaattccggttgcgtgacgcggactgcgcttgatcaatcgttgtgaatgtgataagcacggatccgtcgtccggtggtcgactcctctcagagggagctgattttcgtggctccatccggtcccttttacccattcatcctgtccataattttgcgactctagccgcctgattaacaatccgacggccgggagctacagcacttacttgtaaagacctcgtggtcaaattct

SEQ ID NO: 39463 - DNA, 888 bp, Setaria italica
  Peptide Sequence Number=SeqID_105437
actagacaagaagacaatagacaagtaccggtacaaagttccttaatgcctcgaggtactttaattgcaccaaaatgtgtagaacttcctttagtattaaattctttacttgcatacaggtaactaagcttctttaatgttcctacaccctttggtaaagactgcaaagcagttaggaatgcatccagtacttctaagttttgtaatcttccaactgactcaggtaaaatttgaagtttagtatatctaagacccaaaaaccgtagattaaacaagctgaagacctccttaggcaacatctcgatttgagcaccttgcagatccaatgctgacagcaaatttgaagatgcaaggacaggccttagtaaatcaatattaatatatgtcataaatacattgattgcacggagatgtgttgcactagattgacttaaaggtgcaatattggtgttatttattgatagtcgatgggtgccatctagcaaaaatgatctagagccgtcataaactttaccaaagcattctttatctgctttttcaagggcaagatggcgaatgacatcatgcatttggcaccatttcactcgtccaaactcattcttgctcagaacttgtaataggctttggtttacaagcacatttaagcagccctctgctacttcttccagtgttttgttatctttttccttgatgaacccagcagtgatccactgcctaattagcatccgcctctgcattgcagaatcctctggaaatagtgcacaatgtaagaagcaactctttatatagaatggaaggtcctccaagctgacttttagaatggcatcaacaccaggaatcacatttttagtgactgcatctctaactcctcatacacattattccatg

SEQ ID NO: 39464 - DNA, 224 bp, Setaria italica
  Peptide Sequence Number=SeqID_105438
gcacgatcagatctccttattacgtgcatgaccctgtgcaagataaacatttgcagaggaatgcacaaaaccatatctataacccattaatttattgaacataaagcttccaggtatgcgcatattagtgcaatgtacatgctcaagcgtccataaactgctgattttatgtagtattgttgtatactgactatacttcctatgatgcacactggcacactatg

SEQ ID NO: 39465 - DNA, 594 bp, Setaria italica
  Peptide Sequence Number=SeqID_105439
taagatttaccattgtctcgttaaaccatgtaaaagtaccatatatcatatcagcttccaagtaacaaacagcgacatgccaccagttgtgagtaagcaaaaatgatgtgcatgcaatccatgatggagaacatgattccatgaactcagtagcttctctgaagcgacattcctgctgaaaaacgtggcacaaattatgctgcgaccagacgtcattcttgtttatagccaagccttttcgagcagctctctcagcttcatccatctttccaagctctagcaaagggaaggcgagcataccatatatgtagttctgatcttgattctctggcaaaacttgttcgacaaatttcagggataaatccggatttcctaaatagaagcagaggtgctgcgctctcttgagagacaggatatccctggggaaattcttgagcaactcgaagtgcctctgcagtgccacctcctctttcctctgctcgcccaccatcgcggagagcgtcccgaacacggccctctcgtactccgtcgcatttccgaggttgtccgcggcggcggcgaggaaggcggcggcccccgcggggtccctgggcg

SEQ ID NO: 39466 - DNA, 678 bp, Setaria italica
  Peptide Sequence Number=SeqID_105440
cctatcccctgtgtgccttgcctatcctctgttgcgtgtctcaggaggaagaggatgccgagcaggatgatctggttgcgggagaggagcggcgggcggacgatgggcccgatctcgaggcccgtgcgggactcgatgaactcggccatggagtcggcgaggcgggagaagtgggactggtccatctgctcggatccgccgaggctggcgtgctcggggcggacgaggcggacgtggggcagcgagttgacgccgaactggtggaaggagtgctgcgactcggcgaactcgatgtcggcgaagaagaggtcaccggagccggggttgtgggcgaggaaggaggcggagaggagcgcgaactcggtgcggagctggggcaggtggaggtcggtcttggagtggagcgaggctgcgtcgaagaagacgagcacggagtaggggcggcgcgcggagggggcggagaggaagcgggtgacggaggtgtcggtgaggtggatcacgccggacggggaccgcgcgcgtagggactggagctccgccaccaggtcgtcggccctcgccgtggaggcggctgcggcggcgagaagcaggagagggaggaggagcaggcgggggtgcggtggaggaggcgccatgggggatcgtccgccggggacgacgggatagatcgtgggagag

SEQ ID NO: 39467 - DNA, 1034 bp, Setaria italica
  Peptide Sequence Number=SeqID_105441
aaaccttcaatgcagataattttcatcaagcaatcatccaaaagatgtaagcattttttttcatctaagatttaccattgtctcgttaaaccatgtaaaagtaccatatatcatatcagaattcaaaatcgagacttctctgtttaagtaatagaattgcgaatttggctaaaatgactttgggttctctctattcatactacagcagttgacaactgcaacctcaaactcgcagcatatcatcgcaatccaagcgatgctctatttcagcaatgtcaatttggatgactccatatcctctgagaccaaagggcagaagcatccatgacttcttagccagaatttcacctccagctgctcggccagaaggtatgaatgctatacccagtcttccaattatccaagtaaatcaccttcctaacagcccaccagccaatggccatgacagccagcatcgcaaaccgctgcgtctgcaggctctccaccctcaccaacaggtgtgtcaccccagcaatcatgaggcccacaagcgtgtacaaaaacccaaccgcaaaaccctccgcccccagttgcatccccgacccctggtagaagaacacgagcttgttgggatccgagcggtcggtgaggaacatgggcgtgtgcctgatgatcccgtacatgcccccagacacgctgaagaagtagacgaagagcgccccggccatccagacccggcgatcatggagcagggtctccccatcgatgatcctcttgatcatgaaggggatggagatgaggaagaggatgccgagcaggatgatctggttgcgggagaggagcggcgggcggacgatgggcccgatctcgaggcccgtgcgggactcgatgaactcggccatggagtcggcgaggcgggagaagtgggactggtccatctgctcggatccgccgaggctggcgtgctcggggcggacgaggcggacgtggggcaagacgaagacggaacgaccgaaactaggtaggagcgactcggcgaactcgatgtcggcgaa

SEQ ID NO: 39468 - DNA, 832 bp, Setaria italica
  misc_feature (1)..(26): n is a, c, g, or t
  Peptide Sequence Number=SeqID_105442
nnnnnnnnnnnnnnnnnnnnnnnnnntttttttttttttttttttttttatctataacccattaatttattgaacataaagcttccaggtatgcgcatattagtgcaatgtacatgctcaagcgtccataaactgctgattttatgtagtattgttgtatactgactatacttcctatgatgcacactggcacactatgcaccaacagtcacatggcctccagaagctggctattcaacatcatatctgatcctaataggagtaagcagcttgtagagcatcggccttttcggatgccaccgaagcatctgcgcctcttccatccaatgagtatgctttcgccagcaaacgccacaggaagggtgccccatctcgtttccttatttgtttgccaagcacatcaattgctttcgaagtctctccagcacttattagaacaacgtaccaaacttcattaaagacatccacttgttcatctgatgcaccgatcatcttataaccaagcgcatcaaagtctggacccagagtgtcaaagaccgtcttgtgctcttcatttccaaattgataaacagcctccgctagctggagggccttctgcatcacttgctgcctatctttgtccatcgaactgacccttgacttcaaagattccaacatattttgtgcactttttaactcgcccgtaattgatagcgcccataaaataagcaaatcaaggagccattccacatgccatatagactactcacactgagtcgttacgtgtaaaaattaagtttttaccaaaattagaataaaaacaaagaacctaaccgaactaaagaactaagaa

SEQ ID NO: 39469 - DNA, 422 bp, Setaria italica
  Peptide Sequence Number=SeqID_105443
gaacacatcacatccttgaatgattgattttctttcctatgtactcttttggcacatttgcagctacttgcaatagtggactttcacccaagtggattgccagaaggatgggtaaaagagctagtatttagaaagacaaaggaaggactcatcaggagagatccggtaataaatattatggttcatgaattttcatcattattaggttaggtatagtttgatttcaaaatcactattttccttatcatgcagtattacacggatcctgctagctcctacacattccgtacgctgaaatctgcactatgcttcgtagaaaccggaaaaatttccaagcgtgcttttattcaaaggataagtgttcatgacctgtactcttttgacaagtctgcagatttggtaattgttctcttgatgttttg

SEQ ID NO: 39470 - DNA, 902 bp, Setaria italica
  Peptide Sequence Number=SeqID_105444
ggatggtatttattcaatttgccgaatacactatggtacttaaagtaaacttgtctactgtatattcctacccattatttcagttttaaaccaattaacttgctataaagaaagctatatgttgcctttaggactcataactaataatggaaatatgaacatcaagtgcaaagagctttgcgtgctagtaatgatttaagtacaggttgacacctattattgacctttaatatgattcctttgcagttttatgtttaacccaaagactggagtgcgactgctatcaaaacaagatgttcttctgtatatcaatgaggcaacggtctcaaagtgtgatacaaatggacaatgtaacaccagttctgaagctaatgtgtgcctcttgcttgaacttcttactcgaagaacacatcacatccttgaatgattgattttctttcctatgtactcttttggcacatttgcagctacttgcaatagtggactttcacccaagtggattgccagaaggatgggtaaaagagctagtatttagaaagacaaaggaaggactcatcaggagagatccgtattacacggatcctgctagctcctacacattccgtacgctgaaatctgcactatgcttcgtagaaaccggaaaaatttccaagcgtgctttattcaaaggataagtgttcatgacctgtactcttttgacaagtctgcagatttgcacgaaagtttgcgtagtagactgataataaatgagacaccttatgagaataacgacaagtgcaggaacttacggttgtttataatttgatcatactctatttgtggtgtccctctaggtcgggatgatcttgtggccttcgcataaggtgtctcatttattatcagtctactacgcaaactttcgt

SEQ ID NO: 39471 - DNA, 1413 bp, Setaria italica
  Peptide Sequence Number=SeqID_105445
aaggttttggccaaagcctaaaaagcatgggtgacgaggataaggcaaagcatcagattgctttgattgaggaggaaaagaatattgaagctttatcgaagcccccagattggctccctgatggatggatcatggaagtctaccgtggggaagatggtaccattaatcggtattacacttctccaatatcgggttacacattcaacatgaagtcagaggtgttggactaccttttttctcaaacagatgagcgtatactggaatcaaaggaaagtggtgcagaaaacacctttcagaaagaacacaaatggcttccaaaggggtgggtgatggagatcagagccggtggggagaagatggacaagatgtacaagttttatgtttacccaaagactggagtgcgactgctatcaaaacaagatgttcttctgtatatcaatgaggcaacggtctcaaagtgtgatacaaatggacaatgtaacaccagttctgaagctaatctacttgcaatagtggactttcacccaagtggattgccagaaggatgggtaaaagagctagtatttagaaagacaaaggaaggactcatcaggagagatccgtattacacggatcctgctagctcctacacattccgtacgctgaaatctgcactatgcttcgtagaaaccggaaaaatttccaagcgtgcttttattcaaaggataagtgttcatgacctgtactcttttgacaagtctgcagatttgcacgaaagtttgcgtagtagactgataataaatgagacaccttatgcgaaggccacaagatcatcccgacctagagggacaccacaaatagagtatgatcaaattataaacaacccacaagatggtgacacctctggctcagattcgccatatgagccggaagaagaaaacatcagaagcaggaaggctaaaggcaaagaagcaaccaactcaaggactatcaaccgttcaacaggaaggcccccacaattgaggattaaagaggagccaacagatgatcaggatgtggactaaagaacaaattgcagaagatatcaaaataaaattttaccaacacttatggtgttgttttgttctatttcttagtgtgctgttactaccagcaaaaataattatctgtaatagttaaactagtattaagtcattgctgcttcacatttgatggttgatgtttcaatttaaactagtattaagccatgtctgttgctacatattgatggttaatatgcttctattgaactcagtatgaatacaaatagaaggacaaacggtactacaaaagtagtagaataacaaaataggaacaaatagtaaacaaccaagttactagaaagactaaatactaacttagacaaataagtaggaactttactaaccctaaaga

SEQ ID NO: 39472 - DNA, 1706 bp, Setaria italica
  Peptide Sequence Number=SeqID_105446
agccacatatggacaccatctggtcactctgtacagtactgtacgacaatgcaggtgttcacacagcaagcttaagctacaatctacaaggagaacatgaactagcgccgtcctctgcaggggcttggttttattggcacgcgccggatcggagtaaccattttcaaatcatccgcgggagctgagctcttctgcttcctggtctagaacactagaaccagctagaagagcttgaagaggatgccgccgtgggtggcgaagaatggcgcaaagacgagggactcgacggccatgagcttgatgaggatgttgagcgacgggccggaggtgtccttgagcgggtccccgatggtgtcgccgatcacggcagccttgtggcagtcggagcccttgggccccagcgccctcgcgtgctcgctcgccccggcctcgatgtacttcttggcgttgtcccaggcgccgccggtgttggacgcggagatggcgacctgcacgccggagaccagggcgccggcgaggacccccgacagcgtctccacgccgaagaaggtgccgacgacgaggggcgtgagcatcaccagcgcccccggcgggatcatctgcttgatggaggcgtcggtggagatcttgacgcagttggcgtagtcgggcttgcccgtgccctccattaggcccgggatggtgttgaactgccgccggacctcctccaccatctccagcgcggcccggcccacgctcttcatcgtcatcgccgagaaccagtacgggagcatggcgcccaccaccaagccgatgatcaccttcggggacagcacgtcaaccaccttcacccctgccctgcttacgaacgccccgaacagggccagcgacaccagggcggctgatccaatggcaaaaccctttccaatggccgcagttgtgtttccagcggcatcgagtgcgtcggtcctctcacgaatcctgtggctcatccctgccatctcagcaatgccaccggcgttgtcactgataggaccgtaagcgtcgatggaaaggccagtcgcaattgtgctcagcatgccaagagcagcaacggcaatgccatacatcgcagcaatggtgaaactgatgtagatgccaacagcaatagcgaagatggggattatgacggacttgtatcccagagcaaggccgaagatgacattggtggcggcgccagttctgcaggcatcggcgacatcttgaacagggccgtatgcattgctagtatagtattctgtcacgtatccaatgatcaaaccagcccagagaccaattgcaacacacagaaacaatccccagttggtaacttgtttttgttcgccaaaattgaagattgtgaatttagctgggagtgccaaccaactgatcagcgcgataccgacagtcatcagagccgtcgagatgatgagctgcttcttcagtgcaggctcaatttctttcacagcctttatctcaaagatgtcggttgcaaagagtgtggtgatcaagcagacaatgatgccaacggagctgactagcagcgggtagcacatcgcagtgaaatcatggttgaccccaaatgaagaaatggaagccacaacgagggcagcgcaggaagattcagcatatgatccaaagagatccgaccccattccagcgatgtcaccaacgttatctccgacgttgtcagcaatcacagcggggtt

SEQ ID NO: 39473 - DNA, 700 bp, Setaria italica
  Peptide Sequence Number=SeqID_105447
acataccggagctggtgctgaccgcttgctggtggcggaggtgttcctgcagatgctcgcgtcgggttgggacggtcgctctcgtctgggctacagtggtgctgctcggcggattctccaccatgctcgtgagattggatttctggctcaccacagctatcgtctttgtagaaaccgccagaatcgtcggctacaactcggcgcccgaggccaaattcttcgtcgatgttccggcgtcagctttctttggaaggaacattttgcagatcggaagtgcgactggttttgtaggactaatcactatggggccagcactgattgctcttgctccaattttcgcagcctctgcctgcatgacgctgtcaatttggcgtctgttaagcatcgatggttacggtggctccagtactgaatccagcaatgccaatctaaagccagcgctcatcttgttctacgccctggtgctcagtcaaggtgtgttgttcctgatgtggttcgtagttgctatgagtcgttcagcacaagctaaaaaattgcgtcagtacttcaagaacgaagagatgataactaacagatttattgctagcacactcgacacctgcgtcgagaagggcgtagttaacaccttgaataggactgtaatcacttttgcggaagaattgctgcaatctgaacaaagtggtgaccacggtgttgcagt

SEQ ID NO: 39474 - DNA, 700 bp, Setaria italica
  Peptide Sequence Number=SeqID_105448
tttgaaccaactaagtttaagcctatgttggctgcagatattcttaggggagaaagccaatgtgcttccctcgaatttaaatttttttaacatcagaccaaaatttatgcaatgcttacaagttacaacagtatttgttggacaacagagttaactagattccttattaattaggttggtttctttgtagatatttatattctatatgcatcacataagagtttcctatgttttaagaaatgtttttttaggggtcaactcgagtcatccatggaagttattttattataaataatgttcacaccaaaactattgtgacccagacaactgaattgacagagaagaactggacacttggaatatgagtcaggttctgacacacatattcaggcccaagcaacatatcctgtgttccaattaaaaatatcgtttgatcaaactatatttttccaatttgggcgcttgaatccaagttggattccaacaaccatgtccatatccaagaaacattgaaacaaactagcacgcatggatatcctcactgcagacttgcatgctttattattaataaaataaaggggatcactacatgttgaatagccattatattaccataaactccgccaaacctcgacaatcgaggcaaaggtgaactggaattctaaagataggtattttaacaatgatagttttgaacttt

SEQ ID NO: 39475 - DNA, 822 bp, Setaria italica
  Peptide Sequence Number=SeqID_105449
cttcgacctcgacgagctccgcgagatgcactacgtgcacgcggccatcacggagtcgatgcggctctacccgccggtgccggtgaactcgctgcgggcggagacggacgacgtcctccccgacggcacggccgtgcaggcgggttggttcgtggcgtacaactcgtacgggatggggcggatggagtcggtctggggccgcgacgcgcgggagttccggccggagcggtggctgagccccgccgacgggacgttccggccggacagcccgttccggtacgtggcgttccacgcggggccgagggtgtgcctgggcaaggagatggcgtacattcagatgaagtccatcgtggcatgcgtgctggaggagctcgacgtggccgtcgacggcgcgtacaggccccggcaggtcgcatcgctgacgctgcggatggcggacgggctccccgtgaccgtgaagccgagacgaaactgctgagctgttgctcacgactcattagtctctgcagacaagtataggttgaagtgaaggatgagctgcagctgacaagccattggcagtttgtaatcgtgtctaccgggtgccctgttacgttttggagtctcctgcgtgctgcgagctgcgatcgcttgatttcgcagttatttcctgacacttgttgtggagaatcaatggagatgggatttggacagatcgaggtaccaggcaagtgatgaggacaccgacttttggaagttgtaacgagagtcaagattgtcgaaatcacaaatcttggatcccaactcctgcaataaaatcgtaaaaacatactgccgctaaaa

SEQ ID NO: 39476 - DNA, 448 bp, Setaria italica
  Peptide Sequence Number=SeqID_105450
gatgcgcggggcagttccagtggagttgggcgaggcggggcgcgcgggggaggtggaggcgattgcgccgcaggttgcggcggagagcggggaggacggcggcgatgtcggtgaggacgaggtcggtgaggccgaggcgggagaggccgagtcccgccgggccgcatccggagccgagctccacggcccgagtgccggggaagcggagcacgtcggcgaaggggagggccgggtcgccgaggcagcgctcgacgaacttgacgatgaccagtgacgagggccacacagaggtgcccacctcgaaggagtcgttgtcctgctcgaacgccagcaccgctccgcccaccggaagctccaccaccggagatgcagtgaatcgcatcttctctccgccgccgccgccggcccgtcagtcgcccgcatcgcaacctccggggttttggccaga

SEQ ID NO: 39477 - DNA, 523 bp, Setaria italica
  Peptide Sequence Number=SeqID_105451
tactattgtctaagtattattatttgactatatgtaaccagcatggtatattcagacatgaatagagccattccacttatatatatgactggacacttctataatatttagaagcatagaaatctctgcacaaatacatattaacaaggccttaaaaatgcagatttagaagtccatactatctggagcataggaaagtaccacaattctgaaaacccacaccaactgaaagaaccacaattctaaaaactcacggcaactgttggaaaataacaggacatgttagtctgggttatcaagttctttaccgaagcctaaaccctgaactatgaagcactttacttagaaaggtactttaccctaaattatcaagcactactctgtatggttagcatgcagtcatgtttatattgctctgcatcacatctcagaaatttattattcataaactctagttaaatcactgacatcaccttaaacaaactaaagagtgctacacatcatcgttgacgatgtgttagtt

SEQ ID NO: 39478 - DNA, 750 bp, Setaria italica
  Peptide Sequence Number=SeqID_105452
tccttacagtcagagaatgccagactaagagaagaattggaaaaagaaagagctgaaaagactgttgctgttgagacaagaagaattctcgaagcagagaggctccaaagagaatctgatgtaacccaaagtactgcaagaatgctggagatgattcaggcctgcacaggccaaaaccaagccttgggggttacaaatgctagactaagagaagcaagaattcttgaagggaggctccaaacagagtctgagatcagacagaagatggaagctgttcagggactagttgattcactgattgctgctcaaagactactaatccaggactatcaggctctcaagtccgaaatttcagagaaaaatgaagagcatgctacactcctatatgatatcaatgtgcttgagacagagaagacatgtctagaatatcaagttgattatctgaccaaatccttagctgagaggactgcaagaatatcggagaggttcgacacctatttacgccgaagccaagcatcggaggcagagaatgccagactaagagaagaattggacaatgaaagagcaaaaagggcttttgacaggacaagagctcttgaagcaaggctccgaagagagtccgagatagcccagagcatagaagctgctctaagtcagttaaataagggactaccaggttcttgagtcagagatttcagaggaaactgaatagcatgctacaccccaatttaattttttgaaccaagacca

SEQ ID NO: 39479 - DNA, 493 bp, Setaria italica
  Peptide Sequence Number=SeqID_105453
gtgctaattaaaaatgggtagggataaatgtaaagtcgtgtacttaggttcaaaagtcaactgtaaataaactgcataactgcaagaagaggggatggtgtaaaaagagtgtagggtttatcccagtttactgaaaagatcagactgcccctttgctgtctgctctccatctgatgggttttaggaaactaagtcttagctctggttgaagggaacttattcccccctttataacgtaggctgtatttttagaaaacaaatttgcaacccaatcaccctctcatacagaacaggagaggtatgtaacttcccagcaaggtgatggtggtgaaagatgatcccaatctcgcaatggtccgtggtactcattcccagatgtccttacctggtggtgattcagcaggtcccagaaatgtcctttctctttggctctgagctgtctagtctggcccaagtcctggtctggcctttccactaggacacagctggatga

SEQ ID NO: 39480 - DNA, 475 bp, Setaria italica
  Peptide Sequence Number=SeqID_105454
agtcataaaaatagggatattactgaaagtagttccattaggctattgtcttgtgattttggtggttgagtggttttgtaatcactaggactaatatgtttgtaaagtatatgttttggaagggtttcctagctctcaagatgaaatacaagtgaagcaagcaaccatggcgcaaagaatggagcaaaacaagcaaagatgtacactggagtgtttggtcggtcactgtgactgaaaaatagtatgtgggactgaaatagttgaagatacactaaagatatacatgtgggactgaaaaatagtattacagaagggcgtatactctgatgtttcaagtgggaagttatgcagaaaagaagattctacatgccagatgatccagcgttggtaaaaaaaaaaatataataaaactacacggcattgtattcactacattactgacgactcagactatctgtataatcgatttgaatag

SEQ ID NO: 39481 - DNA, 287 bp, Setaria italica
  Peptide Sequence Number=SeqID_105455
gacctcacttacttcacctgtcagccccagcagccgcttcgcttagcttacctgctgctgccagctggatcggatcagcgtcggcccggcgatggaggcgggggcgtgggcggtggtcgcggcggccgtggccgtgtacctggcctggttctggcggatgtcgcgcgggctcagcgggccgcgggtgtggccgctggtcggctccctcccggggctcgtgcggcacgcggaggacatgcacgagtggatcgccgccaacctgcgccgcgccggggcacgtaccagac

SEQ ID NO: 39482 - DNA, 365 bp, Setaria italica
  Peptide Sequence Number=SeqID_105456
agcagaagatgtcgctcaccctgttcatgaagcacgggctccggatggaggtgcgcccgcgcgacctcggccccgtcgtcgacgagctccgcgccaccggggagtacgacgcggcggccagggccaccgcggcctgcgcgtagaatgatcgatcgatgcatcaccccgccggcgaatgcatgctccgagaggatcgtgtcagactgggatggaaggaaggaacagttggaaaaagcgcaaatgaaaagttatgtagatagacagtaagtaattaaaggggttggtgagttacattactccatttcgaacaaaaaatgcatgtgtaaaaagtccatatcgttttgatttggatttgaagaagaaaa

SEQ ID NO: 39483 - DNA, 705 bp, Setaria italica
  Peptide Sequence Number=SeqID_105457
ggcgtggcgcgccgcggcgggctggtcaccgtcacctgcgacccgcgcaacctggagcacgtcctcaaggcgcgcttcgacaactaccccaagggcccttctggcacgccgtcttccgggacctgctcggcgacggtatcttcaactccgacggcgagacctgggtcgcgcagcggaagaccgccgcgctcgagttcaccacgcgcacgctccggacggccatgtcccggtgggtgtcgcgctccatccacctcaggctgctgcccatcctggacgaggcggccaacgagaagacgcacgtcgacctccaggacctcctcctccgcctcaccttcgacaacatctgcggcctggcgttcggcaaggaccccgagacgctcgcccccggcctgccggagaacgccttcgcctcggccttcgaccgcgccacggaggcgacgctcaaccggttcatcttcccggagtgcctgtggcggtgcaagaagtggctgggcctcggcatggagaccacgctggcccgcagcgtcgcgcacgtggacgagtacctcgccgccgtcatcagggcgcgcaagctcgagctcgccggcaacggcaagtgcgacacggcggcggccgcggcgcacgacgacctgctctcccggttcatgcgcaagggctcctactcggacgagtcgctgcagcacgtggcgctcaacttcatcctcg

SEQ ID NO: 39484 - DNA, 1420 bp, Setaria italica
  Peptide Sequence Number=SeqID_105458
tgcaagctccgaccagttctataaaacctccgtcttccctgctgcgctctgccatcccgtcacctccccttgcagcatttcattgctacgctccatgtggactcacttattaccgcattacactagctagccagcccagccagccagcttgatcttctcctctatcgggtctgatcggatccgttgatctagctggtgctgtgagcgtacgtgtgtgtacagtagctatctctggtcgatcgccggctggcaatggaggtggggacgtgggcggtggtggtggcggtggtggccgcgtacatggcgtggttctggcggctgtcgcgtgggctcagcgggccgcgggtgtggcctgtgctcggcagcctgccggggctggtgcagcacgccgaggacatgcacgagtggatcgtcggcaacctgcgccgcacgggcggcacgtaccagacctgcatcttcgcggtgcccggcgtggcgcgccgcggcgggctggtcaccgtcacctgcgacccgcgcaacctggagcacgtcctcaaggcgcgcttcgacaactaccccaagggccccttctggcacggcgtgttccgggacctgctgggcgacggcatcttcaactccgacggggagacttgggtggcgcagcgcaagacggccgcgctcgagttcaccacgcggacgctgcgcaccgccatgtcgcgctgggtgtcgcgatccatccacggccggctcctgcccatcctgggggacgccaccgcggacggcaggagcgtcgacctccaggacctcctgctccgcctcacgttcgacaacatctgcggcctcgcgttcgggaaggatcccgagacgctcgcgaggggcctgccggagaacgacttcgcctcggccttcgaccgcgccacggaggccacgctcaaccgcttcatcttcccggagtgcgtgtggaggtgcaagaagtggctgggcctcggcatggagaccacgctggcgcgcagcgtccaccacgtcgaccgctacctgtccgccgtcatcaaggcgcgcaagctcgagctcaccggcggcaagaagggcggagacgcccccgcccggccgccacgccgcacgacgacctcctctcgcgcttcatgcgcaaggggacctactccgacgagtcgctgcagcacgtggcgctcaacttcatcctcgccggccgcgacacctcctcggtggcgctctcctggttcttctggctcgtctccacgcaccccgccgtggagcgcaagatcgtgcgcgagctctgcgccgtcctggccgcatcccgcggcgccgacgacccggcgctgtggctcgccgcgcccttcgacttcgaggagctcgaccgtctcgtctacctcaaggccgcgctctcggagacgctccgcctgtacccgtccgtgcccgaaga

SEQ ID NO: 39485 - DNA, 1222 bp, Setaria italica
  Peptide Sequence Number=SeqID_105459
tggtttctattctttcccggtagttgtccttgttggtcggttgtctaagtaagttggctgggcctacggacaataggagaccacgctggcccgcagcgtcgcgcacgtggacgagtacctcgccgccgtcatcagggcgcgcaagctcgagctcgccggcaacggcaagtgcgacacggcggcggccgcggcgcacgacgacctgctctcccggttcatgcgcaagggctcctactcggacgagtcgctgcagcacgtggcgctcaacttcatcctcgccggccgcgacacctcctccgtggcgctctcctggttcttctggctcgtgtccacgcaccccgacgtggagcgcaaggtcgtgcgcgagctctgctccgcgctcgccgcgtcccgcggctcccacgacccgtcattgtggctggcgtcgcccttcaccttcgaggagctcgaccgcctcgtctacctcaaggcggcgctctcggagaccctgcgcctgtacccgtccgtcccggaggactccaagcacgtcgtcgccgacgactacctccccgacggcacgttcgtgccggcgggttcgtcgatcacctactccatctactcggcggggcgcatgaagacggtgtggggcgaggactgcctcgagttccgcccggagcggtggctgtccgccgacggcaccaggttcgagccgcacgattcgtaccggttcgtggcgttcaacgccgggccgaggatatgcctcggcaaggacctggcgtacctgcagatgaagaacatcgccggcagcgtgctcctccgccaccgcctggccgtggcgccgggccaccgcgtcgagcagaagatgtcgctgacgctgttcatgaagcacgggctccggatggaggtgcgcccgcgcgacctggccccggtcatcgacgagctccgcaccgccgacgcggcagcaaggccggccacggcgccctgcgcgtagaagatcccggggatctgcgcgccaagatccgtgctgccgaggagacgctggacattgaatgtgtagataagcgtacaagacagtaagtaaattaaatgggtttggtgagagcattcaagtcacttctcttccggaatttaccattctgataagggagatggggaaatttttgcaattatattggcaagatctagctagatttggatctgggcatgtactacgtctactacaaaggggtgaaagaaaagggga

SEQ ID NO: 39486 - DNA, 538 bp, Setaria italica
  Peptide Sequence Number=SeqID_105460
tattttgttattaattaaaatgtaatattgattttaatgtcgtggagttgaattcaatggatgaattgaaattacaaacaattcttgatcaggcttccttgttgctgctagcacttggtaagattaaaagtgggaagcccaacaactctgaagctaggtcaaacgtttgcagtgaagacaggaaagttaacatggcggtaaactcagatgggggacaccaaatctgagtacaatttacagtggcaacaaaatgggagctgtccatcttgattgtaatatctatgcaagcacaagattgaagtttatacgggcaactagtgcccatagtatgtgaagggatggttttacctttctcatggtaacatttcgtaattttggggaaaatgggatatttctggaagggtgactgctactatcatataccaccacttatgatagaaacttgaaacaccaactttggccaaagacgatgacatctatgttaaccatggagtcatgttcttgtttaatgataagattctttatttttctgtaaaaa

SEQ ID NO: 39487 - DNA, 486 bp, Setaria italica
  Peptide Sequence Number=SeqID_105461
gtggggaagatgtgatatttgctccttgttagcttagctgaaccaaattctattttatttctccaggagttgcagttgcatcattaaaaatcttgtgtttctagtttgttttcaaggctgatcatgcatgatgattatgcatcttttatgtgcttcgtttgtgatttcgtattttgccctatatgatgaacattatatcaaagctatggatttatctccagatgaagcttaatgtcatagttactctgatagggcatgaatactcgctttttcatttcatctttagaatggtatactgtattgaggtcagtcttctgatagttgcaattcttttggtactctgtattcatgtttatgatagagagtggtgagtagacattaaggtctactgtcatgttttctcattagttttcatacttgtttctttggtgatctgtgatggatggctgccctacatgatgatgatatttcaaaaaagctaatgga

SEQ ID NO: 39488 - DNA, 395 bp, Setaria italica
  Peptide Sequence Number=SeqID_105462
tcgaacccccgggggaacgagagcgggaaggcgaccgcgtcgccgaccttgtacatcgggtacgcgcacaagagcctctcgaggtcgctcttcgaggacccgccggagtgcaagccgtcggccgccgccgggatgagcgccgccgccgccgccgccaggtggaaggacaggaaaggtgttcctcacctgaggttgaggagagaggtagctggagacggccagcagctccaggagcagaggtgaggactgatgagtgatagagcgtgtgctgcctgagagagacaaagaacaccgaggcaatgccgagccagttttccccttagtagatacattccaacctctgcaggtagttgcagttgttgttttgttgcagcatcagcagcactctctctcac

SEQ ID NO: 39489 - DNA, 967 bp, Setaria italica
  misc_feature (944)..(967): n is a, c, g, or t
  Peptide Sequence Number=SeqID_105463
actcccgcctctaccctcgccgctcgccgctctcccgatcctgtgcctcctcctgctcgccgcgccgctgcccgcgctctcccgcgacgcgcccagggacgccgtctccggcgccccccgcgccggcagtacgatacaccagctcctgaaggatcacggcctccccggcggcctgctcccgcggggcgtcaagtcatacaccctggacgagtccagcggcctgctggaggcgcggctgtcggcgccttgctacgccaagtacgacaacggcgacctcgcctacttcgacaacgtggtgcgcggcaacctcagcaagggcgcgcttcgcggcgtggagggcctctcccaggaggagctattcgtgtggctccccgtcaagggcatcctcgtcgcgggcgagcagcccggggtcatcgtcttcgacatcgggtacgcgcacaagagcctctcgaggtcgctcttcgaggacccgccggagtgcaagccgtcggccgccgccgggatgagcgccgccgccgccgccgccaggtggaaggacaggaaaggtgttcctcacctgaggttgaggagagaggtagctggagacggccagcagctccaggagcagaggtgaggactgatgagtgatagagcgtgtgctgcctgagagagacaaagaacaccgaggcaatgccgagccagttttcccctttgtaaaatccagtggtgtgtgagagagagtgctgctgatgctgcaacaaaaacaacaactgcaactacctgcagaggttggaatgtatctactaaggcagatgtgggtacttttttgcagttcttttctcgtttccttttttgccctctcctcttgtccgtgcacctgtgtgatattaagtttcagtcatgtgttgcaagcaagcaaggaaaaaataaaacagagaacaaggaaaatagtagttggctgaagnnnnnnnnnnnnnnnnnnnnnnnn

SEQ ID NO: 39490 - DNA, 937 bp, Setaria italica
  Peptide Sequence Number=SeqID_105464
tcccaccttctccacctcctcgtcttccctcccgcctatagatctctctctcctccattacacctcacccccgagctcacggagtcgcagtgacaccaagaaccgcagctcgtccctccccctgcggctttgctgagcggcggcggcaatgtcttccaacggcaagcccaccccgcagcccccggccgccgccggaaacggcaccggcgggccgcccaagatgtaccagcggccaatctaccgcccacagcaggggggcgccaagcgccgccgcggcggccgctcctgcccgttcagctgctgctgctgcttcttctggacggtcctcgtcatcctcctcctcgccttcatcgccgccgtggtgggtggtgccttctacctcctctaccgcccgcaccgcccggccttcacgctctccgtggcgcacgtcaccaagctgagcctctcctcctccgccacggcgcccgcgctcaccgacgccatcgacgtcacgctcaccgccaagaaccccaacaagaagctcgtctacttctacgacgacttcaccgtcacggccgccaccgccgccaacgccgtcccgctcggggaggcctccgtgcccgggttcgcgcacgaggccggcaacatcaccgtcatcaaggccaccgtatccgcctccgcgctcgcgatcgaccccaccgccagctccgacatcaagaagtccggcgagttccccatcaccctcgacctggagacgaaggccggcgtcaaggtgggcgggctcaagaccaagaagattggcatccaggtgcactgcgagggcatcaaggtgaccgcgcccgcgccgcctccgctggcgaagaagaagaagctagcgaaggccgcggctaaagcgcctgcgccggcggccgcggctaaagcacctgcgacagcggccgcggctgacgcgcctgagccg

SEQ ID NO: 39491 - DNA, 596 bp, Setaria italica
  Peptide Sequence Number=SeqID_105465
aaactcattgtgctggccttgccactttgcttctatgcctagtctctataccccaccccttcatgtatgcacttatgtttggggaactgctgtatgatgtgtaaaagtacaactcaagataagaccagcaaaccaaactgcatatagactgtccatgaaacttaatcctattcctagggtgaatgcaagacctgctgcaagcagaatgctccaaatgatgtgaatgtctgtctctgatgagtctgttgagacttgaaatctatgaagcagatgtgaccatcctgatttgatcagatttaccgtgcgtgcttcttgtagtctatctgcaatcgcacacttgcgctgctgaagatagaaaatgctgttgtatgtcgtcttttgtgtctgcacttgcactgcttatgaccagattattgttgcaacttgctgcgtagctttgtcaacgatgttgttcgtatcaattactttccattgacagcctcactgcccacatagccctgaagacagaccttggaccagacacactatacgctaaacatcactgcctggctcactttgccttggcacaaaattgttaattggacaacatcatcacc

SEQ ID NO: 39492 - DNA, 647 bp, Setaria italica
  Peptide Sequence Number=SeqID_105466
ggcgctcctcctcgcgctcctctccaccagggtcattcctcaccggtttccaggccaatggagtacagactctacttggagctcttgaaaagacatgggttcaacttccattatcagatgaaagcggcaaatttcagaaagatcatggatttaatagacggaaaccttagtctttccaagatatttggcgtttctacatgtcatccaggggtttttgttgtgcattttgttctctgtattttatggcagttggttgatgttgttttggatgatgagggcctgttagagttaactccagagaagaaagctcaatggccaaccaggcccgaggacatgagcacatttgagggaacttttactgaacaaagaactgagaagatcgagaagttacagaagatgaacactctgacaactgtggagctcattgagcatcttcttcgtgataaagtaattactcgtatcctatcattggcacgcgaaaacatgcactctcactgggggacatttactagccggttgcatttgcttgcaacaaactcatctaccttacaaaattcagcaatatccttggaaccatttcagcagttgattcttggtgattgcaatgtatatggagaattaaacataatatgcgtaaaaggtttcct

SEQ ID NO: 39493 - DNA, 520 bp, Setaria italica
  Peptide Sequence Number=SeqID_105467
gatcaagaagctctttgacggcatgaagaatcgaggtttcaaggagagtggcgcagtgtatgctgtattggttgacatttatgggcagtacggctatttccgtgatgcgcgtgagtgtatagctgctctgaaagctgaaaatacgcagctttcggctcgcatcttttgtgtcctcgccaatgcttatgcacaacaggggttgtgtgaacaaactgtaaatgtacttcagttaatggaggaagaaggatttgagccaaaccttgttatgctgaatttgttaatcaacgcttttggcactgctggaaggcatttagaggcactggctgtattccagcatatcaaggatagtggtatgagcccagatgttgtgacatacactacacttatgaaaacattcatgagagcaaagaaatttgaaaaaggtatctgaagtatacaaggacatggaacgtgatggatgcactccagacagaaaagcccgggaaatgttacatgatgcctctgttatattggaacaaag

SEQ ID NO: 39494 - DNA, 527 bp, Setaria italica
  Peptide Sequence Number=SeqID_105468
tcagtgctccaagtcaaggcagcttatcaggcatatgtgccattataactttaagtgccggatatatgcccatcactctactaggccaatcagctgatcatggggtcaaattaggtgattaggaaaacaatgttaaaatcacggttgcatttccataaatacaccaatcacgtgttgtgtagcttttttgttctttggggcaagtagtgttctattttagtaaagcctttttgttgttttgcagacttaatgaaaacatcccctatatttagtatagatccagtagctttcaaatgagtacgtaacagtatcggtattggtctcttggttccaacggctacctagaacactgcaatttaaaatttactattttgatttttcaggactaccactacctcagttttggagaagccaaggccttctttatgtggagtttttattgacaagcacctgatgaaaatggggataatttccccagtgaaaccatgtgattagaccctaaaacagtctatgtaccactctaaaaa

SEQ ID NO: 39495 - DNA, 725 bp, Setaria italica
  Peptide Sequence Number=SeqID_105469
ctcaatgcttcccgtcattttagatatactctagacctggaactggaggaagagaaagagaacttaaaaagaatgatacgaactcatgcacaagtgatacgagtaatatctcattggctagttgaaagaacattttcttttctgaagtaaatgtattgttcattccaagtctggattcttcaggcagtatttcttttcaaggaggctggccagaagaatctaggagaatcttacactagcataaaacttgagacactctctcagagatttcgagttgatctgaaaaaactcacgatgctgaacagagaccatgatgccattatttttcaggaggttggaggggttaggggcctttcagatttactaaagagtagcttagacaaaggagtaagtccagatgaggatgaattgttgttgaggagagatattttttggggcaaacacatatcctcacaagaaaagaagaagcatatggcgtttttgtatttgaagcttgtcaggatttaactcttgttattctaatggtacctgctgctatatcgttatcactaggcatggcaacagaggctgttttggaaccatgattatgtccgtttccacgatttagggtgtgaaagatggatggtatgatggtggaagcatattttttgctgtttttcttgtgatattcgttacagtgccatgagtctatcatgttctaatgctttatctcttcacaactctta

SEQ ID NO: 39496 - DNA, 537 bp, Setaria italica
  Peptide Sequence Number=SeqID_105470
cttaataagataccaggaaaccaataaaagttgcataggagaagggattggacctatcacttgctctagagatgggatctacttagttggaggagctcattctggcaatgcttacatttgggaggttgccactggagcgctcctaaaatgttggagggcacataagagttgcataagttgcttatcattctcgcaggacagttctcttatcatctccggctctgaagaaggcacagtccatgtatggtgcatgatcagcttatttcaagctgaaggaccccaagctcgtgaagctgtaaattactgcctcgattttagtgatacagttgagcatgaggcctcaataactggcattctaacaattctaggaggtccttgtccaatgctgataactagctcgcttgatagcagttgcaagatctctttacttctgtctggaagactacttggcatgctgacactcttcagtccaaattaccacaactgttattgatccatcggagcaattactgatttgtgggtctagtgatgctgcta

SEQ ID NO: 39497 - DNA, 322 bp, Setaria italica
  Peptide Sequence Number=SeqID_105471
caaagagtctagccttcacctgactgtttcgttggtaaactttctgaagtcgagaccaaatctcatgagcaagagagagatcttcgactcgatcgaactcagcacgactcagactcgcaaacagaatatcaaccgccttgctgttggcgtgatacttatccctttcatcctgagtcacacgagtagcaggaatcacataagtcacatcctgagtgatttcccaaaacccctgctcccctactatttagatgggctctcatgcgagttttccaataccgataatcagagccatcaaagtagggtgcagcggtcgaggaagaac

SEQ ID NO: 39498 - DNA, 508 bp, Setaria italica
  Peptide Sequence Number=SeqID_105472
ttctttacttcttctctactcaaacttttaaagccgtgaatcaccctgacaggagtcatcgtttggatgcagttcttcaagcctaggttacccctcttaagcttttgatcctcaccatacttcttaccagcaagctttcctcccgagcctgtgtatatcaattcacccgagcttgatagctcatcaggataacctcccgaagcaacaatgctgattgcaacaggcacaccattctcatctctggtgatgtcaatgcctccctggtacgggcggtggagaccaacaagggccagctcaaccctgtacacaaattcatcaccaatttcaactcctgggacgtttccaataataggatcatgttgggtaaaccctggcaatttcttgatcactttatcagctacaaggtcaattctactaactttcagtgagcgctgttccacaaattgtactgtagccctgcatataaaccggaacctcttgcacatcatcttgactttactcctagcat

SEQ ID NO: 39499 - DNA, 1660 bp, Setaria italica
  Peptide Sequence Number=SeqID_105473
aagaactcatatatacagtattacacaaacttgttgatacacatgtggatacaagcatggtatgaaccatatcaagcacaccagaatacatgtacagatagagaaaatgtaattttttaatttgtgtagttcttgcttctccttataattgcattagtgccctcaattcttctaggtgcatcttttgctggtgcctgcactggatataatgtcatctagcagatatggttcatggctgaatccctcgagatctgacatattgctagcgagcagaaggtcatcattagaagcagtgttaggtaaaggtcctggttcttcatccatgacgatgtccttcccaaccacagatagcaaagaatcatccaacatgtcaaattcatcccaattgatatcgttgccaatgctagtagcagcaacagcttgtgcatttaagcttccatgcacaccattcacttcaagggaagtattagcttcttcctcatgttggtgttgatcatcaccaactccaatagcattaggatcaatgtcaccatttccattggttttactgctagcatgtatggtgcttttggttgctgcaacccccacatggatataattctctatagtgatattagtagtggtgtgggcgctactgatagtcgtttgtaaaggggatggtaattgcaaagtgatttgaggaatataagggcaatggaatgctatgccactgtcttgagcagcaacattactagagctagcactatcaacaccataaacagatgcagaagcaaccatgttcatgtagcagtatgtatttggaatattggctagtgctcttggaagttctttcagatggttcatcacaccagaagaagcagcaatgttgttgatggtgtttccaaaggacccaagaccattggccatgtagttggtaggcggaattattccactcactatgggtgcgggtgtgcctgtggttgcaattactgaagaagcttcatgaggtagagatgccaaggataaaggaacacgaggaccatttgtttgtggcactacaagaggaggaatatggactaaaggaggatatctagtgaatttatgactaaattgtggcaattggttctgatggggaggaagatggcaggatgaggatggaagattagtcaacaacctatcatggcgtttcttagtaggcttaggataaggacaagaatggtgctcatcctgatgagcattcaagaaatcatttaggaaatcataagactgagtggaggcaatagcctcagtaatgtcagagtctagtatgatgcttcgctggttggaattggcacacatccaagcacggaatgcaatttcctgcacaaagatctcgcatgcctttgttaggaaagacggcgtgtcaaatgtcatcatcattttacccttctcatcacaaatgacctttttgatgcgggtcatggggattgcacgatcaccaaagtcttgaattgcctcgatctctatttgtctcttcctccaaaagtcatctatcatctcctgctgagatagtggcatgggcgtccttggtgatgaacggatttcaatacgatgatccatttctcccttctccaattgtgaaagatataacttaaagtaccgatactctgaaagaactgaagaataaaacacttgaagaact

SEQ ID NO: 39500 - DNA, 640 bp, Setaria italica
  Peptide Sequence Number=SeqID_105474
gtacacagatgagttcttcttgtttgatttgaagagatgaatggtttttctgtcaggtcatggtttggttttctgagtggaagatgcatattcgcagagggtttcatatacacctgctcagatgaaggtcttgctgcttttgagctgttttacgatgatacttcatattggctgggtctgcctatcatgttagatttttcttggaagtacatttgcggcaaccgaaggttcctatgctttgattcaatttgcaagtgcgaaattggtgataccattgtgttctgcgtggtccagggatatgaggaagcacctcctagcacttcaagtcacaccttggctgcaaccacagtacaagtgaagcttgtggaaacagcacgagggacaaaagtgcctgtcagagttgatcatgttgatatctttctttcatcgattgtagaggaagggtggatcttgaccaactatgcgtttgctttgtaagcagttgcaagcttagggtactgagctccgtgaggttctatgaggctgaacacctgtatcattgacattgggctaatattttgtacctttggaagacgatgtaggtaactgctagacactagtttccgataccaaggccgcggtttcgctgctgtttgacccg

SEQ ID NO: 39501 - DNA, 428 bp, Setaria italica
  Peptide Sequence Number=SeqID_105475
gtctgatgtatgtgttggttgatagcaattgctgtagggataccttgtatggtcttgtagattgtttgaacttttgatgatacctgctgtatctatgaatctttgcctttcaattgagcaatagtggtaacattgttaatagtttcattacgttgcactggtaggttaacatactactctgctgattaacattattactaccttttaaatgtaactgagcgattcatatatggatcatggattaacgatcacgtagtaactgtagttctctccttgtttgattctatctgtttctggtttcgagtaagtttcaatttgggccggtaaatatatcaatttcatttattttatattatcattctgtggttaatacctatgtttgttgtttaacttaatacatgtgacaattaacttctttggtctctaag

SEQ ID NO: 39502 - DNA, 660 bp, Setaria italica
  misc_feature (1)..(77): n is a, c, g, or t
  Peptide Sequence Number=SeqID_105476
nnnnnnnnnnnnnnnnnnnnnnnnnnnnnnnnnnnnnnnnnnnnnnnnnnnnnnnnnnnnnnnnnnnnnnnnnnnnnttttttttgcgcattattactagccttcactacattgatagaattagtgcggcaaaagataggtgacatgccaaatcagggaacaccccactccctctggcatgatacaaatatgaaagaacccccagcgataaaaagagcgggggcagaacgccaggtgccagaatactgtcactatagtaatacagaatacaaaatatagccggaggcaccttcgtatgcattagtgttttttttttaacagtacttcctttcacctgacactatagccttagatggcctgtaaaccacccaacaagggtaaaaccactgcaaaaatgaagtgacaaatgagggcaaaacatgcagctgaagcgtcttcagatgcttgccactctggcagtggcacattggagaacacaacagcctagcagtcccagtcgcagcagctcaaaaggcggaaatgcttcaaccagcaggatcaaaacttccaactgtggggctcttcagctgcatgtgtctgccacaccggaacccaagggcctagcagggccagcaaaactagctcaaagtgggctgattttgctgtttcttcaacagatcc

SEQ ID NO: 39503 - DNA, 134 bp, Setaria italica
  misc_feature (117)..(117): n is a, c, g, or t
  misc_feature (128)..(128): n is a, c, g, or t
  Peptide Sequence Number=SeqID_105477
attcaattcgtgtgtgcaccatgatttttgcatcacaaggctttcagtggagaattttgttagaggttataatgttaggcccttgtcataatgtttgtagcttatttgccacccccncccccaccatntctaca

SEQ ID NO: 39504 - DNA, 668 bp, Setaria italica
  Peptide Sequence Number=SeqID_105478
ccccggtaaaaaaaatagaccaaaaaatcacaggtcgcactagtcgacgcggcagcgaacgaactagatctttgcagaattgcacccattccggccggtagtgcgaccaaattaatgaaagcactcctgtcgtcaggtagctatcgagatccacagtaagctatagctagcatactactcaactgctgtagatctcatgatctttagccgcatacatacgtgatacgtgcactcgcattccagtgtttgtttcgttctgttttctgtcatcggtaggcggcccctcttgtgtcttctttccgacttcgatcgtgagtctgcacatcgtaccaacgaaaaaaaatatgcatgacacattactatgacacatgcatgatgcatcattgtttcggcgcatgcagacgaacaattcaacatggtgatcgatgacatgacatgctgtttgcagtctctgttccactcaccaccacctttttgctcgcaacaacatttggacgagcccgcgtcacctacctgtctacgagctctctagccacgtcgttagttacgtgcacgatcatctccatccatcacgcgaccgcccaaccacctgctcctcgcttccacttcttccaccgcgcaatcatgcacttgcatgcgacacagcaagcaaggtttcccatctggca

SEQ ID NO: 39505 - DNA, 229 bp, Setaria italica
  Peptide Sequence Number=SeqID_105479
ggccgccgtcgagggccgcatggtccggtccgtcttcgacgacggcaagcccatgaacaggtccggggtccgcctgctgatcggcccggacgcgtgccagcggacatgcgaccaggtgcgcttcaaggcgatctgccgaggcctggcgaagctccccggggtgtcgacgccccggcagctgctgctggcgtcgatgcgggtggcggcgcagaaggcgaaggaggccaag

SEQ ID NO: 39506 - DNA, 684 bp, Setaria italica
  Peptide Sequence Number=SeqID_105480
gctactgcaagcatggcgaccttgctggggctagtagagtactcaaggcgatgctggggcggggcatttcaccaactgcaaggacatacaactacttctttatggtctttgcgaggaatcacagtgttgagctggggatgaatctctacagcaagatggtcagcaatgactatgcgccggaccgtctcacttaccaccttctcgtcaagatgttctgcgaagcgaaccggcttgaattaacactgcaaatgctccaggagatgagaaacagtggttttgaggcggatcttgcgaccagcaccatgctgatacatttgctctgccggcgtcatcagtttgaagaggcgtttgcggagtttgagcatatgtttgagagagggattgtgccccagtacatcacttaccggatgcttaagaaagagctcaagcggcttggtttagtcaaattggttcagaaattgacagatctaatgcgtgcagtaccacattccacaaagttacctggcagttacagggacaaggaaggagatgatgctatagagaagaagaaatcaatattacagaaagcacaggctgtttcagatgttttgaaggaccgtaaagatctgaagaaaggacacaagatccaaaaatacctagaaagaaaacttagtaattagttaccttaaggttttagttacttaa

SEQ ID NO: 39507 - DNA, 1802 bp, Setaria italica
  Peptide Sequence Number=SeqID_105481
ttttttttttacgaaagcgaatggcaccacgaccaaagaatatgtacagtacagcaccccagacggctaatgctgggggtgcaaaccattcgcaaaatttggtataacacaacacaacaggcggtgcgacaattctgtcaggaaaaacacagcctacacagcactctttttcccctatcctccaactactactaattcactggaagtaccttgcaaaacttcaggcccagatagaagaataactatgatttggggagaaggatcaaactaaagaaatggaactctttttcttcctcagcagaactattgggggacaaactcccccgcgtctcaatagaacacgatgaataaggaactccgccacggtagccagactaggtaaagatatcgccgcagtatacaccttccaatctcagaaatggtagctctatatacattgatgatgacacaactactctatactggaataacacagctgaggagtcttctgctggcaaacatattgaaaatgcatgaatgatgctatctgaatacaagactcccattcccttgaggtcttaatttctcgataagcgattgataaaatgacctgaatgccttgatatcatttccctgtaacttctcgcgatactgtttagctaggtccggtgggcagcaaacttttgtaagacctgtttctataaatttctgaatgaagacgtccccaaacctttcatacataatcttttgggccaccgcaatttcaccaaagagaacaagcgaatttgcatcgcctaaatcaaatgatttatcaagtacactgtacaaacagcaatcagtagcaaacttctcaatcataaattctcggaagccagtaaccttatcttcagagttagtgcaccagtcctttacaagattcacaaaaatttgtacacatcccttgcggagtagtatatctttatgtttacatgaagtaaataaaagcaagtgcattatagtatccagatactgcatacagctaggagtaaggaggattgtagaaagatcatgtgttgccatagcatgcaagaaagtgtataacgtcctctgcagctcttgcagctctcgcatttcctcagtattgcttgcaggaccagctgaaaatgcatcttgtgatagtatcacagacaaatgacttgcaatagtgggaaagacttcttctagtacggcactagctgaagatttgaatttgcagattatttggtttaccaatacaagaaattccaccatatctttagcctcattatcgagaagcaattgtctcagtgcgattgggatatatggaagcactgggatacctaatatctcaatcatcctatgcagaaaggatatgaccttagatcgcagaggtttcacattaggaaatgagacgaggacttgcagaacaacatcaagggttttcttgaacatgactccaatagctggcctatttgccatcacaaggcgctcattaaagcccttgctgaccatattcaatgcaacaataatctgttgaagactaatggctctcggtgatgattcttcaagtccttgcactttggcatccatgacaagggactcaatctgatggcacagaggatttagcagagcagtcaagcactgagcctgcttctctggtgagacctcctcaatgccgatcaataatccaacagcctcaaaaatttggctgccatcctccgagctgggaaacttgacatctttgtttgcccaatccatagaagtgaattggcttagtacatcttgcaggttctgcaaaatggtatccaggtaaggcactagctttg

SEQ ID NO: 39508 - DNA, 712 bp, Setaria italica
  Peptide Sequence Number=SeqID_105482
ccgccgcctcgtccgtatctgatgacgaccacgacgatcatcacgacgacgacgatgatcaccacgatcatgaccatgatggccaccacgatgatcacggagacagccacgacgatgatgatgatgacgacgacgacgacgacggcgactacgacgagtgcagcgtggagtgcacgcatgactgcatcgactacattcccggcatctgctaccgccactgcgtcgcccactcctgcttctacctgccaccgtgtacgtccaccgctttgcctagctacttttaccagtcatgcaccctgaatcaatcttgacgaagccgtcgttggctctgttaatgcattcatttccctgtgtgtttctatatccatccacacagatagctaccggagagcgtcttgcctcaggggatgtggctacagatgctaccgccacggccgccaccaccaccaccaccaccatgacgacgacgacgatgatgacgacgacgaccaccaccacgatggcccgaagccgagccctcccaaacccgggccgacgccgaaaccgccgaagccagggccagcgccgccaaagccaccggtgcaggtgctgaatccggggatgccacccatgaatcatccccccatgaaggagaagccggcaccgcccaatacaactagaaagactaggtaacggacctaaagaccgaccgaaagaccggacaaccgaagga

SEQ ID NO: 39509 - DNA, 1275 bp, Setaria italica
  misc_feature (1233)..(1233): n is a, c, g, or t
  misc_feature (1247)..(1247): n is a, c, g, or t
  Peptide Sequence Number=SeqID_105483
aaagactatcgagcttgacgtacgatcaggggccagcaatggcgcggtccaagaaggcggccatgctcgccggcctcctggccgtcgccgcgctctgctccgccgtggggtgggaggaccacgaccaccacatgtaccacaggtgctacaggtcctgcatgaggaagtgcgacgacgactttgacgacgacgacattgacgccttcacgaatggcatccgccccctcgccgcctcgtccgtatctgatgacgaccacgacgatcatcacgacgacgacgatgatcaccacgatcatgaccatgatggccaccacgatgatcacggagacagccacgacgatgatgatgatgacgacgacgacgacgacggcgactacgacgagtgcagcgtggagtgcacgcatgactgcatcgactacattcccggcatctgctaccgccactgcgtcgcccactcctgcttctacctgccaccgtatagctaccggagagcgtcttgcctcaggggatgtggctacagatgctaccgccacggccgccaccaccaccaccaccaccatgacgacgacgacgatgatgacgacgacgaccaccaccacgatggcccgaagccgagccctcccaaacccgggccgacgccgaaaccgccgaagccagggccagcgccgccaaagccaccggtgcaggtgctgaatccggggatgccacccatgaatcatccccccatgaaggagaagccggcaccgcccaatacactgaagctggtacggcctaagccgccgaagccggcaccgaggacaccgaagccaccacctaggccaccgtcgccaccagtgcccatgccagcaccggggacgccgaagccaccagggaatccaggaccgaggtcatgagagccgccgccgcgtacgatcaggccgcccgacagccgcaattgaaggataactcatccgtgatagcatacgtacaaatgattaagtagtggtttcaaattaaatgcgattactgatggattgctatgttcgataacaatatgggaggattatcccgattggtagacgtagattgggcataaatcttacataagcctagttctgtgggtctttgtctgcaggatgtactgaagatcatgtcatgtatcagtgaacattattacattgcattgttcacattcagcataagtttgtggaggcaatatggtgatgcacactttcatagtgaaactaaaaaaanaaaactaaaaaagngactagccaaaggcacacaggggatagg

SEQ ID NO: 39510 - DNA, 624 bp, Setaria italica
  Peptide Sequence Number=SeqID_105484
attccttagcctctggtttagaggttcagtgtggtgtcacttgatgagtcatcgttactgtcgccttgtacggagtcagatggcaatctcttgtgatgcttcacctttttacctcgactcccaagatgtacccgcacagtggatgcaaactcatttgctccctgagttatttaagttaagatgccaccaggtttgctaatggtacggacaaaaagtggtgaaagaataaggcgtttgtatggaccgaggtcacaaatgtcacctgtttcagcagccatggctgactggcaatcaatatggaccgatcgttggcaccacatgcagcaatatatgggaggacctccaagaaaagattcactgcatagctcctcacagtaacaacaatactggccttcttcggattgatcagctacatctgtccagagtacagtccattgatggatcacatgtttggacccaaacattgacacacatttgcagtctttctgagaatttggagagcatattatgtgtgcagctacaccacaaacatcacaacggtgaaccatatttccgaagtcatcatttgcccaaggggctgagctggtgaaaatagattccaaagcatacacagcacttcagccc

SEQ ID NO: 39511 - DNA, 632 bp, Setaria italica
  Peptide Sequence Number=SeqID_105485
atggaagtcagcaattctgaagacctgaaacacttgggtgtaaattaaatgcacacacagctgcacctttacataagttcagcgacatgtgtataaattacttctagaagtagagcttcccccaagattcttgcttgtgctatactttttgtggtcatcttttctagaataaaataaagctgaaagtgatttgcgtagctaagaagatatgctgacagttttgtttcctttcatgtcactagtcatcataaaataatgtatttttggactctggtttggctgcacatatcttatgctcttctttgtaggattagttctttcatcactttaaagcaaaggcaacgaaacaactgagtatttgaatgatgtgcctgtatgaagtatagtgtcagaacataggctgtgtgcctgtgttcaaaagggtaccagagcataggcactgtcctatcaattttgacggaattgtacatctcaaagcattctttctgtaaagtagtatgaaacataaattagttacatacaggctctggcggtaaatggagagcaatgtcatggaactcacaaaaaagagtagtatatttttctacttgactacttgagcggaacttgttaaacaatttatcaattattat

SEQ ID NO: 39512 - DNA, 362 bp, Setaria italica
  misc_feature (317)..(362): n is a, c, g, or t
  Peptide Sequence Number=SeqID_105486
cgacgaggccgacgatgatgacggcgacgatgatgacgaggacgacgagtaggctgatgttgacttgattcttggttaccactcgagtactcgacgatgagtgcttccattgctagctagtgcctagtgctagttgctagagctatagagtgaagagaagtggagattgaacacgtgctcttttctaggagtttgtggtgttagctaatctgattggatatttggatcttagaataatagcattagagcaactccaaaagtttccaaaaatttccttcccaaaatgaagaagtattgagagaactaaaaaaaaaaannnnnnnnnnnnnnnnnnnnnnnnnnnnnnnnnnnnnnnnnnnnnn

SEQ ID NO: 39513 - DNA, 466 bp, Setaria italica
  Peptide Sequence Number=SeqID_105487
gttgatgctgtgtgtttgtactttgttcgctgaattgtggtttgcaggacgtggagtggctcaaatccatcaccagcctgccgatcctgctcaagggcatcgtcaccgccgaggacgccaggaaggccgtggaggccggtgtggccggcgtgatcgtgtccaaccacggcgcgcggcagctggactacgcgccggccaccatcaccgtgcttgaagaggtggttaaggcggtggcgggcgccgtgccggtgctggtggacggcgggatccggcggggcaccgacgtgttcaaggcgctggcgctcggcgccaaggcagtcatggtacgctccctcgccgggcaataaactcgtggtcactgcctgtttcggaagggaaccgtggcaaattctgacgacgaattgcatgcaggtggggaggccggtgttcttcgggctggcggcgcgcggggaggccggggcgaggc

SEQ ID NO: 39514 - DNA, 251 bp, Setaria italica
  Peptide Sequence Number=SeqID_105488
cgaggaggttgcctccagttgtgacgccattcgcttttatcagttatatgtgtacaagagaagggatgtttcagcaacattggtgcggcgggctgagagtttaggatttaaggcaattgttttgacagttgacacgcctgtgctcggaaggcgtgaagctgacatcagaaacaagtacacaatgctggttatcttactgaattttcctgaacattcattcgaaatatgctcttttaaaaatcacagtttca

SEQ ID NO: 39515 - DNA, 367 bp, Setaria italica
  misc_feature (193)..(193): n is a, c, g, or t
  Peptide Sequence Number=SeqID_105489
aacaacgaaaagccaagaaggcaaggacagaggactagcctctgaagcagctgccttccactcatctttccgccatccttgatagcagtccttcctgccgacctcctcctccaagtcccaagagaaatggaggataatctaccagtcaatgtccgggagtatcaagagctcgccaagaaagcactaccaaagntgcactatgattatattaatgggggagcagaggatgagtacacactgagggagaatattgcggcatatggaagaattctgtactattcaccacaccaataattttaaagcccattaagaagtaggacctgaccttttggtgtggatcccacaggttacggccaagggttcttat

SEQ ID NO: 39516 - DNA, 1539 bp, Setaria italica
  Peptide Sequence Number=SeqID_105490
gttgtttgtttcttgttaaccgtagtcttgtatttgtttgtattgtctaggtattgtatccgccatccttgatagcagtccttcctgccgacctcctcctccaagtcccaagagaaatggaggataatctaccagtcaatgtccgggagtatcaagagctcgccaagaaagcactaccaaagatgcactatgattatattaatgggggagcagaggatgagtacacactgagggagaatattgcggcatatggaagaattctgttacggccaagggttcttatagatgtcagcaagatagacatgtctacaaccttattaggatataatatgccatcgccaataatggtcgctccaacaggatcacacaaattagcaaatccagaaggggaggtggccacatcgagagcagcagcagcatgtaacaccataatggtgctttccttttcatccagctgcaaaatcgaggaggttgcctccagttgtgacgccattcgcttttatcagttatatgtgtacaagagaagggatgtttcagcaacattggtgcggcgggctgagagtttaggatttaaggcaattgttttgacagttgacacgcctgtgctcggaaggcgtgaagctgacatcagaaacaagatgattgctccacggttggaaaaccttgagggtctgatgtcatttgatgatgatcttgacaccgaaggcggctccaagctggaacgattcgcacatgagacgctagatccatcattgtcatggaaggacgtggagtggctcaaatccattaccagcctgccgatcctgctcaagggcatcgtcaccgccgaggacgccaggaaggccgtggaggttggtgcggccggcgtgatcgtgtccaaccacggcgcgcggcagctggactacgcgccggccaccatctccgcgctcgaagaggtggttaaggcggtggcgggcgccgtgccggtgctggtggacggcgggatccggcggggcaccgacgtgttcaaggcgctagcgctcggcgccaaggcagtcatggtggggaggccggtgttctacgggctggcggcgcgaggggaggccggggcgaggcacgtcatcgagatgctgaaccgggagctggagctggccatggcgctctgcggctgccggagcgtcggggaggtcaccaggcggcacgtcctgaccgagggcgaccggatcagggcgctgctgtgagcttgtgaacaaggttgatacatggagccatgaacggacgacctggctatccatggtcggtatgcgacggactgcctagatggcagtcagtgtccgtcctccggtgggtgttgcaatgagagcccatctgacattgattgatcgctccaaaaataagtcaaaaataagccattgtgcattgccaatatcaaaacgacggttaccaaaaatctgtgctggattaagctatatgtgttctgtgagaacttggtcaacgtgttagttcaaaaaaagaacttggtcaacgtatcttggggtccacttctggaatacatgagaa

SEQ ID NO: 39517 - DNA, 661 bp, Setaria italica
  Peptide Sequence Number=SeqID_105491
actgacaggaaagatttggtctctgcagtacctcagacatagtatcaacaccgaggttgttctggcctcataaaccctggattggttataaaagacaaatatctttcagtttcagttcatatcaccatattgaccatatgtcagccatctgcatcctgtgtcgtgcttcacggcatttcaaattgctcattgaacagcggtgcatggcgttatgttggtaaatctatctagtaaataaaacatggtaaagtggtaagcatataaaagtttctcaattagtaatcctgtgctgtagttagattaggcccggaatataacaaaagtacattttttaaggaagttgaagtatctaaccagattatacagtaatgggttgggtacatgttctgcctgataacatgagatccatcggatgcctgtcttccctcaccactcctctcctttctcttcttctagattcactctggcctcaaacaaccctgtccatccccagccaaacatgtatcagccagccatgatccctcatgtttctttcccctgttggttggcggcaacattgccaatgctctgcctcttctgtgctcctgggccatcgtccttgttcattctcattttgctattccttgatgccccttttatgagatatgcatcagatttggca

SEQ ID NO: 39518 - DNA, 259 bp, Setaria italica
  Peptide Sequence Number=SeqID_105492
aaagctcgcacctgagttgaggcgcgcaaagcgccgccgccgccgccgctcgcgagagagaaatgtcgctctgctgcggcagcaccgccgccggccgcggcttcctcctccctagcatactcctcagccgacgccaccttcctcgacacctcctcctcaacctccgcaccaccgcgaccgtcgcccccaccgccgccgccgccacccccctcatctcctccctctcggcaccgcagcagcgccaggtcgccgtctacgt

SEQ ID NO: 39519 - DNA, 402 bp, Setaria italica
  Peptide Sequence Number=SeqID_105493
tgtttaaccaatttatgtcttgattttcagattcacatatcctagttagctcatgtaatccaaccggtaaaccccccggaaagcctgttgcctttaagaaatagaaattctagggataaaatgttttgcaactctgatggaattgatccactgaaattattatatcccagatccagcatctttatatcctgtagatgtcctatttctgtaggtatgataccatagaacgagttgttgtgaagaatgagagatttcatatgcacaagctttccaatctcaggaggtaaaacaccctttagaccaagatttgctaaattcagggtcgtgaccagtccatcatcagagcactccacaccgaaccaagaccaagggctattactccttcatcccaactcttgagag

SEQ ID NO: 39520 - DNA, 852 bp, Setaria italica
  Peptide Sequence Number=SeqID_105494
gtgccgaaagattcccaatgattggtcaaatggaaaaagattccatcatggaaagtggccgtgacaataaggcaataatttctctggatagcttaaccaagttaattccaagttatttgatgggaattggacgcctcaggtggtggtgcgaaaaatatggactacgagctgacatgtccaatgtcttcaaaactaacttggtaatttttcacaacacccccaggaggtaccttttatttcaccatcgagtatgaaagccgagctattaccctatctttgtatgggagaaacctttatattaatagggtactccgggagcccatgaaacttttgagatcaaggagcgaaatgagaagagaaaagttatatgtcaggagaaaaagatcaagatacgtccttttaaaaagaactacatatttcttgcccctaaaggtgacgttattaatgttagattgggcttatttgctctgttggaggcatttgaagttctccacaagtgttgtggtgaaactcagggggtcaagcaagcagtgtcagcatttgctgtgcatctatgtgaggctggacgcctccaaagtgtgttgaaggatgtctgcgaaatctctctgcagcgcaccatggaaactctcgacagtagatccccaaacttattctggattaataaatatgacaattgtggggggcaagagatgaagcgagtaagttgcatgaaagaggggaaaacacctcctgtgctaaaacattatggcaatgataaagtgacagaggcacagattctgaatcaaattcgtatctttcctcgggatgtgtatgatgaagggttttttgagcatgaaccaatgccattggaag

SEQ ID NO: 39521 - DNA, 358 bp, Setaria italica
  Peptide Sequence Number=SeqID_105495
aaggtcctgtctaatggcggtcgtcctggtcgtagccatggcggtcttgccaccaccagctcctgtgcatggaaaacaagatgcgacatgctttcaaatgaaaggctgcaccgccaatctctgcctcagcgtgtgcaccagcaacaatttagggactgttgcgacctgcttcaacacaccccccgacatggccctgaacaactgctgctgcgagttttaataatgttgctagaaactggcttaatttcagtattgatgccagatctagctgggtgcggactgatggatagatcaatttatgtatcagaataacttgaatgaataaagtttgttcttaagtttcccattttcaaaaaaa

SEQ ID NO: 39522 - DNA, 544 bp, Setaria italica
  Peptide Sequence Number=SeqID_105496
aacaacttttcagggagagccagggaacactaagaagcaagcagagatgaatgctgctagggttgcttttcaacatttcaaagacagggacaaaggctctgcttgttctgctgtacctggaggatcatgcatgcaacaaggaaccaagaacctgttttctggacaaaatatcaagattctatcctccaagcaacaaggaactgagaacctgttttctggacaaaagatcaagattctagaacctgaagttcccgttgtatcaacagcaacgcatggcaaggataatgacttcgatgctataaatcatgatgctagatcagctggctctgctaaccgacttcctgttgctgctacaacacaatctattgatgaaaacgctcaatctgtaaagctggaaattgacaaattatcccttccagagccaagcacagaagttgaagcaatgaattcatctccagaagttaacaaactgacccctttcagagccaagcatgggcattgaagtaatggactcatcatcagaagttgacaaactgtcccttcc

SEQ ID NO: 39523 - DNA, 2601 bp, Setaria italica
  Peptide Sequence Number=SeqID_105497
tgttcgtacgttgtcttcttcctattcttcgtcttcggcggtcggtcttccttcccccctactaccgcgacagcctggccatcgcgtcgttcggcgccatgcagatgggcgtgttcgtcgcctgctcgggcggcaacgccgggccggaccccataagcctcaccaacctgtcgccctggataaccacggtgggcgcgagcaccatggaccgagacttcccggccacggtgacgctcggcaatggcgcgaacatcaccggcgtttcgctctacaaaggccgccaaaatctctcatccaaggagcagtacccgttggtgtacatgggcggcaactcgagcatcccagaccccatgtctctgtgcctggaggggacactgaagccgcacgaagtcgccggaaagatagtgatatgcgaccgcggcattagtcctcgggtgcagaagggtcaagttgtcaagaacgccggtggcgtgggcatgatactcgccaacactccggcgaacggcgaggagcttgtcgccgacagccacctgctgcctgcagtggccgttggggagtccgaaggcgtcgccgccaagaagtacagcaaagctgccccaaaaccaaccgcgacgctcagcttcgacgggacaaagctcgggatccgcccgtcgccggtggtcgccgcgttctcgtcccggggacccaacttcctgaccctggagatcctcaagccggatgtcatcgcgcccggcgtgaacatcctggcggcatggagcggcgacgccagcccgtcgagcttgtccaccgaccgccgccgcgtcgggttcaacatcctctccgggacgtccatgtcgtgcccgcacgtcgccggcgtggccgcgctgatcaaggccagccacccggactggagccccgcgaagatcaagtcggcgttgatgaccaccgcctacgtccacgacaacacgtaccggtcgctgaaggacgcggccaccggcagggcgtccacgccgttcgatcacggggccgggcacatacacccgctgcgcgctctcaaccctggcctggtctacgacatcggccaggacgactacctggagttcctctgcgtggagaacctgacgccgatgcagctcagggccttcaccaagaactcgagcaggacatgcaagcacaccttcacctcgccgggtgacctgaactacccggccatctccgctgtcttcgccgagcagccgtctgcggcgctgacggtacgccgcaccgcgacgaacgtcggacctccgacttcgacataccatgtgaaggtatcggagttcaaaggcgccaacattgtcgtcgaaccgagcaccctgcacttcacaagctcgaaccagaagctgacctacaaggtgacgatgacgaccaaggctgcgcagaagacgccggagttcggggcgctgtcctggagtgacggcgtccacatcgtccggagccccctcatcctcacatggctgccaccaatgtgagcttggtttgtctactgtgcatttagtcaagcaatggagcagcaaccttctgcggccagggtaatcaagccacatatcggttgtgtttgtgtagcagcaacagcagcaaaacaggaagaccactaaccgacgcaaaatactgtcaagctccagtgagaacaggctttattcctcaacgttgtattcatgcttattccaaatgttcacttgctagtttgattgtttctacattaatgtgtgtacaacaacatatgcgagcaaatagtatggaaaattcgctggtagcaggtttagcttgattcccagatggtgacaccatcacaggtgcagagcttcttgtagttctctcctacgccggcacttcgtgcaatcacggctgctgcaatgccagggtctgatctgtcatccgttgcatatagtgcgatcgagcggccaatcaagtcaacaactctcaatttctctttcgatcctgagaactgggcttctccgttctctccagcttctagtgttcccaggtcaccaagagccttatcggatacataacctggtggattatatactttgccagtgctttctgcccctcttgtcaaatccccaaactcatttattgaccatccatgtttaccaggtgataaaccactaaaggtggcttcaactctagccaaatccatgttaacttgggccagacgaacaacaccgaatacaaccggccctttaaactcagctacagcagcagaaactaaaaaatcatttgggttcccttggccaatcagacgtgcgtctcggcctgtttgatgcagggcgtctaacatcgtcttcactggaagatccccaagaaccctaacgacttggttaggcaagtccacttcgatgtttcttattccttcaagtgtttgcagcttatttttcacagctgtcacgcagccctcacatttcatgtccaccatgaattccgtcttcagatccggaagcgccgactccttatcgggcgccgataattcggccgtggccgcggcggcggcggcggccatcggaggcacggcgttgggcgcgcgcccggaggtcgaggaggtggaggcggcggcggagaggaaggaggcaggcagagggaagc

SEQ ID NO: 39524 - DNA, 230 bp, Setaria italica
  Peptide Sequence Number=SeqID_105498
agctgcaggctgcgctggctcaactacctccgccccgacatccgccacggcggcttcaccgacgaggaggacgccgtcatcgtctccctctacacccagctcggcagcaagtgagtcgaactagctcctcctctcacctccctctctctctatgcttgatcgacgagcaaggcgcaaatggagcttctagatcgtctctcgccacgctatgcctttgaccaactcgcgcg

SEQ ID NO: 39525 - DNA, 1197 bp, Setaria italica
  Peptide Sequence Number=SeqID_105499
ggaggccaaaccaatgccaatggatggctgcaacgagacgagcaaacgcaaggacaggtacaagtactacctgctcccagcacaacagccagccagtcctctcctagtcttgcttgtcctctcttcttccctagtcctcttcctcttgctcctgcgcataggggcctaggaggagcacgcagagagggttggtggaggtgggacggggtggtgtgcccatggggaggacgccgtgctgcgacagggcggccgtgaagcggggcccctggtcgccggaggaggacgaggcgctgcgcagctacgtccagcgccacggcagcggcggcaactggatctccatgcctaagaaagccgggctcaagaggtgcggcaagagctgcaggctgcgctggctcaactacctccgccccgacatccgccacggcggcttcaccgacgaggaggacgccgtcatcgtctccctctacacccagctcggcagcaagtggtcgctgatcgcgtcgcagctggaggggaggacggacaacgacgtcaagaactactggaacaccaagctcaagaagcgcctcctcgcagccgccgccaccgccgacgtcgtctccacccgctccccgccacccgtcctgcggctggccgcggcgccgggcccgacacccgcgtcgtcgctgttcccgtcgctcgccatcccgaccgtgaagaccgagacgtacacctgcgacgacttcctggcgcccaccgcgttccgggacgacgacccgttcgccgtggccggcgggagcgcggacgccgccgccgccgacggctccacctcggcctccgcggcgtcgtcggcgtccaactggtcagcggacaacggcgctgtgggtgacggcgaggggtcgtacttgctggacttctgcacgggctccggcatcggcggcgctgacggccacctccagctccccggcggctactactaccctctcgacccgaccttgtcgctggtatagcttcgtcggtttccaaaccacagtagcggtaggatcggtagcatgcgcatgtgatgttcttgggatcactgcttcgatgatcagacgctgcgtgcatgcaagtcgcgccttgtcgccatgagatcaactctaaaaatttcagttgccatctggaaacagaaaactgttcattgtggttcgagatttcaaacgtcgttctagcgaaatt

SEQ ID NO: 39526 - DNA, 520 bp, Setaria italica
  Peptide Sequence Number=SeqID_105500
tgtaaaccctaacatgagcctatacaaaattacaaatgcctatcgttcaactggcatcaatattcagtgtaataattcatgacatgcaaaccccaactttctatatgaatatgactatctatgtctggcatttgttcagataatactaagttctcgctagatagttctacaaagaaactaactggaagtttctgagtttgcttgctcatttattcatctctggtgatttgcacttgctctacttctggattttgagtgggtattttcatctacaatttgaatgggaaactgatagggcttgttttcaagtgttatacttcatccatgtatgtgatattttccatgctcattttaggttgtctgaaatgttacctgtgctttacttgatgtccttccaaggtgttctaatttgccttcttcctatgcttctctacgtctataacacaaatggtttaatggtcaatgcatagctgccataatctagctcttgctataatgctctacttttaatttcccatat

SEQ ID NO: 39527 - DNA, 984 bp, Setaria italica
  Peptide Sequence Number=SeqID_105501
tagtgagacacctcaagctgcaataattaactcaatgcaggttgttgaggaccagaatttactgtcaattggaaaacgttttggcagtcatagatccaggggtcatacggcttctggtagtgaagaaaggtacctcaaccacctctttattagccgacgtggatcagagttagcttttaagcatctctgtgagaaatttggaccgtcattgtttgaaaaacttcccaaattatgggattgccttaccgagtttcttaaacctgtaaaaagcaaagatggtctgaaagacgatacaagtattgcacagctgggcagatcgtatgaggataaggacccacagtcgctcataaataatatccaggttgttcgttcaattacgcctcacttggctgagtccttaaggcctcaactgctaagtctccttccctgtattcttggatgtgttcgtcatcctcatgtggctgttagactagctgctgcaaggtgcatcacatctatggcaaagtcattggctgatgatgtgatggttttggtgatagagaacgtcattccaatgttgtctgatttatcatctgtctgtgcaagacaaggggctgggatgcttttgagccttcttgttcagggtttggctgtggaattggttccttattctcctttccttgttgttccacttctgaagtgtatgagcgacccagatggttctgttaggcagactgtgactcacagttttgctgctcttgttcctttgctgccattatcaaagggtgcttcgctacccggtggactaagtgaacgcttatctagcagtgctgaagatgtgcagtttctggaacagctccttgacaactcccaaattgatgatttcaagctcaacattgatcttagtgttgaattaagaaggtatcagcaagaagggatcaactggctcgcattccttaggcggtttaagttacatggaattttgtgtgatgatatggggctcgg

SEQ ID NO: 39528 - DNA, 575 bp, Setaria italica
  Peptide Sequence Number=SeqID_105502
ttcatactaccaaacagtttgaattaggaatgagggctgttgggttggggagaatggcaagcacaagggctgggtattctccccaacccaacagccctcattcctaattcatactaccaaacagtttgtgaatcattcaaaccccatggatccaaagtccaatggtgagtggactgcctcagagatcatgatgatgaaatctatcatggcttggcacaacaccagtagcagctacaccagcaacatgaataataagcacaccaacattgtggatgagctccaagcatggttcccctggaaggagaagcgtcaggtaaccgacttgtatgcaaatctcatggtggagatgatgccaaccaacaacaaccagtgtgcggcatcgagcagcaaccccgtaactcacaactttgcaatgttgttggaggatccagccatagacaacatcaacgtcttgcgcagctttgacactgaggagatgggggacatgaggcaagctaaggaggcgccgcggaagcagcccgctcctcggaaggaaaagcagttctggaccccagatgagcacaggcagttcctct

SEQ ID NO: 39529 - DNA, 997 bp, Setaria italica
  Peptide Sequence Number=SeqID_105503
cccatctgcatggcgccgaacgacgcgatggccaggctgtcgcggtagtagggggaggagccgccgccgagcgagatggagagcacgtcgacgccgtccgccacggcgcggtcgacggccgccaggatgtcggagctgaagcagccgcccgcccagcacaccttgtacgccgcgacgcgggcacggggcgccatgcctcgggcgacgccgctggcgtagccgaagaggttggcgtccggcacgggcgcgcccgcggcggtggccgccgtgtgcgtgccgtggccgtcctggtcccgcggggacttgagctccgtcgtctcgttgatgggcccagacgaggcctcgtagccgttgtagaagatgcgcgcgccgatgaccttgcggttgcagctggccgtggtgaagccgcgccccgtctggcagaggcccttccacttggccggcacggggccgagccccttgtcgctgaagctggggctctcgggccatatgccagtgtcgagcacgcccacgacgacgtcgtggtcggcgagcccggcggaccagatgctgttgctgatctccgggctgatgcccaggaagtcggggctcctggtggtgtgcagctgcaagaccgtatccgggagcacggccaccacgccgtccgcgtcggccatccgctcggcctcgtcctcgtccagcttcgccgcgaagccatggaacgccgtctcgtagttgtagacgatcctcgcgaacgggtcgtcctcctcgccttccagctgcacagaactcacggatttcacagtggaggcgtaccattcgtggtggaaatcgaacgagctcggcatctcagacgccgccatctggacgatgtacgtcttgggcgccggcgcgcacgccgagaggcatgcttgcagggccaccgcaagagctaggcacagcggcagagccctccatctcgtgctgccggaacccatggtggatgggcgagccgaagcggaccgagatggatggaaag

SEQ ID NO: 39530 - DNA, 486 bp, Setaria italica
  Peptide Sequence Number=SeqID_105504
cctgtttgaccatacaatctctatctcaagggttctcgagccatccttaccgccatcgtggctgaggctgaagaacccgctgtatacaccctcggtgacaaccttgtcgatctggatggtcactcttccaagggtcgactttccgaatgtatttttgctcttgcatatgatgtagagcttctgcccttttggggcaacgtcgaataaccaagtgaaaccctcgttccatgctgggcagatgctgtggttaaccaccttagtttgccttggaggaccatttcctatttgcaggcaacaaaatgcatttgtaccccccattgtctgtttcaaattattcccacgaatgatggtcactgtcaagcaaccaggcaagcaatgaagcaaactatcagctctctcatgaaaactgggaggacaggttttcataagcatttgtagaacaggtatggcttcagctgaaatcagggagtgtactttagcaatgtc

SEQ ID NO: 39531 - DNA, 3229 bp, Setaria italica
  Peptide Sequence Number=SeqID_105505
tgtattattcaacatagaagcctgaaggtccagattttgcgttgacatgaacagcacacacccataacccatgcagacaatatctcctcacacatcacataaatgttctttatcagctgtgttctaagtctcacaccaatctaaactaaaaatataattacaggaaacatattcgcctgtacaaaaaaattacccggtccaaaatctgttacagctgtaaggctacaatccagcgaggacctaagaataattgaatgatgataatgcggggttatctaagtgtcccacctttctacatataaatgaatttggatgattatggggctgatttacatggaagccagtagtataagattggtgtcaggtaaatcagccatatgctacatactgtcgttggatggcctgtttgaccatacaatctctatctcaagggttctcgagccatccttaccgccatcgtggctgaggctgaagaacccgctgtatacaccctcggtgacacaaccttgtcgatctggatggtcactcttccaagggtcgactttccgaatgtatttttgctcttgcatatgatgtagagcttctgcccttttggggcagaagctctacatcatatgcaagagcaaaaatacattcggaaagtcgaataaccaagtgaaaccctcgttccatgctgggcagatgctgtggttaaccaccttagtttgccttggaggaccatttcctatttgcaggcaacaaaatgcatttgtaccccccattgtctgtttcaaattattcccacgaatgatggtcactgtcaagcaaccaggcaagcaatgaagcaaactatcagctctctcatgaaaactgggaggacaggttttcataagcatttgtagaacaggtatggcttcagctgaaatcagggactgggctttagcaatgtcttcattcatttgcggccaagattccttcagcaagcaaagggtgtcaagcacactctcttgggcagactcatttccatccttcagggcacacaccagatggggtatgcacaaggttgctgcctcagaaaaccgcacttttttgaagttgctgaatatcacatatatggtcctcagaataacttcattgatagatgacatagagagcagctctctctccaaggcagcagtgagagaccggatgagctcatttgacacatattcttgcaatgtatgatttgaaaataggtacttgattagaagagcagcctgtcctgaaatatccacatttggagaaagtagcaattcttgcacaaccaaaatgcccccagcctccgcaacagctcgcctatttgtcctgctgtgcatcactaagctttgcagtgcacaaatagcaaccattgtcatgtcatccgtaggctggtcctcaagtaggcttacaagagcacggcaggcagaaacagagtcacttgctcttgcaagtgcttcatgctgaaaaatgtcacctagtgcaagagttaccagaaactttgctgactgattcttagactgaggatctaaaaggtactgtgagagaggagcaatagcatacttggcaacttttgtttcacggacccttgaattgtttatcagcgcttcaagcaatcttgctgcagattcctcacaacgatggctcttcaggagctccaagagtgcacgtactgccccagcctcagccatagccacagcacagcgtgaactacttttctcttgaacaagtaaagcgctgagagctattgtgacagtactctccgtggtcgagttcagcaatcttacaagtacagccattgagactttaacgtagttgtcagaattatatcgcaaaacattacataacacaagtgctgcagattcccatagtgcttgacttggctgaggatcatcctggacaattaccttcgaaagttcaaaaatcccacctgcatctgctacagccttgggccaactctgtgatatgttttcaagagctttaactgcagtttgttgtaagctcaagattccaataccagcaagctgcacaagaggaacaactgcattttttgtagtgatgtcctgttgaaaatgctcctgttctagaagatgtgagagcacctcagtgccaagttgctgaattgcttgcgagggagactcaagaaatgatattaaaggctcaattatttgactgggagtcaacttcaatgctgctagactctgaggtttctccagaatatttacgagtgcttgcaatgcgctgtgctgatcccacatggtaacatctgggcgacgtagaagtaagaaaagtggctccaccatttttgcagcagcagaacttttagcaatgccactgttgtttgtcaaaatgcgaagcaactcagcaatggatgaactaacagatacaggaacatcaagaatcatatcaagtgcatgctcaatgataccagctttaaccatgtcaagcttgcagtttggacggtccttacccaattttatgagagcaccgatacacgcttcagacaactggtagtttgttccaggaacaaaactaacaagaagatcaataacttcaccagttgcagcaacctctgcattgtactcctcttcaagtagtctattcagagcacaaacagctggttcaacagccaagctagatcctgatgtcatcaatgatatcaggggttgaagacattctgttgcaatgggtgatgcacgtatggttgaattctcaaataaaatatagcagagttgagcagcatctttcttgagctctaatgatgaactgaaggacaaaattttgtaaagattttcaagtgtgttgctttctacgtcaaacatagcagaacccttagagatattcccagcagaaagcttgataagtgcaccaagtgctgcctgctgttccatttcagttcctgactcaagcatgtcaagtaatggttgaatagcttgccgagccacctcggtgtcccttatattctctgaatcaaaaagcttctgcaatgttcttactgcactaagcctagaacttctcgagcccaaacgtaagacagctactagctgatttgaagtgctacgtgatgattcatggtaaagcagatcaggattactgtataagatccctagcaaatttgttatagtagtttcagttgagtcttgagggcttaaagatagatacttagtcaaagcatctaaagctccagcctctgccatagcaactttatttgtctcactaccttctgctagctggt

SEQ ID NO: 39532 - DNA, 716 bp, Setaria italica
  Peptide Sequence Number=SeqID_105506
cttactattcagcagcacctcagagatcagtcaatcctttgctactgatgacaatctacagtgatctggagtgtagaagctcatgtagggtaggatgctgaagtagaccccaggcacatcaaccttcctcacccggcctgacttgtacactatcacaaataatccaacacctgtgctgatgaagatgacacccacaccctctgcggagccaaccacaagtcgttcatcactggaatcggcaacaggtataattttctccagatcgatgaccctgcattgtacccattctggagctccttgtgaattcaccttccttgaccacagaaaaaggttggaacctccaatgcaggcaaaccccagtgaactgtcctctgtcaccatgagggaaatccgactgctatacaccaccagtgattgcgggctaatcatagataagcaattgtagctccagtcatacttgacgattgcattacccctccgaagtgtgaagtagatttcatccccgataacggcaccccacctaggctgcacatagggtgtgtagtaggatctttctgttgcactttgctgatgctttacataggcttcacaatcgtcgccaagagataccggcacgctccactcccctgtctccgatgagtacgcgctcaccttaacgagttcgtcgtcgtcgtcggtggcgatgaagaccacccggaagagtccgccgtggcagt

SEQ ID NO: 39533 - DNA, 448 bp, Setaria italica
  Peptide Sequence Number=SeqID_105507
tttggtttgcatttttcgttgagcatcggtattttttcgttggctgaacaaggctcgttccaacatctgtcttcccacgggacggaagtgcagccgacagtacggtgacggccggccgccaacccgccagaaaaaatacggcagagcagcgtgcgagcaacgtcaagcagagttcgaccagcgtcggcgccacgtcgcccgcccatgtgccgtcggcaccggcacaccgcgcacatgcgccgacccagacaaaacgagagaggcacccaacagctatgacgcgtctgcgtctgcgtctgggtctgcggtgtgcctccgttgactgagacgtcgtgggctgtgggcactcgcgtcgtcgtggattcagataacctcatcttctcacaatctcactctcacgcaactctgtttagaccctgcctagacgaaaatcctagcgaaatgtaat

SEQ ID NO: 39534 - DNA, 584 bp, Setaria italica
  Peptide Sequence Number=SeqID_105508
aactttaaacctttaaaaccttcacctagttttggagagcgagctcgtcgacaatcaccatggccagcctgactaccatggaaaggctgctcctcttccacaagcttgagagcgacttgttccaccgtctagtgcatgaacttgcccaagacccagcgaccatgcagtgggtgatcgcgctatggctctggttcgagtccgctggccaccatgatttcatccgtcgtgttgctgcattgccaggccccgttgtgctgcggttcgtcgaggaggcaattgcatgcctccgttgcctcaccaacttgggccagggggccacagccgacgctaatgacaaccgtgacaggcgcctaccctgcacaaatgcactcctgagcaagcccatcgacgacgtgggctacttccaaggtcgccgtgaggtcttggatgacatcactcatcagtacaggagcatctgcctcgccatctgcgatgctggcaacagctccacttccatgccaagaaacataggcagtgtgcacgcttcccactgatggtcaggtcctctgttttcccaccccaagagtggcacccttgccactaaa

SEQ ID NO: 39535 - DNA, 483 bp, Setaria italica
  Peptide Sequence Number=SeqID_105509
catttgttttccaaccaatgtggcagattgttaaacctctgttgaaatcatatgcctccctggtgagattttgcgattctgagactgtgagaaaagaatacttcacagaagaaaccgtacctcatgatttccgcagttaggtgccttgattatttcttcagtaagactgttatccaggaacggctctggcagatcttagttgcaggtcagtgctgcttttctctgaccctgctttgttcaaaagtgatgtttatcagttgaaagttgagtactgaactgtgcacagaatatttttagtacgctcaatctctccaaaaatcaaagctgcagaaatatgattggtggttgcagaaatatggccttctgtacttgtttgagtggcacatgaagcacctccattcctccactccaattaggaaatgtcaagagactccatcagatttttggcctcgtcactttgtgcccaggtttgttcccttagtt

SEQ ID NO: 39536 - DNA, 1031 bp, Setaria italica
  misc_feature (23)..(23): n is a, c, g, or t
  misc_feature (1006)..(1031): n is a, c, g, or t
  Peptide Sequence Number=SeqID_105510
tagacgacatgatcctctggttnttgaaggaccgcaagttctccgtcgacgaatctgtctccaagctcaccaaggccattaaatggcgtcaagattttggtgtatcagaattatcagaagaatcggtgaaagacctgtatcaaactggcaaggcatatatacatgattcattggacatttatggcagacctgtgctagttgtagtagcagccaaacattttccttcgacacaagatccaattgaaaacgagaagctatgtgcctatttggtcgagaaggcaataaacagacttccatcgggggcagagaatatacttggaatctttgatctgcgaggcttccgtgttgaaaatggtgacctccagttcttaaagtttttgattgacgttttctactattactatccgaagcggcttggccaagttctttttgtcgatgctccatttgttttccaaccaatgtggcagattgttaaacctctgttgaaatcatatgcctccctggtgagattttgcgattctgagactgtgagaaaagaatacttcacagaagaaaccgtacctcatgatttccgccagttaggtgccttgattatttcttcagtaagactgttatccaggaacggctctggcagatcttagttgcagaaatatggccttctgtacttgtttgagtggcacatgaagcacctccattcctccactccaattaggaaatgtcaagagactccatcagatttttggcctcgtcactttgtgcccaggaaatagaagacgcaactgaatctttgtgaagaccagattacaggaactggtgaaagaatgtcttggatgaagccaatcctcggttggcaaagaacagaacgttttaccagcagttcaagttctagagacgaggtcatgatgagagtgctgtactgctgtttgccttgcttgcagttgtcctcctatgacatgttatataagtatataaacacattttcttgggcataaaaaaaaaaaaaaannnnnnnnnnnnnnnnnnnnnnnnnn

SEQ ID NO: 39537 - DNA, 540 bp, Setaria italica
  Peptide Sequence Number=SeqID_105511
tgtcccctcgcaggctgcagtggatggcaacgccgcctccactggacaagagctgccggcgtggcgacggaagctgcggtctttggtcccggtggacggcgtggtggcgcggcacatccgcacgggggagccggtggcgctgtcgcggcgggtggtggcggcgttcctccttatgaccgtggcggacttcagcgaccagtacacggactaccaggacgagctgttcgggaacgaggacgggcggctggagttctccggcgacaactgggccgcgctgtggccgggcaccggcaagccggggctgtgggtgagtgccatgtcgcggatgacggcgctctacaacctcatcgccagggacgaccagctgctgctgcgggagggtggcggaggcaagaatgtcgaggtcagcgacgatgacatgctggtgggtgagatggtggtcccgccggtgttcgaggggtgcacccgcgtgctggacccggaggagcagaaggcggcgagggacctgtactgggctgccatctgcggcggcggcggcaa

SEQ ID NO: 39538 - DNA, 396 bp, Setaria italica
  Peptide Sequence Number=SeqID_105512
cgcagataatccagggatatggtacatgcattgccattttgagtttcatgtctcaatgggcatggttgcattattcatcgtagaggatgggtcaacagtggatacatttctccctgcaccacctgcggactttccaacatgtggacatgaccataatgttatgtcaaatgagttctaccctatctaaggaaattgaagtgacattgataaatggagtctagtagacagttccaaacagactttcaaataaggaggaaagatgcatgaatcttgagatgaaacaaaaatccttgctagtccaaattaatctgtatatgtatcttgagatgtgttcttttatgtaaacatttaatctataatattctatctttatggaattcaagtaactaacgttga

SEQ ID NO: 39539 - DNA, 396 bp, Setaria italica
  Peptide Sequence Number=SeqID_105513
tagttcagtcttacagaagcagcacatcattgacgaaaaatggaaagaccatattcatttacaaacagaattcacataagcaaacacacaaaatagaaagagaaaaaactgcatgcgggattcacaggtggaagtatacgcccagaacttgctttggtcaagtggtataccacagacagtgacatgtaccatgaatcttcaggttaatatttgcgagagacacaatctaatggagccatttgcaaattaaaaatttgaacttcacatgacagaataataagcaaatggagataggatactaatggtgaaaaacaacaaacacatcacataatgatctttagattatcaattgagcctcttgtaatgccatgtggaaagatcattatgtgatgtgtt

SEQ ID NO: 39540 - DNA, 699 bp, Setaria italica
  misc_feature (694)..(694): n is a, c, g, or t
  Peptide Sequence Number=SeqID_105514
ggagagcgtccaatccttttcgtgacaagcctagccatagattcttaggatggagcagtcttttgtcagtttacatgaacatcactatactaacagtaacatcaccatcacataatgatcctcactagtcgtagtacatacgtagctatcaataatcctatctttgtactattagtaattagggcacttaatttcgcagctgtttttacctacagcacacggcagtcatgacactgtgctctactccagcacacacctgtcattcttgccatgctttgcagctgatctgaaaacggtacgttcagtacccaatcattcaggtggctcatcaacaactcttcttttacaaaaaggacagaaaaaaggggagaaaaagaaaagtaatcgtcagtactaaaagataaacatgattgaaatttaagatagggtttgttgcatctcacctgtacatcatcactgtggtctcatttaagcgcaccaagatcgcatcgatggaggcggttccaagcgaaggctggaattatgcgagctcttcaccatccgttcattaataagaacagctagcttttgtggttatgtggattcggtggagtgcgccatcgccatgtgagttgtgagtgatcgcagtcggttagccaccactttagttgtagctaggacctgaaaaagatgtaggttttaatttcagaaaagntagta

SEQ ID NO: 39541 - DNA, 525 bp, Setaria italica
  Peptide Sequence Number=SeqID_105515
tcctgcattatcttcctgaggaaagagcagaaaatggaggagataggcaagactataggcagcaagtatgatgtttctgaaactctctatgttctatattccctatcaaaaatccaaggagagcaaggatgtataagagcaactgaactcaaggataaactgagagagtcaatagtccatgaaaaccatgtttgacctttggagttgggatcacttttgccttcggctgattgttctgatctactagctgtgaacagaaacagccattgactgctgaatcctgagcctttgcgtcgtaaagcactgatccatcaccatttatgatttatgtaattgattccttactcttcctgtttctagtcttggatctaagacagaggtcttgatcaaatacttgtcttcgcataatgaattgttgcaaggagtccagcctccaatatggagatgctttgtctgctactcctgggaaacatgctataataattatatatcaaaacttggcgtgtgttttttcttcaaaaaaaa

SEQ ID NO: 39542 - DNA, 454 bp, Setaria italica
  Peptide Sequence Number=SeqID_105516
tggaaaggtgagatttttcgacctcctctgttccggccttcctccaatttgttcctttgccgcgaaaggggattggttagggtttaccttgcgccttcagggcttacgctaacttctcggttccactccattagcgccgccacggggtatctagtccttcgaattcgcagttgattgtggcgccgaatccaatgttttcgtttcgcccccattatcctagccagcgagtgcagtgctctgttgtatccttgggacaccgtttcagccgggaagtccactctttggctgaaattgagcaccgcagtcactcgttccaagactttttcctcacttgttccaaggattaaaacgtactcctactagttaagaccgggtgcttgctcactccttgcattcatctcagcttcttaagcgtccaaaaatcacttgtacttttcgttttaaaaatcacttt

SEQ ID NO: 39543 - DNA, 541 bp, Setaria italica
  Peptide Sequence Number=SeqID_105517
ctacgcttgtaatgcctatcgtagcataaccttgaggctgttttgtgtctcttatttttgttttcattgttcccttagttttattcaaaatcatagtcctatctgttattccatgcttgtgggttatgtctttgggctgtgcaggaggttcgcttgctcaataccgtactgcctgtgagggagcatcaagcaaactcacatgccaaaaaaggttgggaggagtttactgatgctgtcattaagactatatcacaaaagagatcaggactggtctttcttctttggggaaattctgctcaatcgaaaacaagattgattgatgaaacaaaacaccacattttgaaatcagctcacccatcaggcctgtctgcaaaccggggtttctttggatgcaggcacttttccaaaacaaatcagatcctagagaagctgggactatctgcaatcgattggcagctctagacaattccaagtcgacatttgatttgcctgttcgagcttgacagccaccgttgtatgaagtggagcggaagcacctacg

SEQ ID NO: 39544 - DNA, 482 bp, Setaria italica
  Peptide Sequence Number=SeqID_105518
gttttgctcatctggggtgaccatgatcagatatttcccttggaaaaggcctttgctgtcaagaggtgcttgggagagagtgttagaatggaaatcttcgagaaaacaggccatgtgcctcagatggaggacccggcccggttcaacaagcttatattggatttcttactagcatcacaaaagcctccttcgattcagcagtagcggttcaaacggccaaattggttcagttgagcgagtctgaaacggtggcgtggagcaagttgagaaagttcagcatgctgcatgcatatgaagttgtccccaccactccatgcaaacgcctcaagccattgttcccctctcttttgattttgaatgaaggatgatagttccagcaaaatgctctagtgtaaacctgtagttgtggcctgtgaattagttatactgtacttgtacattatttattccactgatgtggaaaataaggaagtgtttcccgc

SEQ ID NO: 39545 - DNA, 607 bp, Setaria italica
  misc_feature (580)..(607): n is a, c, g, or t
  Peptide Sequence Number=SeqID_105519
tcgtcggtcggtcttctattggtagtcttcttcctttcttaccggaggcaggccatttaccttgctgccggacttcgtgctccgacaggccgtgcagcaactttttatggataaaagggatgggaagattgagctgatgaaggctataactgttggcacagacgagttcaagttgacaccattgcctcaggacgttttgctcatctggggtgaccatgatcagatatttcccttggaaaaggcctttgctgtcaagaggagttcttcaaagctcggccttactctattcttggacttgaaggcatttcctggcctactggaggcaccgatcagatcggcctgagaaccggtcagactagttggcgtgctgccgaccttcttattcttgtcttgcccccgagcattgaagcctttgctgcaacttgaggggtttccttcattggcaccttcttctcaggcctctcctcacctatgagtacattttcccctttagccttttcagcctgatctggccgaatgagcactttgggattttgtaactcaagaatgtttatagaaaagtcattttgatcgaataacnnnnnnnnnnnnnnnnnnnnnnnnnnnn

SEQ ID NO: 39546 - DNA, 477 bp, Setaria italica
  Peptide Sequence Number=SeqID_105520
ttatttatttgtttcttattgttcagaagctagtcaaatacaatgtttgttcgacataaaagaactgcaataaactgtacacactatggcatcagtaccatgcagcctatagtgcacaattggatggctagctaattaatagtatggctcacaaatcctagcatgcaccctgtagaacacaattggacatgcaatgtaaattcaaggtcttttcttcaaaaaattgtaaaattcaaggtcaagtgggtaggagcataatgtaaaggttcataaaaaccttatgggcagtggaacattcaaagtgttcagtgcaacatttagaataggaggcaccaaaatagaaatatatccatggtatatattgttgacaatgatagtcttcatgcaattatcgtaccatgaaatacaagaagggaaataacgaggacactggcaggcctatagaacaaaaaagggaacaaaaaagttaagtaaact

SEQ ID NO: 39547 - DNA, 494 bp, Setaria italica
  Peptide Sequence Number=SeqID_105521
aaagacaaatagacaactactcaagagttaaagtcgcctccagctcattctgatcccttctttttcttttagggcaactgaacacttcatcaaacaagtcatgatagtgtcaaacccatctggctcagaaaagccttttctcttcttggacgaaccaacctgacggatctgctcttgacctgccaggagtaaaactgcagtctggacaagcttgccatccttcacatagttccagagctcgtcaagtagattatccgtctttttcgcgagcaatctagtcgtatccaagaaaattttcatttcaggtaggcacaggagttggatgagcttgtagacatagtctcgacgatccggataatcctggaaaggcaataaactgtcctccagatacttgtggaggcaagtattctcaaccgcaacatggagtgggagtagattctcaatgatcttatcaccggctgtgcgaacattagctgatgcaccatagttgaaca

SEQ ID NO: 39548 - DNA, 368 bp, Setaria italica
  Peptide Sequence Number=SeqID_105522
ccgcgtcgtgctgcgcgtgtcggcggcggtcgtcgtcgccgggaaccccgcctgcgtcgcggatttcgggcgctgaccactgcacatcggaggcgcggagccatagccttcgacggcgaagcggtgcttgaataatttgcgtggccatgcttgtttgcgggtgagccggtatagtttttgccctttctctttaccggcgatgaccggcgtaggtagtgacggtggcggctaaggtataaccgccgagtgctccctccctcctcctcagtagattccggctcttctcgtacctcgttttgtaccataacgacgactacctgtttgttctaacatcgtgttgaataacaacgatgaaatcctacttggag

SEQ ID NO: 39549 - DNA, 1088 bp, Setaria italica
  Peptide Sequence Number=SeqID_105523
ggatggctaagcctagttaccaacctttagcctcttttctggatctagcactaatattcttttcaggagatcattgaagttgaatagcatttttgggtcctcgccaggcaagcttgaaacaactgaactaacatcctgtcgtttgatgttcataaccggatgtctcttcacagtcattttcgtcactggatccttctcatggaagtacttgaaatcttggtcaaagtgctcttttgcaaaggttcccttgcgaagcatcttcttaggaagggcacccttcgattccatgtgaagccgaagcatgtcattattcgttttaccgggaaacaagagttttcctgtgtaaagttcaaataaggaacaaccaactgaccacatatccaatggatggttgtacggcaacccaagaataatctcaggtgcccggtagaagcggctcacaagatacggtgtgatctcattcgttccagtaggcatagcactaccaaaatcacacagcttcagcttagttttagcctcatttaccagcacattatctggtttgatgtcacagtgaagaacattgcaacttttaaggtgcttcaacgcgatgaaaagctgctttgaatacgtccttacagcagtcaacttaagccccacatcagaaccaaatttctttagaagcccacgcaggttcatgtgaagagattcaaagatcaaacagagatgatttcgatacatgaaactagaaataaacctcacacagtgtcgtctgtctttagggtcggcactagccagcttttccagtatagaaatttcttgcttaccagccttgtacatcacaggaatgttccgtataattttgatagctacttcactagaatcacctttcccagctttaagatcctttgcccggacaacattagagaaaactcccatcccatggcctgccatgatttcataacgtccatgtagcacctctccacagtggtaagtataatatcctcctggatcgtcccaattgtcacaatgagcattttccttgatgaggaagctacgtttcttgcccagttcttgggcaccaataggtgattctccaaaatatcatt

SEQ ID NO: 39550 - DNA, 759 bp, Setaria italica
  Peptide Sequence Number=SeqID_105524
gatctctacgacagtgtgaagctaacctactgtcgggaccgcatcgtggagtcttacttctacagctttggagtgttccatggggaggaaagctctgctgcgcggatcatacttaccaaggtgtttgggttgttggtcctgattgatgacacatttgatgtgcgcgccacctttgaggagtcccaaatgttagatgatgccttgcaaagatgggatgagagcactgtttcgcttctaccacaatacctacgcatgttctacatcaaaacattgagtaacttcaatgaaattgaggatactttggaaccgcacgagaagtaccgcatggattatgtcaaaaaagagtacaaattgcaatcaaaaaattccatccaacaggctaaatggttcaatgaaaactgcacgcccagcttcaaagacatctagacgtgtcacttatggcgacgggtttgccgttgctgttcttcacagctctgatgagtgcacgccaagtgataagcaatgaggcattcgagtgggcacttgacatgcctgacatgttttatgccaatatagaagtgggtcgcttcctcaatgacatcgcttcttacaagcaagggaagtgcgagaaggatgtggccagcactgtggagtgctacatgagggaatacggcacgactggggaagaggcggtggcagcgatcacctttgattgcaattttgtactctttttttgacataatccatgcggtacttctcgtgcggtttccaaagtatcct

SEQ ID NO: 39551 - DNA, 303 bp, Setaria italica
  Peptide Sequence Number=SeqID_105525
aggccggcttcagcggcgcctcgagatcaatgggcttggccacggcgcgtgccactagggcacttcatttctccggtaatagcaccatcgaaggtgctatcaactggctttctgagcaccaggaagatgcagatattgacgaaatgcctctggtaccagctaattcaaaaacggaggataacaaacccagcctgactcctgaggaaatgaagattaaagcacaggagctaaggaaacgcatgatagagttgcgaagacttgaaaaagaagaggagaaaagagctagagaaaaaatccgccaag

SEQ ID NO: 39552 - DNA, 1538 bp, Setaria italica
  Peptide Sequence Number=SeqID_105526
taactcctaaaaaagacctcgcaagaagcgacgagagcacacttccttcgctgtttcgccccaaatctgctgccgggggcacgagccgaatttgagccgatcgaggcggcggcgggcggcaatggcggggctgtcgctgcggtgcggcgactgcggcgcgcagctgcggagcgtggaggaggcgcaggcgcacgccgaggccaccaaccacgccaacttcgtcgagtccaccgaggcagtcctcaacctcgtctgctccgactgcggcaagccatgccgctcccagaccgaggtggaccttcacaccaagcgcacgggccacaagaatttcgcggacaagaccgccgaggcggccaagcccattgatctcgaggcgccgctgaagccggcctcctcctcggatgctacggacgtcgacgccccggcctcggcctcggcaagcgaggagcctcaagagatggtggtgccggaggtgaacaaggagatgctcgccgacctggaggccatggggtttgccacggcgcgtgccactagggcacttcatttctccggtaatagcaccatcgaaggtgctatcaactggctttctgagcaccaggaagatgcagatattgacgaaatgcctctggtaccagctaattcaaaaacggaggataacaaacccagcctgactcctgaggaaatgaagattaaagcacaggagctaagggaacgcgctcgtaagaagaaagaggaagaagagagaagaatggaaagagaaagggagaaggaaagaatacgaattggtaaagaacttcttgaagccaaaagaattgaggaacagaatgaaaggaaacgcatgatagagttgcgaagacttgagaaagaagaggagaaaagagctagagaaaaaatccgccagaaattggaagaagacaaggctgaaaggagaaggaaactaggattgccaccagaagacccagcagcttccaaaccaagtgcaccccctcctgtcgaagagaagaagagtgcattgcctgtcaggccagccacaaaggcagagcagatgagggattgtctacgaaatcttaagcaacagaacaaggatgacgatgccaaagtgaagagggcatttcaaacactccttacttatattggaaatgttgctaaaaatcctgatgaggagaaattcagaaagatcaggctcaccaatgctacatttcaggagagggttggaaatctgcatgggggcatagagttccttgagctctgcggattcgagaaacttgaaggcaatgaattcttgtttctggcaagggacaaggtcgataaggccatcctgaacacggctggagccgagctgaattctgcaatcaccaatcctttctttggagtcctttgaattaccgagaaccaaattgtatactcaaaccttttggtttcgcttctgcttgacaggcaattgtgtttaacatggcgtggacctatttgtaatgaattcacgaattattacagattacatgcatgtttcttccatactaaatgtttttcttttcctt

SEQ ID NO: 39553 - DNA, 240 bp, Setaria italica
  Peptide Sequence Number=SeqID_105527
cctggagcaggtgcttggcgaggtcaatggcgatgatgccggcgctgcagcccatgccgctgaggttgtgggtgacgacgtcgtgtcgcaggccgtagcggttgacgacgagcgacgtgaacgacggcgtggggctgaagcagctggagttgacgatgacgacgccgatgtcctcggcgcgcacgccggtcctggccagcaggtcgtcgacgacgccgaagacgacggcctcggactcct

SEQ ID NO: 39554 - DNA, 572 bp, Setaria italica
  Peptide Sequence Number=SeqID_105528
ggtcgagctgatgcagctcgccggcgtcttcaacgtcgggacttcgttccgcgctggcgtggctggacccgcagggcgtcgtcggcaggatgaagcgcctgcaccgccgctacgacgacatgatggaccggatcatcagggagagggaggccgccggcggagacggcaacgacctgctcggcgtcctgctgaccaggatgcgggagcaccggccgctcgccgacggcgaggacggcaccatcaacgagaccgacatcaaagcgcttctcctcaacctgttcacagccgggacggacacgacgtccagcacggtggagtgggcgctggcggagctgatccgtcacccggacgtcctcgccaaggcccagcaggagctcgacgccgtcgtcggccgcggccgcctcgtctccgagtccgacctcccgcgcctcacgtacctgacggcggtcatcaaggagaccttccggctccacccctcgacgccgctgtcgctgccgcgcgtggccgccgaggactgcgaggtgggcgggtacctcgtccccgccggccaccacgctgctggtgaacgtgtg

SEQ ID NO: 39555 - DNA, 478 bp, Setaria italica
  Peptide Sequence Number=SeqID_105529
cggggatcacacaatctctgacgaggtgcatctgcaggccgatcgatcggcggcggcggcggcggcggatggtgtcgtcgtcgaagaagaaggtgtgcgtggtcggcgccggcgtctcggggctggcgtctgcccgggagctgctccgggaggccacgccgtgacggtcatggagcagagcggcggcgtcggcgggcagtggctgtacgacccgatgaccgacgccggcgatcccctcgggatcgccggcgtgcacagcggcgtctacgcctctctccggctcaatgcgccaagggatagcatgggcttctccgacttccccttctacccccgacacgacggcaccggcgactcccggcgctacccctgccacggcgagttcctcaggtacatcaggcacttctgcgacgcgttcgggctcatggacgccgtcaggctcaacaccaaggtcctgcacgtcggcatggcggcccgcggc

SEQ ID NO: 39556 - DNA, 729 bp, Setaria italica
  Peptide Sequence Number=SeqID_105530
ctacacttaacgtagctcaattattgcttcggttccttgtggtggaatatagagtatgtgagcatgttttcggaagaagaggaagaagacgatgaaaaggaacaaaatgcagagagagagagagaatgtttggactcgtgtgccacgccactggcagcaagcacatggaacgagcccgggctgaggcgtgacgggcgtggcacacgcgcgaccactcgccatggcgtcggagtacaaaatcttgctctatatgcctgcgtgtccggcagggtcgcagctaggatcgtccccgcgacgacgatggtgtcgactaagacggtgtgcgtggtcggcgccggcgtctcgggcctgatctccgcccgcgaactgcgccgggagggccacgacgtgacggtcatggagcagagcgccggcgtcggcgggcagtggctgtacgacccggggaccgacgccggcgatcccctcggcatcgccggcgtgcacagcggcgtctacgcctccctccggctcatcatcccgagggaggtcaccggcttctccggcttcccattctaccccaagggcgacggcggcagcggcgacgcccggcgctacccgtgccacggcgagttcctcaggtacatcagggacttctgcgatgcgtttgggatcatggatgttgtcaggttcaacaccagggtcgtgcatgtcggcgtggcgccgcccgacgacggcggcgctgctgccggt

SEQ ID NO: 39557 - DNA, 458 bp, Setaria italica
  Peptide Sequence Number=SeqID_105531
atagtggttcatgaatgacagtgtcttttaaacacagcaagtagacaaacaagtcattggatagttgaactaatttgcgcaaacaaaatatcaagattaatgtgtcttttccttcctattcattttagtttatctggcacaaaggttggaaattagagacagtaggctgtctttcttctaattatacttgtacctgttaggatttcacttatatgttactttctgcttactgttgcactgacccattttcatggctgttagaattatctaacaacatgaaaatggcatcatcagataattttatcacagttcagttgttccattgcttctgttatgagctcccttttaaaaaagaacattatgacagttttaagtgctcgttgctcaaattcaagcaggccctaagactaataccacactactactcacactgattgggacaactaaaatccaaaatc

SEQ ID NO: 39558 - DNA, 257 bp, Setaria italica
  Peptide Sequence Number=SeqID_105532
cttgcgcgtggttgcttttgttgcagctcaccggagcgtcccatgtcgtctacaactacaaggagcttgagacggaggcggccacggcgaacgtgccgccgtccatcgtcgaccccctcctgagaaccgggtaccacttccagccccccaagaactggatcaatgatcccaacgcgcccatgtactacaacggctggtaccatttcttctaccagtacaaccccaagggcgccgtgtgggagaacatcgtggtgggc

SEQ ID NO: 39559 - DNA, 271 bp, Setaria italica
  Peptide Sequence Number=SeqID_105533
ccaccaagatccacctcaagctgcatacttgcatcaagcaaagcttcccacgagcgacaagttcaccagagctgaagccgcgagcttttcactcaggcttcttctcgaggctggtgttgttcagccgctcgatggccagtatcagcgcctgtgtaccgagcccgccctcgccgtgcgccatcagcgacacgtacagctgttgcgcgagcgcgagccccggcagcgacagccccatggcctggcattccgacaggcagatgccgaggtcctt

SEQ ID NO: 39560 - DNA, 1296 bp, Setaria italica
  Peptide Sequence Number=SeqID_105534
ggactgcaacggctgttcttataaacggattccacacccctcaaggagacaagaatgcagagaagcaagtccgttcatttctgaagtatttcgggatcagcttcctgtggagcttcttccagtggttctacaccggtggcagcgtctgcggattcgctcacttccctacgtttggccttcaggcctggaaacaatcgttcttcttcgatttcagcatgacgtacgtcggcgccgggatgatctgcccgcaccttgtgaacctctccaccctcctcggcgcgatgctctcctggggaattctgtggccactcatcagtaaacgaaagggggattggtatccggccgacgtgccggagagcagcatgaccagcttgtatggttacaagtcattcctctgcattgctctgatcatgggcgatggcatctaccacttcgtcaaggtcctcggcatcactgccaagagcatgcacgaacgatcgaaactcagacgcagcaacagccgagtggccgacttggacaaggcggcggcgatcgacgaactacggcgggacgaggtcttcaaccgggactccatcccggcgtggctggcgtacggcgggtacgccctgatgagcgtcgtcgcggtggtcaccatcccgatgatgttccggcaggtgaggtggtactacgtggtggtcgcgtacgcgctggcgcccgtgctgggcttctccaactcctacggcgccgggctcacggacatcaacatgggctacagctacggcaagctcgcgctcttcgtcctcgcggcgtgggccgggcgcgaggacggcgtcgtggccggcctcgtcggctgcggcctggtcaaggagctggtgctcatctcagccgacctcatgcacgacttcaagacggcgcacctgaccctgacgtcgccgcggtccatgctcgccgcgcaggccgtcgggacggccatgggctgcgtcgtcacgccgctcaccttcctcctcttctacagggcgttcgacgtcggcgacccggacgggtactggaaggcgccgtacgcgctcatctaccgcaacatggcgctcctgggagcccagggcttctcggcgctgcccaggcactgcctgccgctgtccgtggggttcttcgcgctcgccgtgctcgccaacgtggcgagggacatcctgccgccacggtacgggaggttcgtgccgctgccgacggcgatggccgtgccgttcctcgtcggcgccagcttcgccgtcgacatggtggtggggaccgtggtggtctttgcctggcaaccgggttaga

SEQ ID NO: 39561 - DNA, 701 bp, Setaria italica
  Peptide Sequence Number=SeqID_105535
ttttttagttttttacctttttagttttactttaacctttaagttaaccttaagtccggtagtctgcatccgccacccaaacatggtgctcctcctcggcgcctgcccggagtacggctgcctcgtctacgagtacatggacaacggcagcctcgaggaccgcctctaccggcgcggcggcacaccgccgatcccgtggagccagcggttccggatcgccgcggagatcgcgacggcgctgttgttcctgcaccagaccaagccggagccgctggtgcaccgggacctgaagccggccaacatcctgctggaccgcaactacgtgagcaagatcagcgacgtcgggctggcgcgcctcgtgccgccggcggtggcggacagcgtcacacagtaccggctaacggcgacggcgggcaccttctgctacatcgacccggagtaccagcagacgggcaagctcggggtcaagtcggacatctactccctcggagtgctgctgctgcaggtggtcaccgcgcgcccgcccatggggctcacgcatcacgtcgagaaggccatcgacgccggcaccttccaccagatgctcgacatcaccgtcaaggactggcctgtcgacgaggcgctcggattcgccaagctcgcgtctttaagttgtccacggtagatttcggcggtagggtaccggcctggaactcgccacc

SEQ ID NO: 39562 - DNA, 428 bp, Setaria italica
  Peptide Sequence Number=SeqID_105536
ttttttttttagttttttttttaaatttttttttacgttttttacttttttagttacgtaagtaatacaatacctacctaccaatctccaccctcttccttgtcaacataataatcagatcagggtgtagaggaacggatgtcaccgctaatggggtcggtgcatgacactaacatacagtttgaaagaagatacatatgctagttaataaaaatggtcaaagcatgatccctgtgatgtctatctttcgtactaaagaaaaaaatgtttgatgtatgtagcaggcatgaccccatgcctgctcatcatagcaagcatggcccagtgtcggtgtagatcttgccagatctgatcctccttggagccaacaatgggccatgtttgatgtatgtagcaggcatgacccccatgcctgctcatcatagaca

SEQ ID NO: 39563 - DNA, 700 bp, Setaria italica
  Peptide Sequence Number=SeqID_105537
actttaactacttttactagttccttaacaattagcagcaagatgttttattggaaaatggcagttgccatcttgttagtatgtgcgatatctccccctcaagtagtgactggtacttgtacggagactcagaaggcaagagtcatgttttactgtcatactttcaccaagaaaggatccactggcaacgttatacacatccacagtgactgttgtgtagcggtgagactggtgccgaacagcgacatgaaatgcgtcgtctccatgctaacagataaagagaaggaggaacacgatgaggaaaggatcttgtctcttgaatcgctttgcgagtatcatcctcctccatctccaccctcttccttgtcaacataataatcagatcagggtgtagaggaacggatgtcaccgctaatggggtcggtgcatgacactaacatacagtttgaaagaagatacatatgctagttaataaaaatggtcaaagcatgatccctgtgatgtctatctttcgtactaaagaaaaaaatgtttgatgtatgtagcaggcatgaggtcatgcctgctacatacatcaaacatggcccagtgtcggtgtagatcttgccagatctgatccttttgtagatattggagacattgttggctccaatatctacaaaaggatctggtgtcaattattattagtttggacaaaaaa

SEQ ID NO: 39564 - DNA, 376 bp, Setaria italica
  Peptide Sequence Number=SeqID_105538
cgcgagggttggtttgggtttggatctccttggtttcgggtcgagtcaggttgtcttggtccccgtccgcgcgccggctccccttgccggccgaatccccagctccgtctccaggtaaatcattgatcgcttggttcctcgctgattcgatccgacgcggctttccccggatccgtttggagacggccgttgctctcgggttattggaattaggggccgggggccgggtgtccggttcttcgtcgcgtaactgaggcgggtggttcaacgatcaaaagaaaggggacgggacgtgagaagaccttggttaccgagatggtgggaattttcacagcaatttagctggggtggtttgccacaagaaatgcttcaaggg

SEQ ID NO: 39565 - DNA, 507 bp, Setaria italica
  Peptide Sequence Number=SeqID_105539
tctccctcttcttagtagcactcatccgatccatccacttgtgcagataatgtatatgcatgggcgtcgtccctactttcaaggcaacctgcggaagggccgaaagagttcatatttgaggtgagatctttagaatcaatgtacaaaggaaagaaaaacgtgtagttttcatgacaagggctcagaatatacactccaatcaaagtgatagcttttaaaaaaatatatgttgcaagttatctaaaaaacttcttagctaggtcctggcttcttgctcacgcagggtatacgcgtaagattctttaatttggagtaaactcacgatagtttcaaggatatatcagaaccatcatcgttgtcatttgagcttcctgaatgcaatgcagtcatcacagattcagatgattgcccatcttcagtgaggacatttctgtatcagcagcaactaccgctgtgccagccgttggcacctgaggcacctgttttcagacgcatgttctcacctta

SEQ ID NO: 39566 - DNA, 617 bp, Setaria italica
  Peptide Sequence Number=SeqID_105540
caacaaatacaatgacatgaacaatgtagcacaggcagcaaatagtagaattttcagaacgaagataatgcatacaccattacaaatttagcatcgcaactttgaactgtagatagcagctctggttaaaccgatctcaagttttggcactgttccagtctccctcttcttagtagcactcatccgatccatccacttgtgcagataatgtatatgcatgggcgtcgtccctactttcaaggcaacgatagtttcaaggatatatcagaaccatcatcgttgtcatttgagcttcctgaatgcaatgcagtcatcacagattcagatgattgcccatcttcagtgaggacattttctgtatcagcagcaactaccgctgtgccagccgttggcacctgaggcacctgttttttcagacgcatgttctcaccttccagctgtgcacccttttgctgtaattcgctgatttgttccatgaataattggtcctttgtactaagcactctatgcagtcctgcttcaagttcctttccatttgatgcagttcatctacactcaatccctcaagctcctcacctctcatctgtctaagtccacgacttgcttctgcgagttgt

SEQ ID NO: 39567 - DNA, 800 bp, Setaria italica
  Peptide Sequence Number=SeqID_105541
gatggttctgatatatccttgaaactatcgttgccttgaaagtagggacgacgcccatgcaatgcagtcatcacagattcagatgattgcccatcttcagtgaggacattttctgtatcagcagcaactaccgctgtgccagccgttggcacctgaggcacctgttttttcagacgcatgttctcaccttccagctgtgcacccttttgctgtaattcgctgatttgttccatgaataattggtcctttgtactaagcactctatgcagtcctgcttcaagtttcctttccatttgatgcagttcatctacactcaatccctcaagctcctcacctctcatctgtctaagtccacgacttgcttctgcgagttgttcattcaaaccactgtacttgctctgctctacattcaaatcgataggaggctgctgatttgatttccccagattcttagaatgtgtactgtacttgtcaatgatatcattcatactggagctcgcgaactgcgagagcttgccggtggcggagaagacgatgagcgcgacgtcggcgtcgcatagcaccgccagctcctccgccttcttgaacagcccgcggcggcgcttggagaaggtcacctgccgcgccgccgcgttctctatccgccgtatctcccgcgccatctccccccgccgcagcctcctcctcctcctgctcctcctcctcgtccccaaaaaaaggccaggagaaatcccgtggattcgcaggggggaaaaaaaggcaccccaaaacgcgactcgcgccaatcggtcgtagggggt

SEQ ID NO: 39568 - DNA, 1150 bp, Setaria italica
  Peptide Sequence Number=SeqID_105542
ccttggacccaaacgggggccaaaaggaaatgtacaaacatcttacatgacaagatcaggatatctttgctaagtgacagcaaataatttaggatgaaactaggctatgcacaaacagaggttagagagaaaatgtaaacaccgcaaaattggactacaagtagttccttgaatagacaaatctgttggaagatgatactgtgatattcatctgtgctgtactatactatcaagactttctgtcatataactcacagcagctggagtgcttgctatacttcacgcaccacaggaaatgatcttctcagagctgtaaccgtagcaccagaattgtggtgccattttttcagtccacatgttgctttcttttgagccgtagatttacataccaatttgcaaggcagcgcagtatcaaccccacgagtatcttgaatatcgcgagcataaaataggtcagaactgaccaaagtaaaatccagaatactctccagataaacgggccagcgggaaggagggtagcatatactggagtcaatacacggattaccacacaagctggggcaaggggaatgaatgttaagtccttctgacggtcatcaggtttgtcattcaaaatctatagtgaaaattttcagcacaacgacattaatagtggtctagtgactaataaccaaatgtgttgaaattctaggcaactgaagttcaatgccacaaatgtttggtatgctcaactgtgcccaggacctggggagaaccaaaagacagaaggaactggaacattctgaaaactaatgttcaatgcatgccaatcatcagtccaaatggcaagtggactttttaagtaaatgcaccttaatacatataacgttttgcaaacactgctgttaggagattgtaataacgcggagtatcataagagaatcactgacaaagaattacaaaaaatccaggaggcaatgccgcaacagtacagcagtaataaagtcaccaaataaacttgaatatttcgtaattgtgtgcgtatatatgtttttaacttgataataatcaaaacacctagttctgttagatgatcgaatacctaattgttgcttagcatctattttaagtatcaaatggcacaaacccttaagcctgaaatacaagatag

SEQ ID NO: 39569 - DNA, 523 bp, Setaria italica
  Peptide Sequence Number=SeqID_105543
tcgttcttatctaaatgaagaagtccagtaatactccctccgccaacaccaagtcgtttggttttccagtgccaaaccacgccaacaaaatccagtgtcaggcagccactcgcagtcgcccactcgagagaaaggacgcgcgcgagagagagggaccccgatggcgagcgttgaagggaagggggaggacggtgctggtcacggcctcacgggcgccagcggcttcatcggctcgacgctcgtccgccacctcctcgaccgcggctacaacgtccacgccggcgtcctcaacccaggtcagaacgcaacaatgccatggttgtttgcttcggatgcggtggttatcaagtcaggcggtggcgtgcagatgacaaggcggagacggatcacctcctcgcgcttgccgccggcgccggcgagggccgcctcagcatcttccgttgcgacctcttcgacggcgcggcgctcctcgacgctgcgcggggctgcccgggagtttttcctattcttcgtccttccccct

SEQ ID NO: 39570 - DNA, 705 bp, Setaria italica
  Peptide Sequence Number=SeqID_105544
cggcccttctatgcctttggtcttggatctgcaagctacattaatggtgtcaggtactccaggcccagaaggatgaaggagtatgcagaatgggttcaggagttagaggatggaacatggagccataagtcgagaagctctgacatgaaggacatggcactggatgtggttatgctatcattgagaacagcttgggggcttgatttgcaaagtttcagtaaatcatttggaaaaagtctggcactatcactgtgtaacacatttaagccttttgtggagagtgggcttgtaattgccatggatatggagcgacaagccttgccacatattgattttgagttggacctgcaaaatgaaggtgattttggtagcagagttgcattcatccgtctcagtgacccagatggatttttgttgtccaatgagttgatttcacttgcttttggaattatctcgccgtaacatggttatacatttcagagtgatatagattcttttccatatgattgatttgatctgcccatattgaggtgtgatcattctactcttattggttgacattagctggttgctgagatgcatagcatacagtaaaatagtagtcctgactaaatcagttcatcaattgcacaaaccaatcaactggtttgctgacttcttgtggaaaactttctctttttcaatgtcaccctattcccaaaaaaa

SEQ ID NO: 39571 - DNA, 422 bp, Setaria italica
  Peptide Sequence Number=SeqID_105545
tatttatcttgtggcaagctgtactgcaatgtatgtactgtggaaataatgattgtgcagttcattctatatattcttatttcaagtaggcgctgtaggattacttttggctaatcagaaatattatattttttatctcctttttagtgagtgatggaaaatcaaaaccagtgaaaacttaactgcatagttaataccataaaataagagtggcagtgaatgtcaatgtccaagcgactggtattcaattgtctctaccttttctacatcacctttctcatgtatagaaagggctgcataatagatatgattagtgttttaatggatattctaccactaccaggcaattgctttcctcttgatacatttcttttattactattatatttagtatagatagatagatctagattgtggtaagc

SEQ ID NO: 39572 - DNA, 741 bp, Setaria italica
  misc_feature (13)..(13): n is a, c, g, or t
  Peptide Sequence Number=SeqID_105546
gtttttttttttnttttttttttttttgatttccagaaaattgctttcaagaatcgactattacagatatgcggcgtccattacagaatttgcacagcatatgacacagaagggctttctgaacggtgaaggatggaacggaaaaaactgtaacaacaaatgagcaccctcaacgctttgagaattggggccgcttgcgtgccttcttgagaccagccttcttccgttcaacaatacgggtgtctctcgtcagcaaaccttctgatctaagaggaaccttgttggcagtgctgatcttcactagcgcacgagcgacgccaaggcaaattgcctgggcctggcctgacagaccacccccatgaactttgacgaagacgtcatagttgttctcaaacccgagggtcaccaaggggaccttgcagtactccatccacattgggtttccctgcagatactccttagcatcgcggaagttgatgaagaccttgccggtgccctcctggagcacgacgcgggcgatggccgtcttgcggcggcccgtggcggtgatccgctgcgccgcgaagccgcccggcagccgctgcttcacgtacttccgcagcgcgacgcccgacagcgcatcctcctcggcctcctcctcgacggccaccacctcctccgcgggcaggtccgcctcggccggctcggcggcggaggcgcggagcgcgaggctgacggcgcggcgggaggtgcagggatggg

SEQ ID NO: 39573 - DNA, 637 bp, Setaria italica
  Peptide Sequence Number=SeqID_105547
cggatatcggcgctccaacacagccgtcgatcggggcgagccgacgcgggcggcgagggcacggccaggccagggcgcggcggcctgcgtccccgctgttcctttgctcacctccaggcgtagaggttagcggcaacgtcagcattgcacatcattaacttggagaaaacaaccgctcgcggtgatggcggccaccgaagagggagccgagagctccgccgccggcgagcgggagcacgtctccttcgctcggggcggcccggtgttcgttcccttcatggtgggcccccatctccaccgccccagggttcatgcactctgccctccaggagcttcagtccttggaagctgaattgggagaccctggtgacgaattcgacggtgagctttgcatcgatgagctgagggtgctcacccaggaggagctggtggagcacgccctccaggaggctatggaggatgactcgaattctagcactccaccacaaccagaggagcaaacgtgtgatgaagggatgtcagcgaatccaacccctagaaatgaggccctcacatcgagcccatcagctgaaagggagaactctagattgcctattgaggatactgcagtcatatcacacgaaccagaaagcagaca

SEQ ID NO: 39574 - DNA, 782 bp, Setaria italica
  Peptide Sequence Number=SeqID_105548
cccaaagcttgggttcaacgagtaccccgccgagccagccggattcagtgaggcgctggaggagtgttacgccaagctcaccgagctggggctgctcatccaggacatcctgaacgagtgcatgggcctgccgccggggttcctcagggactacaacggcgaccgcagcttcgacttcatggcggcgctgcgctacttcccggcgacagaggaggagagcaacggcatcagcgcgcacgaggacggcaactgcatcaccttcgtcatccaggacggcgtcgggggcctcgaggtcctcaaggacggcgactgggtcccggcggagcccgtccacggcagcatcatcgtcaacatagccgacgtcatacaggtcctgagcaacaacaagttgaagagcgcgacgcaccgggtggtgaggaagccggtgcacaggcactcgttcgcgttcttcttcaacatccacggcgacaagtggatcgagccgctgccggagttcacggccaagatcggcgaggcgccgcgatacagggggttcgtgtacagcgagtaccagcagctgcggatgaggaacaagacgcatccgccggccaggcccgaggatgtcgtccacatcacccactatgccatctagcctgaggaaatgggtttcgaacgcagaaataatgtacgacagcaacatggctatggtcatcttgccgcgcatatataagaaagtactttccttgagaaattgttctccggactaaaaaaaaaaaaaaaaacctagagactagccaacggac

SEQ ID NO: 39575 - DNA, 373 bp, Setaria italica
  Peptide Sequence Number=SeqID_105549
cggcggcggccggagtttttgtttttttatttttttcaaaatatgtttgccgagtgttttttgggacttggcgaagcttcgccgagtgcccgatgtatgacactcggcgaaacccctgtttgccgagggagagttcgccgagtctgtttcgccgagtgttacactcggcaaatgcgttgccgagtgtttttgggcattcgccgagtgcctggggcactcggcgaacttcctgtttccggtagtgcactctgcaatctgtgtccatgcacaaggatgaattggaaaaaaacacgagtcagtttttgcagcaaaagatcgagagtctaggcgtcgttcagtaagaaatgaaaacctttttccttacctgactttt

SEQ ID NO: 39576 - DNA, 974 bp, Setaria italica
  Peptide Sequence Number=SeqID_105550
ggtccggtagaatatatgaatcgtgcactttttccgcgatagactccgacacaagaaagtaatccaggcgccaacctttatttgttttacggccattatgcctgtacccccaataactatatccaacaacgttggggtgctgtttccgaaatgtgtcaacaaaccctttggacagaaaattggtctcaaatgattctctttcttcatttgtgaagccagcacttttacgatttcctgcaggatcatggatatcaatctcctgatgggcacagttaagatcaccggttagtatgacaggcttcgatttttccaattctttcatgtagttaccaagggatgggtcccactctgtgaccctgtaagtcagtcttcttagaccatcaccagaattcggcacataagcagttagtaagtagaagtcatcaaactcaacagtcacaaccctcccttcattatcatggtctggtacaccaagcccatacttgatagagaggggtttcactcgtgaaattattgctgttcctgaatagccaagctttgacacactgcatgtccagaaactatttgtgtacccatcaagcagagtatctttaataacttcaacatccttttcctgcattttcgtctcttgtaagcatagcacatcaaagtcctccctctccgctaactgctgcacagagaagcctcttgatttgagcaatgctttcaatccattgacattccatgacagaatcttcagagcccgtgtatccttacttagaggtgggggcctcatagtcttagggttgtacggaatccaaccggcttgtggtttcttatgtacaagtacagtccaaggctctgaatcatcattagcacctaatcctgccttaggaacagcaccttggacaacaagtgtttccttctggattgaagtcttatttatcttgacatttctcacagaattctcctcaagagtagtactctcgattgac

SEQ ID NO: 39577 - DNA, 537 bp, Setaria italica
  Peptide Sequence Number=SeqID_105551
aacgccttacaagatatcactgcataccatggcattctacgaaacacacaccgacatggaggctagctccaacaagagaagtcactgcttctctaccctacggatctgaggcggcgccggcgctctcctcttcctcctcttccgcgggggctctgacgcctccacctcctccgcggcctcgggctggaggtcgtggcacgccttcttcttcacggggtgcgcgcacggcggcttgccgcggccagtgccgaggcacacggcgaacttgcgctgcacgtaggcgtccaggtcgtagccagtccggtagaaggcctgggccccgacgcagtagcgggccacggcgagcgagccggcggtgacgatcgcgatgaagaacagcgcgccgaccaccggcccgtagttgccgccgtggtcgtggtgggactccgccatggcactcccaagtccatactgccccgacgacattttcaccaggacgacgacgatgccctacagcccgtacactacacgctctctctccgagagaagatggagggg

SEQ ID NO: 39578 - DNA, 899 bp, Setaria italica
  Peptide Sequence Number=SeqID_105552
cgttaattttttttttttttcctttcagatcagagattacattacatacaagatcttttttcagtgttcttattgtttccagcacgctaaagcactcgtaaatctagcacctctgcgctatcgaacagcaagacgcacgccgacatttacaagatcatcaccatcacaagcatcacgcacacacgcagagcaagaagcagatcgaagaaaatcgatgcggcagggagttggtcaaggcacatacatacagagcctgggagaaggctcgatcgatagatcgtcgcgagagctgcgccggcgtcacgtccgcgggaacacgccgagcatcttcccctttcccaggcactcggcgagcttcttggcgccgtcgacctccgccgtcatcaggccctgcaggaacccgcacgcgccggcggccaccatctgcttccggcaccgccgggactgtgccaccgccagcagcaccgtcacggggtaccgccggtcgacgccccgtgcgcccgccgggtcgaggagctggacggcgttcgcgatgccacgctcgtccttccggaacagcttccggcacgcgcccgacgcggcgaggagcgccgccagcgcgcgcgccgcggcgtcgcgctcggacacggccttggcctccagcatccacaccagccgcgggacggcgtcctccacctcgtgcctcgacttgccggcggagttgccgcagagctcggcgagcgccagggcggcctcggtgcgggtgggggaccggtcgctgcccagcgcggcggcgacgtgcgcggcgaattgggcggacacggcgatctcggcgatgtaacggaaggaggccatgttgcggaggagccccagcgccggcgcgaggcccggctcgtcgccgcggctggcgtcgaggaagt

SEQ ID NO: 39579 - DNA, 803 bp, Setaria italica
  misc_feature (9)..(9): n is a, c, g, or t
  Peptide Sequence Number=SeqID_105553
ttttttttntttttttttttattactgcaaagacaaaactacgcggccgtgtaaaaaggaacgtgatacttatggatctgaaagttgtacagttccacagatttgttccttgaggaaagtttacagcattttaggttgactgtacataagagggcaaaagcctacatagactcaggatatgctacagtattggccaactagtaagtacaaaagaggctgcattggctggagataacgtctactcaaagaagcttcaaaaccaccctagaacagccagtgcttcttcttggtcttgcgagtcaggagatcgtcaattccatataaggaattatagtgtacttcgcaccagaagcttagccaaagctctttcgtgggagtcagatccctggggactatttcaatcaagcaggtgtctctaaatgatgtcagcaaacagattttggcaccaaaccgatctgcggctgcttgtaaggtcagatgatctccccattccccagatcttttcattctcttcaaatacaccttatattccattggtacatagctttcatactgttttctgaattcctttagctgtttcatgacagcctttctcacatgtttgtgatagtcaggattgcgaaatatctggtctgccaaagctcggaactgacaattcccatccccctctatttgaaattcagccaaaccataagtacccaacctttccagcaatctttcgtgatccagtgttgcattatcaacattgggaattttccattaactcgggagtgtacggtattgaccccaaatgggacaagcgc

SEQ ID NO: 39580 - DNA, 427 bp, Setaria italica
  Peptide Sequence Number=SeqID_105554
gcctacgtgagccatgaaaccaagatggatgatgatatcacacgtttagctcttgcaataatctcatatctgcccacgttgtgaaaattggctgttaattgtgatttctacattttaaacagacgcaaatctgctacttgtcatgttagcatgactgcaaagtagtttgaacccaacaggaacaagcacatccatgcaccaggtagaccagttgcttagacatctcagatcttggcaaagtgccatcaagatacattgactgaacagagaatcatgaacgtatttagtccttgatttgccacttgccagaacctgtttgctcatccctgacagcaaccttcaaggcttggggtatctgtaccaacgatgcaagtatattcatcctgcattttcaatcttcaatatctgagttgttacaggtaggagg

SEQ ID NO: 39581 - DNA, 668 bp, Setaria italica
  Peptide Sequence Number=SeqID_105555
aaagaaacgaacaaaaataactaagaactaaacttaagtaacaatagttaagacaatagaactgcaaagtagtttgaacccaacaggaacaagcacatccatgcaccaggtagaccagttgcttagacatctcagatcttggcaaagtgccatcaagatacattgactgaacagagaatcatgaacgtatttagtccttgatttgccacttgccagaacctgtttgctcatccctgacagcaaccttcaaggcttggggtatctgtaccaaacgatgcaaagtatattcatcctgcattttcaatcttcaatatctgaggttgttacaggtagggaggtacaaaataactgtatctacccagcaaaactatctattatcatggtaactcttagttggcttcttcttgacaacttcattgattagtgaagtataagccccaaaatctgaaaccattcctttcgcattcttcagttcttcagcatctctaacttttccatacttgcaatgtccatccaaaagaatgttgtatgttatatcatctggggccaccccaatattaagcatcgcattcagaagcatgtccgcattcttcatctggcccaacctacagagcccattcataaccacattatatgtcacaactcccagttttcgacccttattctgc

SEQ ID NO: 39582 - DNA, 537 bp, Setaria italica
  Peptide Sequence Number=SeqID_105556
cttcagagtccattgagtttcaggtctcttttcactcaaggaaacatgcattcttgggcatcagtggttcagcgctgcatgtagttcttcaactctttgatttgtgctaacctccttgagcataggatcaagcctatgcaaacattgctacgttcttcttcctgcaccaggatggggaaatccttatgttatgcccataacattcttgaccttgcaaggccaaggcacagtgggctgggctggctgcaagctggggaagtttgttggctggtccgtgaaagtgagactcatctttgttgagtgtctgtccttctcagcttaatctctgttcaacatgcagaccagtagactatcttctgcatctatgtattgatcttttctaatgtctgttcaacatgcagaccagtatattatatcttctgcatctatggattgatcttttcctttgtgtgctgggaaaatgcgttttgtttctttccagctggtaaatccggcatgggtgcctgaaataacatgtatttgcatctgaaaaaaaaa

SEQ ID NO: 39583 - DNA, 1969 bp, Setaria italica
  misc_feature (1906)..(1969): n is a, c, g, or t
  Peptide Sequence Number=SeqID_105557
taaaaaagttaagtactaacgtacgtaccctaactaactaaccggtccaatgacgaggaacacgtttccgttttggagtctgacgagtgacgaccgaagcagcagacgaggtgattgaggagcagaaggaaacgacggctcccgtcccgttccgttcccgacgactcccgggagagacgagggcgaggccatggcctccaccaccggctccggccagcagcaatccccaagcccagcagcagcagatgctgacccgggagccggggcagagaagctcgtgttcgaggcgccgccgcagcccgtgagggaggactacgtccagaacgccgtcaagttcctctcccaccccaaggtcaagggctcccccgtcgtctacaggcggtccttcctcgagaagaagggcctcaccacccaggagatcgacgaggccttccgaagagtccctgatccgcaaccaagtgctactactgctactgcttcacaaccacagcagcaggccaacagccagaatcaatccactggggtgcagacatacgcaccagtgcagtctgtgctgcctggaaccgctggccctgttgtccttcgtacgcagcccaggttcagctggtaccaagcattccttgccgcagggctgttgcttggttttggtgctagtgctgctgtctttatcaagaaactgttcattcccaggctcaagtcttggatacgcagtgtcgtagcagaaggcgatgaaattcaaggcaaccaacccaaggccaagattgatgaggaaacggcagaggctgtaaaggcttctgcgtctgctgtttctgctattgctaaaacaaaccaacagctgcttgcttcaaaggatgaagagaagaagatactttcaacgttaacacaagctctagattcccaagccagggagttaaaatctttgagcgagtcactcaatcatagcagggaatccataaacattaccagggaggatagattttctcagtaccgcccactggaagagcatgcccctcctgctataaggaacgggccagttaacagttcatggagagcttctcagcaaactaacatgtatggtgcatcaaacggtgacttcggctccgggaggtcttcatttgcgccagcacctattgaacctactgctgggtcattttcaagatcatatgcggagacgatgtccactgcacaacgtggggataggtcttctggcagtaagccatgggagatgcagcagtattcacagcagaggcctggttatggatccaactctcagttgagtgatgatggatcatacactgatgcccaggacaactatcctccatcctatcaccagaatggaaaggcccctgattttcaagctgatgagcctaggcctttgacctacaacactgggattgaggaaagaccgccacctcagcgccgctggatgccccctcagcctccaggtgttgtcatgccagaagcagcagctgccatacgtcaaccaaagactcttcctaagcagccctcaagcgatgcctctgaggcagctggtgagatgcaggtgaacggtgcttcaagtgcatcggctgttgtcaccgaggtgcctgttaatggtgctggtgcaagtgatgctggacgtagcgagatcgaagaacaatcagtgaccatctaagtaaaagcgaggtttgccaagaacggagaagcaatctaagcaagatgcgggtacatctaggagtccgttatacatttctgaataacatctgaatcagaacaacggctcagtagcagaagatggataccagtaattcaataagttgcaaatagtttctatatttatgttaatgctactttgtacacaggaaaacatatcaataagatttcaatggctgtgcatttgggggttcttacacaataactaaaaaannnnnnnnnnnnnnnnnnnnnnnnnnnnnnnnnnnnnnnnnnnnnnnnnnnnnnnnnnnnnnnn

SEQ ID NO: 39584 - DNA, 600 bp, Setaria italica
  Peptide Sequence Number=SeqID_105558
tgcggtaattgtagtcaccacaagggactacaaattggcaagacattgttcgagggatggaaacgtgctcaaagttgaattcctgcaagacaattatgcatttgagctcttcaaaagaaaggtgtttaagaaggatgatgaacctttttcttcaagccctgatttgatggacgaagcgaaacttatcctaaagaagtgcggtggacttccccttgcaatatccgtgattggtagcttcttgtctgataagcctaaaaccagacttgaatggaggaagttgaattctaaattggggattagtgaaccgctacagacgatgagaaacatccttgttaggagctataatgatcttccttatcatctaaagtcttgttttctgtacatggccattttcccggaggactataacattaagcggaaacgcttgattaggttgtgggttgcagagggttactcaagggaaatgcaaaacctgactgcagaggaagttggagacgagtacttcgctgagctattggacagaagtatgattataccagttaaccaggtaacaaaggtaaacccaataagacaactagggaaaatttttacaatagtaga

SEQ ID NO: 39585 - DNA, 706 bp, Setaria italica
  Peptide Sequence Number=SeqID_105559
gataactcctcaaacttctcaaggtactcagccacagatccggctgacgcaaaacatccaatcgccttagctgagcctgatactgatttctgtcaaagcgatcaaacaccgcctcacagaaaacctcccaatcaacaatgcgacctcggcgctccaacgtttgaagccatgccgcggccgtgcccttgaaatttagagccgcaaaccttgtcttcaactggggactcaccggatacacctcgaaaaacatatcacagcggtcacgccatagccttgggttatccccatcaaaccgaggaaactcgagtttgggcagaggaggtgatttggccccaaatcacgagttcctggtgaactctcgaaaggaaacgaggttgaatcagggaacgtacccgtgaccgggcgcagcgggcaggatccaaggatccccccgcccacgtcccggtggaaggtgtcacgacggtgcccgtcgggccggctccggatacggcggagcaacattgagatcaatagaagcaccccaactgacgacggtggctgtagaggacgcagaggtggcggaggaggtgggggaggtacggcttcgagacgatgcagccgagtagaagtctcctccggtcttgttcaacagcgcactcaatgatgtgtcggtcgtcgattgcttggcttcaagaccactgatcttatctaatgattgctgcatcat

SEQ ID NO: 39586 - DNA, 264 bp, Setaria italica
  Peptide Sequence Number=SeqID_105560
atctcccatgtagccaccaccataaggaggaagaggataattaggagatccatatggtgcatatggcggcggcggtcctgcatacaaccagccaatgatatatggtagaggacctgcaccagcaggaatgaggatggtaccaatggtgcttcccgacggtcggctcggctatgtcctgcaacagcctggtggaatgccgcctccaccccacctacggaggggtgggcgaccggcgggagtggtggccagaggcggtgaaggagc

SEQ ID NO: 39587 - DNA, 323 bp, Setaria italica
  Peptide Sequence Number=SeqID_105561
cagcagcattcataactctagcaatttctgcacgatcaaagcaatttcgactgcatggcttggcagcagagtaccataagaaatcagctacagggatttcaccttctctccttatactttgtctctcaggatcaagaagtaccacaacttgttttttcttttgcatctttttagatatcctagcaggaacaccaattccccgtggcccatacataacatgacttgcaccagttacaacaacgagcatccctgaagggtcgccactagcaatttctttcagtattgtctgggacatggtataatcatcaactactcttgcctgc

SEQ ID NO: 39588 - DNA, 3983 bp, Setaria italica
  Peptide Sequence Number=SeqID_105562
cgttggaaaggcaaaggtggaaaacagctagtgcatcgggactggttactgattaaaaccataagcgatgccacacgaaacatcaggccacggcacaactctgaattcaagtgcatacaaggttctcacagacgacaaccacgatccttgccaaatgccaacatccagttttccatttgtttttgagttgaattttgcatgtaaaatgctctgtacaggtttcaaaattcttcgattgtctcctctgcgaatgtacaaacagtattcaccccataaagggtgcaaaaatggctttctggtcacaatgacgtcttcaaagctttgctcttcagaacttcaaatttgtcccttcacatgatgcaatggctaagcttcaatctagctctgagaacacttctcttctatatgcctgtatggctgtatgcctgtgtagtatacgtttagtcacggattaggtgctctgtgtgttgtatggccacagcaaactaggccattgtgcagtgactacgtcaagtcatttggttgcttattgctgtcatccacattctgtacatctgttgtgccacattctaggagtggcatttcggttgcattggaaacctcaggagaagctaactctttcttcgtactttgcacacctgtagctcgtgcaagatcaatccattgctgtgttccccagtatgaattaattatccttgaaacaaaggacagcaggctagcaagaagtggctggttatagtaggccatcagatgctctcctagtcgatgctcaatcagaccagctatgacctggtatcgcaggtttgctgatgttccaaggaagcaactataaacagttgctgatttccagatcggagatcttttgcgccccacttccatacttgcagaaggtttcagaatttggcgagcaccatataagacatctgaagcaactccagctccaatactagaaatgaatccaacaccggcaagtttaagaccgcccataagcactgatgcaaatctctgtttaatgctccaattctgccctacaatgcccttttgaaatgcattatctggcaatgttcctaaaagtcctttcagaagctccacactatcaccagagccatcatcggcaaaagacaagagcgaaatagtaggtgcaggaagccacactgtaaagaagtcaacaacagagcctctaattgtatcggtgagaacatagtcaatctcttcaaaaaaccgtcctttccgtttttcgtattgtgctagaagagttgtagttattgatatgccctcttcaatagctaacctatgcagaaacttgggatctgctagcaacctttcacggaaaccttggaatcggtgaatcaattcagccataacagggtatttctctaggtcaaaaaagttctgtaatatctcaggagaaactacaccaagatctattcctttctgaagatcctgaggtaaagcttcgcgcctcctaccagcagcattcataactctagcaatttctgcacgatcaaagcaatttcgactgcatggcttggcagcagagtaccataagaaatcagctacagggatttcaccttctctccttatactttgtctctcaggatcaagaagtaccacaacttgttttcgacgacatggataaggaggagggcgccggcgacgggcccgaggacgaggaggagaagaggaagtgggaggagctgctcgcgctgccgccgcacggctcggaggtcttcatcggcggcctgccccgtgacatcaccgaggaggacctccgcgagctgtgcgagccattgggagaaatctatgaggtgaggttgacgaaggataaggaaacaaaggagaacaaggggttcgcctttgtcaccttcaccgacaaggacgccgcgcagcgtgcgatcgaggacttgcaagacagggagtacaaggggaggactttgcgatgctcattgtcgcaggcaaagcacaggctatttgttgggaatgtgcccaaggggctgagtgaggaggagctgagaaacattatcaaggggaaggggccaggtgttgttaacattgagatgtttaaggatcagcatgacccaaaccgtaaccgtggcttcctctttgttgagtattataaccatgcctgcgcagactatgccaggcagaatctgtcatcaccaaacttcaaggttgatggaagccaattgactgtcagctgggctgaaccaaagggttcaacagatgcttcatctgcggcttctcaggtgaagactatatatgtgaagaacctacctgagaatgcttctaaagagaagattaaggagctgtttgacaaacatggagaggtcacaaaaatcgttctaccacctgccaaggctgggcataagagggattttggatttgttcattttgctgaaagatcaagcgccctgaaggcagttaaaggaagtgaaaaatatgaaattgatggtcaagtactggaagtatccatggccaaacctttggcagataagaaacctgatcattcacacaggcctggaggtggccctaattatcctcttcctccttatggtggtggctacatgggagatccatatggtgcatatggcggcggcggtcctgcatacaaccagccaatgatatatggtagaggacctgcaccagcaggaatgaggatggtaccaatggtgcttcccgacggtcggctcggctatgtcctgcaacagcctggtggaatgccgcctccacccccacctaggaggggtggcgaccggcgggatggtgccagaggcggtgaagggagccacagccggcgatatcgcccttattagcttttcccttgtgtgctctacctcatcgcgctgcatgatggatttgttaacttatgagacaagataggagcctgcgtttcatgttccagtataaggcctgcaatggcatgaggcttgtaccatctgttttttcggtaacttatttctatcatgcagtgcatgtggctgaaactttgtgttcgctttgtatcagttcctaccttctagcactttgtagtggtgaactgatgaactgtggactcctggttggagctttgttggcttagaatgcatgttttgctgcattcatgaacctgttggtataaactgataacaagtgtcagtattcaatccggttgggaggtcattctgtttgcatctttttagatatcctagcaggaacaccaattccccgtggcccatacataacatgacttgcaccagttacaacaacgagcatccctgaagggtcgccactagcaatttctttcagtattgtctgggacatggtataatcatcaactactcttgcctgcgctgataaatatgagcttggtccaaaaggggaaccacgagttgatgagatcttgtctatcaatgatcggcctgagatggatgtaaagccagaaatgaagcctgagccagctggaggagcatacatctttctttcagcttttgaaagacctctaattccttctgcttggacagttcttaccacctcaagtggagttccacatgcaacaagctttattccgttatcacggcagtaattcaaaagaggttcgtactcctgccatcgctccggtgcccagtgagatgtataaagccttaaattgtcgccattaattctcccatccatgaaccggttgagctgctcctggaggtcgcaggggaaggcctcgagcgcgagcgagatactcctcccagcctcggcgcatccggccgccagcttcctgacgatctcgagctcgagcgccctgtcgtcgcggtcgggcacgagctcggcctcgccgaggtacaccacccgggccgccatcagcttctcccacaccctccgccgcgcgtccttccccacggcctgcggctccccgatgaccgtggcgtcgtagaccctcgacagcgccggctcgtccgcgggaggcggaggcggggccggcgccgcgggcgccggcgtcgccggcggtggggccg

SEQ ID NO: 39589 - DNA, 706 bp, Setaria italica
  Peptide Sequence Number=SeqID_105563
ttggtcgtcctccagcttcgagaatgggtttttggtagcgacgtgaggctaaggttgacctcgcgcttggacgacttctcgaggttaaggatttttagacctagggtggcttccttataaagcttatatggtccgggttaggcaaaacaacctcgagggtgactgtccttttgggcgatccccaacacactcatatattacagtagagaagaactgtgcaatttaagcttaccctatctgcacagtcaaggagcctaccttttgttcatgggaaatcctgatctaatcttatttcagcttaagaagtgtgtttttgtcttctgaccacaatttgcctgttagagatatcgcccttgaaatgctttaccgagaaagtagtatctgaagattacaagcacggattgatctttaccgcaagtacctgaaagacagctcttcgctctgtaacctggaggacaaggaagaatagaactgtaccaagactacaagtggctgaggagttcgaggtgagcctgcggagccgctcggatctatttgacgaggcctgcgcgatctgccaggtggtctacgagcacgcgacgccccgcaacgaaggtcggcaagtgcgggttcgcgtggaaggtggccggtcgcgcgctatgcgagctctacattctgaagcacggcggcgaaagggtgacctgcctgcgctccgtcctcgaggacg

SEQ ID NO: 39590 - DNA, 396 bp, Setaria italica
  Peptide Sequence Number=SeqID_105564
ttaaattgtatttaaatgattaaagggacaacaggcaaaggaatctacaagctgtaaagatgaataggccaatatctgtcaatcatgattcatgagagccaaaaatgaaaagaaaaggaaaaaggaggcgataaggaagaatcaaacagaaagaacttcagcctaataatgaagattgtaaacggtagtagagaaagatagggcgcaatcagtcagaccagccatatgcagcactgttctgtactacaagcacccttgcaccatgaataacagaacaggtaaaagtgctgaactgacaccataccatcaagggagaaggggtacgaaaacctctgtatgattgcatcatctaatcatcatagtgaaactttttgtggttaatgtactctttctaag

SEQ ID NO: 39591 - DNA, 643 bp, Setaria italica
  Peptide Sequence Number=SeqID_105565
ttaaactggtttcttgtggacttagggtattgctctaattggacagggtgcaatggtaaaatacaaccaccatcagtaagtgaaattaaacagattcagcagctaagaccagtggactaaggaagaaggtatgatattaatcacctgagtgccttgaacgatattgccacttgctgcagccatccacaacagtggcaaaatagcgcactggcttgatgatcttgatgatcttaggattatgaatatggctagcagagtcatccccctgttttatcaccagtttctccttctgtggaatcaacatactcgttgccaggcttgtcagttgcgcgatcacgaatatctccttgttcttgtggtgctacttcatcctgcttgaacctcctaacacatccggacttgcgcttctttgcaccagttatctggccaccctgagatgggggtggtcgtaccgaactttccacctttgatgaaccattcgcaagctgatgctcgtcttgttggtcagtcaagctaacagacagaggagccccttgtgatggaaacccaactgaaactacacccgaactaccctgcaggacaagtagtaggagagccagtaataataggtaaacaaagaagacttagtttaggtaggaactta

SEQ ID NO: 39592 - DNA, 684 bp, Setaria italica
  Peptide Sequence Number=SeqID_105566
tagacaacaaaccggactagaaacacaatagcttcaatgtgtcgaggtggggttataacgaaggtgctgctcatagtattctataagcactaagggctccttagctttcaacagcttgtcatctacgagtacttcttttccatcagacctgtttatcatgatggtgggtagaaatattcagcaaagtgtataagagacacacatgtcaatgacaacataatggcactggagcaaacagaaacaaaaaccacatggcacacacaacaaaaacagaatacatgttgttctagtaaaaaatatatagaaccagaaaccacatggcacactcaacatcaacactgcaggataaaaacttcaacatgccataacaactagataggataattgttgccccatgataactgccagataatttatcttcgcccagttgtatataatgaatttatttgaaagacattttcaaagctgactgcaactatgaacaatagtcaaagaattgaatgatcacgcaatttatgccaagggacatggatgaactcgataccaatacttgatagtaagccacagcataaccatactgcataatttggaacatgtcaccatttgtcacttctattaaaattttggttccatgcttgaatacacagtagggtttcatgtgtaataaacaaatagtgagttcat

SEQ ID NO: 39593 - DNA, 1465 bp, Setaria italica
  misc_feature (1)..(67): n is a, c, g, or t
  Peptide Sequence Number=SeqID_105567
nnnnnnnnnnnnnnnnnnnnnnnnnnnnnnnnnnnnnnnnnnnnnnnnnnnnnnnnnnnnnnnnnnntagccgccgcagaggatccaattaactaacttcttagcatataatacacacaaaaacgtccgggttaaattgacataccataacatcacagtttactcgcactcagcgcaaggactatgacaagagtgccagactaacaatctactacccaattgagctacagatatatctagcacaaaaaaatgctacattaaatacatctccatccattccaaacataggggcacgcacaaccggctgaaacacaatagcttcaatgtgtcgaggtggggttataacgaaggtgctgctcatagtattctataagcactaagggctccttagctttcaacagcttgtcatctacgagtacttcttttccatcagacctgagtgccttgaacgatattgccacttgctgcacgccatccacaacagtggcaaaatagcgcactggcttgatgatcttgatgatcttaggattatgaatatggctagcagagtcatcccccttgtttttatcaccagtttctccttctgtggaatcaacatactcgttgccaggcttgtcagttgcgcgatcacgaatatctccttgttcttgtggtgctacttcatcctgcttgaacctcctaacacatccggacttgcgcttctttgcaccagttatctggccaccctgagatgggggtggtcgtaccgaactttccacctttgatgaaccattcgcaagctgatgctcgtcttgttggtcagtcaagctaacagacagaggagccccttgtgatggaaacccaactgaaactacacccgaactaccctcctggactactctttgcccaagcacattgactgatgcctcaagtccaccaaacaagctcttgttaccattattactggctctcctactacttgtcctgcagggcatttttttgggttctggggcatgatggcctgtcatggatcgggcctccgaccgaggtgggcgaccccgtttgccacgagaagggttaggatcggatgttgaagtagtagcagccttacgctttcgcttccgagaggaccttggcgaccgtgaccgcttatcaaaagcatcaacaatgtcggagcaggccttcaggttttcaaggggttcccatgtgttagcactctccggccacccacgccacttgacgaggtactggagctggcccttgcgcaggcggcggcgacggatggcctcgatctcgaagtagccctcggccagcttcggcgggtccacggcgtcctgcgccggcgtctccgcctcggcctcggcctcatcctcctcaccttccccctcctccgtctgctcctcttcctccccctcttcttcctcgccctcagtctgttcctccgcctcctcttcgtcctcctcgagagcctccgccagatcgccgg

SEQ ID NO: 39594 - DNA, 420 bp, Setaria italica
  misc_feature (419)..(420): n is a, c, g, or t
  Peptide Sequence Number=SeqID_105568
agatggagcaccggagcatgggggaaatagtttaaagactcgggtcaccgggtctgtctcagtctttgggcggtttcttagattggccatgttcctgatttccttttctttcttgcttctctctttttgtttccttgtgccgtggcgagacaggtgcaaggatatgatagtagtagatgatggcgagggcgagcgaggcgtaaagccgtgtgcgtgtggtgcgagagtgagtcgtgtgcgttcatccatgtttggtgaggtgaggttgatgttggtggtgtgtggagctagctagcgtatcattagcacatggaaagttggaaaggagaaaagaaagaaaagggaatgagttctcatgaagcaatctaactgaaggtgaagatttcatagaccaactgccaaggacacacagggatagnn

SEQ ID NO: 39595 - DNA, 843 bp, Setaria italica
  Peptide Sequence Number=SeqID_105569
cctacatggtcagaatgctatgtgtttggctctgcttgaatagaaccaggaactatccacagtttcacgccaattccatatcccctgcgcgtagacgaatgtattcccgttacatctgaatgatactcttccattatatatagtagacatgaattctttgcagtgacttgagaatcacttttgacgccattgctcaacgatttgtgtatggttcagtgcggactgcacatattagttgaggaacatacaacaacacgaatgcgtaggagtaccatgtgagctaaatttgaaccaaaagtttagaagtcgtattttgtccggccacttctcaagattaggcacagcatatcggataacttagaggttgagttgtagaaattccatgcctcaagcatcaatcgcttccttgaacctttgaaatggacaaccttaacatccaagggcataccatgaaactgtccagcaccctcaggtggagtccagttataaacagcacaaggcaagaagagaacagatgctccattaacttcacctgtaaatgcttcatgcttagaaaattttctgaaagctgatggtagatgagacttcacaacccatgccaatgctaattgatcgccaagcatgcgagaagccttcatatattttaagctgtaagcttcaaggacttgtttgaagaattccacagctttagtgatgccatccctcgtgcctcttatcgcaacaaacccagagttcaaaggttggcctttgttattacgaaaggtaagagccagatgacaaaagggatatttttgaatatatctccaagatcatcgaccactgctatatcagaatcagttaaaa

SEQ ID NO: 39596 - DNA, 994 bp, Setaria italica
  Peptide Sequence Number=SeqID_105570
aatgttacaggatagtcatgcttcggcgggtgtacttgaacgggagtctcaacatcttgttcagctaggttttgtacgtaatcaaaatcaacagctccaaattcatctagtggcaagttcaaatcgaatccgttgccatgctcgtcatcttcaggctcgttcaaatcaaatccagcattgcggtcgtcacctttcatgcttgttgggatccaagggaaggttgctgtcgtcatcatcctcatgtgagctaaatttgaaccaaaagtttagaagtcgtattttgtccggccacttctcaagattaggcacagcatatcggataacttagaggttgagttgtagaaattccatgcctcaagcatcaatcgcttccttgaacctttgaaatggacaaccatgaaactgtccagcaccctcaggtggagtccagttataaacagcacaaggcaagaagagaacagatgctccattaacttcacctgtaaatgcttcatgcttagaaaattttctgaaagctgatggtagatgagacttcacaacccatgccaatgctaattgatcgccaagcatgcgagaagccttcatatattttaagctgtaagcttcaaggacttgtttgaagaattccacagctttagtgatgccatccctcgtgcctcttatcgcaacaaacccagagttcaaaggttggcctttgttattacgaaaggtaagagccagatgacaaaagggatattttttgaatatatctccaagatcatcgaccactgctatatcagaatcagttaaacaaaatgattgaacccttccactctatcaagttccagaagcttttgctccagaaatgcaatgtatgacttgatcctttgaagcatcaaatttccccgagagtaatttccttcaataggcaatagtatagcactcccttgattttactgaaaattttgaatcaggatcagtcaatatgatcacattgcactactcacactgagtc

SEQ ID NO: 39597 - DNA, 1112 bp, Setaria italica
  Peptide Sequence Number=SeqID_105571
ggtcattatggtaaaacattagagtttcttgtgagcttaatctgggcccatactgtggctgcagagaggagattgcgcatggtgcatgcgtgtacgacggtgagagctcgaacgagaagtgttgcaggatcatggtcaagcccatcttggcctccagtaaggcgaagttctgaccgacacatatccggggcccccaaccgaatggaaagaatgccggcgcgtccttggatgccttggagacaccctccttgaacctctctggcctgaactcatcaacatcttctccccaaacctctggattgtggtggatgcacgcaattggaagtgcaaatgtaacaccaggtggatacttgacacctccaagctctgtttctagatacgtctcccgagcaagtatcagtagaggtgggtacagcctcaaaacctcatgtaatatcattgtaacaattttgagctgattaatgccctcagagtccagctggttcttcccaaagatgcgaagaacctcctcccttgcgcgatcttgccactcaggatggatgctcagaaccaccattgtccatgtgagcagcactgcggtagtctcctgtcctgcgaagtagaatagctttagctccccgattatgtcctctgtggtcataattggcttggcgctcccgatttcatggctttctttagtgttggactctagtagcaatcctagtagatcgtcattgttgagaccctccttcattgcccgctccctctttttgattatgcctttcagaagttcctcgacttcacgcgcgtttgcctgcatccttttgtttagccttgttggtaggaacctgtaagctgggatatgcatcttgcttgccatctgtgaagcattttgtgcctgctccgattgcaactggaagatccttctcccttcactgaagctgctcccgaacgccgcgcgggagatgacgtcgcctgtgagattttggaactccggccacacatctatctcctgcataccatcagacccgacagagtcctcccatctgcgtatcagctcactggaacaggcagcgaaagccggcaacatcctcttgagcttttcgagatggaaggcatggttgtaggttaga

SEQ ID NO: 39598 - DNA, 458 bp, Setaria italica
  Peptide Sequence Number=SeqID_105572
ggtataatggcatcctctcggcgaacatacctcccttcagtctgtgtcttcttttgatggcgagctagagcctttgctttttgtatacattcatcatattctccacaacgaaatgacttcacacgtttagacttctcgagattataccagtcaatgctgccgtcggggcggccgagtagcttgatgggcgtgccagcggagcgcggagggatgacggtgttctcgggcagctcatccatgccgaggatccggcccggccaccaggatccgttgcggcggcgcacccagacgagcgccccgacctcggcgtcccgccccgtcacgccgccgggccactcctcctcctctcccgcgcagctccccatcgccctgtatctctgcgaccccttatctcctcaccaccatcgcctcccatcccgctcctccccagactgatcaagtcaaggagcctccttttc

SEQ ID NO: 39599 - DNA, 415 bp, Setaria italica
  Peptide Sequence Number=SeqID_105573
cctcgctccccagtatcctagggctttggtgtcccactaaaattaaagattctgttatttcttagtagaaatatgaattatcgctatacatttggattaatagctgtatacacattagaagtgaagcattgggggaaaataaacatgtgcagtagttgaagactagtgaaagtcacatttactttattgggtgaaaaaactacttgcaatagtttcctcaccatggggatcctcacaggggcttgctcgtgcgagggccttcccttttgttaatttttggtgtgggataaggcggtgagtgcaggaattgtttgtgaggtgcatgttttgtgtggttggccatacaacttcatcagttcttaatgaatctgatcacaagccattcatcatatataggcatatgatatttatgttt

SEQ ID NO: 39600 - DNA, 443 bp, Setaria italica
  Peptide Sequence Number=SeqID_105574
gcaaggaaccaaaaccttgaatgtgtatactttggaggaaacaagaatagaattgcaggaattgcaatgcaaggaacaaaattcagaatcacccataagcgcatatcatcaagaaccctgatcagccagaagaacatatgacgatgacacgtttccagtacttatttcaagataaaccatatgaggaacaagctcaaggagtgtgagaggtttatacctttcacatgcactgctcactaatataagagataacagtgagatcaaacaagatagtccaaccctctcatcaactctttcaattaccaatattgacaagagtgaggaggaggatatcatcatctgcatcgcaagagcatccagtaaacatccataaccagagtaaatttttttgattattcatctatccaattggcttgctgccaatgaaatattcaaatcagatc

SEQ ID NO: 39601 - DNA, 947 bp, Setaria italica
  Peptide Sequence Number=SeqID_105575
tcttcttcagatctctcatgttctttgagaggagggggacaagtaactcgaccagaacagatatttgaattcctgccaatcatcactatttcaagcatccaaataaaacatgtgcaacccatgaggaaaccacaagcaagctacatcatctgtgcatcctagccaggtttcttcaggtcttcccggaggccgtcttccaaacatacaatctttccacaggatttctgcacccatgttccaaccagcgacaaggtcacgagtccctggaaatcttaatatttctgaaggacaacatcacagttagtatcaacgtcaccatggcgaagcaaaggtgctccaaggagtggccactaatgaagtaccggttcacactgtaaaccttcctgtcagcaaggccttcaaatcttgctagaaggtaaaagcctgtagcaaggaaccaaaaccttgaatgtgtatactttggaggaaacaagaatagaattgcaggaattgcaatgcaaggaacaaaattcagaatcacccataagcgcatatcatcaagaaccctttcacatgcactgctcactaatataagagataacagtgagatcaaacaagatagtccaaccctctcatcaactctttcaattaccaatattgacaagagtgaggaggaggatatcatcatcggcaacctgtcccatattaagcggtcatcatctggcttgaggtgatagtaagctgagccaaatgctgctgctgcattcccagcataaaagaggaaccatcccaaggcctcccacctcaagctgacgccgaagcacccgctgccgcagagacagaggatgaggcccgggaccccggcgagaaggagcgggtaggcggtgagcacgttgagcgtgttgggcacgccgaggaggttgcgcatgtcggcgaagaggtggagcgcgggggagtggcggagccgc

SEQ ID NO: 39602 - DNA, 738 bp, Setaria italica
  Peptide Sequence Number=SeqID_105576
gtatgtgcaactcatcttgcccatataatgtacagctgcaattctgatgccaaacctggtattcaagatcacgggcatggccgcagttgctcaggtacaactgtacaccagctgtcattgtattaacttgcttcgcatgaatgtgtcacttgcaggcttgcaactatgcatgaagctgctggatcttcagcattcctggaactgttatcgtgagctgacggggttgcaagaagctgctagatcttcagcatttccgaaaccgttgtcgtgagctgatggactgatggggccagtttattaagaccacatatttacttcacacctacctgacttttttttctgtcgactcgacagcaatacaaatcatgcaagcacactgaaactggtctcttcgtcagaccagaagtgacgcttctggtttcgatactgggggaaccgtctgctgttacttgcactgattgagccggaatcggatctactccctccgttccatattaccattcgttttgacttttttaaattcatagtttttgttatgcatctagatatatggtatatctagatacgtagtaaaaattatgtatataaaaaatttaaatgaatagtaatttgggacggaacgagtatcttgctagctctcctaatagtatctccaagagtgtccaataattttactcctaataagtcaggattgggagttgcccaaaatatattgggcagataaacatgccttcatcc

SEQ ID NO: 39603 - DNA, 317 bp, Setaria italica
  Peptide Sequence Number=SeqID_105577
agtgatgagtttgctcgttattcttctctcatgtggcttcgagatgtaccctactgcttttcctttaagacttaagcgcccgtgggcttcgggactgccatgtcaatggcggaggagtgatgagtttgctcgttattcttctctcatgtggcttcgagatggaaacagaggggcccagtctttgaacttccagtgcagcagcagccatctgctggtaagtatctggcttcagacccagcaatggataatctattctcggctgaagccatggtgacactccaaatccctggaagttcaaagactgggcccctctgttt

SEQ ID NO: 39604 - DNA, 2060 bp, Setaria italica
  misc_feature (1)..(9): n is a, c, g, or t
  Peptide Sequence Number=SeqID_105578
nnnnnnnnnacaggtttgaatggtttaggctccacatggaaccatcagttttagatatgatatatgtatatagctacagggctaggtcacctctacagtgagtgcctgcattcatacttccatagagcaattcttgcctgccatctagagcttaggctagggctatcgcatagctacaccagctatcataaaacatgtccattaccatagtgatacaatggatcatatctagctatactaacgactaggttattcctcgcgagcgaacgggactagagagaagaccacaggaaatgcggtgactagcggatggcaatcctgcgatgccaaattgctggtttggtttggattccggtcttcatctcagtagtctaggggaaccacaggtgcaatgctgccggtgaggttctgcatgctgtggcctgcagaatagtcatcgcaagccacactgctctgtagcatcgttgctccaggtgtagacagaaggtcgtccccgccacggaccatctgctgcacgtcttgtggcgagaggatctttatgcaccacacgctattcacaaactcctgccacgggtcgtcgccgacgagaagaatatcattttcccggtcgacgaatacaagctgccagcctgatcttacagggtcctccagttggccttcaagaccaaataatcgctcgagctcgctacgtaactcgtagtagctgctgaatctggtgatatcgagcgatctcccgagggaccctgatttgtaaaccttcacaaaggttccaccttgtgatgggttcacgccacaaacatcatcaagagaattgaaggttcctgattcacccaaacaactggaagttgctaaggagttttcaggtagcaaattcacatcactatatcttaatgaagctatggttatcgcatcagttccactgccaacaccaccactcctgacagttgtcatgccatcatggattgcaaatgatgaagaaagcaggtgactctgaacatttgtaccaagtgcctgggcactagaaccatctcttgctgatagtggtgccaatgtgccagaaatgtgagacacattactctggtgactcactttctcaagcttgtgctgcacagattgagcttcaagattagcaaggggttccacagccaacctttttgaaggccatccctctgatgccattaattggccacttcgaggcagattaagaaggtttgaggcttcttggctcgaaaagttctgaaaactgttttgcagatgcaaacctgggctgctgtttccttcaaacatgttctgctggtagaacgaggacacaggaagcaaagaagactgtgattgagaagcagatccagcctcagacatgctagaagctacattggtaatatcatgacaattagatgagaggtgctgttgcatatcctgatgagattgttgttgcagaacttgctgtgtttgctgctgctgctgtggtgctgactcctgctgcttttgcagctgcagctgctgtagctgactttgaaggaacccagagttgcctgtgttctggccataaccttgctgcacagcttgcaggggtggctgctgagattggaactgcatctgctgtagaacaggatttccatacagaggatctaatccaccattcaaattttgagcctgttggactggcaatagagaagatgtctgcttcaaatgatccccacctctaatttcttccagtgcagcagcagccatctgctggtaagtatctggcttcagacccagcaatggataatctattctcggctgaagccatggtgacactccaaatccctggaagttcaaagactgggcccctctgtttccatctcgaagccacatgagagaagaataacgagcaaactcatcactcctcccgccattgaacatgggcagtcccgaagcccacgggcgcttaagtcttaaaggaaaagcagtagggtacatcggaaaggttgtcaatggctcaatctcccagagtgaaacccttggttgcttatcaccagctgtagactcatcccaaccaaccttcacagaacgccagt

SEQ ID NO: 39605 - DNA, 1159 bp, Setaria italica
  Peptide Sequence Number=SeqID_105579
acaagaattgagcacaatgggttacataacatatactataaggggtacatggcgaagtctgaaacagtgaaactcacagacgtatatacatagcgcagacacaaacacttaacactcggattatttattcgacgacaccgttcagcaaagctccggtcacagcttaacccagctcgacatggcacacgtaacattagtaagctccagctctgttctgctcttaccccggcttctcacctgccatcaggggtaggagagcctggagctggggatgtagatcctggcccagaggtgcttgcctttgatcatgaacttggctgtctgccgcccatccagcaccactgggatcatcgccgcgctgcgcaggatcacccgcccgtacaccggctgctgccccggcgccaccttctcaaccatcaccgtttccacgcaaggcccaaacaccgagtcgaagaactccatgatatcctccctgctgatggggtagcctttggagaaggtgatgaagagggatcggtagtcgtccggtaatgggctttgcatcgggatccatggggcttccatcaatgggctttgcatcgggatccatggggtcgccatggggttcagtgggaaggatgctgccattgggtttagtggcaagggtgccaccctcggggtggtatggataggggagcttaccatcggtggggcaacaggcacaccggctgtgttgttgggcatgcaagtggtgctgttgttgacattgcaaacggcgaggcaaacactcctgtaatagtgggtgacgccatccaagatctcgcgatgactttggaagtaacccgcatcgtcgatgggctctgttaggagcgcgtttgtgcagggtaggcgcttgccgcgtccatcttcaacatcagccgtggccgcctggcattggccagcaagacagcgaaggcatgcgactgcctcctcaacgaaccgtagcacaacggggcctggcagcgccgcgacacggcggatgaagttgtggtggccaacggactcgagccagagccaaagcgcgatcacccacctcatggccgctgggtcttgggcgaggtcgtgcactaggcggtggaacaagtcgctctcgagcttgtggaagaggagtagcttctccatggtggtcatgctggccatg

SEQ ID NO: 39606 - DNA, 565 bp, Setaria italica
  Peptide Sequence Number=SeqID_105580
tcagccagcgtgaaaacgactaggtgctccaagatccagcaggaaatgagggatctagaaggtgtgaagttgaagttccagctagtcagaagacgtgtatatgcgctagcctaaccaggctccaataccgacgagaagatccggactccagagattttgacgggaactccaacaactccaacaagaagctagggccctagtcaacctaggaaaatgcactgaggatttttaatcaaagtctaggacttatatggtgctctaaattcattcttgaggaatgggtatctgcaccgctctccgttgcgtaaggtaatcagcgggaccttcagagtaaggtccacacaccagatgtccgcagcaagaaactcctcgaccaggtcaggtccggtaataactgagcaagcgaggacaaaagcatcctcgcaagtcctaaagctctttttccttttgaaattaggaactgtaacgatgctcagaggagacatagtgctataaaaaggataaaaatctgcgctaccaaagtctgaggcatatcaattgtaacgtagagctagtaagaaagcca

SEQ ID NO: 39607 - DNA, 320 bp, Setaria italica
  Peptide Sequence Number=SeqID_105581
taagaacggaacgtgcggcgtattcatctctgatgcgttggagcagacgcgcgcgaatgatgcagccatcgcgccagatcgacgcgatttggcccatatcgacctcccagttgtactcggcggccgccgtacgaatctcgtcgagaccttgtgcgtaggccaccaccttcgccgaccatagggcatcacgaacatcggtaaggaaggtttgccggtcctcaacagtgatggtgtgctccggccccgcaaggacgtgctgaccgaccgtgcgcagcggcacggcgctggaaacggaatcgggcgaagaccgcctcgctgat

SEQ ID NO: 39608 - DNA, 413 bp, Setaria italica
  Peptide Sequence Number=SeqID_105582
accccctagagccggtgcttcttgcaccatgccaacggagcccaccgccgttgcaaaagaagcagcggcgaccgaactgccgcctgtgcccagcacagagccgcctgtgatccgggagcaggaccggctgatgcccgtagccaacgtgtcccgcatcatgcgccgcgggctccctccccacgccaagatctccgacgacgccaaggaggtgatccaggactgcgtgtccgagttcatcagcttcgtcaccggcgaggcgaacgagcggtgccacaccgagcaccgcaagaccgtcaccgccgaggacctcgtgtgggccctggaccgcctcggcttcgacgactacgtcgggcccctcaacgccttcctccagcgcatgcgcgagatcgaggcggcggcgacggcggccgcgg

SEQ ID NO: 39609 - DNA, 1461 bp, Setaria italica
  misc_feature (1408)..(1461): n is a, c, g, or t
  Peptide Sequence Number=SeqID_105583
ggcaatcacctctcatgttgtcctaaaaacgaagacctgaaagtgtggaatcaaaaaaatcggaagtatttgattcatgggagtggatcgaacgagaatatgtgctcgttccaatgaactgtacttccatggagatgtattcttcagtcgagaagtctgcaaaggatgatacatgtacaagaaatgctggctatgataggaccactggcaaaggttctgttcagaatcaaaacagagactttatccacagagttattggtgtgcaaaaccatggatgcactctggtgcctgtttcccaggagtcagccaatgcagaagatagaagagcaaagccacctgattgttttacaaggcttcatatgctgaatcaatatgttcttgttcttacggaacttgctcgggaaaagctttctaaggggctgtacctggaggcattgtcaattgaacttgtattattagctatctggaaagaggcacttgatgcgtgtagcttattcatggatgcatcagatgatggaaatttctctgaatcttctccagaacatttcctgcctaagagtgaccattcatctctgaatgtggcgcgaggactggacttcagtagaccagcttctgtccgttcgtgggttgaaagtggattcatgaaagcatatgatcgtgcggagaagatatcacatatattgcggaagagttatgataacactgaaatgccagatgcaatggatgtcatatttcaaactgctttagaatatgggaaaagtggtgccgcgaatgaagttttggggcaccgaagtagatcgacggcgctttactcaaaatctatcatcttgctcacatttatattgcaggaagctcctatgttgccactaaatccaccattttccatttcaccatcagaacagcagcgcatccatagctacatagctaatttgaagagccatctctgcactgctcaggttgcggggcaacagcagagatcagctcataactaatttagtatttattacttgggaaacctctctgcacaaggattgaaagattaattgtcgtggcgaagctttgtcctccactgtttttatctataggaggtgttcagtgcattggtggcgtctgatgacaggaactctgtataatattatatgtgctgaacaccatggtccatcggacccttcttttgtatatataccacttgttaaagctctatggtcgccccttttcatatgttgaggtgaccttaaaacttgtaaaggcttcgcgcaaactgtaaatagtaaacctttctttaactgcagtctccttttcaaagtttggagctccgaatggacatctgtaaccgaatggttgaattacccaaaaaaaaaaaaaaaatgtttaaagttttatttttctttttttgttttaaaaaaannnnnnnnnnnnnnnnnnnnnnnnnnnnnnnnnnnnnnnnnnnnnnnnnnnnnn

SEQ ID NO: 39610 - DNA, 289 bp, Setaria italica
  Peptide Sequence Number=SeqID_105584
gggaagctctcacccttgcttgcttatccttggagcaagaggctgcaaaaggagagccaagcaaattgtctactgaaggaaaaggtcctgccatgggttccaaggatgacgcgccaacatgggcggaccagtggggctccggcgacgacgggagcagcaacggcaaggcggacgatagcaagaagacggtggccggcaacgtgaaggcggcggcttcggaggggttcgtgaaggccaaggcggcggcgctggtgggggcgagcaaggtcaagtccgggacgagcagcgg

SEQ ID NO: 39611 - DNA, 565 bp, Setaria italica
  Peptide Sequence Number=SeqID_105585
gggggagggaggagaaggtggtggcctggcaggtggttcaaactattatttatgtcaagtatccttcacaattgtagattataagttagcgaagaaactaaacttagccaacaagatgctataatttgattactctcaattctaaactgaagttcccacatgagcaggtagatacaaggagcaatgataaataaccatgaaagataagggatgttcattgcagctgagcagaagggcaacaaattttcactgcaaaaaaatttctgcagattcaaatactcaccatcagctccactaaaccacatatgaattatgtgggtgattatatctgatacatgacgcaatgagactataagaggtgatctgcactaacaacttatcactataagagtaaccaaaaccaaataacagcatcgtcgcacgagactgctagtatgtggcaggtaaaaaaaatagcagtcatcattttaggttgtgcacctactgcgtagttcgaacaccttttcctgaaatgcaattacaaatcaccatctagtgagttcatctgtctgccaagctcttcatc

SEQ ID NO: 39612 - DNA, 320 bp, Setaria italica
  Peptide Sequence Number=SeqID_105586
ttcttgttacacctgccagaatgttcagactctgaagaccctgcccctcatggatgtctctcttcaaaagtaggcataaacaaagatccgccactcatccgaatcaaaacagaaattagcaatcgtcgctatacctgaggcccatagacagcctacaagtcatattgcctggtcaaatcatgtataatccttgcaggaatgcttagtcgcaatatagtctaaatcacggagtcagcaccagcagtgaacaaccaaggttgttttggatggaacttgcagtccaaaacccctcttccatctgaactagaatggccacgaag

SEQ ID NO: 39613 - DNA, 226 bp, Setaria italica
  Peptide Sequence Number=SeqID_105587
atatggatcaacattggcatgtggagtccttccctttaataatctactaattatcttagcctcttcctttgtaatctgaacctcctcatcattatactcatcatagatctttctccaattcttggcgtcatccgcgttcctgaggtaggcttcgatgcggccctccctatcgcgcttcttgatcttcctcccatcaatgtcgtacccaatgtgctcctcgtccttg

SEQ ID NO: 39614 - DNA, 240 bp, Setaria italica
  Peptide Sequence Number=SeqID_105588
ctaagcgggttgaagagttgatagaaaagatgcaagacaactcagtaaaacctgagagtcctatacgcattgatgagcatttaactcctttgaacctgaggtgcattgagcgattgtacggtgatcatggtctggatgtgatggatgttcttcgcaaaaatgctagtgttgcattgccagttatcctaactaggctcaaactttgttgaaatctgatcggcaccttgaccactcttcctg

SEQ ID NO: 39615 - DNA, 345 bp, Setaria italica
  Peptide Sequence Number=SeqID_105589
ggcctggcagtttacggaaaggatggtgcgagtgctttttcgtgagctgatgcaacaatacagctcttgtatcacgtacaaaggaattaaggtgtacaagggaaattaaagttatgatatcattgacccacaatattaaatctgaccaatgtgaacataactaaaagtagagaggggtcacacttacaaagaaaaaaaagagaacagatcggaataaaacaaaatcagtaagacatcactcataaaggatatcacttggcacaactgtggtgaagtaatctcccttaaaaatgccagtccacatttgacacagccttatgatgaatcatcatgattccatcaagt

SEQ ID NO: 39616 - DNA, 439 bp, Setaria italica
  misc_feature (74)..(74): n is a, c, g, or t
  Peptide Sequence Number=SeqID_105590
tcatatagctcggcaatcatcctcaaacttggtgttgtcagaagaaccatcgagcaagttgtacagcgcagtcntaaacttcgcatataggttaggcgggtttgtatccttggaagtcctccatttcttttccgcagtaaaagagttgttttttgctgaaaggagtctctcatataagatctgatgtagcctgaacaagacataaaacgaatcatttccataaaatatacgtgaggacttctcatctcgatcatgcaaagctgtaggtacacgctttctgcactcagttaaaccacttgccaagcatgtacctacagctttgcatgatcgagatgagaagtcctcacgaatcatttttattggtaaattgtatttcgtttttattgttcttttgttttctaggctacatcagatcttatatgagagactcctttcagca

SEQ ID NO: 39617 - DNA, 711 bp, Setaria italica
  misc_feature (669)..(669): n is a, c, g, or t
  Peptide Sequence Number=SeqID_105591
agccttatgatgaatcaaggtgattccatccagtttttcgtgcttcatccacctcacagctggtttcttaccatcagtatcatcttgaggaaccatttcgccaatttgcaggagctcttttgccctaatttgcacttcttcactccccaccccagcattaataagtagcaggtcatgttctacaatagcagcaagaataggcctgtcaggtgcagggattacaggcaatatgacagacatcacctccgacattccaaactttaagacagcgaccagtttcaacctcccaaacacgaattgtaccatcggaagaaccagatgcaagccactgcccagtcatttcaactgaaactgatttcacaggaccctcatggcccttgaactcaaggtaacaagtttttgggtatggcctcaaatcctttttacttggtaacttgggcttgagtgactcaggatcaatatttatacgctttttgcgggttctagggcatagatacagatctagacatcgatcaaaaccttccctcagtgccttctcatatgcaggtacacttcgaagggactcaaatcgtttggaataaactttggacgatcctcctcatacataagctggtatgaatctatttcctcttgcgtgggaatgtattcaacagaaggattatatgactnttcatgacctggtaaattaggtttaggagctggaatgtagct

SEQ ID NO: 39618 - DNA, 2415 bp, Setaria italica
  Peptide Sequence Number=SeqID_105592
ttggggtaaagatctgagctttggtacagcatggcaaacagtgtttagtattacaagcagattcatggtacaaattcagcgatgatattagttttacatctgctagattcagcttccacacgactttgaagaatatacccttagaccacctaaacagcttctggaacggttgatgccccaggcttggaaaactttcaaatgctgtcccaaacactaacattgactttgggacagttcaaaatattgttttcgtattactgttaccagctacaggtgttcctcttcaaagctaccccccgccccctccatttcaacatttctcttctcttcaaatataagatccaccagtcaacggaatcaaaactgctatgaagctgatggcttcacacacgtgcaccgtccgccacattgtccaggattcagttagggacttgatactggaatatagcaatcatcaccatacagaggcccaacgactggctgaccatcatattgcctggcaaaacaggtatcatccttgcaggaatgcttagtcgcagtacagtctaatcacagagtcagcaccagcggtgaacaaccaaggttgttttggatggaacttgcagtccaaaaccccttgtccatctgaactagaatggccacgaagaatttccaatggtacaataagtgggttctggttaagatcagaatagaccattccatgacatacataggcagtacaatcctcagaggatgaggcaaaaagagggtactttcggtgaaaagtaacattggtaatatccttcgagtggaccttcatagtcttgtatggtctcgtagatagatcagtatcaaaccagcatagtttgccatctttgcttcccacaataacattatcaccaccaggatggattgagattgaggaaatctcacggagacctgactccagcttctttaccaactgtgccttttggagatcataaacctgaacaaacttcttagtagcaacgaagaacatcttctgacttggatggaatgtagcagcaactggaaggcctggcagtttacggaaaggatggtgcgagtgctttttcgtgagctgatgcaacaatacagctcttgtatcaccacttggcacaactgtggtgaagtaatctcccttacaatgccagtccacatttgacacagccttatgatgaatcatcatgattccatcaagtttttcatgtttcatccacctcacagctggtttcttatcatcagtatcatcttgaggagccatttcacctatcttgaggagttcttttgccttcatttgcgcttcttcactccccacctcagcattaataagtagcaggtcatgtccaacaatagcagcaagaataggcctgtcaggtgatggattccaggcaatatgatggacatcacctccgacattccaaactttaacacagcgaccagtttcaacctcccaaacacgaattgtaccatcgcaagaaccagatgcaagccactgccctgttatttcaactgaaatggatttcacacgactcgtatggcccttgaactcaaggtaacaagtttttgggtatggcctcaaatcctttttactcggtaattttggcttgagtgactcaggatcaatatttatacgctttttgcgggctctagggcatagataaagatcaagacaccgatcaaaaccttccctcagtgccttctcatatgcaggtacactccgaagggactcaaatcgttttggaatgaacttcggacgatcctcctcatacataagctggtatgaatctatttcctcttgtgtgggaatgtattcaacagaaggattatatgactcttcatgaccaggtaaattaggtttaggagcaggaatgtagctcaagccatgccgcttattctctgctgtatcattttcatctccccataacagatataagttagattcctcctttggcttgtcaaactttatccatccattacgaatagccctcacaagtttaacaaccttcttctgctcccactttgaaggcacaaatcgcctctttggctcaggggcactagaaagcggatggcctttatcctcgtattcaaaccaatcaacataatccggatatggatcaacattagcatgtggagtctttccctttaacaatctactaattatcttagcctcttcctttgtaatctgaacctcctcgtcgttatactcatcatagatctttctccaattcttggcatcatcagcgttcctgaggtatgcttcaatgcgcccctccctatcacgtttcttgatcttcctcccatcaatgtcatacccaatgtgctcctcctccttgtaccactccagaggcacgtcccccacggtgttccttggagccacctcatcctccgaagagtcgctctcttccgccgccgccg

SEQ ID NO: 39619 - DNA, 3437 bp, Setaria italica
  Peptide Sequence Number=SeqID_105593
gcctgaagcttaccgagaattcttgaactgccttcacatatacagccaagaaattattacaagaagtgaattgaaaagattggtaaaggagccgcttcagcactacccggatcttgtgaatggattcagtgaattcttggaacactgtgaaaacatagatggctttctggaaggaatcttaaaagaaaggcaaacatcacggacagttaaaactgtggaaagagagggagacaaggaggggcatggagatcctgagaaagagagatataaggaaagaggaagacctgaaaaagtatcgccattcaattctaaggaaggagctagtaacaaagctactgcattccctagcaaagaaaaatataacctgtgcaaaccaatatcagagcttgatctgtcaaactgtcagcggtgcactccaagttaccgacttttgcctgaaaatcatccaatgcctcctgcgagcaacctgactgacattggagctgaagtgctgaatgatctctgggtatcagtgacctcgggaagtgaagattattcgtttaagcacatgcgcaaaaatcagtatgaagaaagcttgtttagatgtgaagatgacaggtttgagctggacatgctgttggaatccgttaatgcggcaattaagcgtgttgaggagttggtagaaaagatggacaaatcacttaaaccagacagctctatccacatcgatgaacatttgacttctttgaatatgaggtgcattgagcggctatatggggaccatggacttgatgtcgtggatgttcttcgcaaaaatgctgatgtggcattgccagttattttaaccaggcttaaacaaaagcaggaggaatggtcaaggtgccagtcagattttaataaagtttgggctgaaatatatgcaaaaaattatcacaagtctcttgaccatcgtagtttctatttcaaacaacaagatgcaaagaatctgaacgcaaaagttctattggctgagattaaagaaatcaatgagaagaaaaggaagggggatgatgtgctacttgctgttgctgctggcaataggcggcctatagttcccaacatgtcatttgagtatgtagattcagacattcacgaagatctttaccagatcatcaaatactcttgtggagaactctgcagttcttcagatcaagttgacaaagtgatgagaatctggacaacatttttggagcctatattgggcgttcagcatcgagattatggcactgaagatactggtatggtaaaagcaaagagccgaatcagaaaagttggtttggcatttggtgagacaagaaataatgcatcaacaaatggtacagttgctgttaagcctgccaatggtgatgaaaacattctaaaggaacatgtacaaccttctcgtgctatatttgtcaatgaagctacaggagatgctcaagatgattcccatgaagctgaggaagctttcggcagaggcgaagacctaccaaatgctgaacggcatagaagagtacgaaacaccagtcctgcagctgacaaagtagctgcattaactgcacaaaacatctccaccaaaggatcagtggggaacactgatctttctccaagcgagaaaaatcagggtagagcaaatatggaccttgtagcaggtagtacttcctctactggagctaaggctgtggttgaatttaagggtgggaatgaaacaattccgtttatagggaacagggaagctgggaggatcacatctttgtatagagtgggtgttaatccatttaatgaatattctgggtctcacaacaatttaaagcctgaaagagaagagggtgaattatctcctaatggtgattttgaagaggaaaactttggtattttccaagttgaagcttcaaatggaacttctaaactaaaggaaggttcagccagcagacctctacagggtagacataaggaagttgtcaagttcaccagcgagaatcatgctgatgcagatgatgaagctgatgagagtgcccagcggtctacagaggatagtgagaatgcatctgaggctggtgaagatgcctctggcagtgaatatggtggtggcgaggagttttctcgtgaagatcatgaggaagaagaggatgacatggaccctgatactaaggcccaaagtgagggtggggcagagattacagaggcgcaagatctggatgtaggaatatcgctgccattttcagaacgtttgcacagtactgttaaaccactttacaagtatgtcgccgccacactacaaaaccatgaagataaagttacaagtgtgttttatggaaatgattcgttttatgttctgttcaggctacatcagatcttatatgagagaatattgtcagctaagacaaactcttccacatcagaaaagaagtggaaggcttcaaaggatgcaaattctccaaatcaatattcaaagtttatcagtgcactatacagcttgcttgatggttcttctgacagcaccaaatttgaagatgactgccgctccatcattgggactcaatcatacgttctctttactttagataaactgatattcaaagttgtgaagcagcttcaagtaatagcatctgatgaaatggacaacaagcttctccagctttatttgtatgaaaagtccaggtctcctgggaggttccttgatctggtatatcatgaaaatgcacgtgtcctcctccatgatgagagcatatatcggtttgaatgccattcaaatcctacaagattatctgttcagctcatggagtatgggaatgaaaaacctgaagtgactgctgtctcatatgatccaaccttttcacaatatctttataatgattatctgccaagtagttcagataccaaattggctgatgatgtcttccttaggaggaataagcggaagcaagggagaaatgatgattccccagcttctctgaagaccatggacaatgtcatgttttccaatggtcttgaatgcaagatatcttgcaaaacctcgaaggtttcctatgtccttgatactgaggatttcttattccgtgtgagaaagaggaggagagctccttctagtggaaccatgcctgcaaaggcaaattttgtgaaagcttacactgtaaaatcacaagaatttcatagatttctctccaggccgtagggtcttgtagcagaattatggtaattgtaatggcatgtacagttggggagtcttatgagtacagtagttggaggaagggaaaataggcattgtggtctttgaactcggatgattaagttcaagttcgtccctcaattttcagattgaccaatttagttcctcaactttcatgttttgtcaacctcatccttatgttgatgtggtgcttcaaattagcatgagactagtgctaatttgaagcacctcatccttatgttgatgtggt

SEQ ID NO: 39620 - DNA, 4878 bp, Setaria italica
  Peptide Sequence Number=SeqID_105594
ctcgagggaggaatcggctcgcgcgcgtgggtgaggaggagggcgtggaggtggaggagcagggaggccggtgcatgggggcatgaagcgcggcgccagggacgacgcgctcatggggtcacagctcaagcgacccaacctcgcccgatccgatccggcggcacagccgcagcacatgcctctgcccggttcagcgtcggcggccgcgccgccgcctcaggctggtgctgctccaccagcgcagtcgcagcaggcggcgggtgctgcctcggccaaccagaagctgacgaccaacgacgcgctcgtctacctcaaggccgtcaaggataagttccaggacaagcgggagaagtacgaggagttcctcgaggtcatgcgcgacttcaagagcgagaggatcgacaccaatggagtgattatacgtgtcaaaacccttttcaacgggtaccctgagctgatccttgggttcaacgccttcctgcccaagggctatgcgatcaagctacaggaggagaagaagcctgtagattttgtggaagcaatcaattttgtgaacaagataaagaatcggtttcagcacgatgagcaagtttacaaggcattcttggacattctcaacatgtaccgcaaggataataagtccatccaagacgtttaccaggaggttgctcagctgttcgctgaacataaagatttgcttgaagaattccagcacttcctgcctgatacctcagtggctccacaagcagtggcatcttcaaggggtggtttggttaagcgggaggacaggggctctctagtgcctcctgccaataggacccttcacggtgataagagggacagagcttatctgtcacatgccgaccgtgacttcagtgttgaccgtcctgatgtggagcatgatcgccagagaagacgtcttgataaagaaaaagaacggaaggttgaaagggatagaagagattatgagagagaagacaaggatggtgaacatgacagcagagagctggagattggacagcgtaagcgaaagccttttccaaggaagatggaggatactgcaggtgctgagacacaccaaggaggccccagtgagaatcatggaatacatagcatatctgcttcatcgtacgacgataaggatgcgctgaagagcgtatacacacacgagttccatttctgtgagaaagtgaaggaaaagctggagcatgatgcttaccaggagtttttgaaatgtctacacatctacagccaagagattatcacgagaagtgaactgaagaacttggtgaatgatatactccaacattatccagaacttatggaagggtttaatgaattcttggagcattgtgaaaatatagatggatttcttgctggagtcttcaataaaaggccaactgcaagaattaaaacggaggataaggagaaggatagagagcgggatagggaggacagggatagagatcgggaaaaggaaagagaaaaggaaagagagagacttgataaaggatcaacattcaattcaaaggaaggtgctagccacaaaccgtctatgttctctggcaaagagaagtacaacctgtcgaaaccgatttcagagcttgacctctccaactgtcaacgatgcactcccagttaccgtctcctacctaaaaactatcccatgcccccggccagcaacaggactgatcttggagcctctgttcttaatgatcactgggtatcagtgacatcaggaagtgaagattattcatttaagcacatgaggaagaatcagtatgaagaaagcttgtttagatgcgaggatgacaggtttgagctcgatatgctgttggaatcagttaatgctgcgactaagcgggttgaagagttgatagaaaagatgcaagacaactcagtaaaacctgagagtcctatacgcattgatgagcatttaactcctttgaacctgaggtgcattgagcgattgtacggtgatcatggtctggatgtgatggatgttcttcgcaaaaatgctagtgttgcattgccagttatcctaactaggctcaaacaaaagcaggaagagtggtcaaggtgccgatcagatttcaacaaagtttgggccgaaatatatgccaagaattaccacaagtcacttgaccatcgtagtttctatttcaagcagcaagatacgaagaacctgagtacaaagtctctcctgacggagataaaagaaattaatgagaagaaaaggaaggaagatgacgtactccttgccatcgctgctggcaataggcggcctatagttcccaatatatcatttgagtatgtagactcagaaatccatgaagatctacataagatcatcaagtactcctgcggcgaagtctgcaattcttcggatcaattagataaagtgatgagaatatggacaacttttctagagccaattttgggtgttcagcctcgaacgcatggttctgaggatccagacctagttaaggctaagagccgaacagcaaaaactggtcttgcaagtgttggggaaagtaatactggagcagggattgttgccaaacaaggcaatggcgatgaaagtgagcaaggaccgtcatcccgggctagattggcaaatggagttgcaacagacactcaaaatggtttccacgatgcagatcgaactgctcgtagaggtgaggaaccatcaaactctgcattaaatggaagactgcacagtgctgcacctgccgcagatgaaacaccttccataagcgcccaaaacatggcttctaccgagcgatccgcagagaatttacctgctgttaggatcgaacaacagaaggctaatttggaacttacgccaggtgtgaatgcttctaaaagttctcatgatgcagttgagacggttggtgaaggcggcaggggtggcaatgaaacattgccttctgtggagggaggggagacagggaggccgggatcatctgtaaatggcaccaatgaaggaaacaaagggcgcctgaataatgaaggttctgcagcccataatacttcaaaagttgaaagagaagagggtgaattatcaccgaatggagattttgaagaggaccattttgttccttttgaagatggagcatctaaagcaaaggaaggttccacaagcaaaccgttccagggtagacctggggaagtggtaccatcttctgaggcagccggcgagaatgatgctgatgctgatgatgaaggcgaggaaagtgctcagaggtctactgaggacagtgaaaatgcctcagaggctggtgaagatgcatcgggcagtgaatctggtgatggtgaggaatgctctcgggaagaccatgatgaggaagaagaggatatggatcatgatgatcaggatgcgaaggctgaaagtgagggtgaggcagaaggaacaactgagacacatgacgtggaaggaggactatcactaccgcattcggaacgctttctgcactcagttaaaccacttgccaagcatgtacctacagctttgcatgatcgagatgagaagtcctcacgtatattttatggaaatgattcgttttatgtcttgttcaggctacatcagatcttatatgagagactcctttcagcaaaaacaaactcttttactgcggaaaagaaatggaggacttccaaggatacaaacccgcctaacctatatgcgaagtttatgactgcgctgtacaacttgctcgatggttcttctgacaacaccaagtttgaggatgattgccgagctattattggaactcaatcatatgtactcttcactttagacaaactgatttacaaagtggtgaagcagcttcaagcaatagcaacagacgaaatggacaataagcttctgcaactatatttatatgaaaaatcaagatcttctgggaggttctttgacctagtttatcatgaaaatgcccgtgtcttactccatgatgagagcatataccgttttgaaagttgctcaaatccgacaaggttgtctattcagctgatggaatatggtcacgaaaagccagaagtgaccgcagtatcaattgatccaaatttttcctcgtatctttttagcgagtatttgtgtagtatgtcagataagaaattatctgaaggtgtctaccttggaaggaataaacgaaaacattcaaataacgatgagccttcagattctttgaaggcaatggatggtatcaaagttgtaaatggtcttgaatgcaagatatcctgcaagacctctaaggtctcgtatgtccttgatactgaagatttcttgttccgtttgcggaaaaggagaaaagttttgcgtggtgggaatgtgcctgacaggttgcagatttcaaaaatatctgctgcaaaagtgcagcgcttcaatagattcctatccaaaccataggaccatttggcatgaaatgccatcattgtatctaaacatggagatgttgctggggcagccagctgcttcgcttcaacaatgagaatctgcgggagttccatgactccatcgataattctcgcagagtgcccttttggaataacagctgggaaaaatacatagggtaaatacagcaaagcgaagggagcgtgtaggccaccgcagtcagctctgttgtgctgaaagatgtgtatatatgtattaggagcatgttgtttgttctggttaccattcactgggttcttgatggaggtctgttccatcaggtatttaactaatcatcatttgttgctgttggtataggtcttctgttctttttgccgtcgttttgcattgaagatatgtagtcaaaattaaaacccgtgtcaaacagttatgtagccttcgtttggttaatcaatcagacaccataatttcttaaaaaaaaa

SEQ ID NO: 39621 - DNA, 2118 bp, Setaria italica
  Peptide Sequence Number=SeqID_105595
cccatggcgagcaccaacatggcctcggccacctcgcggttcatgctggctgccggcgtgcccgccaccggcatcagcggcaacgggcagcggccgcgtcagcttcgcgccggtaccaaacaggctgggcaggaggctcgtggtgcgggccgaggaggaggccgcggcaccggccgagcccgcggcggaaggggagggcgccgtggccaccaagaccaaggccgagaagccgccgccgatcgggcccaagagggggcgccaaggtgaagatcctgaggagggagtcctactggtacaacgggattggcaacgtcgtcacagttgatcaggaccccaacacccgctacccggtggttgtgcggttcaacaaggtgaactacgccggcgtgtccaccaacaactacgccctggacgagatccaggaggtgaaatgagagaggctggctcaagggcctccgtgctcccctgtggttggtagttgcgaaatgagggatgtgaagctgctgtggtagcgtcacaacatcttgtgtgtgatagcttaatctctgtaatcattatgtaattgctttgctgcttgcttcaccgtggactaaataatctcttgaacccttaaattgttgtattcttttcttgtcattttgtacatgctcataaacctcttccctagcaccgtttgcacgatgctggaaactcaattcatagtagctataagggttcgtacaccatctcaggctttggctttggtagagcttggtgaccagcgttcagtattaaagaccatggtacaaattgagcgatattacaacaccaccaaattactcctccagtttttacatctgctagtttcagctttcacatagcaataaaaaaaatatagcaacctactctaagatgtgtgacagcattaattactaccttctagaacaggtcaagcccgagacttgaaaattttcaaatgctgccaagccactaacattgagtttgaggtagttcaggttcttgttacacctgccagaatgttcagactctgaagaccctgcccctcatggatgtctctcttcaaaagtaggcataaacaaagatccgccactcatccgaatcaaaactgctatcaaaactgaaggcttcacacatgcgcactgatccattggtaacgttatccagactaaagttagggacttcataccagaaattagcaatcgtcgctatacctgaggcccatagacagcctacaagtcatattgcctggtcaaatcatgtataatccttgcaggaatgcttagtcgcaatatagtctaatcacggagtcagcaccagcagtgaacaaccaaggttgttttggatggaacttgcagtccaaaacccctcttccatctgaactagaatggccacgaagaatttccaatggtacaataagtgggttctggttaagatcagaatagaccattccatgacatacataggcagtacaatcctcggaggatgaggcaaaaagagggtactttctgtgaaaagtaacactcgtaatatccttcgagtgggtctttagagtcttgtatggtcgtgtagataggtcagtatcaaaccagcatagtttgccatctttgcttcccacaataacattatcaccaccaggatggatcgagatagaggaaatctcacgaagacctgactccagtttctttaccaactgtgccttttggagatcataaacctgaatgaacttcttagtagcaacaaagaacatcttctcacttggatggaatgttgccgcaacaggaaggcctggcagtttacggaaaggatggtgcgagtgctttttcgagagctgatgcaacaatacagcttttgtattgcgtacaaaggaattaaggtgtacaactggatgggtaaattaaaggtgccatatcattggcccacaacattcaatgtgaccatgcatgtgaacataactaaaagtacatagagaggggccacactttgaaagaaaaataaaaccagaacatatggaaataaaacaaaatcaataaacatgattcataaaggatatcactaggcacaactgtggtaaagtaatctcccttaaaatgccagttcctactatttttgtacttacta

SEQ ID NO: 39622 - DNA, 253 bp, Setaria italica
  Peptide Sequence Number=SeqID_105596
ctgactgccgtaagaggtgagacgttaagatatcatcacacaggctgaagagaagtagagaacactgctgaacccgaatcatgttggcacgacctcgtcgaacggagcgggcacccaggcgaagaacaccttcagggagaggcacagcattatgagctggacgaggccgaacagggacaccttgaaggtcctgctctgcatcctcagggcctcggtcgcccggtagagctccttctcgtggacctccagcctg

SEQ ID NO: 39623 - DNA, 288 bp, Setaria italica
  Peptide Sequence Number=SeqID_105597
actgtcttgctcgggtttcgggggcgggtgctcattgtcacccgaaatgtggttcgggtttggggcgggttttattctcgggtttcgggggcgggtccgcggaagctccacccgaccccgacccgcccagttgccatccctagcgcctcgccgtcagccggcccagcctcctctcctctctccgtcccgccgtcgtcggacctcaaaccccctcgccgaacacatctccataccccttctaccgaagtacggcacccccttctcctagtcaccggctcgccgccctct

SEQ ID NO: 39624 - DNA, 417 bp, Setaria italica
  Peptide Sequence Number=SeqID_105598
aatttaacccctggcaaaaactaaatagaacagctcaaaatgcaaattaatgtgctaaggcatgcaaaattaatggaatgttgcaaggaaacgtggaattcagtctcaactcaatcatagcaaggcatgccatgtaaaaaaatggtttacaatagacagattagaacaaagtaataaaaaacttgaaaatgtcaacttaccttgagatccaactgtatgcaaatccagtaggagacagtcatgcaaacacaattgttgagaagatagatagatatttcatcagttcagttgccaatgccaagcaatgaagagccagaagataatatggcccttatgcataatcagttgatagttcctgaataactcaccttgaagtgaaaatcttagtgttatttgacaagagctatagacattcgt

SEQ ID NO: 39625 - DNA, 250 bp, Setaria italica
  Peptide Sequence Number=SeqID_105599
ttagatctgtgatggcaatgaaatttgttgcttgcttcttggtagttatccttgtatgggaagttccaggtgtatttgacatagtatggagcccatttacatttcttctaggtcagtgtccttgcaaaaccttttctgctgtggatatcacatgtgtttttccttccaaaagatgaacagtaccatttgcctttgtgtgcaggctataccgatccttctaaaccagatctcccacggttgcatgaatggc

SEQ ID NO: 39626 - DNA, 412 bp, Setaria italica
  Peptide Sequence Number=SeqID_105600
ctaatttccgtacccgtgttcgcggcgctcgctcgctcgggtttggatccgagcggaggcccggccggtggatgctgtagagaaatggcggaggccgtcgcgtccgcgggcgggctcgccgtggcggcagcctcgacctccgtaacgccaggccaggtttctgctattctggggtttctttgggttttcgcagcctgggcatatgctgaggttctctttcataggaagaatgctgcttctattaaaactagacactcggatgtcaatttagcagtaatggataacagttcagtcaaaggagaagatcagacacttctgttggaggagggtggccaagctgtagctgtaaagccagcttatgcttccttcacatcacaaatcctcagacttttcttcatggaccagatgcttc

SEQ ID NO: 39627 - DNA, 2123 bp, Setaria italica
  Peptide Sequence Number=SeqID_105601
attcttttcttctgttgtccatgaagaactctgcttctgttacaagacatagccttaggtatccgtctcttgcagtgcgttctgaattctgttcgtctgtcttggaatgcctattgcgccctgtttgcttttttttaaagacttcataattttgttgagagacactcatgttgctttgaatgagactacaataaccttctataaggagtcttattggagtttatgcctcttcatctttgtcagtagacactcggatgtcaatttagcagtaatggataacagttcagtcaaaggagaagatcagacacttctgttggaggagggtggccaagctgtagctgtaaagccagcttatgcttccttcacatcacaaatcctcagacttttcttcatggaccagatgcttcttctggagaatcgtttaacactcagggcaatatctgagtttggagggtatctactttatttttacatatgtgatcgaacagacttactcggagagtctgctaagaattacagccgagatctgttccttttcctctactttcttcttattattgtagcagctatgacttcctttaaagtccatcaagacaagtctgcattcacaggaaaatctatattgtacttgaataggcatcaaaccgaagaatggaagggttggatgcaggtgctattcttgatgtaccactacttcaatgctaaagagatctacaatgcaatccgtgtttttattgctgcatatgtttggatgactggatttggcaacttctcttattattatgtgaggaaggatttcagtcttggacgatttgctcagatgatgtggcgcctcaatttctttgttatattctgctgcattgtcctgaacaatgactatacactatattatatttgccctatgcacacccttttcaccctaatggtttatggcgctcttggaattctaaacaaatataatgagattagatctgtgatggcaatgaaatttgttgcttgcttcttggtagttatccttgtatgggaagttccaggtgtatttgacatagtatggagcccatttacatttcttctaggctataccgatccttctaaaccagatctcccacggttgcatgaatggcaattccgatctggactggatcgctacatttggatcgtggggatgatatatgcgtattaccacccaactgttgagaagtggatggagaagctggaagaaactgaactgagaaccaaactctatattaaaggctcgatagttacagtgtctttgacggctggttatttgtggtacgaatacatttataagctggataagattacatacaacaagttacatccctatacatcctggatccccataactgtctacatatgcctacgcaactttactcaagaattcaggagtttctctctcacactatttgcctggcttggaaagattacactagagacatacatatcacagttccacatctggctcagatcaagggtgcccaatgggcaaccgaagtggctattggcaataatcccaaattaccctttgctcaatttcatgctcactactgctatatatgtcgcggtttcccataggctcttcgaattgactaacaccttgaaggtggcatttgtacctagtcgtgacaacaagcgcctctcatacaattttgtggcaggaattgtcatttcggtcgcactataccttgtatcatttgttctagttggcatcgcaggatactaggaatctctctttttttttctttccattttcatgtgttctagttcaacgactaggccagtccaattgtgagcaaattcaaggcgacacgtcattcactatccagaaagctgccatttctttcactggaataagattttacctgagttccttggtgaaaagtaatcgagctgcgcgagaacagaagatcttgaagagtgtaacatatgagtgaagcaaccccaagaaggggatatgataaaacagaaacagatatatccctgtatagccgctgagatgcatacgtcggctgtggaaatcagatgatgtttcctatttgtctaatagacagaatggtaatgagaagttcggctagttgattcctgtatgctcgtatattgtt

SEQ ID NO: 39628 - DNA, 832 bp, Setaria italica
  Peptide Sequence Number=SeqID_105602
gaacttgattatcgagacgggttggaattaggccagacagacccacacgctgccaccgccttttgcccttcatttcccctttcccctgacgacccgaccgcctccttccgccaaagcgaagctcgcggcgtgcctcctcatccacatcctccgcttcgagtggcccggcgtggagtggagatccatctggacctggattgatttcccctttcgttgattcgtgttcctggacattccataaggcagcatgccgaagataaagacaagccgtgtttcatatccggaagggtgggagcttattgaaccaacaatccgtgagttggatgccaaaatgagagaagctgaaaatgatccacatgatgggaagagaaagtgtgaagctctctggccaattttccgtatttctcatcaaagaagccgctacatatatgatctttactacagaaggaaggagatatcacagaagctttatgagttctgcctggaccagggttatgcagaccgtaatctgattgcaaagtggaaaaagccgggttatgagcgcctttgctgccttcggtgcatacagacacgtgaccacaactttgcaactacttgtgtctgccgggtccccaagcacctcagggaggagcaagtgatagaatgtgtccactgcggctgcaagggctgtgccagcggtgactaatctcgtcatcatgctgttgtgcccatgactcatcatctcaacctaacactttgagctgtttcgtgagcatgggccgacaaagagcaactgtggcctatagaggtggttcgcatgaatgtgttgcagtaattgtaagcctaggatgac

SEQ ID NO: 39629 - DNA, 654 bp, Setaria italica
  Peptide Sequence Number=SeqID_105603
aaatagaaattaaagtgattttgcgaagaaatatatatgattgaatcaagtattgcgattattaattttggaagctaaaagaattttcaaaagatccattttggtcacttgaagattctaagtattcattttctttttagattgggaatagtccctgagagcttatttgttctgtttcaacgttcttccttctttccctcggtatacattttgttcctctgtttgtgtctgtacaatgtagtgtctgctgtacaacttattttgatatctgtttaatctcatatactgattgcttactgatgcattttgcctttgcccttttgcagccgggttatgagcgcctttgctgccttcggtgcatacagacacgtgaccacaactttgcaactacttgtgtctgccgggtccccaagcacctcagggaggagcaagtgatagaatgtgtccactgcggctgcaagggctgtgccagcggtgactaatctcgtcatcatgctgttgtgcccatgactcatcatctcaacctaacactttgagctgtttcgtgagcatgggccgacaaagagcaactgtggcctatagaggtggttcgcatgaatgtgttgcagtaatttgtaagcctaggatgacataatttcctgacgttcggattcg

SEQ ID NO: 39630 - DNA, 509 bp, Setaria italica
  Peptide Sequence Number=SeqID_105604
ttgaatggagggccaataactgaaagacattccaatactgatacaatcaccgtttggataaagtaaatcatgttaaactacacgatgcgttcaaacacatgaggcaacatggacaccagcggttgtggcttaagctctgacgagatgcagccccatgcttggtgagtgattagccattttctgcccgatcataggcattagacttgtgcttcggtgcaaaggtaaatccttctggaactttaccaagcaacatctcagagatccttatccagtcagctgctgaatcagatgccatcagggtttcaaggtcatcccggccacagtagcttggcggcctccagttcaatcgttgagggatgacatccaacaggccaaccggaatgtagcggcaggtataacttaaccattctagcaagaaatggcgtgttgtctccacacctttggaatcagagccccaattgcttcctagtacctaaacttgtcttacttaaaatttctttttaagttaa

SEQ ID NO: 39631 - DNA, 2336 bp, Setaria italica
  Peptide Sequence Number=SeqID_105605
tttttttggctgctgaaatgtcacgttgctattcaatatatggtgaatgatcagggtttccccccttgttcgtacattcatacatcacatattgcttttgaattgagaattggaatgtctttcagttattggccctccattcaaatactgatacaatcaccgtttggataaagtaaaatcatgttaaactacacgatgcgttcaaacacatgaggcaacatggacaccagcggttgtggcttaagctctgacgagatgcagccccatgcttggtgagtgattagccattttctgcccgatcataggcattagacttgtgcttcggtgcaaaggtaaatccttctggaactttaccaagcaacatctcagagatccttatccagtcagctgctgaatcagatgccatcagggtttcaaggtcatcccggccacagtagcttggcggcctccagttcaatcgttgagggatgacatccaacaggccaaccggaatgtagcggcaggtataacttaaccattctagcaagaaatggcgtgttgtctccacacctttggaatcagagccccaatgctccagaccaaactgcacaaaatctttaagaatatttaatctctcaccagacgtaatgtcccagtgcctttgttcttttatctcagtaaataaccaaggcttgataagagcacctcgagcaatcatgcaagtggaaattttggaggagtccgagacatgcttgttccagtcagtaaaggagaacacatcaccatttccaatgacatgcaaacagtcaggagccttctgtgcacactggtaaatatagtcccaatcagctagtttgctgtagcgttgttgtcgtgatcgaccgtgtattgttatggctgaagcaccccagtcgtatatgtctgaaactatagaatcagcacgattcctgccctcaaagaaagctgttctgaccttaacagttaatggtttttcagtaacagtagatgccgcttgtacaatactcttaatcctcataggttttgttagcaatgatgatccagcacccttgttgacaactatatcaattgggcagcccatatttatgtctatgaagtcaactgaacattcattatccacaagttcaactgttcgagctaccgtatctggataaggtccacagatttgcaccccaaacaaatcctctgatggatgccgtcgtagcaaagcccactctgaagcttgcccctgtaaaagatttgtgcacatagccatttctccacaagtaatatcagctcccaaggttttacaaagcctccgaaaaggaagattcccgacagtggtcaagggagcaaggtacagcttctctcgaaaatctataattttcttttcacgtaaatgaggtgtcgtgatcagatcaactctgcaggaactttggttatttgaggaaacttttgatccattgcttaaattaagatcttcagattctgcctcattgccatgaataccagtcccatcatcctgagttccatcaacttcaacctttgatttctttaatggccttggctccacacattgaactgagttaacaaccaaaggttctccctctgaattatctattgctttgcataaagtgggatcaggttcaacattcacaagaagggattcagttttgccatcgccatttagctcgcatgtttcatctggattgtcatcatttgctgtttttgctttattcttgtttccatccttaagaccaagaagtttgatctgggcagtggccttgggaaatttatagttgttcttccacaagagcttttgaatatctttgctcaaaggatttctctcatggttcccgtctgagtgattttgaggagcaaggttatccttatgtgtaccaaggaaccgacacgttagtccatatggacacaactgccccagcgtggtaaatgggcatgttccttcaaggtcacctggtttctgagccaaataagcatttatgtcatggctgaaacggcaagaagtaccgtatttgcatgagtccacatttccacttttccctactccaatgcaaagatgagaagtagacttttgttcctgctggcgctcacgtttgagctggcgcttagacttcttttcccccgtgacgacggccccgccgccgccggccttaccctcctccttggggacctcgcgtcggtgcggcgggcggaggaaggcgggtttgacgggggcgacggcgcgggccaccagctcctccggggtgggccgcggaggaggggaagcgtcggtggtgacggcaggggaggagtccggagggtcggtggccggcgcggtcgtggccatggttggaggcgtg

SEQ ID NO: 39632 - DNA, 313 bp, Setaria italica
  Peptide Sequence Number=SeqID_105606
cctcctggtccatccttcctatccaccaccgccatggccaccgctaccgcctcgggctccacctactgttgcaacaccctcctccacctccccaggccgacccatttccgccgcatctcgcctcctccaacccaccgcctggagctctcgctctcgctctccctcgccgcgcgcttcgccacctgccgagccgcggccgtcgagtccgggaccgcccgtttcggctccagggcgagagcgagctcgggaccgccaccgccgccggttttcgagacggtggaggaggaggaggaggagcgtgagtggtcggacg

SEQ ID NO: 39633 - DNA, 559 bp, Setaria italica
  Peptide Sequence Number=SeqID_105607
agcaagctatggactttggtacttaatgatcactgggacctcaacataaaatagaaatgataggaagaagcagttcaatggacagatcagttgcaatatcagaaaacctcaaggaaattgaaataaaatgtgaagtggttgatgaggaagtccacaaagttttcaagtttctatgttcgatcatttaatatatgtaactctttcatattcaagtaggcgggagaagattttggctttcgacgcatcatccgtcttgaccattcagaagtgtatgtctgaaatcttctgtgacaaggtttgcatcgtttgtctctgggtgtcatatgaatctcgctagttgtccttttttcttaatcacagctaccacctgtttctcgacttccaatactacccccagccattagtatgatcccgctactttaggtttttctggtgaaattaaggaagcacttttctgatttctacccaagggaaaaaaaagaggatcgatgtcagcttcagtgactagacaaagccttgaggttcctcatgtctcttatgtgcatggattatatttatg

SEQ ID NO: 39634 - DNA, 286 bp, Setaria italica
  Peptide Sequence Number=SeqID_105608
tggttttttgtcactacagggacctcaacataaaatagaaatgataggaagaagcagttcaatggacagatcagttgcaatatcagaaaacctcaaggaaattgaaataaaatgtgaagtggttgatgaggaagtccacaaagttttcaagtttctatgttcgatcatttaatatatgtaactgtaagtgagctagcgacactcttgattctctgtatatttctttaattttccttcgtatggtggaacggaaacaagaaatgaataaactcctaagtttattaag

SEQ ID NO: 39635 - DNA, 257 bp, Setaria italica
  Peptide Sequence Number=SeqID_105609
gcacctgcttcatcaacggtatcatgtgccaaaatttcatttaactccgcgataagtttctgaacctctgggatgaaatcaatcaggccctctggtataaggatgacaccgtaattgtagccaagttcagcacgcttacagacaatgtcagtaatgtaatctgtaacattttttagggtctgcttcttttcagcaacctcttcaccaataagagcaatgtttgggtgtgtttgtaaggcacactccggaagtaggag

SEQ ID NO: 39636 - DNA, 155 bp, Setaria italica
  Peptide Sequence Number=SeqID_105610
gacatgttcagtaacccaaatcacagagtttataccacctcaatgttaatgaccttgcacaatttcttataaacagctaatgctaaaaataattggcctggccatattcttttatttgggggatgtgaaacatctttgggtcatcaggacccccc

SEQ ID NO: 39637 - DNA, 576 bp, Setaria italica
  Peptide Sequence Number=SeqID_105611
ggaggctacatgttcaccttatacataattacaataccgacgaatatctgcgatcgaaataaatcatgatttttttaaaaaaatgtacaaggtgaaattaataaaataagaaaacacgcaagatagtgatacggtagatctagctatgacgagtagaatcaataatgattgcgcatatgaacaacactagttgtggcaataaaagatagatcggactgatggctgatggatcaaaacaaaaagaggcgttagcgtacatctaattttattgaaaaaataattatagtaactttaaagagaagaggatacatagacaccataccgaaatagggcaattatgcccatacgatgttgtgagtaggatggccatggaggtggccttcgaggaagaacatacgaggccaccatgagccgataggaattacaaatatcaccgaagtcgagcatcatcccacgatagcaactttaaagaagaataaagaaagatctcacaactgttgaataggttgtggagctatcagatccacttgtcactgagctacacaccatgaaggcggaatagccatgagaatgcta

SEQ ID NO: 39638 - DNA, 481 bp, Setaria italica
  Peptide Sequence Number=SeqID_105612
atcatgaatcttttggcatcacacaggggcaatgaacagagaaagaaaccctaacaaccttgcatgattgaccatcataacaaacgggatgctttagtggttaggttcacgaaagatcagcagtcaattgtacacctaaaagaggctcaggttttttctaagaagggccaatgcaccttaaagaaagctctgttttttttaaacaagggccagtgtactactgctacaaatagccaagccacatccaccaactggattgccttgcaatagacttcatcatgtctgctctgcaccaatcctcctcaaccatggacccccctcctccctccactaaatcagcccaaggcaccggaatatgataaagaaaatgagcacgatttggcatttgcaaatgccatccccagatcctctcggattcgattccgttttgtcgatttgcagcacctcgggctaccgacacccacgccatttgctagaacaa

SEQ ID NO: 39639 - DNA, 343 bp, Setaria italica
  Peptide Sequence Number=SeqID_105613
ttacggacggcgagcttgggcggggagatcagggtgtaccagaactttggcatgccgttcaggatcaaaggccaggggaatctcttctactgatcagatcactggcgcgtcgccggcgccggacgattaacgatctgcgcgcgaacgaaaccgcacaacatcctttttggccattggtgacatgtgatttccatcgattttcgtgtacatggttcgttctgtgtttgtagctaggaagtgctccaatagaatcgtagatgcaaaaattcaaagtgaggtgggatttgtaatttgtaccaaaattagcaaaatcaaaaaagaaggccacagatctgtaatccgg

SEQ ID NO: 39640 - DNA, 415 bp, Setaria italica
  Peptide Sequence Number=SeqID_105614
ttatttggcgtctgacttaggcctatatgaccgatcgatcgaaatactccatatattccaaggctgcctaggaccccaccttgtgcaggagatttcagaactgggtatgcccttttacctttttggaaaaaagggatggtaataaaaagctagagatcaaaataagtcaaaggagcagcattcaaataacacaacctgaattgttttacagtgtaaattggcactgcaacgacataaaaaagcaacagctaaacaacaccaaacacactgttttctaatttaaatgccagggaaagtggcagcatgtatccatgtaatttaacgatatcaagatattaaaaaacagaagatttataaggaattcatattacctgacttttgttgataaaagatccatgtgtgcttccaaggtcat

SEQ ID NO: 39641 - DNA, 458 bp, Setaria italica
  Peptide Sequence Number=SeqID_105615
attgcatatgattttagaaattaaattaatccgcatgttagtccaagtaaaactcctgccacaatgcttgcatgcattgcaccaccaggccaaagtatttgccttgctacgtaatcctatactgaactattaatgagggaactcatgaatgtaaggctgctttgctgctccaaataaggctcctacgagacatagaagttgtcctatttctttgtgtttgagtctcttcagttgccagtactcaatatggagttgttgatttgtgaattatttgtgtataaatgtgcagatcgaggtatttcaatgttaggtttatatacaactacaatgtcggattcacttagagaataatttgttagatttaggacaagagatgccaagttcagtaatactgatctcttttatgtcaaatttgtagttcatatccacaatattatacatgtatcagaaattctgaa

SEQ ID NO: 39642 - DNA, 450 bp, Setaria italica
  Peptide Sequence Number=SeqID_105616
gacactttctagtggtgtggttgtgacaaccacacctttgacaaacttgagagttgtcatgatgagtatgtttcttaaaagtgactttgcctttgttagaatctttgcctttttggtaattctgcttcttccattttcacttgaaatcctttttgaatttcttgccaccaaactgtttattattattctgagcattgaagtgaacttcaggcagaggtgctgcacccacgggacgcaattgatggttctttgttaagagctcatcatgtttttctgcttgaagtaaataatatattaagttagaatatttggtgtagttgtggcaatggtattgctgttgcaatatcctatttgcagggagaaatgtaggcaaagtcttttcaatcatttctacatcatcgaaaggttggttacagaaatgaagcttggaacaaatcttgtgaactgtag

SEQ ID NO: 39643 - DNA, 453 bp, Setaria italica
  Peptide Sequence Number=SeqID_105617
ttgtcatctcagaggaatgggtctctggtttggtatcttgtgcggagtagcagtgcagatgctcttgcttctctgcatcaccttatgcaccaactggaacaaagaggcattgaaggcaaaggatcgagttttcagttctactattcctgtcgaccacatgataacatcaggttgtacggatcaggaaaatgcgtccagtgtagttggaaaggatgctaggagaaccatagaggtgacaaaggattgtactgctccgaattgaggtagatcgcagtaataatgtaggttagccggactgataatacttgagtggtaagcagcatcatgtgccatgtactagttgcatttcctccagctaaaagctgtagaggtcttgccccgttaggccattaattatgattttagtgattggtggcactataattaatcattgagactaatattcttgctaaa

SEQ ID NO: 39644 - DNA, 492 bp, Setaria italica
  Peptide Sequence Number=SeqID_105618
gggaaacatacattactagacgctgacgcaagttcggtttggattgcgcagctgagattgagttggtgaccaaccagcatagtcttcaagaaaacagaacacaaacagatttgtccatgatgcttggcatctgacagcatcaacatcaacaaaggttcagaatgggactctctccttaaggagttcttagaatcatcggatgtcttaagcacagccactcgatcgatggtctgacatggccgcgtcgatggatcctgctcctgcagttgctgcaatcatcagcagatcctggacatgttgctccactggcagacgccgtcgaggccccagtcctggtccgacgagccgccgccaccggcgaccggcaggtccacgccgaggtcgacggtggacgggtcctggtcgtcgctgctgtgctgcgaggtcgagctggagtggttgggcgcagctgccggcggcacctgcacggtctccggcgcgttgagcgtcggg

SEQ ID NO: 39645 - DNA, 536 bp, Setaria italica
  Peptide Sequence Number=SeqID_105619
ccagttactttaaccagttacgtaacttacggtctacttattatatctaatagttccaacttttaacttcatagttaactcataagtagttcactttcattttaattaatgcactttttcctaatacaaaaaagtatattttttcttaatacaaaagcagaaagtaaaactcataatcccaccgtctggaggtaacatttattaacatgttgtttttatactaacaccgatacatatacatctttaatggaaacaatcttacatagatgctggttttagacgtttatcaatgccttttttgtaaactttttattgaagtattgacatacatacaaaaaagtgtacaattcgaagtaaacatacccatgtatatttcaagaaacagaacactgccagtatccatgaagccctggcaggcctactctccgttactacccctcccccaagagtagtcctcaaccaaatatgtaacatcataaatttcctttgtgtgtttcagacttttgtacagttggaatcgtgcactgtgtattctt

SEQ ID NO: 39646 - DNA, 1010 bp, Setaria italica
  Peptide Sequence Number=SeqID_105620
atataactcgcagttaagcacgataagcttggagacttcagcagcaacgtgttctaaatcatttgcaagacctctttcaagttggctagtatctgttaaatttggttcaacatacggaaaacatgtcgttcaagctgtagctactgcagttcagcaatctcagcatctgaggatcattcttcctgtgggtgtcatagttggtgtaactttggcatgtttgagaaattacttccatgttgatgtctctaagcatgatgaccatatgaaagccaatgtgaagtcgaatattttgagtgaggatcttattgttcaggatatcagcagagcaaatattcaggatagtggtgaagcaaatacagataataatattgaaaacgctcgtgaggacaaccatcaggaggtgacaaggacaaagggtcaaggtatgatggtaggggcagtcacggctgccctaggtgcttccgctttggtagcacatcatcaggaaaataaggatgaaaataatgatggcaaggatgaaattcagaatgccaagcatgaggaaactacacaggaaaagggccagaataatttgatgagaagttttactgagaaagccctatctgttgcagcgccggtagttcccacaaagggtgatggtgaggttgatcatgaaaggattgttgcagttttagctgaacttggacaaaaaggtggaattttgaggttcgttggaaaatttgctctactctggggcggaattcgtggtgctatgagcttaacagataggcttatctcattcttacgtatcagcgaacgacccttatatcagaggattatgggcttttctttaatggttctcgtcctatggtcccctgttgtgattcctctactgccaacacttgttcaaagttggacaataagcgcttcaactgggattattggatatgcttgcattgttggattgtatgtatctataaatagaataacttagtacaatagactaataggggacaaaaggaataacggga

SEQ ID NO: 39647 - DNA, 391 bp, Setaria italica
  Peptide Sequence Number=SeqID_105621
agcggaggaagaagaagggttgcattggctgtgaagaagaagaagaaagcagccactgatcgagctctagcagcggcggcgcggccgagcaaagcttttgctgcggcgccggtgatccttgacgatggcaggttctaggatcggttggtagtttaatcttgtcacaatgtcaccgtactagcatgttgcaagtcggtgccgttggcttggttgtcctctagctccattagaggtgtgccaagcgaaagccttcttaggcctagaagaaggcggcttcttggacgttccgagttttggtacaaggagaggttgtacaacttgaaccacaatcgcaatgtaccattgatcccttcatatcatgaattggatttattttttcaaaaaaaaaaaa

SEQ ID NO: 39648 - DNA, 743 bp, Setaria italica
  Peptide Sequence Number=SeqID_105622
ctttaccaacacaaaatgtgaggccgtccaaacaatacattcacaacgattcccccatcccagtcccaattttttagctaggatgagcaattacatcacatacaaattaagaagtagtaacaaacaaagccagcatatcgatcagactgcacaaatttttaaactactaacaggtgtgtctttccacacgatgaactgcccctccaaaaaacccagcacaagctggcgcgcgtcgcgccgaccgacgatcacctccgctatcgaatggcagcgccctcgcacgcgagcagctcttgcctcgcctgcatcgaggcggcagcggcgatgtcggcgccgccggttgtggccttgatctgctgctggtggaatagttggcgtagccgctcgatctccttcttcagtgcctcttgatgagcatctttgaagatcttgtcttgggcaagcgccgcaattctttgcttgagatggctgttaccgacggtgagcaatgatcgctggtgatccaggaaggccacgcgaggggacagtgctgacacctccatctggagactggtgacactgcgttcgagctcggagatgtactgcagcttcctaactcgtgacctctgagctgactgcctgtttgccaatatcctcttgaccctcttggggtcagcgacgccgtcggcggccgcccgcgcgctggccggcgacgaggccgccgccattccgtcctccgcgtcccccaagtccatcagctgcgc

SEQ ID NO: 39649 - DNA, 505 bp, Setaria italica
  Peptide Sequence Number=SeqID_105623
atcctggtggagtgaatgtttgttgcatgttgtttaactgcataattattttcttgtgattgtttgttgatgattgattcaagttctctgtcacttgtctgggtttcaacagcatgtccaagtggttttgtaatcttcgacattcattgtttctcaacactctgattgacacccctgtttagtcatttgcgaatctttatttctagttcaatatgctgagacatatttctgtcaaaaaatatgctgagacatgtctgtgcatgtatttgtgagaccactatgaaaatgcttagccgtgagctgcttctatatttggtgaagaatgtacagtgtacagtagcatttagtacaatgcttcattctttccttcccttcaaaatttctccttttcttatttcccccaaaaaatgtaatgttactcatttttccttatattttctttcgaattttagagctgaatttcgaatttggattccttcaaatctttttttaagtaaaaaaaaaa

SEQ ID NO: 39650 - DNA, 373 bp, Setaria italica
  Peptide Sequence Number=SeqID_105624
ttgccaaagcagcagcaggaggtgttgctggaaatggcggcgcaggggctgacggctacggcggcgccggtgaagctcggccgccccttcagccggagctactcgagctcgccggcgagaggagcacccaggctcctctccccagcacactccaacagtgtgcacgccctgcgtgcatgcgcgtccacctgcagcagaggcgtggcggcagggagattgagtgctgccgcaaccacagccaccaccgctgctacgccgctagcgccggccggcggcggcgaggagataatggatcagtggccgccggtgccgcagggagcaggtggaggcccatcccgggtcgcttggaaaccgggtggggtggcgggagaac

SEQ ID NO: 39651 - DNA, 895 bp, Setaria italica
  Peptide Sequence Number=SeqID_105625
tttaactttttgttttggtttgttttccttaggtcgttattcttgagaagcctcattctggtttgactgctaaagctgtgctcaaagccacccagaatgcagcatacaatggattaattactttggtcaattccaaggttgatgagtttatgttgcagttgactagcatcaattggactgtggaggaagctccagaacacgcaaatgactacatgaatgaagtcgttatctatcttcatgaggtggtatcttctgggcagcagattgtaccaagggatgccctgtacaaggttgtgtccggtgcactaagccacattgcagactctataataacagtacttcttagtgacagagtcaaaaggttcaatgcaaatgccgcagctggtattgacattgacctgaaaatgttggagggctttgcagatgacacatatcacagcactgggttgtcagaactgagaaaagaaacaagtttcaaagattgcctagtggaaataaggcagctgatcaatcttcttctcagcaaccagcctgagagcttcatgaaccctgtaaccagggagaagaattatggatccttggaccacaagaaggtggcaatcatttgtgacaagttcaaggatgcgccagacagcttgtttggtagcctttcaagccgagccacggtgcagagcgcccggaagaagtccttggatgtgctgaagagaaggttaaaggattttagctgagagtatccgtgctgcatcgttaaataagctagtacccccttaggagagaactagttcagtatctgtcctagccatttcaaattcctttcatctttttctttttaatttcctttttgattctactttgtttgcattccgttttggagctaatgtagcagtaatggttt

SEQ ID NO: 39652 - DNA, 815 bp, Setaria italica
  misc_feature (795)..(795): n is a, c, g, or t
  Peptide Sequence Number=SeqID_105626
ccgctcccggccaacgacctgctctgggagctcgcgctgcccgtgggcgccgaccgggaccacgagtactgcaacccggagtccatgctggcccgcgtcggcgccgcgcgcctgcggaggctcccgccctgcctcgtgctcggccgccgcaaggacccgccgcgggaccggacgaggacactggtcaacgcgctgcgcaaggccggggtggccgtggaggccagcctcgacggcgccgggtaccacgccatggagctgttcaaggccaactgcgccgccgagttcaccgcgcaggtgtccgacttcgtccgccgccactccaccgccggctccagcgccgcagccggcgacgtggttgttggcatgagcaagctgtgacggacggtcaaaccgatcgtcccggagtggaggttgctgcacggcactctggtgcaagttgcagcgatgtttagggggcatttctcaatcacatcatcatcgtcatgctacaatgctgagcggcgattggctcgagctcgccgtcgtccaaccgacaggtagacccggtacggtgcagaggtcgatatctccatctccgcttcaattccggatagccggataggtgcgcgagttggccgccttttcttttttcttctttttaccgtcgagtccatctcgacgtgaatggtccgaaccaccggaagtacatgaagagaaagaggctccaggtctgttaccctgccctgcagtgcaataaggcagatgattttatgtatactgtttgcatagctggtagatattgcttcgcatttttcngaataactgaaatcgtttta

SEQ ID NO: 39653 - DNA, 474 bp, Setaria italica
  Peptide Sequence Number=SeqID_105627
acgcggccagccggccggggatcagcgacgtggtcgcggcgctctcgtttctcgccgacccggcatactatcctccggaaggcatgcaaaccgagcagccgagggagaagagcagcaggcctcctgtcgcaagcgtgggccgcgtggtttctgaggtaagggcagacgacgaaacgaaggagaggtgaccataggtaatggatcttcttttggtagagctatctgctctctcgatcttcttttgtaacgaacaccacgtaggcaggatgtaacatcgttcaaggagttatcttgactgatgctgattctcagcagcaataatgctgcgcaaagttgagtttgctgtcggcacaaatcactcagcaatgactcaatgataacggcattagctatcttatgtcacagagcaggggataaccatatatttatagtgttcaagaaggataatctgtgttgtgaattgtgatgttgtag

SEQ ID NO: 39654 - DNA, 461 bp, Setaria italica
  Peptide Sequence Number=SeqID_105628
ttccagcttttattcagttattgcagctttggagtcaaacatgcgactccagcgaggctttgtagacaatctatctataaagtacttgaagcaaaagcgcaaaaaggttttgagtgctgatgtcgagatgacgaagttcgggaaagtagagcaattgttgaagatattgaaagagatatgagtaccatcggagcatatctataacctgattcttcagaggcagtgccctgtttgtcctatgcataagatctctggatacaaaaaatatgatgtgtccaagcctatgcatatccgagctgcgctggagagacacttgaagcatggccctatggtggctgtattctggatcagtgcaaactatgatgaatgtatgaagaacggtgctgtttatagattcatccatatacgtgggaaggttaggattagccatgaagtatgtgtggtgaactttggcatcgagg

SEQ ID NO: 39655 - DNA, 415 bp, Setaria italica
  Peptide Sequence Number=SeqID_105629
ccaaggctcgagcgaactcattcgggagatgcaacgggaaggtgccttggtcatgcagggggagatgatgagtactgggtcttggccaggaaactagcaaccgtgacgcagcataggcagagccgagcaagagatgagcggctcactggaagtatcccaccagctgaggtctcgcctcaacgtgtgcagagggctccgttcaagctagatggtggctgctacgagcagctatgaatgttctgcttgtaaatgcggaagtcggtagtaagtggacttggaccttagcatgctactcgtgctgtggaggaactaagattgcttgtagtatcacacgaaccaaacgcatcctatatagctttagccagttactcagttacagttagcctagcgcagtttagaggaggtggtgcttgtt

SEQ ID NO: 39656 - DNA, 614 bp, Setaria italica
  Peptide Sequence Number=SeqID_105630
tccctcggaagtgccgtgagacgtgcagggtcatgggctacgacgtccccaagggcacggtcgtgttcgttaacatgtgggcgatttgcagggaccccaagtattgggacgatccggaggagttcaagccggagcgtttcgaaaatagtcatttggactataagggaacgtgttatgagttccttccatttggagctggccgtcggatttgcccggggataaacctcggggtggctaacgttgagctcgcgcttgcgagccttatataccactttgattggaagctgcctgctggaatgaagcccgaggacatagatgtaatggaagttccagggttaatcgcgcgtaagaaaacaagcctgatcttgcaccctgttactcgcattcatccagtcaatgcgtaaataagccggtcataatgtggtgcatgaacaagtatggcactggtcatgactgataattgcactagatcagtcagatacatggaaaaataagtgctaggcatggattatatgtgtatccaactcttccagcctctattttgtagcatctggtacatgacgtctatttgatgcaaaaggccaaatatataggaacagaggagttacaataaa

SEQ ID NO: 39657 - DNA, 400 bp, Setaria italica
  Peptide Sequence Number=SeqID_105631
ttctttgtttaccctgccccgtcgtcttccgcgccgccgccccaatctccggccacctcgcctgcggaagatatctccaggcctctagggtacgcgcttgccaccgccgtcgcgccggccctgcctcctccggcccatcctcctcgccgcggatgcagaacaccaagacgatgtcgacgtggaattccgggagtgagcaaggcatgggtgtcttccacatctgcgggtacagccagcacatcaaaaccgcagccggcgagagaaagaaaatcctcgtatccagcacgttccgggctggcggccaccactgggccattttcttccgccctgatggattcagcgacaaatccgtagctggaatcgtgatcgcgtccaaacacgtcaagttgagggcgtccta

SEQ ID NO: 39658 - DNA, 369 bp, Setaria italica
  misc_feature (267)..(369): n is a, c, g, or t
  Peptide Sequence Number=SeqID_105632
ggcaacacaagtgatcactatgggcctatggttgcaaaaactttataaggggtgggatccagcgatccattgtctactcttgtatgaaagaatcagaagcttgttcttctcagtgtagcttgtgtggtgcagcatttgcaagtggaagacttgctggttcttggtacaccatgtaatcttcattagatgctgtaattgttgtagaattgtattttcttgtggagtttggtttctaatccaaagtttgatgagctgccaaaaaatttnnnnnnnnnnnnnnnnnnnnnnnnnnnnnnnnnnnnnnnnnnnnnnnnnnnnnnnnnnnnnnnnnnnnnnnnnnnnnnnnnnnnnnnnnnnnnnnnnnnnnnn

SEQ ID NO: 39659 - DNA, 1207 bp, Setaria italica
  Peptide Sequence Number=SeqID_105633
gcctgctaatggcttactctggcaatcgaaaatagtgataataaggatgattccgtaacaagaggctagatcttgcctgccagttgcttcggagagaactctggttgcatattaattctatacaaagacgcatggttaagctcatgcagagagatttgagctctgatgggaacttacaagatcttaggcgttatgtggatgcatcaattgttaccaatggtttgaaccgggctttctccactggttcctggcggcatccttataaatcagaaaggtgttcaggggttgtagcaacccttcggagagcaaatccacttcaaatgatgtctgacttgaggaagactcgacagtggtttgcatattctggaacaactggagatgcgagatatccgaatccatcctactggggaaaattgtgttttttgtccacccctgatggtgaaaaatgtggattcgtgaaaaaccttgctgttactgctaaggttagctctgcagtgaagaaacaactgtgcattgatacatttgtttcttgtggaatgaagaaactggatgataaaattcgtctacaagatatttctgggaaagacaggattttcttgaatgggaacctgcttggagtgtgtgcagacccaggcgatttggtttcacgtttaagaagcttgaggcgtagcaaactaattgagccacaggttgaaatcaaaagggataggcaccacaaagaaattcgtgtattttctgatcccgggagaattctaagaccacttcttgtagttgaaaatctaagaagaatcacaagacccaaagctggattgtactcatttcaggaacttatgcatcaaaatataattgagctgattggtgttgaagtagaggaggatatccgatgtgctcctggaattaggcatctattcacaagggagaaagaagaggggccttctgactatactcattgtgaacttgatccttctttcttgctggggttgagttgcagtctcattccctttgccaaccatgataatgctaggagggttctgatgcaagcagaaaaattatcgcagcaggctattggctacttgcctacaaactcacgctctagatttgataccctctcacaaatcttctatccacagagacctttgtttaaaactgtggtggcagactgtcttggaaagccagactacagctttggacgaaaaggtgactttac

SEQ ID NO: 39660 - DNA, 441 bp, Setaria italica
  Peptide Sequence Number=SeqID_105634
cgtaacggtacggaagctttcttcgtttcaagtcacgtcagatcacaggacactggatcctgcgtcgacatccttgccgctgaaaaagttagttacagcaccatttgcgtccagcaatcctaagcccaagcataaactaagactgtaagtaacaggcacagctgatagcctacttctggcatatactacatactagtaacatgacccatacagacatccttccattcagacttcggtgcaagatcggaccagagacgctcggctacctgctagtatggactccagcgtccatgccatggctccctcgctcctcccagccaagtcggctccccaccaaaccaggtctcctgctcagggtcctgccactgccagccaggccgtcgagattgagcttcagcagggtggaacatgtgctggtgattccagggctgctgcatggcc

SEQ ID NO: 39661 - DNA, 876 bp, Setaria italica
  Peptide Sequence Number=SeqID_105635
gggtggcgctccacgacgccgccatcatccccctccgcccgacgtgccacgggtcgccccggcgggctcacgcagctgcagcggatgggcgtgggccggttcctggtggtactggccctgggcaccgccgcgctggtcgagcgccgccggctccggcaggcgccgtcggcgccgatgagcatcctgtggcaggtgccgcagttcgtggctggtggcggggtccgacgtgttctgcggcatcgcgcagctggagttcttctacggggaggcacccgcggcgatgcgcagcatctgctccgccttctcgttcctggcgctgtcgctggggttctacgtaaactcgctggtggtgacgctggtggccgccgtgaccgggcgccccgggtggctggcgccggacctcaacgccggccacctcgactactacttctggctctggacggtcatcagcgtcgccaacctgctgctctacatggtgctcgccgcgcggtacacgcccaagcaggtcgccgccgcggccgtcgagcctggtggttccagcagcagcagcgattaattgggcacgtcgaccgaggacaactcgatccggccggccgcttactatacagacaacgagacagtgagcgagtcagatggaaatcatattcgagtaggatatactactacactagagtggttacacgcatatgttgctcaattaaccgttctacgagacctacaactcttaatcgtgagtttgtgacactgttgcgtagctagtacaatcatcatttgtacaagtgatccagacagatagcatagttaattcaatcttttggggaatgtaagtacggcacgccatggaagatccattgcaaagtaaaaaaaaaaaaaaaa

SEQ ID NO: 39662 - DNA, 543 bp, Setaria italica
  Peptide Sequence Number=SeqID_105636
agagagacggcgattggcgagagatcgagtagcccactgcaacccggtccaaactccggtcctccccttccccctcagcccttgcgcgcttcctcgccgccgggcgtggtctccctccctccctccgaatctactcgcgctcccaacctttccccgtccgcccgcctctgctcccaaacaatcaaaatagtggcatggcatctcgcatcctccatgcgcgcgctggggcctctgttgccgctcgatcagtgcgcgcccacggcagaccgatcttgactccttcaacggcttaccctacgctgatggctgatgctggaagctgcgctggaacaatcccggcaattcagggccttcgtcattacggaacaccctccaatcatcagaatgtagcagagctgaatgaagcactgggaaaggtggagaggaggctggatgcacttgagggaaaatgtgatgttgggcataagccatccatgaaagtgaccataaagatgttggaagcgtggacataacaaaggaatttcgtcaagtaacagatgggct

SEQ ID NO: 39663 - DNA, 229 bp, Setaria italica
  Peptide Sequence Number=SeqID_105637
agatggtactgaagtggtgttttgttccttatgctgtttatgtacctcaccaaacaatgtggttcctcctatttttggtgaggtacataaacagcataaggaacaaaacaccacttcagtaccatctgatgatgatctccttagatgtctagccattaggcggaggggatttcgacctcgccgtcatcgatctcctgttgaagatccttggggtccttgccgtcgacgg

SEQ ID NO: 39664 - DNA, 318 bp, Setaria italica
  Peptide Sequence Number=SeqID_105638
ccttgatgacgagcgccgcggcggaaggcacgacggagaccttggcctgccggttctggacggtgagcttgacggtgacgcgcaggcccttccagtccttggccgtctccttggcgatgtcctctccgatcttcttgggggagagaccgagcggaccgatcttgggggcaagggacgaggccgctccgacctccccgccggtcacgcggacgaacacctccaccacctgcgacgggtcgagcttgggcggcatggctgcgggagagggggtggcggcggcaggagctagaatgatctccaaggtgaatgatctccaag

SEQ ID NO: 39665 - DNA, 310 bp, Setaria italica
  Peptide Sequence Number=SeqID_105639
cgcggcggcggaggggacaacggagaccttggcctggcggttctggacggtgagcttgacggtgacgcggaggcccttccagtccttggccgtctccttggcgatgtcctctccgatcttcttcggggagagaccgagcgggccgatcttgggcgccagcgacgacgccgcgccgacctcgccgcccgtcacgcggacgaagacctccaccacctgcgacgggtcgagcttcggcggcatggctgcgaccggcggcggcgagggtgtgggtagggtttgggagagggtgaggagtggcggcggcggggcg

SEQ ID NO: 39666 - DNA, 519 bp, Setaria italica
  Peptide Sequence Number=SeqID_105640
gtatgagctctagcgagctgccactgtttaattttgaacgatcataaaacatccactaagagcttgtttggatagaagaggattggagtgaaacaaagggggattgagtctaaaatgaactaatttcccctccaatccctcccccattccacttcaatccactactgtccaaaaagccctaaacgaggcttggattccattgcagaggcattgaaactctccattctagacttccaaaattggaaaaggatccagtaataacattgaggtctctcagaagacaacactactagaactagacaaaaatagatggaatcgcgttgtttagtgaggtacatcaacatcatgcagaacaaagcaccacttcagcagcaccactgattatctccatagaaatgtctagccttcaagctgaggggatctcgacctcgccgtcgtcgatctcctgctgcaggtccttggggtccttgccgtcgacggtgcatccgacgctgacgcaggtgccgaggatctccttga

SEQ ID NO: 39667 - DNA, 991 bp, Setaria italica
  misc_feature (2)..(2): n is a, c, g, or t
  Peptide Sequence Number=SeqID_105641
tnttttttttttttttttggtcattgaagctaccagaaaaattaatacaggaaagagcgacagacaatatgaaataacacctagagaagatttgagcattagcatggcacaaggcaccgcttatggtatcagggtcagctaatgcgttctgctcgtgataactgaaaatagggcgcacagtatcaccgagaaagatgaacgcaggcaaccgaacaaactgatcaagggaacaaaacagtgtatggaaattccacctggcaggaggaatttaagatgaccaagtgcttaaaactccattccagattccaaacggatgcagtagtaacattgaggtctctcacggcataactactaaagcaagacaaaaataggaggaaccacattgtttggtgaggtacataaacagcataaggaacaaaacaccacttcagtaccatctgatgatgatctccttagatgtctagccattaggcggaggggatttcgacctcgccgtcatcgatctcctgttgaagatccttggggtccttgccgtcgacggtgcagccgacgctgacgcaggtcccgagaatctccttgacggtgccggccaactccttggccatggacctggacctcatggtcctggcgatctcgatgacgtcgtcgagggagatgttgccactgtgcttgatgttcttgaccttcttcctgtccctctcgggctctttaagcgccttaatgacgagcgccgcggcggagggcacgacggagaccttggcctggcggttctggacggtgagcttgacggtgacgcgcaggcccttccagtccttggccgtctccttggcgatgtcctctccgatcttcttgggggagagaccgagcggaccgatcttgggggcaagggacgaggccgctccgacctccccgccggtcacgcggacgaacacctccaccacctgcgacgggttcgtagtctttgggtcggtctattggttctttgttcgtt

SEQ ID NO: 39668 - DNA, 922 bp, Setaria italica
  misc_feature (1)..(8): n is a, c, g, or t
  Peptide Sequence Number=SeqID_105642
nnnnnnnnttaaaaaagaaaaaacaaaaaaggtaaaaccttaaaaggggtaaaccttaaagaaaccgtaacgaaacggtaagacaacccgaacgactagaacctttttgtactttttttatttttttattctaaccacattaataacttcaatattgcttgtgaatgttcattaaagcttgacaaaaatagtctcaacaactaaggcatgataaacatttcttcttcatcaagagtggaactccaagtgcatgtatcacactcattccccctcaactgaatcaggaaacatctagatagaaagaactacttcagcagcctcacatagcaacatcctggactccaaaccttcttaagctgacgggatctcgacctcgccgtcgtcgatctcctgctgcaggtccttggggtccttgccgtcgacggtgcacccgacgctgacgcaggtgccgaggatctccttgacggtgccggccaactccttggccatggacctggacctcatggtcctggcgatctcgatgacgtcgtcgaggctgatgttgccgctgtgcttgatgttcttgaccttcttcctgtccctctcgggttccttgagcgccttgatgacgagcgccgcggcggagggcacgacggagaccttggcctggcggttctggacggtgagcttgacggtgacgcggaggcccttccagtccttggccgtctccttggcgatgtcctctccgatcttcttcggggagagaccgagcgggccgatcttgggggccagcgacgacgccgcgcccacctcgccgcccgtcacgcggacgaagacctccaccacctgagaggggtccaacttgggcggcatggctgctgcttgctcgagctaggggaggcggcggcggggtgcgggtagggtttgggagcctgaggacggc

SEQ ID NO: 39669 - DNA, 656 bp, Setaria italica
  Peptide Sequence Number=SeqID_105643
cagccaagaaggcaagaaaccaccaccggcgccggcaagcaacgaaccaggcttcccttccctccctccgctccgattcagcgccggcagggaggccgcagagcagccagaagccatggcggtggacctgatgtcatgcggcagcgcctacgagcacctggcgttccaggaggccgccgccgcggggctccgcagcctggagctcctggcgtcatccctttccccgcgcgccgccgggagggcggagtccccgccactcggggagatcgccgaccaggccgtctcccgcttccgccgcgtcatcaacctcctcgaccgcacgggccacgctcgcttccgccgcgcgcccgccgtttcccccgcggcggagacgacgcctcccgcgtctcctcgccccgcgccgcccgcggtggccgcgccgcctcagaagaatagcctgacgctggacttcaccaagccgtccccggcggcggcgaccaagcaggcggcggcgccggccgtgtccgcgacgtcgacctcgttcctgtcgtccgtgacagcgggcggcgagggcagcgtgtccaagggcggcagcctggccgtgtcctccggcaagccaccccttccgaagcgcaagcacccggctgcgtcgccccacaacgccgcccccggcgccg

SEQ ID NO: 39670 - DNA, 467 bp, Setaria italica
  Peptide Sequence Number=SeqID_105644
caagtgattatgatgtcaaacgagacaacaatggatatcatgaagagatgcattaagcttggcgcctgttttctggtgaacaagcctattgatgctcacactatacataacatgtggcggcatattgacttcggaaattcaaggatgcacaatatcaagaagtcattacaaggtaatggagaagaacaagatgtaagttactggaaggagagtgctaaaacgaagaaaggttatatttgttggaatgattatctgcataggaagttcctacatgctcttgaaatacttggagaaggtgctgcttctcctagaaacatagagattctcatgaacgtggaaggtgttaatcgcaaacatatttcttctcatctgcagaaatatcgaaagcgcatggaagcagggaaactaaacagtgcattggatgcaacaaagtgcagaactagtgcctcaaaatccgaatctgcaag

SEQ ID NO: 39671 - DNA, 263 bp, Setaria italica
  Peptide Sequence Number=SeqID_105645
gctcaaccagctcatatgagcccatgtccttttagtcagccagttcttgtgaggccaagtccttttagtcgctttccttggtatcaagggaagaagtgatgggtacgtacacgatggctatcttgcactcataatctcagttattttgtgtgtgtatatatatatcttggacttccctgtacattcttgtataaggaaagaccttgcttatcctatgtcatgtgctgaggttgagacttgagaaattagcactatgaataaag

SEQ ID NO: 39672 - DNA, 1272 bp, Setaria italica
  Peptide Sequence Number=SeqID_105646
aaacttgcaccctacattacattgttatcgaagatcttaagaatacattgcaagaatttcattacatcggtagctacattagttagtaggcgtacaccactaaggaataggtattgcacgtccaggccccagcgacaggccgcagatatgaagtgccgtcagttcagcaatgatcgaatgcagtgagcacaaccatcttcagttgagctgctacaagaatcccaaacaagtaacacaaaacaaaatagatgcagaacaaacataaacctttcatatattatgccaagatcgcactgcagcaagaccatgagtctctaactgttagcacattgaattcagtgcacaacaatgtaaccatcctaaaaaattattattgtaccagtaacccaatttatactgattcaatcctagcaagctgtaacatgtgcttcaagtcttggcactcgaggtaaggttcacttcagagcaatgaatgtcacaagcgccagccattctacagtttcaatctagaacccatgggagcggtgaacactgggtttgagaaaatccgtgaccgtgataacatcagttttgaccaaaccagtggggtgatatgtaaccagtaccctcccacttcatgccactaaaacccccatttagaatatctactacaaaaatgcttgtatttagctctactttatacctacaaatcaaatctgcacaaagtttcaaagttcaagctaaaagtagataactgaccattttctgggtccgaaactgggtggaaaccacaagagacctgatacagcaagattctgattttcacccaccatccagtataccaaaccattgttaacccacaattggtgaatccaaaattatcaatccgatggtggatcctgtagttcttggcatggcaattgctaacttatcatggctgccaccaaccttgtatctcatcagaatcaataaaatgttcacttaatcttgcccaatgatttgtatctaaacaacattatatttttgatttgtttgctagatgcctagggcctcgtttggaaccgcgttggtggcgtgtctggtggggaaacgcggaataatcccgccgaacggtccacggcaagcgcacatcagcgaaccacggcagacgcaaaacacgggattttcaactgcgtacgcaagaagtggggtcggagccacaactcacttcctggtgacacgcagctgcgggacatggttccaaacacggcctagatctctagccaattcaatagcgccaaaccaaaccgtgcg

SEQ ID NO: 39673 - DNA, 548 bp, Setaria italica
  misc_feature (514)..(514): n is a, c, g, or t
  Peptide Sequence Number=SeqID_105647
aatacgaccactgcaggcagcagaggaattcctagcgctgctggctggccctcccatttcgttttccgccgccgcggccccgcgcgcccgagcgtttctgctcccgtgagcggcgaggcggttcacgtgagtaaagaggaagccttcctcacgggatggcggcggagggggaggcggcggcgctggagtacacgccgacgtggatcgtggcggcggtctgctcgatcatcgtgctgctatcgctcgtcgccgagcggttcctccactacatcggcaagaagctcaagaagaagaaccagaagccgctctacgaggcgctgctcaaggtcaaagaagagttgatgcttctggggttcatctccctgctgctgacggtgttccaggggatgatacagaggacatgcatccctgccggctggacggaccacatgctgccatgccagaggctggatgtgaaggctggtgagattaacgccaccaaggagcattttgtgctgccgggatcattggaaanatcaggaggcggctgctcagtgaaggcggcgcgt

SEQ ID NO: 39674 - DNA, 271 bp, Setaria italica
  Peptide Sequence Number=SeqID_105648
gaccagcatggcgaggatatccgaggctgaagtggtaggcgcagtgcaggctttggcctccaatgttctgggcctctgggagaagaagatagcaggcgtatcttcatctgcacaggctgctgaagctggcctgcaatcgtgcatggctagagttttgaagcaatggagagcttcgctgctgcctgtgagaacacctacaaggatatttgccttcgcgctgaagaagagaatggcagacctccagttgcagacatcgctggtacaaggcaac

SEQ ID NO: 39675 - DNA, 523 bp, Setaria italica
  Peptide Sequence Number=SeqID_105649
atgattccaattgatgaatcaaatctcatcttcactatctccatcaaatgtggacttcctcttcatcctcttgtggctgaaaggagttgaatcacaaagactttcatcaatatcatcctccaagccaccagaggtacacggcttctcatcatcatcttcatttgtcatcatcatcaaacaaaggaaccttagtggagttgaggtctggtataccctcggtaggtgacttcatagttgaaggtatgactgattcccaaatgccaaccctgcccatgacatcaatcagaagtaaagaatttccatccggtttccaagccaagctgcatatcctctcatcaaacttctgtctctcaatgtcctgccttgacttcacatcccagatgagcacctgcctatccaggccagcactggccaggtatctcccattcggagaccagcacaagctgcacactggctgctcatgatctcctttcagcgtggacacctcctcgcctgtgtccctatcatacagcaccacattgtt

SEQ ID NO: 39676 - DNA, 600 bp, Setaria italica
  Peptide Sequence Number=SeqID_105650
ccttcacttcttcccctcaaatctcattgaccactcactgttaccagcccagctaccgaaagggcggtacattagagtgctcactattcttgtcaactttgcatggatttgcaaacacacttcctgattcgttcattgcagccattgtgaaaccaaaatagtccgtcatcgaaggaactctagggcctcttccagtgtcatgaaagtcaacctctacgtgtgaatgcccctcattttcaatagtagtaatgcttccaagcatgttgtaggcaaggaaatttcgcataccaggctgaggcggtgttgatccaggctggaaagcagcttgcattcttgcagtaaccagcctccctgaagttgcagaatcgcctcttgccttcccagcatcctcctttttatctttatgcttatctttcaatcttttggatgattccaattgatgaatcaaatcctcatcttcactatctccatcaaatgtggacttcctcttcatcctcttgtggctgaaaggagttgaatcacaaagactttcatcaatatcatccttccttaagttccttaccttagtttaggttaactacggtcgtttcttctattcta

SEQ ID NO: 39677 - DNA, 501 bp, Setaria italica
  misc_feature (448)..(448): n is a, c, g, or t
  Peptide Sequence Number=SeqID_105651
gccgggtgtccatggtgccgccctgctgcacggtgaaggtgaggagcagcgggatcgggaggtagcccaggacggagctgaggaagatgggcagcatgcggaggatgatcttggcctcctccacctgcgtcaccgtgcacagcgaccaccgccgcgtgtcgccgtcgtccacggctgccttgtccaggaacttgaagcctgaagttctctccagcacttcgatgctggtgcctgttccttgagtggcctgatgcatctccatcaaatcatcaggcactgaaagattcctcttcctaaaagcagccacaaaaaacctgaaggattctggtgagtgggctccccgtgggcttctggtgccggtagaatggcaggccggcgaggaggacgatggcgccgaggagcgccacgagcgcggagagcacgaagccgaggtcccagccctgtgtcngcacccacaccacgaagacgagccccacgaaccctcccaagccgagactgcca

SEQ ID NO: 39678 - DNA, 923 bp, Setaria italica
  Peptide Sequence Number=SeqID_105652
ggaacctgagcaccttcttccagcttccccggcacctctccagcagctcccctcctcgccgcgggccccatggccgcgaacgccgcccgcgcagcgcagagcttggacgcggcgtactccgcgagcggcctgagcgcgcggcaggtgccctcgagcctggcgaggtcggcggctgcgagcctgccggaggtcaggacctccccgacaaggtggcccgggagctcctcgatggagaacgcgcgcggcgccttctccccggccatggatccaccgccgcaggagccccggtgaggtgatgaagccttggccctcttggtcccggaccgatcggaatcatccaaggatccgggcgcgcgggtcgaaatggcgccgggatcagcaggaagcagcgacggcggcgggggagctgcggctggggaccgaatcagatcgagcagcagaggatatcgcccagagactccggcgcccagcttgtgcggcgccgaagcaacccccggcggcggaagcagcgagcccccggctggaaccaatcgaatcgaatcgaatcgcgcgggggagcgcggcccaattgggcaaggaacagctcgcggcaccgaattccagcaccaatcccgacctcggcagcactaaccggaagcgaatcggggcgggttgcggtggtggggggatgggatttgaggccgggggagcggagaaccttttctaattgggggattccttgtcccctgcctcttcgaaaatcggcgcgcgtgcgtacgcgatttcacgcgcacgaacgctgagcggacgacgacaaatacggcatacggggtagcagaccccaaaaaagctacgccgcgggagccgaaagggaggagcgagagggggaggggggagagcagcacagccacacagccagcatccaaggaattctcctgtgcacg

SEQ ID NO: 39679 - DNA, 651 bp, Setaria italica
  Peptide Sequence Number=SeqID_105653
accaggtgcgcttcaaggcgatctgccggacggcctggcgaagccgtccccggggtgtcgacgccccggcagctgctgctggcgtcgatgcgggtggcggcgcagaaggcgaaggaggccaaggcccgggtggaggcggtacggggccgaggtcgcacgagggcgggccgatggtgtccatcatctccacctgccgcaagggctacgacgacgtggcgcagtcgctggaggagacgcgggcgctcatcgaggcgcagggcacccagttcgtcggcttcaacagcaaggtgtcggacgccctcacgagcgccagcgactgcgacaccgccttcgaggactttccggacatcccgtcgcccttcgccgccgtgcagaagaacgtcttccgcgtcgttgacaacgtcctcaacatcgccgtcgtcgtgcagcaggccgaggcgcaactccccaacgcgcacgtgccgcaggcccactgaaccccactgatggcctccctgtaaattaaggcaggggtggtgctgtactaccgatctctagcacccgaatatttatatatgaacaaggcttgagaaaaatttgtacgcagtagttgtaacttatgaagttacgaacacggaattacaggttgagctctcgtatcacgaaaaaaaa

SEQ ID NO: 39680 - DNA, 948 bp, Setaria italica
  Peptide Sequence Number=SeqID_105654
agaacagtcggacaggtttcgcttgctgttaggacctgctcgcttatcagccctctgtacaatcgatctcaacttatctgatttgcttttcgacgatctcacatgggcgattgctgtctaaacatgtcacttggagcattggaagatccaatagagctgctttatatatgctcaagaagcagcactcgcaacacctttgcttgatcggttgtacttcatgtggctcttgacaagctggccagcagaaagggccgccagaagagagagctcgcccgcgagaacgctgcccgcgacaatggtagccagaaccttagcatttgccccgggtgagtcacgattcggacccctcacaccaagcaggttcagacaagcggcctgtgaggcaagacaagtgccacccccaatagtacctacctcaatggaaggcatggtcacagagatgtgaagatcatctccatcattcaccgcctccaacatggtaatgcattgtgagctttcaacattttgtgcaggatcctgtcctgtagcaatgaatagggcagttacgatattgcttgcatgggcattgaaacctcccagagctcctgctaaagctgatccagcaagatttttgataatgttaagctcgataagtttttgcacagtggtcttaagaacattctgcacaacccctcctttgattgtagcctcacaaacaacagattttccacgaccttctatccagttgacagctgtgggctttttgctgaacaatagttaccagataagctgatgagattcatgtcggggaaatcattctgcaggtagcccaaaacattctcaacaccttttgacaccatattcattcccatagcatctccagtactacaagtgaacctaatgtaaaggttcctaccacctagtgcacaccgaataccctgaagcctcccaaatctgctagacctattg

SEQ ID NO: 39681 - DNA, 892 bp, Setaria italica
  misc_feature (235)..(235): n is a, c, g, or t
  misc_feature (843)..(843): n is a, c, g, or t
  Peptide Sequence Number=SeqID_105655
tcagtgaccacatgcgggactcctttggggaaatcctgtcttgccctatctgtctacaggtataatttatggagcacaataattgtctaagaaaacttcttgtacaatatgctctttgttcttgttaaaagtaggatttggaaaggaggccaaccattgtgatcattaatgttttggaacttgatatgccctctctttttttctgtagggcggattaggatttggaaaaaaaacntatttataaattttggctaacaattagtcaaattatatgcatacctagtgtataaatagactcttatttcataaatattctaatacaaatattgaatttgtagcaattgatgatataatgtaaagaaaagatcaatggtcaaagtatacttagaaagactttctgaaatcctaaaacgccttaaaaaagacaggggatactgggatactcattattaggtggttgctacatgcttctagcctgttattagtagcgtgatttgtttaccagcggatgttaatttttttcctgatgattttattcttatcttcttcaaaagaatattacggagtttatattgtttcttgcacaatataagactttgaccgcaatcattcaatacaagttagcacatagaccaccaataatttatcctgggaacaacaactcactgctaaccaatgattttccataccattttattcgaaataatttctgagcattatattgttcaaccagaaacttgggctcatacctagatcctgataatgagctcatgaatgcgataatcagatagttgaatgcacggtgcgaatgatacactgataggaaatgtagtgggatgcaanacctcaatggggcgaactgatgcaattagcaatttcataccaagaattt

SEQ ID NO: 39682 - DNA, 394 bp, Setaria italica
  Peptide Sequence Number=SeqID_105656
cccccgcccttgatactctccagctccttcttggccccgtcaagctcggcctccgccgcctgcagcagagccatgtcctgcgcctcttctttcttcctcctcgcctcagcctccgccacgtcgccgctcttggcattattgttcctctccatggcgcgcaccagctccatctcgaactgcaggacctccacgtcggcgttcgtcgcggcgagcttctcctccatctccctcgcgcggcccacttcctcccgcagcgcctcgaccttggccctggcggccgccacctccccggcgaaccgctccgcctcggcgcgccgctgggcgtcgatctcccggtgctcccgctcggcctcgatgcgcgcgagctccaccaggacgtgctcctcgttcgcct

SEQ ID NO: 39683 - DNA, 482 bp, Setaria italica
  Peptide Sequence Number=SeqID_105657
gttgcctgagcgtatatctccatgtccttactaacagagggaaaactttcacatttcaaagatattatcagaaccataacattaacctatataaaactcagtgactatgcaaccttccattctagcaatttgttttgcgaggggtaattttccacacagttactgcaaaactctaaaaataactttacagagcattgtacattctgtgataaacttctcaaaaattaaataaacacaggattgcaacaaaaaatttccagcaagcaacagagacaccttttatttatcttgtacttaatgttcaatgcttaaactttaaaatatttaaaactaacaaccaaatacaatcctctacttgaggctttgcataatgacagaaggaatacctctgacacttgacagagccacaaacccaataatatgcaaacagttcatgtcttcttacctgaacaacctgcataatttcacgacctaaagtcgtc

SEQ ID NO: 39684 - DNA, 431 bp, Setaria italica
  Peptide Sequence Number=SeqID_105658
gaatggtacaatcaaagatcaaatcaaagctgagaacttcacagaagaagaggaagcataccttgagaagcaagtactcttgatcagcgatccaaagcgtgtcaaggagaatctcattcggctgccatcgttgagcgagcaaaaacaagcagaaataggagcatttgcccggaggttgcaaggaatcacaaagtcaatatcaaggtaccctacagccaagcgccgttttgatgtccttgtgaaatctctctcggaggagcttgcgaggactatgggtggcagtcagtctgccaatggatctcaagtccggaagacgagaagcggtattgtccgaatgcttagccagagctccctagggaagacaacaggcatccggggcgatgatcatgaggcccagataacaggcgatgttaaacaactgaatagaatta

SEQ ID NO: 39685 - DNA, 1635 bp, Setaria italica
  Peptide Sequence Number=SeqID_105659
caattgtctgactttgttgccccagggttttagtacaggatatacgggactgtgtcgccgtaccgtatcactataattcgaaacaccaaaagggttcaaaattcaactggtaaggattgtactgagcctgaatgagacacgacaggaaaggaaaactctgaagcaggtattatatttacaaagataacagaatgaagtactttctaacagctacatgtaccatcttcaaagcttaaacttcttagaaaccaatttttttgttaacctttagcagttctctgacatcacagccgatctcagaagctagtgttgcatcttagtcaacttgcctaaccctactcctagaaacgcaatggcctacgcgcgctgttcactacggaaacaacatgagacttccattcagctttgcatccctcagagacaccaaactgaggttgtctccggatgtgttcatggaatatgtgcacaaggaccacagcatcaagagcagcatactctttctgcttttggctgagtggccgttgctcccagttgctatttcgtcgtgtcttgttcaaaccaagtcctaatatttcctttgacaatccagagagaccaccagtaacccatttaaacagcttctgcatatcaagtagcctttcgtaggactggaaacattccaattggccataggattgtgttagctgatgaagatcacattgaatgtcgtagcccagcttcagtatattagatgaacacataattcgcctgaagcagctgtccaatacttttgggttatcttcgtacagcttaatcagatcaaagatgaaggctatcttatctgatgcaatttgtatgattgaaaccttactaggtttgctatttttctcaaaatttggtctccactcgcaatccatgccaataatcttaaaaccctcgatacaacttgttgcattaagcagtccattggtctcatcgacccagacaatttcttctacatccaatttcttcagatctaagtaatcagatccacaaaataccttctctggaaccaaagaatggaaataaccttcaagggagtaccgctggcaaagctcatcaaccttctccatataaccagcttccatggccaaatataccaggtattccatgagttttgtttccttcttggcccggatttctgcaatatcccagcaccctttctcagccaacttctttactaaactctctttatacaaatagctaacatctgggaattcttctgtaaggtcatgttctttcaccaacttgttcgcactctttagcatttgcatatctaggtacttctgaatgactaaagatatcatttccttgcccatgaaagtagcacactcctctgcaatatctaattgattgctttcaattaattttatgagaaaggactcatcacagcatttgatggaaaatcgtgttatcagagccacagcgattgcattggattctgattccataaagcattttacatactgtcttagatgttcccttgctttcactagatcatcatccaactctgaaccatacagagcataagccatatctctcaactcaatctcaaatgtctcaagaagcttaacaaatatgcggttctcatggggtacaacagaatcaaggatatca

SEQ ID NO: 39686 - DNA, 764 bp, Setaria italica
  Peptide Sequence Number=SeqID_105660
aatgcagctcagtgcacaacatcacataggcagagttcctagcagcagatgatagcatgcaagaggatgtgcattttagaaattcagctgaagctaccacatccttatcaaggacacaagaagggagtcacagggtaactggatttctgaatacgtcttatgcgccgactgtagaaccattttcccggcaattctggaaagctggagagtatggagtagctactgaagctgcgatcaacactggccaaaactgcttacggattcatcccaagtttcttcattctaatgctacttcgcataagtgggcatttggtgctattgcagagctgctcgacaatgctattgatgaggtgaacaatggtgcaacctttgtgaaaatagataagatgaagcattctcctgatggggattatgcattggtgatagaagacaatggaggcggcatgagtccagaatctcttcgacattgtatgagcttcggattctctcagaaatgcacaactgcatccattgggcgatatggaaacggcttcaaaactagcacaatgaggcttggggcagatgctattgtgttcacatgtactaaagataataggagaatgacacgaagtgttggattgctgtcttacacattcctaacgagaactaagtgcaatgatatatttgtaccagcggttgactacgaatttgatgcctcatcttcaactttcaagaggataatgaactgtggtagaaaaaacataatttcatctaatctatctact

SEQ ID NO: 39687 - DNA, 211 bp, Setaria italica
  Peptide Sequence Number=SeqID_105661
tgaagtatcaggaactcaccaaaacccaaccaaaattacccatgtggatgaaacagtgagctcaaagacagtaaaggggaagaataagtgggtggattaatgggatcggggtaaaaggtttcatgaacacccgccaaatttcagtaaacccactgctgcactgaagcatggtaaaattgcagaaatagtggatggtagtagcttctcgccc

SEQ ID NO: 39688 - DNA, 708 bp, Setaria italica
  Peptide Sequence Number=SeqID_105662
aaaaaatcaagtgaaaatggaaggttgatatgaaatcctttaggaaacaagggttcataagaaagatcagtacacacatggcatagcctccaagatcacacaaatcgagcccagagtgctacaatacgtgaccttttcgcacctaacctccaaacaatattcatgatgatatattgtttcgaacagtgtcttgctactctataggtagacaagcacgaggatttggcccggaaagaaagccgcggcaacacaagagccgtgtcgtggtggtcatgttacttggatgaacatgagcacatcactagatcgcaatcctctgaacacatcacggaaacttgttgtgatgaagtgaagcaacaacacatttgtgcctttttatcatgggaccagaaaaaaggcgccataaaaaaagttaaatctacccatcaagccaagcaatcagaagctcacccacccttgccttccatatcatgcacatcagaacaaacaaaaggcaacagaccagtacagaaaggttgatgcattcaaagtagcaaaaagaattctaaccatggcaattttactgcaatccagtatattctcctagaattaccatatggatgaaatgtttcatgaaatggaagttactcaccgataagacatccccgatattgctggagacattttcagcaacctttgagattggcctgcagtaaaacactactcaca

SEQ ID NO: 39689 - DNA, 881 bp, Setaria italica
  Peptide Sequence Number=SeqID_105663
cgtccccgaccgcgatccgcccaacggcaagcccgacgagccactcagggtgaacatcctcttcaagcacatcaagggcatgctctccggcgacaccgccgtcgtcgccgagaccggcgactcgtggttcaactgccagaagctcaggctccccgagggttgcgggtacgagttccagatgcagtacgggtcgatcgggtggtcggtgggcgcgacgctcgggtacgcccaggcggccaaggacaagcgtgtcatcgcctgcatcggcgacggcagctttcaggtgacggcgcaggacgtgtcgacgatgctgcggtgcgggcagcggagcgtcatcttcctcataaacaacggcgggtacaccatcgaggtggagatccacgacggcccgtacaacgtgatcaagaactgggactacacgggcctcgtcgacgccatccacaactccgacggaaactgctggaccaagaaggtccggacggaggaggagctcaaggaggcgatcgcgacggcgacgggcgccaagaaggactgcctctgcttcatcgaggtgatcgtgcacaaggacgacacgagcaaggagctcctcgagtggggctccagggtctcggccgccaacagcaggccgccgaatccgcagtgatctgctgacggatctctccagcggttctgcaatggcgccttcgggagtcctcaagtgtcggagctgctttcagtcagttaatttgtccgtctgcttcaagtggacctttttcttttttttttttctttcatcgatgttgaatatgtccacgccgatggggctgtcggtcttatgataacgtttgcaattcagctgcttggaattgagttctaatgtaaatttgcaatacaaaaaaaaa

SEQ ID NO: 39690 - DNA, 236 bp, Setaria italica
  Peptide Sequence Number=SeqID_105664
gctgggctgatgttttgacaagtgtgaaaaaaatggacagccagaagggtgacgcagaggaaaagttgatgaaaataacagggggcattttctttagcgacccattttgagatttgttcagaagttttaggaaggggttgatctcttaacagattgtattgatatagcatgatttttgtttagttggtaccatgataatctctagtttatgctctaacaaaaaaaaaaaaaaaaac

SEQ ID NO: 39691 - DNA, 439 bp, Setaria italica
  Peptide Sequence Number=SeqID_105665
tccttgtcggtctaaggttgtattcgggtaactaagttgggacctgtacctcgacctcctccaggcggactacaccgagggggacgctctggatgctttgaacttggtccgctactgctgtaggcgaatgctgatgacccatgtcgacctcatcgaaaagctcctcaactacaacacgctggagaagactgaagacggagctgccagttaagcgaacatggcatgctcgaatgttggtccgtcacacctagtacccttcactggagtgttactctgtgttttagtacatgtctggacaaactcaatgctattctccctgtcccatgctgtgtctgctgatgcgtgtaattggaaggtcatcgtaacttcaatttaactagggatctgcgtatgattgttaacgtattttcttgtaactgtcatgggcgtactaattgac

SEQ ID NO: 39692 - DNA, 375 bp, Setaria italica
  Peptide Sequence Number=SeqID_105666
ccacggtggcgcccgccggctcctgccgccgctgctgccgcggctcgtcctccccctcctcccccattgtctgatcctgatcaaggccaccgcccatcctgccgctcagcgtgtcgtcgaacacctgcgtgtgcacgtgcgcgtccccgccgctcacgtgcgtcgctcccgctcccatggactgcagcagcagctccggcccggacacggagtagttctggttctgtaacgcggcggccgtcggcgcgaagggcggctccggctcccccggcgaggcaatgaggccgaagggcagctccggggatggcggcacagcgccgtgcgggtagaacgggacctcgtcgtggaagcagccggcgtagaagtaggagtcca

SEQ ID NO: 39693 - DNA, 431 bp, Setaria italica
  Peptide Sequence Number=SeqID_105667
cagaggcaaatgatatgagcttgtaattatgctgatttttttccctgccacacagggtgtcttgctaggtgaggcaaatgaataaacccagtaactacactacaagtttatatcttgcatagcacctgccattgatgatttgtgatgccaaatttaagatgtataaggaaaaaaacttatgataatcatacccaaagttttggaagcaggataaagagaagaattggacactaggaccatgtttaatgcgcggagtatcagattgggactagatctgttgtgctaccttttattcttcatgtgcaccctaccatatgaaattgttgaaaggaagcagctaagaggttaataaggttgcaagaggatttatccagataaaaagatctaagaatttattttgtcagacagctaagaacaaaaaggtcaggaat

SEQ ID NO: 39694 - DNA, 1198 bp, Setaria italica
  Peptide Sequence Number=SeqID_105668
gtgccttggagatccatggcatgtaggctccctcatggcataagttctccaaccagaagaagaatttcctcagcaggctcagtctctcatcacagtcagctgagtttatttgtacggctagatctgggtaatgatcgagatacgacagcccaattgcccctgtaacatagccttttgatgcacttcgcaagtgtctttgtctgctcacaggtttccggtcagtggcttttctccaaagctcttcgtattcattttgatcatatggctgacttaaaacagcgttgaggttttcatcaaatgtagaggatccactgcagctaatagcaagaggtgctgcttgttcatcttcacatgcatttgaatcagaaggttcagtgtaaagtacaagtccacgctcatctgtgcagataacatcctgaccatcaatgttctctgaagaaggtccatccatttcatgctcagatgcaattttattagcctgtgtaagcccatattcacatccataggtagtgtagtcttcctccatgttttcaagtggagacatcaaaggctctggttcatttgtggaagtgccagttctcaattcatcatatccagcaggcatgtcttcttctcgctcgtatacaatggtgacacctggttctggctctataaccatgaaaccatccttgaatttcacaaggcgcagaaataactcataagattcatccactgatgaggatttcttctgcttcacaagtgatctctttggtgaaaaggagtgatccacatttccactggtagccttgactgcttttacaccaggttgtttgccatttggaacaccccaacttttatgcagtgaaccattgggagaattggggccatttttgccatttgtgttcccgtaggatgtatcatcttcctcataccgtacagaaacaggcatgccatggtccccatttggcacatcaaggacataggtattcccatctttgcttaaatgttccaggaaaagtttataacatggatccatttctgaagcatctttactaattggaccatcagtcaacttgcccttcttgcaagatgatcctttcactgttttcttggtcttcatatgcaggttcttgaagattcaagatgggttaatttattagtagaaaaaatcatccatcagtgactgtttgcctgccgccagagcaggggaccagcggcg

SEQ ID NO: 39695 - DNA, 2112 bp, Setaria italica
  Peptide Sequence Number=SeqID_105669
gtcccaaaaccaaagacagaataaaagggttttaccgtatagcgtgggaaagttagctggagacaaggacccaggttctctaatgtgcactgagatggcaaaccacgacttctgttcacacttcctgtacatatggatttctgaattggtgctgaagcatacattaaggtagccagtgcagacatttcaccaattcgttcagccatatcatcaactgtatacaacatttcatcaatctcaatagcagtaagattactactattaatcattttctgtgacaaattccaacgggcattagagaatgatgcctcatactcaagacctttgatcctggagaagagtaaccattgtgcccacttgcaatcacctgcagcgtctttgagtaaagggatacaatccttttcaggagccaagttacagttgtccagatagagctccagtaggtatggcaagttatattgcacacagaaacgtatgactaacttatgcaatgcgccttcacgaccctggaaattggcatcatctggcatctctgacgcagaaaatgtcgtagaatattccttcctcggaccaacttttataagcatgccagcacgggcaagcaaaggtataatttcagtagtacttttccagtactctttcacaaagatgtgtttctttgccaactcctgctgtattagcattctgatgtacgacgttgattcatgattgtacaaggatctaaataccttaacatgtggtatctccatgcaaacaggttccagctcttctgagtcacatatgtacatgttgtaatcagggactgttaggtcagaaacggtgttgtcggcagcttgtaaactgtccacatttactctaataatcccttctaaaagtacgctgttgggaatcatgtccagaagttcacagactttccccgcatcattatgaccaacaaaatattcaaactgagattcccatgggatatgagcatgtacatgataaggctgatccagcaatatgcggtccacagttctctgatcccaagcatccgaccatacggcagcgcaggcccagtagccatcagaaatgttgctcccagaggactcctttgaatcagtgtaatcatcaatgttcacccaagaaccaagcactgttccatcaacatcaccgcattcaataaggggttggttgcggatatggagagataatgcaggtttatcttctcctggcagtgtaacaatctttgcagcatcacgaatgacattctccctgacaaaatatgtgtcccagaagctgctgcttgggtagaaccgctcaatcagagttatagtctctagcatcttccattcacttgaccttatgaaccacgctcttcatctcatcagcaatttgcagccttaatgacctcctgacagtaccttgcataagttgtcttaggtctgactctacatcatctcctaacctttctagcgttgctacagccaattcagttttacccttcatcaacagatcatatacaatagatcttcctatttcatgaacttcggagaaagcatcttctgaatcctcattggaaactaattccctctggcgcaaaagctgcagctgaagaactgccaaaggtaggcgaccagattgcagtgcttctctgactacagttttcaagtcaaagttattcatttcccatctattaatcatttccttgatgtttccttgaataatttgtctcccatcttgagcagtccctttattggtattaatatcatggaaattcgaagcactaagagatgattcagctggcgctagagctaacaggctgtcgctatcaggaaccaacacatgagctgactcttgcctgtcatgagcatctaaaccacctgacagccctgatgaaagaccatccactacaacaactgaaagtgaagaatcattttgcaataattctgtacctattttcagtgagttcttatcatctcccatccgaacagaattctgattctttgcagagactcggtgttggatactccttattaccatcaaaagggaagacatttcatgaagctttactgaattatctggcatgtctgtgttctgcttctgaagtccataacattttatcaattcttgttg

SEQ ID NO: 39696 - DNA, 411 bp, Setaria italica
  Peptide Sequence Number=SeqID_105670
aattgtaatagttcccatagcagtcatataaagatggttcctcagtccatgctgttcgcttctgagctgagtgtaattgtaatagttcccatagcagtcatataaagatggttcctcagtttccttattcaatagttatatcttttccccttactttctatagatcagttttgcccgatggtaatgaatctaagtaggttaaaatggtctggtaaatctagtcaatcgcatttgcgaaatgtggacgatgcaagcaatggtagagcggctttttaaagcaatgccagtgcttaagctgatgcattaatgatagggaatatgtctcttcaattattctgtacattctggaaccatcctatggacatagcgacataaacccttaaatctcgcatgctgattctttgtccttga

SEQ ID NO: 39697 - DNA, 366 bp, Setaria italica
  Peptide Sequence Number=SeqID_105671
tttgtttaaacttttctttaagttccttactttgtttacctttggttaagtttggtttgtaggttgtcaaaatgaccaagcagggaagcggacctcttttgtggatgatagctcatcaacttgttcgtcagactcagttccttcagttatcttgaatggatcaggaggtgcctggacaaatgtcagatcctcatcaaataggtatatttcacttgtattttcacctatcatactgttacttggtatttatcatgctgcattgtgattcaggggaaacaaccggaggaataaggatactgatacacgggcaggacttggacaaggcggaccaaactcagtgtataatggttttgtaggatctggcag

SEQ ID NO: 39698 - DNA, 655 bp, Setaria italica
  Peptide Sequence Number=SeqID_105672
agcaagcaacaagcagcagcagcatcagtaacagtagtgattgtgctccgtcgagttcaaacatcagaagtgagattgcgaagctcaatttgaatggtagatcacgaagcaggcagctgttgtcagaaatttctaccagatttactccttatcaaccgcaaggcctggttgctgatgagttcccacacctagacatcatcaatgacttgctggacgaggagcagagcgaaaggagaagggttcttcgacctggattcgctcaacaattctctatgcccaatgatgccagcacacctgattatggcttgtttggtgagccatacctgttggatcagtccgagccatactttgatgacgagcctccaaggttttatagcccattgagcagtgctcctcgagggcttagggaccggagttattcacacttcgatctcccttcttactccaacagcagccagtttgatgatctgatgatgaaccagtggcaatacagctctgacatctccatgactagtttcatgtcggacgcaagtggctacacctatcagccgcaggatttcccggtgaatggagtaagcagatacccatccctaatacgagcctagaccaactgagtaatttagtgtattgctattggtaataatgtgtggtgagt

SEQ ID NO: 39699 - DNA, 3806 bp, Setaria italica
  Peptide Sequence Number=SeqID_105673
taggcggcctcccccgtggggggtcagatccgagctgaatcggggggatttcccgggcaggaaggaaaaggttgagtgtgaaaatatctgcacttcttgaggtgatagagtaatggctggcactttgattgaggacaatgctggggatggtagatcctcatcaactgaagagatgccaagtgatcagcagagccattccggggattctttagctgagtggaggtcaagtgaacaagttgagaatgggacgccatccacctcaccagcttactcagacactgatgatgatgattgtggaccaaggccttctgaactttatgggaagtttacatggagaattgataatttctctcaaatcaacaagagagagctaaggagtaattcctttgatgttggtggatttaagtggtatatcttaatctatccacaaggatgtgatgtttgcaatcacctctctctctttctttgtgttgcgaaccatgataaactactcccaggatggagtcacttcgcacaatttacaatagctgtaattaatagagaccctaagaagtccaagtattctgatacactgcaccgattttggaagaaagaacatgattgggggtggaaaaagtttatggagctatcaaagttaaatgatggcttcgttgttgaggatgttcttaccatcaaagctcaagttcaagttatcagggagaaggcagaccgtccattccgttgccttgacggccagtaccgaagggaactaattagggtgtatctatcaaatgtggaacaaatttgccgacgctttattgatgaaagaagaagcaagcttagtaggttgattgaggataaactgaggtggtccagtttcagcgcattctggctagcgatggatccaagtgtgcggcgacacatgacaagggaaaagactgacactatattgaaagttctagtgaagcacttctttatagagaaagaagttacatcaaccttggtaattgactcgctatatagtggactgaaggctcttgaataccagagcaagaacaaaaaggggataccgaaactaacagagacagatgctcgaagcactccaatggtacttattgatcaggacatgtttgttttggctgatgatgtgatagttttgcttgaaagagctgcattggacacactgccacatcaaccgttgcccacaaaagatgataaaagttcacagaaccgtacaaaggatggcagctcaggtgaggaattcaacaaagattctattgagcgtgatgatagacggcttatagaactaggctggaagacattggagctttttgccttagctcatatattcagccgaatagaagtagcataccaagaggcagtggctttgaaacgccaagaggagctgattcgtgaagaagaagctgctgggctagctgaaattgaacttaaggcaaagcgtagtgccgctgaaaaggaaaaacgtgccaagaaaaagcaggcaaaacagaagaaaaacagtcgaaaaagtaataaaggaaaaaatggcaagtctgacatcaaggaaatacttatggacagcagtccatctgatgataggattctggatgatttctctggacaagcagaagaaatgtcctcgaatgctgacaaccctgaagaagtctctgatatgtctgataacagagatgataattcagatgcacttcatgttgatattgaagagcgtgaatctagccctgttaattgggagacagatgcttcagaaactcaagccactgtacctggaagtggtgaggtgcaaaatgaccaagcagggaagcggacctcttttgtggatgatagctcatcaacttgttcgtcagactcagttccttcagttatcttgaatggatcaggaggtgcctggacaaatgtcagatcctcatcaaataggggaaacaaccggaggaataaggatactgatacacgggcaggacttggacaaggcggaccaaactcagtgtataatggttttgtaggatctggcagcaatgcttctgtcaactccaaggatgctagacatgaatctgaggatgataaagttgtctcgcagaggaagcaacatgcacaacggcatgttgatgtcatgagcccctccaagtcaagaatggcagagtcttccttttcatctgtgagccctgctaagaagcaacctaacgtatcccagcaaagcaccaatagttcgaattaccgtgcaagccaagcttcgggtgctgtgactggcactacgacagcaggtgtcagtccaaccccggcagctcagtcactatcaaataaaggacctctgtccagtcctgcgacccaccatgagaagtcgtttccaattgcaagtagacccctgcaggtgcctatacaatccaaatcggaagcgcagaaacaggcttccctggatggcagtgcaacaacccaggccgttacagtatcaaggcccttgagtgccccgcaagtccctgcaggaaaacaaagtacaccagttacttcaacatctcagagtgtaccacttctttctcgttcaatgagtgcggtcggacggttgggaaatgagccctcggctaatgctcctagcttcattccccggtcacgaacatatcgcaatgccatgatgcagacaagttctgctggtggaagcagtttcacacaccagccaggttcatcggagcaaggagttgcacattcgcaaccaatatttacatcacaaccttccattctgtcatcagaaaccttgtctggtaaagaggaaacatcattgaaacctgggttcacatttggcactgtcaagcccgagtcactgaaccagtatcagtgcagagaacagagctcacagcaagcaacaagcagcagcagcatcagtaacagtagtgattgtgctccgtcgagttcaaacatcagaagtgagattgcgaagctcaatttgaatggtagatcacgaagcaggcagctgttgtcagaaatttctaccagatttactccttatcaaccgcaaggcctggttgctgatgagttcccacacctagacatcatcaatgacttgctggacgaggagcagagcgaaaggagaagggttcttcgacctggattcgctcaacaattctctatgcccaatgatgccagcacacctgattatggcttgacagtgccaaatgtgaacccaggtttcaaacctgttggatcagtccgagccatactttgatgacgagcctccaaggttttatagcccattgagcagtgctcctcgagggcttagggaccggagttattcacacttcgatctcccttcttactccaacagcagccagtttgatgatctgatgatgaaccagtggcaatacagctctgacatctccatgactagtttcatgtcggacgcaagtggctacacctatcagccgcaggatttcccggtgaatggagtaagcagatacccatcctatcgccctgccaatgggcactgagaattttagtgattgcattggtaataatgtgtggtgagtccatgctgttcgcttctgagctgagtgtaattgtaatagttcccatagcagtcatataaagatagttcctcagtttccttattcaatagttataacttattcccttactttctatagatcagttttgcccgtattggttaattgtaattcttcgacgatttggtaataaaggtgtggtggtgagtccattggcagggcgataggatgggtatctgcttactcctatcagccgcaggatttcccggtgaatggagtaagcagatacccatcctatcgccctgccaatgggcactg

SEQ ID NO: 39700 - DNA, 817 bp, Setaria italica
  Peptide Sequence Number=SeqID_105674
aaacaatgggggtaatcagcaaaggaagtgtagctagctcccattactactcaagaacccagtcttcttccactgccatggctgccaggtggaccatgcttgccggcctcctgctcctgcttccactcctgcagtcggcctcctcctcctcctccatggtgttcaagctcgacggcaatgtctaccccgcaggccacttctacgtaaccatgaacatcgcagacccatcgaagccatacttcttgagtgtggacactggcagcgacctcacctggctggagtgcgccgcatccaatggtgcctgtgaaaggtgcaacaaggtgccacatccacattaccgaccaggaccgcccagttacaaggtcgtcccatgtacggacccactctgcgacacacggcaccaagacctgggtacaaccaagcactgcacagaaccatttcaatgcgactacacactcacatatgcagatggatcgtccattggtgcgctcatgactgacaagttctctttacccatggtcaagccccccaatgaccatcctcacctcgcgatcggctgtggttatgaccagggggtgaatgctgggaaggtaacgacagtcgatggcatccttggtcttggaccgaactcggtatcgctggtgtcccagctcaagaaccacaagatcatcacaaagaatgtgattggccattgcctcagtacaaaaggagggggattcctcttctttggggaagagagcgtgccctcttcaaatgtaacctgggtccccatggcaccaagaacacccgggaaaccatactccctactcaccgggcc

SEQ ID NO: 39701 - DNA, 716 bp, Setaria italica
  Peptide Sequence Number=SeqID_105675
gttgacaatatcttggatgagatgcgcaggaagggatgccctccaaatattatcacatacacaattgtaatgcacgctctagggaaggctgggagaacacaagaagctctggatacttttaagaaggtgaagcaggatgcttgcaccccagatgcttccttctacaactctctgatatacatacttggcagagctggaaggtttcaagaagcgaattttgtgatcacagaaatgcgcagaactggtatatcacccaacttgactaccttcaacaccctgatttctgctgcctgtgaccactctcaggctgagaatgcgctgaagcagttggttcagatggaggagcagtcatgcaagccggacattaagacgtacatccccttgctgaagctgtgctgcagaaggcagtgggtgaagacgcttctgttcctgatatgccatatgttcaggaaggacattacccctgatttcagcacctacacgttgctggtgagctggctgtgccgaaatgggaggcttgcgcagtcttgcttgttcttggaggagatggtgttgaagggttttgctccgaagcaggagacatttgatcttgtgctggacaagcttgagagatgaacatgcattcagcaattagaaagattcagcttctcagaaagcaggtagcagataataggtgtaagaacattgagagaagattttgatggtagacaacattg

SEQ ID NO: 39702 - DNA, 391 bp, Setaria italica
  Peptide Sequence Number=SeqID_105676
ctttcttgcacccattgctttcgctagagtggcaggatcaggatatgtatccattgttaatgaattcatttttcattgggttcaaagcttactgagattcttcaaacctattccatgatgaggagaggaacaggctattcatgtcgcagttgttcaatacaaataaaataaaaggtggcacatatatttctaaatgatatccaatcattataccactgacagctatatcctggtccggtttgtccatacgcatatgctgaataaaatttctaaggaattcaagaaataccagtagccaggctcataagctgctgaagtaacaaggtagtatatatctctaaagggcttgcactaagttttttgcatggtctatccaatcaacctattttag

SEQ ID NO: 39703 - DNA, 632 bp, Setaria italica
  Peptide Sequence Number=SeqID_105677
tcttttaggctgaactccagtacttgcaccatcatgctggtgtagctgctagcgttggtcttaatgcaaaccctgttgttaacctttctggtgtatttggaactaaaactattgctgttggtgctgatgcctcatttgatacttcatctggggacttaaccaaatacaatgctggactgagctacaatgctggtgactttgttgctgcagcgactctgtaagtggtttcttctaatgcttaacaattcttatttgaactgtttatgttatgtccaaggaaacccatttgccctttagcagtgagtagtttctctagggaatttgtaaagcagaaaaattgtgagggtcaaatgttatgccttgtttctgcttctcttactatcttctgtacatactagcacaggctttgacaaatttgcaatcaacagaaataatttaggctacaacactaagctcgtttcgcatttcaggaacaacaagggtgacagccttgctgcttcctactaccacttggtgaattcaaccacagctgttggaggagagcttactcacagcttctcaagcaatgagaacaccctcacctttgggacacagcacgccctggaccctctgaccacttgttgtaaggtcgt

SEQ ID NO: 39704 - DNA, 370 bp, Setaria italica
  Peptide Sequence Number=SeqID_105678
tagctactcgggattattggaaaaatgattgagatactttgtaaacatagtcctggctaactgacccttggagtggcagtaaaaaattgatgatataatgaaataggttggctatttttgcaacataaagattcctaaatttgtacataactggatgcaaattgcaattatgttcagttaatgtttttccatcctcttatagcacatctactatatctccacttttatatttcttggtaacacagtaacaactgcaaaatgatatgtaggtaactgtctggaactaccagtacgaatgcatctgtttactcttttagcattctttttttttattagtttgattgattcaacttctcgtaacgccttggtg

SEQ ID NO: 39705 - DNA, 504 bp, Setaria italica
  misc_feature (493)..(493): n is a, c, g, or t
  Peptide Sequence Number=SeqID_105679
aattttcatcttgtgcatttattcggtctcctagccaatctctatttccgagcaaaatgtcaacctgttaaagaaaaagtcacaaatgtatgggcatgtgaacaacacattcaaataaaataaaacaatgaacaacccatttccttgctaatgctcaactgtatccaataatttaaatgaacaaacatgatctacgcacaaaacaaggtaatggaaaagcctatcttaagtaaaactatttttttcacaatatatttgaggcttttaaaaacagtagctcagtaataaataattctttcagatttgtatacggctttgacatggaagtctgaaactgaaaggcaagtctgcataaaacaaagctatgtatcatattactggatcttgacggatcttgcagccatgaaaaaattattgccaatggtaattcattgtcggcatctcatcaccaatatccacatactcatccaccatatgagcttccattgccctnttctccagcat

SEQ ID NO: 39706 - DNA, 314 bp, Setaria italica
  Peptide Sequence Number=SeqID_105680
aagaaggcagagcgggagctggttctcgatcatcatggcgtcgcgcaccgtggcgttgatccagttggccgccgaggacaccatgtccgtggtctcgtcgcggtggtagccctcgaggaagtcgagcaggaagcacgtgtcgatggccatcatccaagccagcgtctcacggttgagctccagtatccggtggtacggcgcctgcatctcgtcctggagatcacgtaggcgctccacgaggtgctcgatcgtgcggccgccggcgaagtgccgctccgcgcgcttggcggcggcgagcttgtagcgttccatgt

SEQ ID NO: 39707 - DNA, 544 bp, Setaria italica
  Peptide Sequence Number=SeqID_105681
cggtggcggtgagctcactggagccggtggggaggtgattttacttgtggaggtggtgaacctcacgaggcgccgaaggtggaggtgacgttcgactggtggtggtggcgagctcactggagccggtggcggaggcgatttcacaggtggggaggtgagctcaccggagccagtggaggaggtgacttcactggtggtggtggcgagctcaccggagccggtggtggaggcgagctcactggaactggtggaggagaagatttcaccggtggtggtactggtgccggtgccggtgccggcattactggcggcgaactgatgggagccggtgggttaggcggcgtttgtggcttggccacaggtgtgggcggcacaggcgtcggcggcgcgggcgcgtgcttcttcggcgacggcgtgtaagatggccccgccgagcatgcgttcttgcggcagtcgacgggtgcgcaagcacgggcgcgcactccggcgccgggcttctgctcagggcgcccgccgccgaggcagttgccggcgtcgtcgagtg

SEQ ID NO: 39708 - DNA, 223 bp, Setaria italica
  Peptide Sequence Number=SeqID_105682
ggaagagagccagtaggagctgtcctcggcgtcgatggcgttggtgccaaggaggaaagagtcgagctgcagaagcatgtcgtcggtgccatcggccgcgtcgaaagggagcgacgcggctggagctgcggcggagtagtagctataggagccagaggaggtgtggttcccctgctccatttggagctgtgctgttaccggtgactggtgagtgtgctgcagg

SEQ ID NO: 39709 - DNA, 618 bp, Setaria italica
  Peptide Sequence Number=SeqID_105683
tttttgtctgagaatttctatacgcatcatttcaggcagtagtagcccaaattagacttacaagaaactaatatacacaagcggccgattgcatcatgctgcatcctaacatgatttgcatcaagcaatcaatcttgagtccaatacaaaaggagaaaaataatataaagaagttcttatttatttgttcttccatttcaattcgacgaattctgttgccgttccaggcatcatcgctggaagcgcgcaccaaggaacaggagagagaggtcccaacccactaaaatcacaggcgcagacagacatatatacagaagccgaagccgatttcaggtagacgggcgggcgggaggagggagcaaaccaaaccccacggacgatcagcagacggtggggacgaatcgcagggcggcgacgcgcgctgcaaggaggcccgcaagcctgcggacggcgaactgggtgcagttggagagcgcgatgaggcacatgagctcatagacgaccccgagcgcagcctctgccgcggacctccggggggcgggcacgtcgggctcccagtcgccgggcccccccgctgaccacccgaacccgctgatccagctccaccgccctccgccg

SEQ ID NO: 39710 - DNA, 479 bp, Setaria italica
  Peptide Sequence Number=SeqID_105684
tggcgagtatgctcagcagatatctccaggagtcggcgtgtatcacactacgttcccggaattccggctttgggggcttgaagggcacaatgatgtcctcgaccttcctgctaccgaactagggcgaattcttcttgtaacagagggtcagttagtggcctattgcggtactgacgattgcgaattaagtcgtggccaatccgtctggttgcctgccggggacgaggtgaaagtaactggtcagggacgtggattcctggcaagtgctggggtaggggattcctgaatgggaggtggcgtaacgctgctgacgtcgtgaccccccactcggtaccggtggtcgggtgagggggtcgaatcgctcacaggccctctcaacgtccgtctcgcgggttccggtgttcagtgccgcgcgggcttgcggtagtattggatcgttgggctccccgctggttcatgacatccgacggggacgccag

SEQ ID NO: 39711 - DNA, 414 bp, Setaria italica
  Peptide Sequence Number=SeqID_105685
gcttcccaccgcccgcgacacgtcatctcctagtcgcgcaggcgcagcatcgaatccagctcgtccccttccccgcgccgcagccgcggattccccctcgggagagagatccggcccttggcgcgcgcggtcgatcgccggagacagcggcatggggctctgggactcgctcctcaactggctccgaagcttgttttttaagcaggagatggaactctccttggttggcctacagaatgctgggaagacatctctagtcaatgctgttgctactggtggctacagcgaggacatgattccaaccgtaggctttaatatgcggaaagttaccaagggcaatgtcacaattaaactttgggatcttggtgggcaacggagattccggactatgtgttggcgagtcgtcttacttgt

SEQ ID NO: 39712 - DNA, 1193 bp, Setaria italica
  misc_feature (1103)..(1193): n is a, c, g, or t
  Peptide Sequence Number=SeqID_105686
aatctgtgtcctgtctcttgagaagtgcttacttcgtccagctcatatttggtgaatcttagttttcaaattgcctcgtagccagctggtcagcttgagaccatttttcgttgccctgtgtactcttggcattctgcttgtgttatatgggattacctatggttttgaatattgttggcaaagttcttactaaagttacagtcttaaatcttaactccgagctaactcagctagtctgagattagtaggcatgccagccttagctatcgagtagcattttgttggctttgaagcagtacatattaaatcattacaatcctacccacagcagtaatgttctcgttttcagcttgttttttaagcaggagatggaactctccttggttggcctacagaatgctgggaagacatctctagtcaatgctgttgctactggtggctacagcgaggacatgattccaaccgtaggctttaatatgcggaaagttaccaagggcaatgtcacaattaaactttgggatcttggtgggcaacggagattccggactatgtgggagcgctactgccgaggagtttctgccattctatatgtggtggatgctgcggatcgggatagtgtcccaatagcgaaaagtgaattgcatgatctgctgatgaaacagtctttagctgggattcccttgcttgtccttggcaacaaaattgacaagtcagaagcgctttctaagcaggctttggttgaccaacttggattagaatcaatacaggatcgtgaagtttgttgctacatgatctcctgtaaggattctgtgaacatagacgttgtcattgactggcttatcaagcactctagaacagcaaagtagcttctgtgtgtttatatcactttatgcacggtgatttgagtcttcctgtgaatcacctcctgtttcctggtccagttgttcaaagcgaccaccttgtaatctatgatctctttggtttcagacaaacagtatggtgtctagtacttgaacatctcaacctttgcactcctttgtaaatacctttgaatattttattattctttattgtgggcgtttagtggtttttttctacaaaannnnnnnnnnnnnnnnnnnnnnnnnnnnnnnnnnnnnnnnnnnnnnnnnnnnnnnnnnnnnnnnnnnnnnnnnnnnnnnnnnnnnnnnnnn

SEQ ID NO: 39713 - DNA, 354 bp, Setaria italica
  Peptide Sequence Number=SeqID_105687
atttgggctcgtgctacctcggcgggaacgccgatgcggtggagttctgcccgcaccgcccgttccgccacgtgctcgccgccgccacctacacgctgcaggagcaggagcaggtccgcgcaggcaccatctccctcttctccgtcgacgccggcgcggaggacgagtcccagcggctccggctgctgcatactgtagataccgccggcgtgttcgatatgaagtggagccccgtgtctccgctgctcgcgcaggccgacgcccacggccgcctcgcgctccggcgcctggagcaggaggacggctcggatacaggcattgccttcacggatgtgtgtgctgaagatatttctt

SEQ ID NO: 39714 - DNA, 642 bp, Setaria italica
  Peptide Sequence Number=SeqID_105688
catgctgagggtgggttctgtctgggtgccactgtaaaatacacttactgatcctttcacctccattgaactccatccaggggtcttttgcagattctggcgcctgaccaaagaccttactgcatcaactccatcccattttccaatctttgcatacatatttgacatcaaaacataatatcctacattctcaggatcaagttcacataggttttgtgaggccagtttacccatttcaacattcccatgaatcctgcaggcaccaagcaacgcgccccaaacagcagagtcaggcttaattggcataccttgaatgaactcaaaagcttcatccaactgaccagccctgccaagcatatctaccatgcatgcatagtgtttcgcaatgggcacgattctatacacggtttgcattgaatcaaagaaactccgaccttggtcaactaagccagcatggctacaggcagccaataatgaaacaaaagtgacatggtcaggcttaattccttcttgttgcatttctgagaagagatcgagtgcctttgcaccatgcccatgaactccaagaccagctatgatggcattccaagtacctgtgctccttctaggcatatggtacaaacaaagcattgcttctgcgag

SEQ ID NO: 39715 - DNA, 400 bp, Setaria italica
  Peptide Sequence Number=SeqID_105689
gagacgcatttctcacacaattcatttactctctccttatttcttcatcactcccttgtctttgcagaattattcaactcagactgccatgcagaagaaaaccatgaacccgtaagtgttacattttgaagcaaaagtttattttttcaaagtccattttcccccttagaaagaatatcagagtgagaaatagcgagtctcacattatctaaaaagcgactctctccggttttgttccatttattgaaaactccaatttctttgcctcgggttctaatttattttgcaattcgcacagtgcactgtaaacataatgtaaagttttcaaagcttaattaacagctacaggataacggcaggccaagattttaaaggcatttaagcttggctccaagaaatg

SEQ ID NO: 39716 - DNA, 571 bp, Setaria italica
  Peptide Sequence Number=SeqID_105690
taaggggtaaggaacaacgtacctacgtacggtaaagggtaggacgacacgtagttgctcctgctgtccccgtgcgcgctcggcgaggccgccgcggtggcgctggtgtgcgtgagggcgaacggcggcgaggcggagggggcgccccagttcacctgcaagctctgggcggaggccgcgagcagcaacgagagcatgacgatgatgtcgtccatggtggggagcagcagcctgtccgccgggttctcggcggccgaccaggatatgttcctggtggtgccgccggagatcctgcacgacgtttccggcgaggcgcccttcgtcatggttcgcatcgacagagccggcgctgctgctgctgctgccgccgcctccgccaattccacgaatccaccggccaggagctcaaggaggacgcagtaatggcttggtagtgcctctgatgttcggtgcgctggcatgttggcatgttcttgatgccagcagacgactccttgttggtgcattggcctcttggcaagcaggccggcgacggcgacctttctggttacggccactgcaggcgtgctac

SEQ ID NO: 39717 - DNA, 697 bp, Setaria italica
  Peptide Sequence Number=SeqID_105691
tggcttcaaatgaaaggtgtaatttcgaccaatcttagtttgcctttccacattttgcatatcttaaaaaccaaacagaacataatgctacatgttattttaagcacaacaagatatttattaagaaccacaaaacaaatccagtatgtacagaaggcatggctcatatattagacaacaaaggatcatccattttgaggtaatggcattcagattggtctttgcatcaaagaacttcagatattgtaaagtttagagctccacaactactgcagccaactatcaggtataaatatgtgcagcccacctacatgatagaattaacacagaagtatatatcgagttaaaattgccatgaaaaaagagtaaacttatagttaaagactacgagtgtggtcggcataacgctacatatcaccactgattttcttgccaaagtgtggcataaccgcttgacaaatttctttgtgaagaattattctccaaaaatcatgaaagatttggcaagaatttatttaaacacagatttttttataccattggttctcgggcatcagattggtctgtattgatcccagaaaagatatgggctactatagctacatctagtttgctttgtaacacaaatctttcaagctaatgtatatgttgtatctcaccaggttgcagccatgtcactagtaggcacctgctcata

SEQ ID NO: 39718 - DNA, 261 bp, Setaria italica
  misc_feature (200)..(261): n is a, c, g, or t
  Peptide Sequence Number=SeqID_105692
catagttagagatcgtgttcgcttccataaattcatgggaggcagttgctcttgtaaggacttttggtgatttcctcgtgacaaatgaatcatagtgatgcaaaattattctagatacatgctactaagtacaaacatatggttatcctgaatacatatggttatcctgaatacatatgataaattttgtgcttttaacnnnnnnnnnnnnnnnnnnnnnnnnnnnnnnnnnnnnnnnnnnnnnnnnnnnnnnnnnnnnnn

SEQ ID NO: 39719 - DNA, 705 bp, Setaria italica
  Peptide Sequence Number=SeqID_105693
cgtggacggcgattactctcctaaacttggcagcaactgggacatttttccgctctgagcacctaactaggcaagtggctcactgacgtgtggggtccggtgcatcttggcttggggtaagcgggaaggatgttgaccgcgggattcctgacggagggtgggattcgatagcgtggggacgtggatgcgtccacgagccaccacgtcggacctcgaggaatcatgtgagcgatgggcggagcgcgcgtgacgtcgcgcgaggtggcgcggttgcccgctggattatctaaaagggtaaaaatcctggctggttttttaggcttgatgtgctagccatgtaaaggatatcacaattcacaccaccggtttcagtttgtagcactgaagagatatcacctttccagctcataaaggaaaaactaagatgacaatggctaccggattatggatttagtgtaactactagagatatactgccaatatttctatcatgaaatatggccttacatggtgagtcacaccaccaatggtttcatgtataggcaatccaaaatttctttatcaattgtttctttacacgtcgatttatgttctcatgtgaaaaagttctacaaaaggcaagcagtcgtaataaaaaagtaaccatgattgtttatggatctagtgtaactaaaagtgacatgctgccaagagtttgttcatggg

SEQ ID NO: 39720 - DNA, 401 bp, Setaria italica
  Peptide Sequence Number=SeqID_105694
gtgtctccgactcagtgtgagtagtgtagcatgcaacaacataatcagtgttgaccctgcatgagcaaggacgctaactctaatctttagtcctgctcagattgatcgccatcatcctgatcagctgttgatcttttgcttctactcagatttgttcacttccaagtcagatgaactgccgggctgctgctcaccattgagcaagcttgataggcttctgcagaactctctatatgctctcagatccccagtggacttggacacttcgacaatgcagtgtaccggagtcacctcgatcacctcagccagaagagtcagatcaggtatgctcctttcaagcagtctgctgtcctgaagcttcacctgtgccacattgagaatttaggccctgtttggcatgg

SEQ ID NO: 39721 - DNA, 1124 bp, Setaria italica
  Peptide Sequence Number=SeqID_105695
tgccgcctggcctctcttcttctctcgttctctcttccctgctcggctcaggtgcttggatcagagaagaagagcagctacgcaaacgccgcatgatggggtccaaagctgccatttttgccacggccgtactggccgtcctcttctccgccccggcactggctcagaagagtagccccgcccgcgccggcgcccgtgtcgctcccgccgagcccggcaccggcgccggcgccgcactacgtggacctcgcggagctcctgagcgttgccggcccgttccacacgttcctcaactacctggagaagaccaacgtgatcgagaccttccagggccaggccaacaacaccaaggtgggcattaccatcttcgtccccaaggactcggcgttcgcggcgctcaagaagtccaccttctccaacctcacctccgaccagctcaagacgctgctcctgtaccacgccttccccaacttctactccctggccgagttcaggaacctgagctcgctcaacccggtgaacaccttcgcggggtcgccgtacacgctcaacctcaccgacgacatgggcagcatctacgtgcagtccatgtggtccaggcccaagatcgccagcagcgtctacgccaccaaacccgtcgcgatctacgcactcaacaaggtgctcctgcccatgcagctcttcagcaaggaccctccgctcgcgccggcgccggcgcccgcgccggagtccggggcgtccgacgctcccagcccggcggccggcaaagcaggcggactgaacggcggcaaggatgactcgacgagcaccgcgtacaaagccggtgccgtcagcgtggccacttccttgctgctagccgctgcagggtgcctgatgctcctgtggtgagacttgaggattcttgccatctgtgaccacagtgtccgtgcttcccaacacttgatttcgtttttaattggttgatggaatcattcttttggacatatatggtaggcatgccgttaggatcgagttggagtattttcacgtcacattactctcatataatttctatcatcttttgatggatgagtgattcgatgaatacagaaaaaaagtttttcgctgaactaaaaaaaaaaaaa

SEQ ID NO: 39722 - DNA, 405 bp, Setaria italica
  Peptide Sequence Number=SeqID_105696
caaaagcagatctgttcttgtatgaaggaaagacgcatactgatttattccttcaggatcccccttcgtggtggtagagataaaatgctcgaagaggatcctgaaggaaagacgcatactgatttattccttcaggatccccttcgtggtggtagagataaaaatgctcgaagagatctccagtgtgattcacactggcgatccaaacgcatctgcccaccacctcgtcgtgcctgttgcacggcgtcttgttcctgaattcatgttgaagctcgctggaagagtaagccctttctgaagatggtgatggtttatgtttgcaagaccaaaagaccaagaatagtaatactagtaaacaatacaacgtaacaattaagggtacaaggactagacctaccccctaaa

SEQ ID NO: 39723 - DNA, 535 bp, Setaria italica
  misc_feature (535)..(535): n is a, c, g, or t
  Peptide Sequence Number=SeqID_105697
gttgatgctttacaagagcatggtgcaaaagcagatctgttcttgtatgaaggaaagacgcatactgttaccttacttcaggatccccttcgtggtggtagagataaaatgctcgaagagatcgccagtgtgatacacagtgaagatccaaacgcatctgcccaccacctcgtcgtgcctgttgcacggcgtcttgttcctgaattcatgttgaagctcgctggaagagtaagccctttctgaagatggtgatggtttatgtttgcagccaaagccagatgtatctgtaacatcacgtacattagggggaggcagcctgaccctgacgcgaattggatcctgccgtcaggaaaaaaaatttgctccctgatcagctactcgacttccatcctaactcccaggccttagccgcgttgagatggtagggacctactgtgtacattgaccaggacgtgtgttcggtatggttgtgcctactacgatatctccagagacgttcttcattgttgtattgtattgtatctctcgatgtacn

SEQ ID NO: 39724 - DNA, 504 bp, Setaria italica
  Peptide Sequence Number=SeqID_105698
tcgtaattgttgtgttgaagttagagaacaaaccttggcccatagttaacgagtaatttgctcatgttagtgcaaattcacaatagaaggaactacctagtctaattttgcagtggtgtaggttcagatgctctctttggttggcttgtaaggtgcaaaaggtgcactgtatttgtggtataatattttgttctcatgcttggtcccaaggtcttctgaactgaacatgcaagcaccgatttatgaaatctacaacgtagtgctgacagcagagtttgttgtgggggttttttgttggttttaaatcttggttctgttttcatgaagccaacatagttgaagttccaagctcacagacctttatggttttgctgtaggagcgagcctcgtcaattgtatttacctggctaatgtttctgaatttcatcatttgctatacttttcatgagacaaaatatgattttaacaacttctttggtgtctatcagtgtgtgttgattagtg

SEQ ID NO: 39725 - DNA, 644 bp, Setaria italica
  Peptide Sequence Number=SeqID_105699
tgggggcagagtcatcaactggaacgggtaccgtgtcctgggagtgcttgcaacttctaggtcgattggtgactactacctgaaaccgtacgtgagcgccgagccggaggtgacggtggtggaccgcacggaccaggacgagttcctcatcctggccagcgacgggctgtgggacgtggtgtccaacgaggtggcgtgcaagatcgccaggaactgcctcagcggccgggcggcctccaagttccccgagtccgtcgccgggcgcaccgccgccgatgccgcggcactgctgacggagctggccatgtcccgcggcagcaaggacaacatcagcgtcgtcgtggtcgagctgcagcgactgaagaggagcggcggcggcggcggcggcgccggcgcggcctgatgattttagtttactgaggctttgagcatgtagctgtagcgggtagatgatgacaattaaaagcatttgagcatgctgagaagctggggattaaaaagggttcgaatttgaacggcatggtgatgcagggtgtacataggggagcggtgttggatgtttgaggctctcggtgtcctaatcatagctatatgccaatttattatatttctcttggttctttcacatcaaataaaaaaaaaaa

SEQ ID NO: 39726 - DNA, 476 bp, Setaria italica
  Peptide Sequence Number=SeqID_105700
tactactggatgatgtcagcttcgttgagaacggggagaggacatttgaggcactgattgccaagtgcccatcgttgagatctcttatcctcctgttcccgtcgattggcagcgaccatatgcatgagggaaactacagtgactggaccataagggcaccgaacctcaaacacttcataatcagcgcttggcaggactatgggtggcggatagatgatcttccactcattgaggaagcaagagttcacctggaaggccctgagttgccgaggatcctgccagggctgtccaaagtcaagaacctgtctgtggaaatcacagatgatactattgtggaacggctttcatactttatgaacttgaaggacctatcactccatactattcttataccaagtcatccacagttttatcaatgttctgcatactcaggaatgctccaggttgggagcattcctgagtatgcagaacattag

SEQ ID NO: 39727 - DNA, 462 bp, Setaria italica
  Peptide Sequence Number=SeqID_105701
aaatagggtgttttttgccttttcttgtcaaggttccgcttccgtgagtaactcaacaaaaaatttcacagcaggcagtcggttcgaaggagaaagcgatgcgccgacaaatgcagtacttcctccgttccaaattgcatatcattttaacatttctaaatgcatagatcttactatgtatctcgccatagtgcatatctagatgcatagcaaaaacaataaacctaaaaatgctaaaaacgacctacaatttaggacgaaccttaacttatgacttcgattataaaaatttagacactccaatgcgataaggcactagcagttcaagaacgcctatgcaaattttacagcaagttggaacttaacttgcgcatcattaaaccactttcgctctcccaaaagtagtctgtaagcccgtatcatgttattttcctgtgagactttgaatatcatgtcatagct

SEQ ID NO: 39728 - DNA, 420 bp, Setaria italica
  Peptide Sequence Number=SeqID_105702
ttggcttatgaggtactgcgctaaaaatagttcttgatattcagaacgttgcagggttagattacaacaaaaagaagctgccactcccagctatatataagtaattgctgccaaataattgagtccagtgccaaataatatgtgcactggttaggataaccggccattcagcagtgccactaccagcttgggacgatcatggagacaacagcaacagtacaaaactagaacatatagacaagtacatctgaatcatacgactcatacaagttttaggtcacttgcaaaaagaagaacacataaggctcttattagtcacttgtgacgcaccacatttcagactgttgtttcttcttccttttttcttctcagccaaatcgagcctcaatcgcgttggtttttgctgaaaccgcagacggg

SEQ ID NO: 39729 - DNA, 362 bp, Setaria italica
  Peptide Sequence Number=SeqID_105703
aacaaataaaaagatagaaatgcaatgagtatttgagtattgattttttaacaaacgtgtaaagatccattgagtataataaaaattgaaaatgagtcgtcaaattaggagacgttaagggtcgtggttttgtgtttctcaaaaaagtaacaacagcgattttgtgacaagatactttgatgtggactttgcaagacctaaaagatgaaacataagttctaaaggtgctgcgtgacgttttccttgacaatgtttagaggattggtaggttctgcttagtgctaaaccgcaacggccccaaccttcgccattgatggcgcagtttagtggacaaggacgcgaactgactactcctaaacctg

SEQ ID NO: 39730 - DNA, 494 bp, Setaria italica
  Peptide Sequence Number=SeqID_105704
ttctcactctccttaatctcttcggatgcttctatctactatatggcttcagttaccacctataggttgttgattctcatatctaaatttgtagtctaaacccctctcttgagctgaattgttagcatttgtaattagttggctttttacatattcatttttatatttaaagcaatttgatatcttttacctaaaaaaaaaaaagctagttcttcctctctttactttggtatcatagtattcttgtccagttgattaagttataatctttatgttcgtgaccattagtcaaaagctatcaggtacgcacctgtagtaaacaaagttaggtttattgatgctttctgcagcaagggaagccacataccatggggaaaccatgaaatgtcggtaagatgatgttggacagacttagagaatgtggccttgtgttggtaattttggggaggattcgagggaagtgatgaaggttcctttggattggatgctgtgaa

SEQ ID NO: 39731 - DNA, 233 bp, Setaria italica
  Peptide Sequence Number=SeqID_105705
gggggggcatgtttccttttgcgaatgaaataatggacaaatcaagttcacaagggagctgatactgctgaataatcgaagccataatcgaatatgcacatagctgccaacttaataatcacaacaaacgaacgaacgaatgaatggactatgtatatgaacaacctacaccgatcaactatcaggcatgcatgttccttcaggcgctcatcatgatcttgaactcgtcgaag

SEQ ID NO: 39732 - DNA, 533 bp, Setaria italica
  Peptide Sequence Number=SeqID_105706
tccgtggccagcaccagcacgtacaggtcacctggactatgcccagcacctcgttgttgttctgcccaaatgaattttcagttactcttttccatatactttgctttgctgtacattatggaccctgtcgctgtatacttcctccatcattgaggttaattcatggctagattaccctagtagcttatctgtgggaggctttgatctgagaataactgttatctgatatgctggggttcagttatgcctgatgtttggttctgtgacttgcagtgagtgcactagattagttcctagtagcctcctgaagggaaattttctggctctagattacacaattgacatggtcaggtaaggttccaaaggattaatttatagtaggctgatgaggttgtgtagattggagtactcgaattgacatctagctgtacaggtctctaaaaagaacatgtacaggcacatgtccaatctctattgtgatctctcaaaagaaattcaagtgtagctgtgcagattttctaaattagaaatta

SEQ ID NO: 39733 - DNA, 439 bp, Setaria italica
  Peptide Sequence Number=SeqID_105707
ctcggccaccaccatgggccgcatctcccctccgccacacatagaagctaagtgagtgcactagattagttcctagtagcctcctgaagggaaattttctggctctagattacacaattgacatggtcagatcactgggatcgcgagaaggtatgctgctatgtgaaaaggatggattaaaaggatgcttacctagacttgactaatgcagttgctactggtgttcttgtgcccaactcttgtgagaagatgcagggacgaaggtcaagtacttgaagaactagattggcctagtgatggtactgcttggaaggtaacggctgcaaattgcatgcttttgctgttagtttcttgtacagtacgtgatttttgattgaagttccatggtacaacattgtgagatgtgttggattaaaacctaaattagattgtgatttca

SEQ ID NO: 39734 - DNA, 855 bp, Setaria italica
  Peptide Sequence Number=SeqID_105708
ggcccgcattttcatggatgaagcagaatcaagtggcccagatacttttctcggagcaccagacggattcaatggtcctgaagagataggcccagatgtgatgagcccagttgtgggaagcacaggagggagaggccctgagttctggcgagccattggggtcactcccccagactggggaccggatgacctctttgttggttctccatgcttattaagaggtccagagtttgattttgctctggctgaaccgccagcaccaggaactgaagacgaaagtgaaccagagtagttggaccgaccaccagaattggatacaggtcctgagttggaagcagcacctccaaatgaagtattccttgaaggagcgttgcctagagggccagattttctcgacttttcaacatggagatcaaacatcttccccagctctccagatttcttgatgtcaccgccagtatatggcatcacattggaacaaatggtcggggccttctccttaggttgctcaggtcgaccagaaacatacaggccattgctcagctgatgtgatggaaaccttgaacccatactctgaagcagaagatcaactgtatctcaagtgtcccaccaacccacagcttgattaagtgagtctatatctgggtcttgacatgcacagctgcccttctcgctgcaaaacctcaccttgcatgagctcctcgagagaatggcaagcacgtcgcgctgctgccccgcctggttttgggtcctccgcttttttttttttttccctcggcgagtagactctgctcgtgcggtggcggcggaatggggggaggtggaggtgggcggaggagagagcaagcgcgcagt

SEQ ID NO: 39735 - DNA, 1574 bp, Setaria italica
  misc_feature (1563)..(1563): n is a, c, g, or t
  Peptide Sequence Number=SeqID_105709
gaacaacagattctgctgttcccactacatatctggagactgcttggtatagttgctcttcatcgaagggttttgacacatatccattcattcccgattttaaacactcttcataagttgcctggataacatcggctgtcattgccagaacaggcaaatggtactcagcaaatgtggagccttcaattgaagccaacttgttctttctttcttcattggctttcatctccatttgccttatttgtctggttgcctcaaacccatccatctctggcatctgaacatccataaaacatgcgtcgaagcaatgtggaggttgaagtagactgatagcatccttgccactttcgacacaatggaccttagcaccatacttttttagtgcagctgcagcaactctgagattgaccttattatcatctacgatcaatatgttcttcccaaccagcaagctacgaagaaatgacggccgattttgattttcttttctttcgggcatctctactttgagcagctgctgaatacatgaagcaattgtgcttgctcttaaaggcttacacatgacaatatcaaatatgaatccatatttgtccttgtcagcttcggaggtgaccagaagaaccgccttaggcgcatcaggcaactgaccgttcttgtgttcacgtagacgattcaataactgaacatctgtctcaggcctccagaagtcactctcaataaaaagcatggttgctttttcccttgaaatggttgatccattttgtccagataaagcttttagtcccgcactcatattgttcacaacttgaacaattattcccaacctcttaaggtgatatcttgtgacagcactacgtacaggtctcccatcaaccaagatggccttcattcccttaaaagcagtaggcagtgcctcggacaagctctttctgaatcagctgaagcatctttgtatgagctcctcagtgtagctgagaatgtgaatgtacatgaaagccaatgaagaagaaagaacaagttggcttcaattgaaggctccacatttgctgagtaccatttgcctgttctggcaatgacagccgatgttatccaggcaacttatgaagagtgtttaaaatcgggaatgaatggatatgtgtcaaaacccttcgatgaagagcaactataccaagcagtctccagatatgtagtgggaacaacagattctgctgtttaatgttcagatcaacgtaatggattcgtcggaagtgaagcatcaccatgttgcttctgtccagctgacactaactctaacaatcatctgacatggcctctcacaacactagatgaaaaagatgaaagtgccgtgagcttgctatgcatcacagatgagcggcagcccaggggagtttaggtatagatcaccttgtaattctttctttgatgtttataggctgttgtatgtgctgacagttcattgaaaataccacatctcgttgcaacccccagtttcagattaacatggaaactgaaaaaagcgatgcccttcctgttagtttaaaaacaaaaaaaaaaaaaaaaaanaaaaaaaaaaa

SEQ ID NO: 39736 - DNA, 1051 bp, Setaria italica
  misc_feature (3)..(3): n is a, c, g, or t
  Peptide Sequence Number=SeqID_105710
ctntccctagtattgtttgttcacaagaggtgttatccgcagagcttcccgacatagttgaacttcctagaacaaaaaacaatgctggtacaaaggtgtgatgcctattattagtctaactgtgctggcttgcttcctcacctttttccacaaattattggtaaagtataagtagatgtggtggtgtaagatactgaaacatcaaaacatttgcttctgctgtctataatgttccgtgtttcttctcatttacttaaaaaatggattaaatgactggaaatttctgtcatctgtgctgcaacgtgtaatttcacacggaggctgtctaaatctcgtgatcctctccgcatccctgcgcgagcgcgacgcaggcacacgcttgacctccccgacggcctccgcctccgtctcgacgcgcggcgcaggtgcgtaggacggtaggagtctgctatggccgacgagaagaaggtgtttgggttcgaggaggtcgccaagcacaacgtcaccaaggactgctggatcatcatcgccggcaaggtttatgatgtcactccctttatggatgagcatcctggtggagatgaggttttgctagctgtaactgggaaagatgctacggctgattttgaagatattggccacagtgattcagcaagggaaatgatggagaagtaccacattgggcagattgatgcttcaaccatcccagcaaagcgtacttatgtgaatccccagcaagtgccccgcaacgtggacaacgatagcgacctcctcatcaagatattgcagttcctcgttcccattctgatcctgggccttgcgtttggtatccggcaatacaccaaatcagagtagcattgctcttagtgatttacttatgtgaaatgatttgtatgaaagcagttcaataattttgtggtgtatttgtcaggttgaagaatgttatcgatcataaggtactctgtgttatgaacatccatatttgtggccaagtgtgttaccccgagatgatatctgaagcttccttgaaagccgacatcatagttgcaaa

SEQ ID NO: 39737 - DNA, 229 bp, Setaria italica
  Peptide Sequence Number=SeqID_105711
tgagcttggagaatgccgatgggtattcaggtcggattaggacgtggacacggcggaggcaaattcacacggcacatgaggtcactggatactactagtcttattagtaattttttactactggtagctccgtcagcgattattttttcttgcttttgcaaataccgagatgtttgcactttcttattggagaggaagatattttcgacttaaaaaaaaaaaaaaaaaa

SEQ ID NO: 39738 - DNA, 542 bp, Setaria italica
  Peptide Sequence Number=SeqID_105712
tccgggcacaagcggaagccctgcgccggcgcgcactccgaggccaccgccaacggcggcagccgctgccactgctccaagagaaggtaacgccgatatccccagcacctcaaacataaatatcacttctccttttagcatcttcctcggctggaagcggttttctaaccatggactggatatttggttatttttgcaggaaaaaccgtgtgaagaggaccatcagagtgccggcgatcagctccaagatcgccgacatcccgccggatgagtactcctggcggaagtacggccagaaacccatcaagggctccccttacccacggtaaattcctcttcctaagctacatcactctcgagattcaccacaaatcattctcattgagcaaggatctgacgaattctatccgtctcccaggggctactacaagtgcagcaccgtccgcggctgcccggctaggaagcacgtggagcgcgcgaccgacgaccccgcgatgctggtggtgacgtacgagggcgagcaccgccacacaccgggagcg

SEQ ID NO: 39739 - DNA, 898 bp, Setaria italica
  misc_feature (855)..(898): n is a, c, g, or t
  Peptide Sequence Number=SeqID_105713
cgagtcgccggccccggtggcctcggcgccggtggtcgccgctcctgcggctcccccggcacccttgccgcacgtggcgcccgtcagcgtggcgcagccggcgccggccccgcagccgcagagcctgacgctggacttcacgaagccgaacctgaccatgtcggccgcgacgtccgtgacctcgacgtcgttcttctcctcggtgaccgccggcgaggggagcgtctccaagggccggagcctgatgtccgccgggaagccgccgctgtccgggcacaagcggaagccctgcgccggcgcgcactccgaggccaccgccaacggcggcagccgctgccactgctccaagagaaggaaaaaccgtgtgaagaggaccatcagagtgccggcgatcagctccaagatcgccgacatcccgccggatgagtactcctggcggaagtacggccagaaacccatcaagggctccccttacccacggggctactacaagtgcagcaccgtccgcggctgcccggctaggaagcacgtggagcgcgcgaccgacgaccccgcgatgctggtggtgacgtacgagggcgagcaccgccacacaccgggagcggcggggccgagccccctggcaaccgcgtcgccggtggccgccgccgtagccgctagcgtctccgccggcaacggccatgcctaaagtctgactaggatcagtagcttctttttcccccttctttttttgagctgctcctcaatctgatgtccgtgtaaaaatgaaacaagattgtagaaaagagggagaggacaccttcgatgccagcaaaactcatcatatctccgataaacaaaaaaaaaaaaaaaaannnnnnnnnnnnnnnnnnnnnnnnnnnnnnnnnnnnnnnnnnnn

SEQ ID NO: 39740 - DNA, 446 bp, Setaria italica
  Peptide Sequence Number=SeqID_105714
cgacgacctggtgatcgggcggggcgggtacggcgtggtctaccgcggcgtgctccccgacggccgcaccgtggcggtgaagaggctcgcgaggccgcgcgacggcgactgcgagcgcgagttccgcgccgagatgggaggtgctcgctggaccgggatgggggtcggcgtggccgcaccccaacctcgtcacgctctacgggtggtgcctgtcgggctcggccaagatcctcgtctacgagtacctcgatggcggcaacctggaggcgctgatccccgacacggcggcgttcgggtgggcgcggcggctggacacggcgatcggcgtggctcgggcgctcgtgttcctgcaccacgagtgccgccccgcggtggtgcaccgcgacgtgaaggccagcaacgtgctcctggaccgtgacgggcgggccaaggtgacggacttcggg

SEQ ID NO: 39741 - DNA, 411 bp, Setaria italica
  Peptide Sequence Number=SeqID_105715
tcttatcgccacctcaatctgtctttggtcctcacttccgctccacctcttcaacttccgttccgcttcctcatgttatgacctcaccactagatacatgcagcaaaggttcctaagcatgagcaagaagaaaactgtttattgcgagagaagaagtttgaaacacaaatacatgaattgttccacattccaaatacacggattgttccattccaaacagggagtataaaatcaggaaggcaaggaagatggagtcggacaacatggtggtggagattggaaacaatcaaacaatatcatatcttgttcaaaaaagaaaaataggccagggctgttgtgacgatctgcacagctgcaggcaggaacggaggaaaaaaaagctacgggcccagtcaaaaaaatatatagggt

SEQ ID NO: 39742 - DNA, 500 bp, Setaria italica
  misc_feature (479)..(479): n is a, c, g, or t
  misc_feature (487)..(487): n is a, c, g, or t
  Peptide Sequence Number=SeqID_105716
agataggtcttcaatgttggcagtgtccattgcaaccttgagcttcaggtgtgtgttttgtttcagccagtccaaatattgattgaacaggccatcacggagcacagtgccaccataatccctattgtttgcttgtaaattccatgcgttgattgcatgaatgtgcttctcctcccaattcttggcacccctttacttgcgacgatcgatttctggagggcaagtttgaagttttccaaattgccgcatcaccctatttggaagatggtactcgacaatatagaagcaaattaggggcaaatagaacaccagtattcttcgtccatcttgcacatgggactaagctccatctcttcaaccccattcctactatacagctgccaagttacatggctattctaaggcagtcaatagtgccgttgtagtctatgtagcacgtcctaggttgtcgtggacggtagaaatgttagttccaaagntacccganagtagctaaggta

SEQ ID NO: 39743 - DNA, 518 bp, Setaria italica
  Peptide Sequence Number=SeqID_105717
ttggccatggaagatgtgtcttccctctgggtccactcaacgtccgcagtccggacttcgccggagactggcttgtagcagtgcgagtagcctcggacacggtgctccgccggatcccaacctgcgccctggcaattgaaggccccaatgaccctccaaacttgttcaggttccaaatcttgaggacagtttgttgatcgaagagtggattcttgaaaaggcagtctcttgtcgggagagcatagtgcaggcacctgggcacggtgccatcagggaagacgagcctccttagcagctcgaagtcatggccgccgagggagtcgctgacgtacacagggccaccgcagatggcccgtgacgcggcgtggaaggcggcgcaggcgtgatcggactggaacatgtcccagtccgggcggatgaactggcccatccacaagctgttgtaggcgcagttcaccatgtgagctccctgcagccagtagacgcccatgggatcgccattggggtcctcgaaccag

SEQ ID NO: 39744 - DNA, 724 bp, Setaria italica
  Peptide Sequence Number=SeqID_105718
gtctcacaagccgcatccaaaaagaactattaagtcaaacctgcgataaagataagaaatagtcagcaaatcagcacagctatatcttttatgatgcgcttcaaagggattttttcattaaccattagatggcggcaagtttcatgatttgttacaacaagcatatacattttaaagcaaccataactattgcaaaaggagcaaaccaatgaaccccacttcgtaggatcatacactcttcaggacaatccagcaggcaacgctcactggaggctttataaaaaacacttcatcttcctattacagcaagtagcatgaaaggatcctttctgaagccatagcagaataaaattgttgcaactagtattccagcaaataactaaattctattattgtacagcgaaagcttgcaccaaggccacaggatatggcaaaatgaaatagaaacgctactagtattctctgaatctctgattggtaggcattatagtttgcaggttagtgatgcatgatgggtgattatccccccttttttctaaactagccgaaatgcccgtgcgttgctacaggtccttacttgctctcactttattattcgtttgttcctaatatgttggtttcacttcacaatatgttggtgcgttgtccctagtaatcctctctttgcaagtgtagtagtagaagatatgtgtgggtggtttgatgccatatgtttattaagtaa

SEQ ID NO: 39745 - DNA, 422 bp, Setaria italica
  Peptide Sequence Number=SeqID_105719
aacaagggactagctgcatatacccttcttaatatgaacaaagaagctattgaggattgcctaaggtcaatcgaaattgatcccaactatagtaaagcatatagccgacttggatctgcttattttgctctggggaattatcaagatgcgttatacaagggctacttgaaagccgctgagcttgatcctagtaatgaaaatgtctggcagaatattgaggtcaccaaaaagaaattggctgaacaacaagtcccaccagaagagcaggtactgtcagtagaaactacctatgcctttcagatggagtttgagatgtctcctacaaataaaatacacacgcacatcaagctcaaggatcacatccaatgtttacaagtaatggtattccttttaatctatttccaccgggtagttctccaagt

SEQ ID NO: 39746 - DNA, 416 bp, Setaria italica
  Peptide Sequence Number=SeqID_105720
taatagtatgcctttcagatggagtttgagatgtctcctacaaataagtactataattctgttttttattacatggtgcatttttatattgttctttgttctaaattgacaattagtccatcttcttgtttatagaatacacacgcacatcaagctcaaggatcacatccaatgtttacaagtaatggtattccttttaatctatttccaccgggtagttctccaagtcctgaattctttgccaacttcatcaatcgtggatccgatcttggccaaccaccatctggacattcgataagtataaatttgaatgacatttttggtcaagccaatgtcaatgctagtgggcaaggatcaagtcaaacaggaaattcaaaccctccacctgcttctgttccaactggtgctgcagttcc

SEQ ID NO: 39747 - DNA, 2061 bp, Setaria italica
  misc_feature (1998)..(2061): n is a, c, g, or t
  Peptide Sequence Number=SeqID_105721
cgtcaaagtgttggagtaggctagtccaccgccgcggcgccaccccgccccgcccccgccgcacccccaacaaccaccgttcgctgctccggcgccggcgctggagcgggcgggctaaggaatccatggggaacatgacccgctcggactcgcccgtctcccgccgcatcgtcctctccttcctcgacttcctcaactcagttgaattagctcctggggctgatcctgaagctctcgaagttgctagggattgcctggaatctatttttagtgtcaactcatcagccgctggcgaggagatacaaccaggactgttacttgaactattttcttctctcgaagctaatgaaagagataagccaagacctggattggtatcgcaatcagtatcaaacaagccatcgcaaagcgcgagtacatcaaatattgaggaggactcaaataaatgtacaacatcaaatagtggcagccaggtggaggataccttcgacttagaccattcaggagacgaactatttgcaaaagtttatgctgcactcgatgaaatcaatttctttaagacatcatctgctggagctgaagatcctggccaactttcaaaagcaacacaatatttcaatgaagcagtactatcaatgcaaaagtcaggaaggaaaaaggcaagcttagtagaccttgcagagtccttcaaatcaagaggtaatgaattcatgagatcaaaccaacaccttaaagcagtagaacagtacacctgtgccatggcattgagcaggaaaaatgctatttactattgtaacagggctgctgcatatacccttcttaatatgaacaaagaagctattgaggattgcctaaggtcaatcgaaattgatcccaactatagtaaagcatatagccgacttggatctgcttattttgctctggggaattatcaagatgcgttatacaagggctacttgaaagccgctgagcttgatcctagtaatgaaaatgtctggcagaatattgaggtcaccaaaaagaaattggctgaacaacaagtcccaccagaagagcagaatacacacgcacatcaagctcaaggatcacatccaatgtttacaagtaatggtattccttttaatctatttccaccgggtagttctccaagtcctgaattctttgccaacttcatcaatcgtggatccgatcttggccaaccaccatctggacattcgataagtataaatttgaatgacatttttggtcaagccaatgtcaatgctagtgggcaaggatcaagtcaaacaggaaattcaaaccctccacctgcttctgttccaactggtgctgcagttcctccttttgccttctcaggatcaggtaacgaaggaaatcaggcacacgaagcttctagtggacaagaaagggaacatggtgaaccaggcatccatataaacttgacaggacccgagcaggctgcagaggctctgagaactgtgatgcagatgtttgggccacagatgggtccgcatgaaggcacacctagaggaccaggttaagacgtgggaagcaggaaatgtgtaaatgtggctcgtagttcaattattgtatacagaagtcttaaggtgccatgctattttgtccttccaccctgattaagcatggaagttcttggatgcctttttgcagtatgtctgttctgctatcccaccttaatatttcatggtcacctgaactgttcatctcggcgttgatgaatcattagatatggtgaggcttgttcgttgaaactctcccgtgatgcctgtttgaccattttacttgtcggttattgtgtaatgtgaaagtcttttgtccccgggctactgttttacttgttggttggcaggtgatactttatgaaatatttgtaagtttatataggttggcagagtgaaacttgtgtcggggatgaagtttataaccatactcataaattcattttgttgttggcaaacaaaaaaaaaaaaaaaaaannnnnnnnnnnnnnnnnnnnnnnnnnnnnnnnnnnnnnnnnnnnnnnnnnnnnnnnnnnnnnnn

SEQ ID NO: 39748 - DNA, 551 bp, Setaria italica
  misc_feature (517)..(517): n is a, c, g, or t
  Peptide Sequence Number=SeqID_105722
tctgtagccttgtcgtcaaatggtaagcttgtttcaacttcagaaatttttggaagagaagcatgaaacttggaaccattaggccaatgagcctccacttcggattcattaggccttttaattggtttggtgtcatccttaacaacactggccagggctgacacagcagctgcagcacgattaatcatatgacgctttgcaggttccacactggcatgcctatttgcaagggaattaggtgccattctttgtcttacactgtgaggtgaagactggttggagctcttgaaatcttccaggtgttcatgatgaataatagcgggccctagatgactggaaccgctataggtactgttgctggttctgatggaagataacctcttgctctcggcagcccattcttgtgccccactactttgcacattaaagttgacacatactccaaacttaagagctctgttgtcttgaattccaacacctgaactctgagagtactcctgccttctgcccgccggtnaaccgggcgagaccatcgagcggccgcggcggcg

SEQ ID NO: 39749 - DNA, 472 bp, Setaria italica
  Peptide Sequence Number=SeqID_105723
agctggtggaggttgtactgtctccttgggtgagcattcattctcatcttcagcattgccatctgtagccttgtcgtcaaatggtaagcttgtttcaacttcagaaatttttggaagagaagcatgaaacttggaaccattaggccaatgagcctccacttcggattcattaggccttttaattggtttggtgtcatccttaacaacactggccagggctgacacagcagctgcaccacgcaatgtccacacgcccacactttgcatacatgtcaactaacgcattccccacagctatgtccgaatcaaaagcaaggaaccgcaccatcctgccatggatctcccttcccttcatcagctccccttcctttgcacagacattgagaacgctcggcatggcgcgtagatcattcgccatgttcacggcctcaacctgccccctcctgaaaacgatccagggccttgctgccct

SEQ ID NO: 39750 - DNA, 437 bp, Setaria italica
  Peptide Sequence Number=SeqID_105724
atgtgcttcatttttggctttggatggatgagaaggcacagacgaaggtaaatggagtttaatggatagattgaaagtgaatgtgcaccaagatgaagaactggaattgggaatagaagggagcaattcaatgttcacgtttttcagcttttctcaagttttggaagccagaaaaaacttctcggtagaaaataaacttgggcaaggtggctttggtcctgtatacaagggtaagtttcctgatggattggagatagcaattaagagacttgcttcacattcaggacaaggtttcagagagttcaaaaacgaagtccggctgattgccaaactccagcacagaaatctggttaggctcttgggatgttgctctcaagggaggaaaaaattctaggtctatgaatatttgccaaataaaagcttggatttcttatctt

SEQ ID NO: 39751 - DNA, 509 bp, Setaria italica
  Peptide Sequence Number=SeqID_105725
agaaacaataactaaagaataaggtaacaaacaataggacaagggtacctaggaattttaaatacagcgcctagaaattgcaatcgatgtcgctcatgcacttacttatctccatctgtatgcagagaagacgataattcatcgtgatgtgaagtcatcaaatatcctactaacggatagctatcgtgcgaaggtgtctgactttggatttgcaagaagtggccctagtgacacggagaagacacacatatcaacaatagtgaaaggcaccgctggttacctggatcctgaatacctgagaacataccagctaactccaaagagtgatgtcttctccttcggcatattgcttgtggaaattctttctgctcgccgacctgtagagctgaagcgaacccctgaagagaggatcactatcagatgggtatgtgtgagaaatttcttttgtttcctgtatcggcacaatctatatacaaggtgtcaaattgatactaaaatggaacactagc

SEQ ID NO: 39752 - DNA, 457 bp, Setaria italica
  misc_feature (188)..(188): n is a, c, g, or t
  Peptide Sequence Number=SeqID_105726
ggaaatgagcgtattatcatcacagaatatgttccaaatggcactctaagagaacatttagtattggtcaacatggcagggtcctggattttaatcagcgcctagaaattgcaattcgatgtcgctcatgcacttacttatctccatctgtatgcagagaagacgagttggctacatgcttagttgcntaaattactgagctatttttgtcaaatagtttacagcattttgtctctgaaaagggctaacagatggacaaagtagtgcttcggtacccagttcttcgttttggaatggccagttattttgatgagagatttaaaacatttagttcaggaaaaaaatctttgaatccatcaaatcattgtgttgtattatactgacttaaagatagcatagttttgtaatttttggcactggccaaccatttttatttcaattttttttgtgataatct

SEQ ID NO: 39753 - DNA, 2241 bp, Setaria italica
  Peptide Sequence Number=SeqID_105727
tctctccttcctccccacctgctccgctccttcgctcgtgcttgctctgctctgtgctcctcttgcttggattctcccgatctgagcgcccccttaccgcccaaaaatcttgatcattatcaggcagataggttccctgcttagctcagatttctttgtcctcttcttcttgccttgttccgcagattttgtgtccaatcgctccacggttttgtactttccggtcttgcctgatctgctggttcttttcctgcttcttgtccttttctccgtgtaagagctcagctgttgcttcttcctcttcagctttcatcaaattcgattccatttccgctttcgggggtaaaaagtttgtgctttctgttgtgttggtagagatagagagaggaggggggggggggggcgggagctgatgagacatcaaacttggactccgattcttggcttaattcgcttcccatagatgagatccttgtgagttgtaaggtcaaatccattctcagtagtgagcaccgatgtctccttcggctcttctacctgctctcgcggttttcctcctgtgctgctggcctctagctctcgcttccgtcgctgagacagccctttcgcgagttgcttgcggagacgaccaagttgccgtcttggatgcctctgatggcctcctcaacctgtcggtcaatggggttctggtgcaggaccgcgttcttgcctgccagaagctccgcttgtactttgggagtggttgcctccgctgcggcgaggtgtcggatgggtggaggggtgcggttaagcaatactgtggtgaagggagcgaatccagccaggcaacttcgcatcaaaatgtaccaaggaagctcttgaggcggcccacagaaaatggctcaagaaataattctggcccatgtggaagcttgggtttgcatgaaaataatcaggacaacggtgattcttcagaaaacgatgatcacttcctggccatgcctggtgtgattctcctatgctgtggtctcatgcttccatgcttccatgctgaaagaaaagaagccagcaggcatgatactgcaactattcagcgcaatgcaattgaatcagtttcgtcttatgaagtaagcatgtcgtctgagaaagtcccaccaactccgcatcggatacctccaagtccttctagatttgcaccatctccgcaagtagctagagttggatctgtcaacttaagcattcagcagatcctcagggcaactcagaacttctcaccatcatttaagttaggtgaaggaggatttgggatggtctacagggctgtattgccagatggaaccgttgttgcagtcaagagggctaaaaaggatcaatttgcaggtcctagggacgagtttagcaatgaagtagacttgcttgctaagatagaccaccgaaatttggtgaggttactgggttttactgataaaggaaatgagcgtattatcatcacagaatatgttccaaatggcactctaagagaacatctagatggtcaacatggcagggtcctggattttaatcagcgcctagaaattgcaatcgatgtcgctcatgcacttacttatctccatctgtatgcagagaagacgataattcatcgtgatgtgaagtcatcaaatatcctactaacggatagctatcgtgcgaaggtgtctgactttggatttgcaagaagtggccctagtgacacggagaagacacacatatcaacaaaagtgaaaggcaccgctggttacctggatcctgaatacctgagaacataccagctaactccaaagagtgatgtcttctccttcggcatattgcttgtggaaattctttctgctcgccgacctgtagagctgaagcgaacccctgaagagaggatcactatcagatggactttcaagaaatttaatgaaggcaacatgagagagatattggacccgttgctggaagatcacgtggatgatgaggtgcttgagaagctccttagcttggcgttccaatgtgctgctccgacgcgggatgaccgaccaaccatgaaggaagttggggagcagctgtgggaaatcaggaaagagtacggaaagagcatcaggaaggtgtgaagatcatgggcaactttacctgtttctagcttcccttcaaccacaagccgaatcatgcttattcattgcccgtgacatgtttctgacctgacagatgtggtctgaacaatgtacagatttgataccacca

SEQ ID NO: 39754 - DNA, 918 bp, Setaria italica
  misc_feature (21)..(21): n is a, c, g, or t
  Peptide Sequence Number=SeqID_105728
agtttataattagttcggttnaaggggtatgcttctttgatattgtgaacataaaagaccattcctttttcatgtgactcagctatggagcaaggctaacatcacagtggtcctagtaagataggtctgctctttagattttggggttgcaaataaaatgtcgcatacttcaagttttaaaattgaattaacaccagggcttcaggggttgaaaaatggacatttatcccttttgatatttctaatttagtaatgatatcacttgtctgtttacatttttcactatcttggcaatccctgaaataactgaatgcatgagactttttgtttgtgctgggtatgcagactttcaagaaatttaatgaaggcaacatgagagagatattggacccgttgctggaagatcacgtggatgatgaggtgcttgagaagctccttagcttggcgttccaatgtgctgctccgacgcgggatgaccgaccaaccatgaaggaagttggggagcagctgtgggaaatcaggaaagagtacggaaagagcatcaggaaggtgtgaagatcatgggcaactttacctgtttctagcttcccttcaaccacaagccgaatcatgcttattcattgcccgtgacatgtttctgacctgacagatgtggtctgaacaatgtacagatttgataccaccagcaccaatttgtatctccttgtctatcggtttgcgatgtacttttccttggagttacagttctttcagtgaatgtgtattttgggagtcctcacatttcttgattcccattgttttggtattctgatgcatgtaaccacacaactgaaaatggtttacctaagtacagtacatggaggaattgtgtagttacggccttacggcagaaactaaatgaatgtgtatgaagcattt

SEQ ID NO: 39755 - DNA, 583 bp, Setaria italica
  Peptide Sequence Number=SeqID_105729
aagtgtaccttgtgggtttcgatgtgccatatgtcttgagaaacatttcaactttcaaatgtattgcttcattatatcttttcttcagtgaacgatagagtgcagtggccactagaacaatgaaggtggctactgatgttgtagctgaattaaagaaaacaaatgagctatctgcgcagtcagagggaatagatgtgtcccgcgaccaaattacttgtttcgaaaataatatagtggttattatgggaacatggtaacataaaatttgggttgtagcaacaaaagatttaatcataatggtaaaattttcaatggcggcgtacctgcaatgagtttgacatgcgaacctgcaggtatgaagatcgaaagttagtcttcccatggtttgctttttacaggaaaaaattaaacttttaaaatgctgcatgcaacaacagtgcactcttgcagctctcactggacgaggttcttaacattttgcagtgtctattgcaagattttgataaaattcctttttataataatagtatattagtaaaagatgtatattctagaagtgttttacataataataacattattt

SEQ ID NO: 39756 - DNA, 244 bp, Setaria italica
  Peptide Sequence Number=SeqID_105730
tttatcgcccgctatttgcagggcggtcgacgcccgccccggcaaccagccatttttttgctgcgaaaagagacgtgaggcggcacctgcagataccattcccgccccctcaaacattttctgtagcagtgaccggccggggaaataatggaatcgaacaaccagttgtttccgacaaaaaaaaaaaaaaaaaacaactaaaagagaactagccaacggaccacagggagtagaaggtaaggag

SEQ ID NO: 39757 - DNA, 211 bp, Setaria italica
  Peptide Sequence Number=SeqID_105731
acttagacttgcatattcaaggactttggaggggactatgtaaataaggtgttgaaggctataagggccaccccatgagcaattaactcatgacaacataaggtgtcatacctagtttgtaaagggaaactaggagagctaaggaggattaggtttagaagcactatttcttgtacaaggaaggtaatataagtgatagttgctctctcac

SEQ ID NO: 39758 - DNA, 620 bp, Setaria italica
  Peptide Sequence Number=SeqID_105732
aaagggaaactaggagagctaaggaggattaggtttagaagcactatttcttgtacaaggaaggtaatatgagggttccaaagtgttgagtagggttgtgagagagcaactatcacttatatttttgtagagttgtgcttaaagaatttgaggacggattttccaatcttatcctcttgtcatggattcttcaacataaccatttagggctttctatgatattcatttattttgttcttgatacgacacacgttctagtcatactttctatatcatatctatatccaatagttgttgcgtataatagtggtatcaaagtcttaacatctggtggttgggactattgcggtcattgggttcctcctcgtcgaccttgttgatgcaggattgcaacaacaacaagaacatagtcaacttggggtcttccttaagctcctcaccattttcgtcattcttggctcatcgccatctccatactccttctttggtgccccttttctgttactttcctcttcccgtagctccacaaatcctaattatgtgacttcacaattgctaagacctgatctatcattgtcacctccgtagccttaatcccatagaactctaatcctctaact

SEQ ID NO: 39759 - DNA, 298 bp, Setaria italica
  Peptide Sequence Number=SeqID_105733
ctactgggcgtcttctatctgctaataagctcgactccaacacaaacaaggtagctgtgcatggctttcttctctggtacccccatagaagtttccttgtcatctaggtacactgaatagccaacgcatgcatatttgaaatccgaaaggttgcgaccttcttggatagcttccagttcaatttccccaatcatacgctcagaaacttggggaagggcgcgggtgacgccgacgcagacggggccgcgcgctcgcgaccggagcaccgacgagtagaagaggcagcccttgcagaaga

SEQ ID NO: 39760 - DNA, 485 bp, Setaria italica
  Peptide Sequence Number=SeqID_105734
tactatctcgtacccccatagaagtttccttgtcatctaggtacactgaatagccaacgcatgcatatttgaaatccgaaaggttgcgaccttcttggatagcttccaattcaatttccccaatcatacgctcagaaactgatacatagttaagaaagtcgatcatgaaacagagttaatcaaactgttcaaaactataaatcagataacaaaataaatagaccatgaaacagattcgagatttatactgctccgttacttgattatatgataaacagagtgtacatgcatagacaaagaatgggcctttgcatattgttatggaacagatcaggtttagattcacggtatcctacacttttggttgctaggtgataaaacatttatggatggacccaagtgcgtcaattatatttgtttcaagtcagtggaagacatgatgctcctaataggcctaaacctcatgctgttaggttagataatcc

SEQ ID NO: 39761 - DNA, 511 bp, Setaria italica
  Peptide Sequence Number=SeqID_105735
ccgctggaataacttcttcagcttgtgaaacaactgacatgctgaagctaggtgagctgtataaagaagatcgcgcaagggaccttgcacttttatggaagtagctactacttttggcataggagaagtagaagtcatcatttggcagatacgcaaatacatgatcagcattttgtatgacaggccagtatggggcggatgcagaggagcatctgtccagtagctcctcagttccaacaatctccaatctcctgagcatgaaaggttttcctggctgcaaccattgtggaagtttggttgaattcctttcatttgaatgcacagtgcgcaatgaagggacatcctgcacaacatccaaaagcaagcaatccactactttcaagtcttcaagatttccaaggtttgagatcatcttcagcttgatgttctcacggacttcgagttctttaagtgcaggtatgttctgaatcgtttccaagctatcaacatgatctatatgcaagcttgtcag

SEQ ID NO: 39762 - DNA, 382 bp, Setaria italica
  Peptide Sequence Number=SeqID_105736
caatttgtgtggttgcagttaactagctagctacgatgatggactttatgcttgccttcagtatagcatcgaattgacatatccgatggttgattgatcatctttcaactttcttttataacatgctaaaagcataagcttgtacacacaactttctttttcttccagatgaaacccgtaccggccgacagcatctgtggcatcgtcgttgtcaccttttacaaactttattatgtcattccgtccatacctaaactaactagatctcgtgctagacgtgttatatgttagtaaccgacagttaattaagcttcatctggtcaattcaccaacaggccaggtaaatgatcctgtgtcacggactcacggattgattattaca

SEQ ID NO: 39763 - DNA, 542 bp, Setaria italica
  misc_feature (506)..(506): n is a, c, g, or t
  Peptide Sequence Number=SeqID_105737
catccattttcagcatcttcgctagggagattagcagttagcagcttatgagcggactgcccaagacgctttcgcagaaagggaatgatagctttggaacatcctatttgtaggttcttcctatttgattccccaggttcatccaacaacacaacaacagaatttacaattgattgcatagtaattaacacatcagaagacagaagatatgagaacgagcgcactggatccataatatcctcaaacattttacatgctccacagtatagataatcaacattgctaggagcaagagatggttggaactccgaaagaatatcatcaaaattttctgttggctgcaaattctgtaaaagttgcttcagacctgacatatttggttgattcaatagatcaggaaaggccagtaacttcctgtagcagccaagaatctctttacatactgcagttgcagttgatgatttcgagatcaccacatacggaatgtctgggttgccagctgaagnggaatgtgaactccagttatctgtgcagctctcatc

SEQ ID NO: 39764 - DNA, 468 bp, Setaria italica
  Peptide Sequence Number=SeqID_105738
cggtcgcggcgatcctcctgcccctcgtgctccgcaagcgtgtcggtacgtacgtgaggttgtgagcctatgcacatgcactggtatttttttaaattagagcgaccgattatgttaaaaaaagatgaagctcaaattggatgaaataatgaatgaaaaaaataataacacaaacatcgtcaagttggattggatcatcaacacatgccgcaccacgtcatcgcactcaacttaactcaacaacgcatcagccggttgaattgggacatcaacatgtaccgagctcaacttatctccaacacactctgcccggtcggattggaagatcgacacaagccgcaaactacccccacttcgtggcagcccctcaacgcttgccgccatggtaacagccctaccgccaccatcggtccaccaccaccccaaacgagcggtgccgaccgcctgacgaagtcaagaacccgcaag

SEQ ID NO: 39765 - DNA, 1114 bp, Setaria italica
  Peptide Sequence Number=SeqID_105739
cttcatcttcagcccatgaactctcttcttcagaaagttgatgcagaaacctgtcctcgcccgtttccatctcatcctcaacctctggaatgccttcctcagtaacaatgcattgttcttcctccatgcttgtatttatctgctcttcaatgctagttatcgtctccgattcttcttcagagaaatcctccttgtgtttctgtaacaagtcatcaacatcagactttgcatgaagcatatccccatcaggtttttgaggtgtgtaatctccctccttagcttctactccctccgtacgaaatgcatggtgactcccaggaaaatcaagtttctttgtttgagactctttggtggtgccaacaattgataggtcctgtttaggaaagccaactacggattgttcttctttagggatatgaacaactgattgttctgctttactgtaaccaacaatggatttgatttgatcaggcacgccaacgatagattgatctggtttactataaccaacaacggattgtatttgctcgggcacaacagcaatcgattcatcttttctgtgagaagcaacaatagattgatctggttttctgtaaacaacaatggattggatttgctcaggcacaccaacaattgatttgccttgttcctggaccctgacaagtggcatggactgaggcttcaaacttccatgtgtttcattattggccttgtcctctatggatgttgatggcagtgctggatattgccattgctcattctctacatcagaggtttcatctgaagactccactgccataaatatgtcttctttagctttagcttcatcctttggatcaagttcgcaaactgcagcaatgctcaattcaattcctgagagatctaccgcaaatttatcttcttcgaccgcggcttcatctactgcttccacttcccctaatgacatattagtcaatgcatttcttgacaattcgacctcaaccatgtccagtgcagcttcttctgccacatccacttccccatatgctgaactgctcgaagcattttctggcaaatccacttcagcagtttctaaaccttctgtatcagtacttaacagcctattgtatatacc

SEQ ID NO: 39766 - DNA, 479 bp, Setaria italica
  Peptide Sequence Number=SeqID_105740
agagaagcaggggtgcctagggttttagaagaggaaggggtgggttctccgcggcggcgacggcgacggcgagccatggagacctcgaagctctcgtcggcgctcttcgccggcactcacttcaaccgcaagcgcttcgccgccgactttgcgcggttccatcaaggcccgactccctcacccgccgccccctccgcgctgtccccggagaagaagcggaagcgaaagagcggcaaggcgaaggcgaagaataataagaagaagcgagcggaagcggctgccgcctcgtcgtcggatgttgtggaggggttcaatgtgttcaagggattggtgggtaaaaatgacgagctgcgttctgagaaggtggtgatagggaaggatgaggattcggtgtctgtgaggcggcggaaggagattggagagggaaatcggagagggctggcagttcttcggaagaggtttgatattcacattgctgg

SEQ ID NO: 39767 - DNA, 259 bp, Setaria italica
  Peptide Sequence Number=SeqID_105741
tcttggcccataaccaaagaaatattttttatagataaggagagaggaagggaagagagagagagagttgacataaccataagtagtattggcccagcagcctaactgagcctctaaaaatatattggtagatgctatatttgtttggggaaattattctcaccaacagtatactatgtgtatacacactcttgtacataagaatgtatatatggttgaaatagctaatgtggctaatagtaacagtaaaaaaaaaaaa

SEQ ID NO: 39768 - DNA, 2228 bp, Setaria italica
  Peptide Sequence Number=SeqID_105742
gcattggattctttggtttcagtctttgagatgacctgatcagatgcattgctgttggcaaatgttctctggagtctggactagccatctttgagatgaccttctagggctgaagttgtgcccaaaaaggggaaacaacaatagtaaaccatcgctcttctgcacaatccagtgaacgaatgcctctttattcaagccgctttattgaaatggaatgggtgaatatgatactgatattttgacatgtgaaaaggcaattttttcgctgaaggtacgcagaatggtgtcaccactcaaaggtcagagcttgctgtgatttgagagttcctgcttcagttgatctctcaggactcttctcagaagcttgttggaagcagttcttgggaactcgggaacaactttgacatagctcaccttgaaaagaggattgaggttcttctgaatggctctctggaacttgctcttgagaacgtttacatcgtattgggccgatctatctttcagcactgctaagatagccagatgttccggtccaccaccagcaggcttgacactaactgcagctgtttctagcagtccctcatcggctctgttgcataccctttctatctctactgaacttgtcttaattcctccaaggttcatggtgtcatctgctctgccctgtacaatatagtacccacctactgtcctctggattatatctccatgccgtcggagttgccttcctttgtaaatgggcatgccatcaaagtaaaccttgttgtggtcagcattgagaagccaatttgtagcaccaaaatacaaagggaagagacccacttctccagcacaaggtacatcatcaggatatggagtcccctgttcatcaagtatgacaaatccagtggacattgacgcaccactaaaagcgccgaagacttgcggttgcaaaagactaccttgaatgtatgaggatgccagctccgtgcccccacagcattcaacaataggcttgtatgatgtgcgtgaagttagccacagattatcatcaatatcagatgcctcccccgtcgtgcctagtaccctgattttggtccagtcaagccctttagcacagttcgcagctttccatgacttcaccaagctaggcacagttcctaatacagtcacaccagcatcctgtacaaatttgcaaaaatcacgtccaagtggagatccatgatataaagccaaagtcgcaccattaagaaagcatgagtacaggattataggtcccataacccagcccagattagtaggccagcaaccaatgtcctctggacgaacatccatatgggcccatgtatcagctgcacatcttatgggagaaagttgtgcccatggtatagcttttggctccccagttgttcctgaagaaaatagtatattagttatcgcatctacagactgataagctggagaatagatagatgaccttccagcagcacgagaaagaaagtctttccaggacatatcaccattcctcagtgtaactccaaggtagtctccatttgcaggaatcacaacagctttagatgaagttccttgcacgacacggctgtaaagtggaactttcttgcctcccctaataatgaaatcctgagtaaaaattgcctttgcttttgaaacacccatgcgagtaccaatctcctgtggcgcaaaactatctgctattgacacaacaacaaagccaccaaggacgattgccaaatatatgatgactgcattgcatgtcataggcatgtctattgcaatccgatcccctttctggaacatggtatctagtgcatttgcaacagctatcacttgactacgaagctccttcagtgacatacggttcactggatgatcatcaagaccttcatccctccaaacaatagcagtactgtcatctgtcctcttcaaggaagggcaaggtagcagacagcattcggcaatgttgagcaccgctccttgaagccaagttccccctttctttgatctatctgacgtacttagaattgcctttggttcttgttgaaacttgagtgcgagctgctttagcaccattgaccagtagacctcttggttttctactgaaaacctgtaaaagtggctaaaacttgatatagggtccttgtatgatgattttaacagcttcggtccatttgcttccatcaatctccccaggttcgtttgcttactgtcaatcggtgacgggaaccagg

SEQ ID NO: 39769 - DNA, 609 bp, Setaria italica
  Peptide Sequence Number=SeqID_105743
taattgaaaagtatgcaccttgtccttcatctcaacccagctcatagcaggctccttcttgaggttactttctttcattagcttccgcaccttagccacctcatcccacatgcctgctgaagcataagtgtttgcaagcaggacatgtgtgccagacttctctggctctagagtgaagagcttttcagctgctaaccttcccagctcgggatcttggtgaactcttgaggctcctaagagtgcaccccaaactgcagcattagcttcgaatggcatgttgttgacaagctccatcgcatcctctaatttccctgcacggccaagaagatcaatcatgcacgagtaatgctcctcggtcctgtcaattccaaacatctccttcattgactcaaagtatttcttggcctcatcaacaagccctgcatggttacaagcagagagaacactggtcaaagtgatgtggtttggggcaacgccctcatcaagcattctatggaacaattccaacgatctcttcccttgtccatgctgcgcgagccctccgatcattgcagaccatgagacaactcccctctctggtaggccagagaaaggccaatgtctgcatcc

SEQ ID NO: 39770 - DNA, 475 bp, Setaria italica
  Peptide Sequence Number=SeqID_105744
ccacttcctgatgatggcaattgcacttctggatccaatggtataaacccctgtccagagccaccagagctcgaaccagacctccgacttaacccaggacttccaggagtaacactatggtcactatgcagagtattgtaagctctgtcatactccgcactcacgtttcctctgagtttttcaatgccatctgtgaagtccattgggtgaggtcctgtttccatctcatattctccttcagtctgaggtggaaattcatgaggtgttgagtttctaggctgtttttcttgtgatgatggtggctgccctgctgaagatgaagtcttttgcacagttgactgcagtgcattccttccagagctgcacaagtggcttaggataatataattctgaggatgacttgtccaagtaagacattagagcaaccggggggcatgtccatgagatcgcttatcttggttgatcgaataaaatc

SEQ ID NO: 39771 - DNA, 239 bp, Setaria italica
  Peptide Sequence Number=SeqID_105745
tacgaatgcgaaaggttaacttaattttgatggcatcgtctgtagctcaatgacaaacatgaaaactggtgttcagtggaagcaaatttatcctgttacaggtaatcgaacccgattcctgttgtcagatgtgtgacttgaatcttgatgcaagtttttgggtgaagtttccagcagagaaatatacatgcttaagatgtttttgagaaaaatataatctgatttaattccaataaggg

SEQ ID NO: 39772 - DNA, 543 bp, Setaria italica
  Peptide Sequence Number=SeqID_105746
aacccttcctcccggcacccgtcggtcaccgagagccgggcgcacaccgcgtccatggcctgcgcgtacccggggctcgcgaacaccgggagcccgtgctcgcgcgcccactcctgcgtcacctccttcggtgtgcggatgctggcggaccagttcaccgccgagccgccgccgaccgtggcgcccgtgaagatcatcgtggtaacgttggacgtgcagaagatgccgccccgctcgaagaggcgctccatggacgggccctcgatcgagctgtagtccgaggcggtgaagtagtcgcccttctcgacgaccacgaccttgtaccccgcggacgcgagcaccgccgcggccacgccgccgccgcagcctgacccgacgatgacggcgtcgcattgcactacgtggtggttcgcgtccgacgcgaccggcttcaccgtgaggcccctgcccacgagggacctgagcagcgcgttgtcgtccagcagcctggtctccacgacgccgacgtcgagaggccgggacggcgaaaggcgccgcctccgt

SEQ ID NO: 39773 - DNA, 463 bp, Setaria italica
  Peptide Sequence Number=SeqID_105747
cttagagtactgttccagtcctgctgccaccactctagactgctaatttcctcataggtctaccagtcacgcccagcttttcaacaaagcttgcataaagtcagatgaccaaccaccaggtaaaacagaccaagtcaccttcaccgagattaatgcaaaatcggtctctatcagttgatcatcatgtccatgattgtgcgctgtgaaggaacagcaatgttctgatgatctgaaagaccctgcacctaccttgaacttcatatccatctgagtgcctatcacaactgcaatcacatacctcgtcaagcaacggggctcaccaatggtgccatcaaagagctggatctcttcatcaaactcactgattaaaacagccgagacgcattattaaaaccgccttggacttctgatatgacgacttctacagtcgcctcaactgcatggtccagacgtgatgcactta

SEQ ID NO: 39774 - DNA, 720 bp, Setaria italica
  Peptide Sequence Number=SeqID_105748
ccccccgcgtgctcctccagccactccgcactccagatctccgaaccctaacccctcccgcatgccattgcactgagcagtagccggtagcggtagccacacgccatggcgcagccgcgcacctgggggatcctcctcgccgtcctcgtcgccgcggccgtcgccgtcccgccggcgaccgcggcggtggcgagcatcgacctgggctccgagtgggtcaaggtcgcggccgtgcacctcgcccctggccgcgtgccgatcgccgtcgccatcaacgagatgtccaagcgcaagtccccggccctcgccgcgctcgccgacggcaaccgcctcgcgggcgaggaggccgccggaatcacggctcgccacccgtccaaggtgttcgcccgcgcgcgggacctcctcgccaagcccttcccctacgtgaagaccttcgcggagtccctcttcctcccctacgacctcgtccccgacacgcgcggcgccgccgcggtccgcggcgacgacgggcaggtgtactccgtcgaggagatcgtcgcgatggtgctccactacgccgcggggcttgccgatgcgcacgtcggggcgccggtgcgggacgcggtggtcgccgtgccaccctacttcgggcaggccgagcgccgggcgctgacacaggccgcacagctggctggaatcaatgtgctcgctctcatcaatgagcacgctggggcagcgctt

SEQ ID NO: 39775 - DNA, 403 bp, Setaria italica
  Peptide Sequence Number=SeqID_105749
ctggaaatattttctttgctctctgtggacgaccaatgcaaattcaggtaaattttttttcttatcacatgtgtcattgtcggagattgaggattgaaggttatgtcgtcatttctcgaggtccaaatactccagctcattaagatattgactttcagaagaattgagcggatttgatggtgtgtttcttggtaactggcattcaagttatgtgcaacgacatcatcaatcagatatcatgttcttcatccacattccttagatttcatatgagattccaacctttaggacttgacgacgggggatcgacatcatcttctcaccatttcttgagttctttctaagaaatgagtataggtagttgacaacaatcttcttgaggagcgaggagtgaggtcttgcc

SEQ ID NO: 39776 - DNA, 392 bp, Setaria italica
  misc_feature (334)..(392): n is a, c, g, or t
  Peptide Sequence Number=SeqID_105750
acagatcagaattctgttcgggcgaggcttgtagaacccgtatgagaatagctgccatcggttcaaagctgaagagtgcacctgatactactatgtatgtaccactaagaacccatgaagcagccgcattagctaatttaccatcatagtcatagaatcctctggattgcccttgctcttgtctgattcgacttcaaatattgagtatagcaacagaagctggtggggttcctcagtgcaatctgtgtccttgttgacctgctcaatgctaaaattgttatgaaacttgaattcagacctgggtgtaatttggcgctcagatttcatgacaacnnnnnnnnnnnnnnnnnnnnnnnnnnnnnnnnnnnnnnnnnnnnnnnnnnnnnnnnnnn

SEQ ID NO: 39777 - DNA, 372 bp, Setaria italica
  Peptide Sequence Number=SeqID_105751
gccctctgcgcgcgctgcgaccgtgacgtgcacgccgccaaccgcctcgccggcaagcaccgccgcctcccgctccacccgcccgccgccgcctccgcgcccgcctgcgacatctgccaggagtcccacgcctacttcttctgcgtcgaggaccgcgcgctgctctgccggagctgcgacgtagtcgtgcacacggccaacgccttcgtctccgtgcaccgcaggttcctcctcaccggcgtccaggtcggcctgcagcccgacgcccaggacccggagcagccgcatcccccgaccgccgccgcctccgcagcaccagcaccagcagctcccctcccaacgcccctgccgccgcccgccaagaaggcgccg

SEQ ID NO: 39778 - DNA, 600 bp, Setaria italica
  Peptide Sequence Number=SeqID_105752
caaggacatagcctctggcctactgtacctccacgaggagtgggagaaagttgtcattcaccgagatatcaaagcaagtaatgtgctcctcgacagtgggatgaatggacgccttggcgatttcggcctagcaaggttgtacaaccatggcacagacccacagaccactcatgtggttggtaccataggttacctagccccagagcttgctcgcacaagcaaggcaaccccgctaacagacgtcttcgccttcggtacattcatccttgaggtcacttgtgggagaaggcctattttccaagacgcaagtgacaaacaggttatgctggttgactgggtgctagagcactggcgcgaaggaacgcttgttgacacggttgatgcgaacctccggggtgacttcattgttagtgaggcatgtctagtgctcgagttggggctcatgtgctcacatccttttgtgaatgcaaggcccagcatgcggcaagtggtgcagtacctgagtaaggaggtaccactgccggagctgatccctaccaatatgagcttccacatgctggcactgacgcagaaccaaggatttgactcgtacatacgatc

SEQ ID NO: 39779 - DNA, 369 bp, Setaria italica
  Peptide Sequence Number=SeqID_105753
cctgcgatgtttggctaatataattagggatgtttggctaatatagttaaatatagtaatacctattaaatgtaggttaattacaaaactaattgcacagtctaattattttgagataaatattttaatctaattagtccatgattttaattacaaaactaattgcacagtctaatttgtgagataaatattttaatctaattagtccatgatttgaaaatggtgctacattaactattagcttatttgctaatgatggattaatcataatttgcttaccatctaattaggtttaatagatggattaattaatggattaattaggtttaatagatggattaattaatggattaattaatggattaatta

SEQ ID NO: 39780 - DNA, 316 bp, Setaria italica
  Peptide Sequence Number=SeqID_105754
tatgagcagctgtaggactgatccaagcaggtagagaggcggggtgtaccaggccgggccatacggcgatccctcgtcaggttatggtgataacgtattttatcaccaattttttgccctagaatcccgcgcgatcacgcgcgcgccccagctctggtttctaagaattaaacctgtcacttaacaatcgagttgtagggggagcagctccagactcatgtagccggatgccggccaggaccactcgtacggtggtcttcacacaccttccccgatcagcagtgctgcataacgaccaagggtctatcaggcaggc

SEQ ID NO: 39781 - DNA, 951 bp, Setaria italica
  misc_feature (722)..(722): n is a, c, g, or t
  misc_feature (733)..(951): n is a, c, g, or t
  Peptide Sequence Number=SeqID_105755
cggcagctgatgcaagaaacctgttggatcgaactgttggcttcaccataaattacgagagggaggatgagtacgatacgcgggagctgtcagagttccctgacatacggctatggtttgtgaggcttgatgctgcttacccttggttcccagttgtgcttgactggagagctggtgagctcgccagatatgctgcgatgcttgtccctcaccagatgagcatgcggctgggcgtcgtcttcaacccggaggcactggagctgtttgtgatgaagaaagtgtttgctgtggacgcgtggcttaagcagcagaaccatcccaagccgaggttgaagacggcagacatgggcaggatgctcggctacggtataggagatgagttgttcgacttgatcgagaagtaccccgttcatcgttcgtaattcaaaagaatttacaacactgaaaagaatagggacccgacggttataaaaagaataaggtccaacacagaatatacaggaagatcaaggtgcaagattgtacagagatcaacatttgtacgtttggttcgaggagccttttgatcctgtcgtattgctcatagtgtttttgctgttgtacacttattctcagtagtagcaggaggtacctgcaaacgagggccggtgcccgtgctcttgcgaccgcgaggctctccaaacttgtctcttgtttagaagcatccaagaaaaaaaaaaaanaaaaaaaaaannnnnnnnnnnnnnnnnnnnnnnnnnnnnnnnnnnnnnnnnnnnnnnnnnnnnnnnnnnnnnnnnnnnnnnnnnnnnnnnnnnnnnnnnnnnnnnnnnnnnnnnnnnnnnnnnnnnnnnnnnnnnnnnnnnnnnnnnnnnnnnnnnnnnnnnnnnnnnnnnnnnnnnnnnnnnnnnnnnnnnnnnnnnnnnnnnnnnnnnnnnnnnnnnnnnnnnnnnn

SEQ ID NO: 39782 - DNA, 657 bp, Setaria italica
  Peptide Sequence Number=SeqID_105756
taaccaatagggctacatgggccagatgggtgaacggtcaaatatgctctgagtgaagctagacaaaatggccaaacattgctgcaaccaacatatgtgttgcagtaaacctaagcttagtgttatttaggattgtttacttgcaagttgcaacttgctgtgggcatgtctctgaacttctgtagttacattcttggaccgaaacttttaatttaattcattatgtttctggatatgcaattttgcagcttgaagttacacgtttctctccactactaattgttgtggtctctgtctctagagttaagaagccaggagttcttttacttgtctgggagttgtactcagcctgggagtcgattgatctgagagtttagttaattatgaaagaagatttgggctaaggagttaattaggagtgctttatcaaattagaaaagtagagtcctaggggtttaagtgtcctaattaaactgggaggggccaatgcgcttgcaaatcctttatgtatttggttgtgcctgagtgcacaacagttgcattgtatttgcacataaagcccccttggatggtattagtttagatgaattgcttggtttatctgcgggatcatgctgataagtgataacttatatatccaggaataagacaataact

SEQ ID NO: 39783 - DNA, 495 bp, Setaria italica
  Peptide Sequence Number=SeqID_105757
atagataatgttcttcaacggaagatacatgagcttgaaaacgacaaagtggaactagaattgcatatatcaaggctggaagatgaaaaaatagaattgtcagagtccatttctggaatggaggctgagttgactaatctgacaagtgagtacgagtcatgtatagtgcaaatggatgattctagaacacttatcatagatctcaaggataaagtacaatggcagcaagcagagttggaagctcaaaaggtagaactgaagcaaaaacatctggcatttcagaaaagattttcagaagtacaggaggattcagagactctaaaaagattgaatgctaaattacaagctaaagttgacaatcttgttgaggagtgcagttctcttcaagcattgacagctgatctaaagaagcaaaagttggaattgcatagctgtgctacacaactagagcaggaactggagcactcgaaaaggagaccacagtatttttgcaaa

SEQ ID NO: 39784 - DNA, 572 bp, Setaria italica
  Peptide Sequence Number=SeqID_105758
agtttactactagtgcgcaaccttgctgcaaattcctaatggaacccgtgccgttcctcggaaacaaagatttgtactcactgtgtacttctctgaagaatatcaatgttattgctattggtaaataaatgctacttgttggaacaatttttttcatacgcacaccttgcttcttctccttcttcttcttttttttgacaaatgctactggtgaatgaacatagataggtagtcgggccgcccactgggctggttcagacttcatagagcctttccagagggcgggcctcgcagcatgcatccatcgtcatgatgagaatttttttattttttatttttattttagtattttgaaaaatatatgttctaataaaaaaattagaaatctatatatataccgcagtttgaagcagctatatagctaaatgaaacagcggaatttaccttctctgcgcagcatacttttaaaaaattataagtaattcatatgaacttggatggagataaactttatataaaaattgtagatctcgacgagatccttactaacttttgttaatttctaaaccttt

SEQ ID NO: 39785 - DNA, 999 bp, Setaria italica
  Peptide Sequence Number=SeqID_105759
ttgcctgccgtgggctgtgcaccgtgcatgtgaattctttgccgagatagagaccatgtcaaagatccagcaccatcatatcgtgcctctgatcggtcactgctacaagaagaacgagatgatcctggtgtacgagtacatgacccgtaatagcctgactcacagcatgtacaacatctataaggcattccttacctggaagcgacgcctggagatctgcattggtgtagctcgtgcgctgcactaacttcacagcttaaggatcatccactgcaacgtagcaacggtggacattctgctggatttgaaatgggtgccaagatttcaaaccttggtctctgcaaggctgggccatcgacggatgagatgcccgtcggcggctgcttaggtatggttgatcctgattaccaacgaatcggtcggctaactgagaaatcagatgtctattgttttggtgctgtgatgcttgaggtcctctgtggccagcctatggtggaacgtgttccaccaaaagaattcaatgtttggatttatgggaaactgcagctcatgagggcgggcaagcttcatcaggttgtagacacctgtcttttcaaaaccattgctgatccaaggtcttgcatcaagtttgtggtaattgctgacaagtgtgtttctgatcggggcatcgaccgtccatcgatgggagatgtgatttcagagttggagtgtgctctgcaattgcaggtgagcgcagaggcgagcggaagatagctgattggacgtggtggagagatgccagatgatggaatgacatgagctagaaaattgtcactcgtcggtagggactatgacacactcactctcagtgctgtctcttggcagatgttcatttcttttagcatgtttttgtgacttcaagctactacaattctctacatgatgtttctttcccatgtctgacctgtacgcgtgagatatttaagtgatgtgcagttgttcacagtatgtttattgttt

SEQ ID NO: 39786 - DNA, 1007 bp, Setaria italica
  Peptide Sequence Number=SeqID_105760
cttgatagcaacctgaaccgtcagaaattgcgatgctgaagttcgagatttgcttctctcaactcaaggtaagtgtctacattaacaagcttctacaaccatgagaagcaaatgcagcgcaccaatcgatcagtagcagaaacttagtgcagattactccttgtctgtcaactctgccctcaattgttggcaaagataactggcatcgaaatcaaccaataactagacgcagttcagttgaggcatctagctcaagctgtgagtgagtagcattgtccatttcaaaagaaattgaggtcagtatatccataatgattgatctcagtgtacccatatgagtatggcagtaattcttccatgtccaactgggagctccaagaactcatcttctgaattcggctgtgattgatcgattccacttctgcactgaacatgctgtagacaggtctgtggtctgagaagcgagactctcctcgaacatatgagagttggctaaggccccttccataccacaaaatgcggtcacaccatgccggtgttcgcttcttctccttatggtttatgtcgtctcctgcgtatttgtcagaattgttggagtatttgtaggttggtgggaagtatatcctcccctcattccagccgggaaacacacgtccgcctctttgctcactcctcagctgatctttttccagcaatgctttccagttacgcatctctacaagcgccttcactgatcgataggaaagtgcgatgcgataattcagatccccgagccagattatccgatcatgctccaagatagtttccggacatctctcatactgcccacaaacccttgggaacctggtcttcctcaaaatctccattacatcggagttcctacggtgctcgtcaccatctttttgacctgatgttagatgactgcagacgaagcaaaagctcgtttggtgcaataacatgctaatggaaattgaacccttgtttccaagatagcccattaatcccct

SEQ ID NO: 39787 - DNA, 464 bp, Setaria italica
  Peptide Sequence Number=SeqID_105761
gcgaggagcagagatggcggaggcggctgtgaggtacctacgggacgggcgcctcgacggcgagcacgcgccggcgctgtccgtggagggatcactccagtgctgcccgctcgccgcgggcgcgatgctccacgtcgcggccgcactcacctcccaggccgcggcagggaaggcgcaggccagggggctggtggttgtggcgttcgatcggagcccggaggtgtacctggaattcatgcggcgccgcggccttgacgcaaattatttgaaccgatgtgttcgaatattggattgctattctgacccccttgggtggaagcagaagattcaaaatcagcagcatcaagagaacagtacaaagcagttctcaacaaacaaagagaacgttgctgtttttaggaatgtcaaggttgttaaaaattgatgtaactccattactgaacttggaggagggtttgaagggg

SEQ ID NO: 39788 - DNA, 623 bp, Setaria italica
  Peptide Sequence Number=SeqID_105762
ttgccgatggcatccaccctgacaacatatttgtttgtggtttttagccaaggaggtgccctgacattagctagtgtgttgctttatccgaagaagctaggtggaggagcagtcttcagcgggtgggtgcctttcggttcatcagtcactgagaggatttcacctgaagcaaggaagaccccgattctttggtcgcatggaattgctgacagaacagtactgtttgaagctggtcaagctggtccaccatttttgcaaaaagcgggtgttagctgcgaattcaaggcatatccagatcttggccattcgctctccaaagaagagctgctttatcttgagtcatggatcaagagtcatctctcagcctctcaagagaaggacaattaacattttttgttcgagtcgccaccagttccccatccccagtatagcggcttggctgatgccatcatgtctaaattggatttgatctttctgacctcgcctcatgcaacttattactatgagatttctcatgtatatctatgtgtcaacggatagatggactgatggaccagtcagctactgctcctggaatttgttgcgttatgcacctgttattaaaatagtaaaccaaatattca

SEQ ID NO: 39789 - DNA, 522 bp, Setaria italica
  misc_feature (495)..(522): n is a, c, g, or t
  Peptide Sequence Number=SeqID_105763
ttttaagaacaagtaggacaagcaagaaagcaaaagcagatgtgccccatttttcataaccatatgtatagtttggaggtgcaatttttttttagaggagtttggagtgcaaaatggtttgcaatcttgttgaagcgcttgaagtttgtgagctgctgcttcgcacggattgtgggcctgatgatggagaggcccacctaacgcgctgcgctgtgccggacaaggttagattgagcagcccgtggatggaggatgaattttctttgtcgtgcatttatgtggccggcgtgtgacgaggatgacaaactgctcgatcggaattattcagtactgtcaatgttagctctcttaccgtactcgtgaatcgtgatatatggaccggtgtattttgctagctcttcctaggttttagttcgtgcagtttacttacgatcatgtccagataattaaggtatatatcgcggtcattaccatgagatgtgtatctatcgaatnnnnnnnnnnnnnnnnnnnnnnnnnnnn

SEQ ID NO: 39790 - DNA, 641 bp, Setaria italica
  Peptide Sequence Number=SeqID_105764
aagatgaatagcagcaactcaaaggcactaaattcaatgaagcaaaatcttaagaagaacaacaaacagtatgcagagctgatactgaagtgcagagagaatccggagtgtttttacaaggagggtgcaaatgacaagggcaaggatgacagtgatgatgaatatgatagtgatccagatgttgatataaataggctagcatctgataagagagaggataataatcatcggtatggacagaatgaagaacccttgaacaagataaccgacaaggacaatcctatggacaagcagttctccaaagacccaagtgagattacttgggaaattgttgacaagaagctgaaggaaattgtggcatcaaggggcaagaaaggtactgggagagttgaaagggtagaccaacttatgttcttgagtcatgtggcaaaaacaccttctcagaagctcaaagttctttgtcatgtgatttcagctcagtttgacatcaatcccagcttgcttggccacatgccgatcaatgtgtggaagatctgtgctaacaatattcttcttgtgcttgacatcctgcagcaatatcccaatattgtgattgactaacttagttgagcctgccgagaaggagacttgtaatggtgctg

SEQ ID NO: 39791 - DNA, 539 bp, Setaria italica
  Peptide Sequence Number=SeqID_105765
ggtggcggtgccgttgaacgagcaggtggcgccggtgctggacatcttctggtagtagtcgttgtaggcgtaggaagcgagcgccggcaggttgttctgcgagtagcagggcccgccgggctggatcgccgagcagtcggcgtggcccgacccgcacgcccagttaagccccgcctgcagcgccgccgggtccgcgttctgcagcgccacgcagaacgttcccgtcgccagcgaccgccgcttgccccgttcactcgacttcccgccggggtagctgtagtagtagtacggcgccgcctctacgccaccggtggctccgaggtccgccgcgatgaccgggacccccggcacgcccagcgcgcgcatcgcgccgtacgcggcgtcggccttggcgtcgctggcctccgacgagggggacttgaggaacagcggcgcgccggccgagctcaggaaccggaggacgtggcccgcgacgccggaccacgccggggcggtcagcgtctccgcggacaccgcgctcgacaccttcacgcggccgt

SEQ ID NO: 39792 - DNA, 979 bp, Setaria italica
  Peptide Sequence Number=SeqID_105766
aggcttcctcccaattatatgtgtgcacggaccaaaattacagctgaacaaacgctatatgagaagcctacctgaagacgaccagaaaccactcttatatcatgatagagtttaaaccagaaattatttgtaccgtgtacaggaaattctgtgcttattcttaatacagagtaattaacgagcaaggaacaactccaaatccatattcaggtgagcaatatacaaggctgaagaagcaacagcgccgcagttcctaggaagaggaagggacatccggttgcctaccaggaagcgctgcttggaatgcagggtgtgccatgtactctgcgtggagcctcgcaatggtggggtaattcgacatgtcaattttagtgcgctcaatggctgcaaaaatctggggtgcaaggaatacatctgccagttggacttcatctcctgtagcatacttcccagcacagccttttaattgtatcaggttctcaattgctgtgaaacctctctcaatttgttgttgggtccacaagacaccctctcctgcaccaactttttgctcaatgaacctcaacactgagagattatgtagaggttgaataccagaacttacaatgttcgcaatctggtgattcaaagccttctttttagggtcctgaggcaaaaggggagggttggggtacttgtcctccaaatacaatgctattgcataagaatcaccaattactgcatcatcatcaatcaacgcagggacaaacttcataggattaagcctcacgaattctggatcagactgctcgcccttgagaaggttcaccgccttgtactcataatccacacctttgaaattgagggcgatgcggacgcgatgggagcatgagctgcgccagtaagagtacagcctaggccgccccgccgtcgccgtcgcctccatctccgccattttcactcacgattgactagctgcttcgcggaactgcgcagagtc

SEQ ID NO: 39793 - DNA, 1137 bp, Setaria italica
  Peptide Sequence Number=SeqID_105767
aagagccttgtgtggtgcctcttctgcacaactatgaaggtgatttgtggcttctcattatacagagctttccatgccttctctatctctgggatttcttgttccaacacttgtttgaattggccctcgcttactccatcccctgtagaatatcagctgcttgggtctccgcctagacccttgttcgaatgcacgtagcagctccttaacaatgtcttccaggccatcgatgagctcttgacggtggccttgcgcacggacaacaccattatacttggccacattgggccagtcttgggaggcaacaacagaagcaatggatggagcagtatcgtctagagcagcagggtgagtaacatcagcaccaaatataatcgttggttcgctcgaaacaactggtaaactttgttgggggttagcaaacttctgtgttccttcccccaagcttggcattgatcttaatagcaacattagcaaagtacggagcacgtgcacttgtaacaaatttccccagacaacactgcgacatgatcccaatctctgtctcacaaatccttttgaaatttccatataagctaccatttttctctggtaatatagcaagcagaaggtcaatcttttgccctccaagcttgttccgtgcatcctgatagcgcatacgaagatcagcttcaacttgatcaggacgagcagtgaatataggaagcctcaagttatccatgttcagtccagtagtacaagaccatccaaccagatcagagcagaatttatgaacaatattcatgtgtaaatcatgacaaaagttaatgcagacccagttgcggacccttgcaccatctactactttcttcacactcggagttagcgaactggtcctcggcttgctctagcacgggctcgacttcggcgtggtgtagatccgctatagcttcctcttcgggcgtcgggtgcagctcgtatgtaccgtcggcgatgttaacttccgtcatcaccggtgcaccttctgggacttctgccacattggtgaagtttagcctgccatgacgaacttgtactttgggcttctttcccttgttcaccattgcattgctctggccggggcgttgatttcttgttttcttgggggtctagttccta

SEQ ID NO: 39794 - DNA, 485 bp, Setaria italica
  Peptide Sequence Number=SeqID_105768
cgagaggatcctcagtcttgtggaagagcgggggctgggtccctaagaaatcctcataacgagcaatctggggctgctgatgaccccttcctccctgaggctggtgttgctgcccttggacgatgtgtcgcaagagctctgtttgtgcagccaagatcgcctctagcgaaggcgggggaggcggtggtggcggaggtgctcgattatcctcgctaccacttgggatcgagcttaagcgcgcagtgcgcaccatcttcacactcggagttagcgaactggtcctcggcttgctctagcacgggctcgacttcggcgtggtgtagatccgctatagcttcctcttcgggcgtcgggtgcagctcgtatgtaccgtcggcgatgttaacttcttatttatcatgttccaatgtccaccattggggttgcatatactatcagatccagtaccatagtacctcagagttggagctggcagaactctagca

SEQ ID NO: 39795 - DNA, 448 bp, Setaria italica
  Peptide Sequence Number=SeqID_105769
aacatatactgtgttccttgctacattggattgcataaggttcttccaacacctatctctttagctgtattgaatggttgttcagcttgctcatgtcataccttatttatcatgttccaatgtccaccattggggttgcatatactatcagatccagtaccatagtacctcagagttggagctggcagaactctagcctgaaccgaagtaggctgatagtcaacctctaagccaaattcatttgcacgctctgttccattgtagtcgttgtgcttaacaacctgacaaatgttgccctcgcgaacagatgggtgcaggcagattgagtccattagcttagatacctgttggctttcaagcttcttctgatactgctgtccaggaactatcttgcaaacctccatagggagatagtttggcctctgatcactgcctaactttgtaagta

SEQ ID NO: 39796 - DNA, 464 bp, Setaria italica
  Peptide Sequence Number=SeqID_105770
gatgcaccacccacgcaccgccaagatgcgggagctcgtcggcgacaaggacgccatcggcgacatcaaggtgataaacagcgtgttcggctttcgggcaaacgaagatttcctccagaatgacatcagggtaaagccagacctcgatgccctgggcgcgctcggtgacgttgggtggtactgcatccgtgcaatcttgtgggctgtcgactatgagctgcccaggacagtgattgcactgcgtgatcctgtcaagaaccgagctggcgtgcttcttgcctgtggtgcgacgttgtactgggcggatggcaagaccgccacattcaactgctccttcctcaccaatctcaccatggacatcaccttggttggcacgaatggcactctccatgtcactgactttgtcatcccatatgaagagaaatctgcagagttctctgtggcttcgaagtcaagctttgcca

SEQ ID NO: 39797 - DNA, 622 bp, Setaria italica
  Peptide Sequence Number=SeqID_105771
ggttcttaaacgttaagtttattttttcctttccttagttaatttgttacttatttcttagggtttaaagttccttagttacctttcgttattgtcccttgggtcgtcgtcttcggtatgccctgggcgcgctcggtgacgttgggtggtactgcatccgtgcaatcttgtgggctgtcgactatgagctgcccaggacagtgattgcactgcgtgatcctgtcaagaaccgagctggcgtgcttcttgcctgtggtgcgacgttgtactgggcggatggcaagaccgccacattcaactgctccttcctcaccaatctcaccatggacatcaccttggttggcacgaatggcactctccatgtcactgactttgtcatcccatatgaagagaaatctgcagagttctctgtggcttcgaagtcaagctttgccaatctccacattggatgggatcctctgccaagcaagcacgtcgtcgcgacggacctgccgcaggaggccctcatggtccaggaactcgcgaggcttgtgcagagcatccgggacgctggtggcaagcctgaggggaagtggccggctatcaccaggaaaacgcaggttggttgtttggtattgctagt

SEQ ID NO: 39798 - DNA, 1193 bp, Setaria italica
  misc_feature (1)..(26): n is a, c, g, or t
  Peptide Sequence Number=SeqID_105772
nnnnnnnnnnnnnnnnnnnnnnnnnncttggattgaattattctctgattcatatgataactatttacatacaccgagtcaaatacacctctcatgatatataaaaagatccttctgctcttcagtttctttgtgcaaatacagtagtggctgatcctgtcattcgtgtgcctgagctcacaggaactgcctttcttcagcgttgcctctagacttgtacctacggcacatcagtcgtatactagtactacatgtaagatgcgaagacgctgccgtcctggagctgtcattcatgccgacgccggcgccgtcagaagcgtgctgacgatcctgtctccgagccctggcaccgccgactggaagtgccccacgccggggagctcgtggtagttgacccagccgagccggcggcatatgtggcgctgcagctgcacgggcacgacgccgtcctcgtcgccctggaacacgtgcaccgggaacggcggctcctccaggtccatcggctcgaactccggccacctcccgaacatgaccgccatgtccctgtagaaggactcctggatcccctgctgcgtcgccagcctcgccctctggtggaacatgccgttggagagcgccatgacgcggttcttctcgtcgagctcgttggggaaggacccggagccgtcgatgacggtggaggtgggcagccacggctggctcatccaccagtgcagcagccacggcgcgtagtaggcgacccggagcgaccactggtcgcccgccggctgcgcccggtagagccgccgggccagcccccgcggcagcccgcgccagcggtagttgaccaccggtgccatcatcgccaccccggccagcctgtgcgggatgtaccggatggcggcccagccggcgtgggtgccgagggaggagcagatgaggtggaacttttcgccgaggcccagcgcgtcggcgaggtcctcgatgtccagcgccgcgctgcgcagcgaccgccgggggtccgggtcgctctcgccgtacccggcccggtcgaacgccaccatgtacacgcccagctcctccagcagctcctgggaggcgcggggcgagtccatgcggccgccggagaagccgtgcgagtacaccaccttgaaccgggccctgtcccggctcaccccggactcggcgtacgccaggtaccgcccgtcccgcat

SEQ ID NO: 39799 - DNA, 477 bp, Setaria italica
  Peptide Sequence Number=SeqID_105773
aacaactgaaaaccctaggaccaagaaaagaagaggctttgcaagttcacaggagctagctgtttactgcgaatgaacatccagaggaagcctggagactggaactgcaagaactgccagcacctcaactttagccgccgtgactactgtcagcgctgccgtgatccacgccctgatttgcagttcagtgacggctacagcactgggtggtgtcctgacctccctcgacatacgcccaggcgactggtactgcagctgcggctaccataactttgccagccgcagcagctgcttcaagtgtggcactattgttagggacttccctgggggggcaaggtgcagccggtgctgagggtgactttgctcgtggccgtgacagcgccgcagttcgcgctgggtggaaagctggcgactggatatgcacaaggcccggttgcaacgtgcacaattttgcaagcaggactgagtgctacaggt

SEQ ID NO: 39800 - DNA, 490 bp, Setaria italica
  Peptide Sequence Number=SeqID_105774
gtctgcttgtgggcatgggcaggctgttgacagaggccggtgggtgtatgatcagcttagtgaatatggaattgaggctgatgtggatataggaaatgcactcataagcatgtatatgaaatgcgggtgcatgtctgatgctttggaagcatttaaggtcatgccttcaagaaatactaaatcatggaacaccctgatcgatgggtttgtgcaaaatcagaagcataaagaagcactgacgatgtttgaggagatgttatcgaatgactttaatcctgatgccgtaacacttgttagtgttttatcagcctgcactcagcttggttatcttcagcaagggaggaatctccacagttacataaaaagtcgtaggattagttgtgacaccatccttacgaattctttgattaacatgtatgccaaatgtggcgatatggtagcagcagaagtggttttccaggctatgaaacagagggatgttgtttcatgg

SEQ ID NO: 39801 - DNA, 955 bp, Setaria italica
  misc_feature (777)..(777): n is a, c, g, or t
  Peptide Sequence Number=SeqID_105775
ttgtctagtaaaatttgattcgttcaaaaattgttcaaacaaccgaagcaactgagctactgctttggctaaacgataaagcaaaagacaaaccctgctgctgctctgaacagctgaaaaatgaatcacgaagaaaatagcagagagccagtctctgctgcagtgtgaatagagaaaaggcaaagcttgagctgctgccgcccgtctgaatcgatggaaactcaagtgcaaagatcgacaggctagctgatgcgtcggaagaaccaagcactgcaccgcaaggatcgatgacctgcagaccaaaacagcaaccgagcgaaacccagagttgcaacatgcaaaatcgatcaaggaaagaaagcttgttgctgcagatgctgaccgcctgggagaaaagatcgagcacagggcagcacacaagaatcccagctgactaccctcgcttcgaacaggaacagcacctcgagcctcccttcgaaaaccaagaactcgatcaaaacagctcggattcacacaagatttgaaccacagcctcacggattcatgcgcaagctattccaaccgaaagcacctgaaaagataagcctttaacttcaaattcagagatctcgtggaaccctagatgaagaacaaatcggggggaaaacccgaaatcgaagatgcttgcgagaggattagatcaattgatgacacagatgtattttcacatatccaagcaaaaaaacccctcaagaaatccgacataaatcgcagccaagtcgcaagaacgaaaaaccncaaaaaaaaaatcacccgaaaatatcaaaaagataaacgctcgggtggagcaactgtgtacgagatcgaaactcatgctcggttagcagccactcccagcaaaataaaaactatggatgataaaaagatctctcgtctctccctcttcccgttgtcctaaattgggttgtacccctta

SEQ ID NO: 39802 - DNA, 1261 bp, Setaria italica
  Peptide Sequence Number=SeqID_105776
gtacggtgtggtttctcggatgcctgtcgagggcatcactgatttcggaccttattttggacagatcacacggtaaggccttcaggtacacagagatctcttcaaggcttgcaaggtgctctatcccaataactgaaccgccactgaaagtcaggtcgagactttgaagcgtaggcattgcccctggctcaaatgacagcaatagtatgtgatacttgaatttgaattccttcaggcatgagaattcattggagttgatctggatcatgatgcttctgttgggggcttttgcagctcccaaatcgaggtaagtgaggcagggcagccctgcaagaacatggacgtcttcactgcacagctcttcaacctcaagtatcaagcttgttaaccttacagcctgcgccatccacttcgggaaagttgggcaacaagagtccaaatgaagtctccgtagacagcgtggatgagttaatgaacaatttaaaacacagccaaggcttactccaggatgcgcaacaagagagcggaggttgctgttcccaatcttgcacagggagacggcaaggacctcatactttctcctctccatatgtgtaagaggttgaaagattccactgtcctcatgtcggagctggagctccatcagattggtcaattcaccaagatattttatgttctgcatcgaattcttgccgagatcaaactcttccagggttcgtagagtgatcaattttccaattccatccggcagaactgcaccgcgtggaactgtaagatgcctcaatgatgacaaagaagtaacatctaatggaatagcacaaaccacttcgctgtctcctagatctagcgtcatcagattctgcagtttcccaattttctccggcaacttcaagttccgaaatcctctggcccgtaaatatctcaataggaaaagattacttatagcagataaatcaaggcactgaggaatcaggtgaagggttcgtctgcagattcaacactcgtaaaaagctcaaactttgaaatgggtggctgcatacagtcagaagcagggaaggtagtaaaggatcgaactttttaagcctcagactttccagagcaatattaccattactgaagtgacagcaaaagccgacgaaactggaaataatgtttgttcatttgtatttcctatctattatagtgaaagaagttctcaaacagtgcacttcgatataatatgatcaagcattagatcatgaactcgaacaatagtgcattt

SEQ ID NO: 39803 - DNA, 208 bp, Setaria italica
  misc_feature (153)..(153): n is a, c, g, or t
  misc_feature (166)..(166): n is a, c, g, or t
  Peptide Sequence Number=SeqID_105777
aattgtctgaccagtagttcactactcatgccgctttttgtttttgcaaaaggatgcattgtatcaaatgcaacatactctcacaatgttatctgagatgttctgaaatgaaatgttcttatcctttactagctacaaaaaaaaaaaaaaaanaaaaaaaaaaaanaaaaaaaaaaactaaagagacacgcaacagggagtaggcgaa

SEQ ID NO: 39804 - DNA, 603 bp, Setaria italica
  Peptide Sequence Number=SeqID_105778
gtaaaatcacctccccaccaactccgatgagctcaccgccgccacctgcaaataccctgccaccaccgacaccggtgacttctccacctccaccaaacaaatcaccacccccaccagctccggtaagctcaccgcctcccccggtgaagtctcctccaccacctgcaccggtcagctcaccactcccaccggtcatctctccacccccgccggtccccatgagctcaccacctccaccggtagtaccatcaccaccgcctccaccagcactagaagatgtaatcctgccaccgatcttggcgcagaagtacgcttcgccgccaccgcctcagttccaagggtactaagcagtgattacagcatgctctaacactgacactgagagatgatcatgatgacgggaggtgcaatgatcggctgatcatagtagaatgggtacctgcgtgcgtgcgtgaatatgtgaatattgagtataggtggcgtacgcatgtaccaacgtgtgcacatgtaagttgactggagaagaggaagaatgtgcaaaagcagaggggaactatggtcgcatcacgacgcattgtaagaagtttttgggattcttatgca

SEQ ID NO: 39805 - DNA, 374 bp, Setaria italica
  Peptide Sequence Number=SeqID_105779
gacttttcacctctatctcagcttaacacaagcattaacaggtcaagggaagtttctgttggcggctcgtaggaacaggtgtgggtttcgcatggagtatattatctctactcagggtgatctctctcatggaagccatgttggaaagctaaagtccaacttcacaagaacaaagttcaccgtttatgattggcaaccacaatatgaaggtgctaaggtgtcaagcagcagatgcagacgctggcttgcaagcaaacaaataaacccactcgcttctagtggcattgttgacattggagaagtgtcctatgaatacaatcttctcaaatcaagaggaccgagaagaatacactgcagtatccagtgccctgccg

SEQ ID NO: 39806 - DNA, 616 bp, Setaria italica
  Peptide Sequence Number=SeqID_105780
aaaaaactaaaaaagaaaaaataaaacaaaaaaggaaaactaagaacgaaggaccaaagacatacgcacaccacgatccagagcaagcccaagtcaaagatgctcaactctggattgctgtcacctgaaggagcaaatcaagtgcgagccttgcagaacctctgggtgtcccacccagctcctggcatcaatgatgatgtcgtgtttacttgcttgccagagtcagattccgggacccgaaggcattcgttatcgctcttgatgcgaggaagaatgttctgctaggctcagctgagtttgccactgaaaagaaacgcggtgatggcgtcatgtatttcccaagtaaacgacatcatcattgatgccaggagctgggtgggacacccagaggttctgcaaggctcgcacttgatttgctccttcaggtgacagcaatccagagttgagcatctttgacttgggcttgctctggatcgtggtgtgcgatgctttggcctcgcagtccttgatccagtcatcccacgaggtactcatcttggagttgctccatgtcgtgatcacccagtcagacatgagtgagtgaggaacggctgtttcttcatcgctgtcgctatcg

SEQ ID NO: 39807 - DNA, 600 bp, Setaria italica
  misc_feature (554)..(554): n is a, c, g, or t
  Peptide Sequence Number=SeqID_105781
tcaagcctgcatgaaggcacagaaatgttggagttttcctagtttaccattcgcttaccctggcttgattgtatgatgcatcagtgctcgagctggtttgatgatctcatgccgtttatgacatgagtacatatctgctgcagggccctgtttgtttgcccctcaagtcaaggttatgtaatctagctattaagctgtgtgctgtttgacaatctagattatcggtggtttggattatttagttttgatgaattattatcatctgcttataccgctgcttgctgtgctacagtttagcttgtcactgctcggtgctgccgatcaatgctcactgtgcttgctagctactgccgttcaagtacgtactgcatgcgcacagaaaattctatggtgttctagattcaaaaaagtggcaagcaacgacattagtacttgtttccttgtatctatgcgttgctgtacctttgctttttaatataatattaaaatgtttcattggcacctgcacatatttttctggtaaaaatgtgtaatagtaaacaaccaaaaaaaanaaaaaactaaaaaaagagaactggccaaaggacacacagggatagg

SEQ ID NO: 39808 - DNA, 933 bp, Setaria italica
  Peptide Sequence Number=SeqID_105782
gtgcgagccttgcagaacctctgggtgtcccacccagctcctggcatcaatgatgatgtcgtttacttgcttgccagagtcagattccgggacccgaaggcattcgttatcgctcttgatgcgaggaagaatgttctgctaggctcagctgagtttgccactgaaagaaacgcggtgatggcgtcatgtatttcccaagtaacatctcaaagtatatcgccccagaggctagggttcttcctattaccaaaggtactgctctaattaagtattgcagctgcaaattaaatcctgctccaagatatgggagtgggtctacaaagatgagctctaaattaatgagaatacctgatcactgaaccatagcctgtgtcagtccactgcatatttcagttagcttgcattgattcgatatgcccatagtttctttttgggttttttcacatgcttggctgtggataattatccgctgtaattagtcactttgatttctattgcaattatagatttggggaaaaacgggtagaaacatagctaggatcatctcatcggccgggcggttagtggggggattggggtgttggtggagttaaaacctgcccgtcgcacttttgcctaacgggcgaaatccttcaccctgcacccacgggtggttttttgaacccgtacccatcccggtgaggtttgagttggattagcatccctgttagttagaacagatagagcaccttgcatttcaaacacacatgggtgaaaccacagcaccgtaccagcacttgcagggtggaattttacacctgcaagcgtgggttgtgtgttggtctgttgttaccaaatgggggcatttgaagtttttccatcttactataacaaatgaacaggcgaccagagttttactagcagatgcgatggggaaggtaaagcataagcatc

SEQ ID NO: 39809 - DNA, 645 bp, Setaria italica
  Peptide Sequence Number=SeqID_105783
tagtaaccttagtcttgtactattgtctaactaattggttcggggggtcttgtactattaggaggctgcggaaaatccctccgcgggattgccgtcatcaatcaaagcctcaggtttgttcatttggaagccatcgtctccaccaccttcaagactctgcctaccgatagcgacagcgatgaagaaacagccgttcctcactcactcatgtctgactgggtgatcacgacatggagcaactccaagatgagtacctcgtgggatgactggatcaaggactgcgaggccaaagcatcgcacaccacgatccagagcaagcccaagtcaaagatgctcaactctggattgctgtcacctgaaggagcaaatcaagtgcgagccttgcagaacctctgggtgtcccacccagctcctggcatcaatgatgatgtcgtttacttgcttgccagagtcagattccgggacccgaaggcattcgttatcgctcttgatgcgaggaagaatgttctgctaggctcagctgagtttgccactgaaaagaaacgcggtgatggcgtcaaattgtaattttccctaagtaaacaatactacaaaagtaataatacgaccccaagaaaggactaaagggttacttaacctaattaa

SEQ ID NO: 39810 - DNA, 501 bp, Setaria italica
  misc_feature (1)..(20): n is a, c, g, or t
  Peptide Sequence Number=SeqID_105784
nnnnnnnnnnnnnnnnnnnnaggttaatttcagacaaacttctctcacgctctgtgttgctgttgcatcgtccatgaattgcatcaaaaatacattacctcatactggctcatagcaacaagaagatgattaacatcggctacaagaatatcatgagtcgagaggattgctctcgctcatatgtaacagtagcagtcgtaatgggagataggacgataggtagtgccgtagtggataggtcgatagatacaagaacagctcaagtcaaaagagtggagagagaggtcggtccctggctagctagctaagagatgatgaacaacaagaagtcagtcgaggccggacctgatccgcttgtggccggcgccggcctgccgaacggtgccgacggatccgccctcggaggccgcgcggccgccgtcggaggcggcgaaaagcgaggagaggtcggcgtagaggtcgacgacgcggcggatgttgttgttgagctcccggatgagg

SEQ ID NO: 39811 - DNA, 656 bp, Setaria italica
  Peptide Sequence Number=SeqID_105785
gctggtgtcattatgccaactgtcacataatcaaagcatctcaataaagctgatggaggcaacaattttacagtgtcaatgcagtatggcttataacagaaaggcaacacattgaaaaaagaaagtgctttctgaagaggtgaggcaatacattcttttggctacggacgtattactccaccgcctaatagtttttttggttgttcccatccatatacattttaattgatgcattggttgaagcattacttggtttagtgtttctcgaatgtcgtgttatggcttccctatcctatgagtactgaacaaaggtcagatcttcctgattcgagctatatatcccctcaatttgtttcacttgttaggtggattaattattaagaatcccatgctcatggcatcactaggttataaacctaacatacttgaggagttgtgtgatgttcatcagctagtgcatagaacacacaagagaaaatgccccagcatggttttaagcttcaaccggcggtatagcttcttggttcgtgtgggcttaaaaacaaggagccattgcacaaccggttttatagcttcttgaatcttgacatggatgtgaagtcaacacgaaggtggcatgaaaaagaagcacaagcttcaagtgcttgcagaatctg

SEQ ID NO: 39812 - DNA, 416 bp, Setaria italica
  misc_feature (366)..(366): n is a, c, g, or t
  Peptide Sequence Number=SeqID_105786
cagtctcagcaccgatggcatccgctccgctccgatggccattcacggtgacagagctgcagagaatatacatgttaattaagttgcagggaattagtagtagctaccacaagatcaagttgccttgttattgcttgctacagtaagcagagtagtaattaaactaagttgccttgttatcatttgcttatgcttgctacagtaagtaaaggtaaattgcattgcctgcagagggcttctcccagacgtcaggaatgcggccgacgagcggcggcgtttgctgcccagctgcattatgaaattgttcaccggtcagttgaagaatgaatcatgtatggaattaattaattaattaattaatggganccatggaagagatggaagagaactcactgaagcagatgtagaggacctgc

SEQ ID NO: 39813 - DNA, 566 bp, Setaria italica
  Peptide Sequence Number=SeqID_105787
ccgacccgggacgggtcccgggtccgccgtcccccgccgcggcggtggtggttcacggaaggccccgaggccgctgcagcactcgctctgcggtgtcggcgtgtcctgctcgctccccgtcaggaacgacccgcaggtcatcagcgccgccagcggagtcacgcactccgttggcgacgacgatggcgtggagccaccaacgcccccgccaggcagcccgggaaagcccggcacgaaggggaagccagacacagacggcgctgccggcctggggcaaggcggcgccgacggcacgccgccggacactggtgccggcgatgacctcgagctcggggtgccggacgacgacgttggtggcgacggcctggctccggggaagccagggaagatggggctacgtggcctgctggagcccggacggccggggaagcggagcgcgtcggcgtcggcgtccgaggaggcagctggtgcagccgtggttctcgctgcttccgatggccgcgccgccgccatgacggcagcagccacggcaagcacgacgacaataatgcagctcgacatggatg

SEQ ID NO: 39814 - DNA, 498 bp, Setaria italica
  misc_feature (1)..(80): n is a, c, g, or t
  misc_feature (443)..(498): n is a, c, g, or t
  Peptide Sequence Number=SeqID_105788
nnnnnnnnnnnnnnnnnnnnnnnnnnnnnnnnnnnnnnnnnnnnnnnnnnnnnnnnnnnnnnnnnnnnnnnnnnnnnnnntttttttttgttttctcgaactcgtgccttcaaatttatataagaatacgcgagatcgtacatgacacatggatggtatatatgacgtacatatggtagtattggttaatttctgatgagatatacatagtgtatgtataatcttgactcgttactatatactatgtatgtttgactgtatcatcgatcactgatggcatccactccgctccgatggccattcaaggtgacagagctgcagagggcttctcccagacgtcaggaatgcggccgacgagcggcggggtttgctgcccagtgaagcagatgtagaggacctgcggtgggagcacgactccgcacgctatgggcagatacatcatnnnnnnnnnnnnnnnnnnnnnnnnnnnnnnnnnnnnnnnnnnnnnnnnnnnnnnnn

SEQ ID NO: 39815 - DNA, 835 bp, Setaria italica
  Peptide Sequence Number=SeqID_105789
tttctcttttgatagtccaactattcctccatctttcatagtcacaaggcatattccaaaagaatggagggagtaatacgtagttgtggagaaagatctcatcaagtaacacgtagtaggagtacagtatgctcgaactcgggccttcaaatttatataagaatacgcgagatatgacgtacatatggtagtagtggttaatttctgatgatatatagtgtatttataatcttgactcgttactatatactatgtatggatgactgtatcatcaatcaccgatggcatccgctccgctccgatggccattcacggtgacagagctgcagagggcttctcccagacgtcaggaatgcggccgacgagcggcggcgtttgctgcccagtgaagcagatgtagaggacctgcggtgggagcacgacgccgcacgctatgggcagatacatcatgcgcacgggatcaagcggcttggggagcatcttgttcacgtcccccaggatcaccgggcacaggcaccggagggtccggtcgccgtcccccgccgcgctggtggtgttcaagaaggccccgaggccgctgcagcactcgctctgcggcgtcggcgtgtcctgctcgctccccgtcaggaacgacccgcaggtcatcagcgccgccaacggagtcacgcactccgtcggcgacgatggcgtggagccaccgccaggcagacccgggggaagccccgcaccaaggacggcgctgccctgggacaaggcggctccgacggcacgccgggcactactggcgccggcgatgacctcgagctcgggtgcccgggaagccggacgacgttgg

SEQ ID NO: 39816 - DNA, 454 bp, Setaria italica
  Peptide Sequence Number=SeqID_105790
ttctgtgcttgagtgacagttctaggaaaccatcaaggataaaacctttctggcatgagggtttcttcatggcttcatcaataatccccacaaccaagtcatctgaaacaagctctcccttgtccatagcttctttagctttaatccctagaggagtcttggcagccacagcagccctcagcatatcaccagtggctaaatggcacaggcaatattcatccttgataaggggagactgagttccctttcccgagccaggtgggccgatgaggatgaggcgcttgtcgggcttggagctgcacttcatgcggcggagcagctcgtgcatcagatccagcgacggcacgtcctccaggttcgccgccatctccgccgccgccgcaacgagagagaagagctcgagtcgcgtgcgttgggggcgtcgcaggcgtgcaggtgcagcagctggcacaaa

SEQ ID NO: 39817 - DNA, 413 bp, Setaria italica
  misc_feature (381)..(381): n is a, c, g, or t
  Peptide Sequence Number=SeqID_105791
tcccggtgacgtttacggtgctcattatctgatcaagtatcagatgaaaatagagaactttaaaccttggcacgtcagtatcaattctgacctctacaacatcatcataagatctaattagagttttttttaggaaagtaaactaattagagtttcacaatttgatctccaaaatggtggtacgttaagagagggctttctggacctcagccgtcacttccttcggtggcttctcagcgtgaaggttcgccaccatgcccttcttggagtaatagtcaatcacctggtggaaacaatcagtccaataaaaattatttaactcgcaaaagcattgctgtaacacagttagacaacaggcagcaggattcaattattcaaatntttaacaccagaagacacaacaatatgcaacc

SEQ ID NO: 39818 - DNA, 655 bp, Setaria italica
  Peptide Sequence Number=SeqID_105792
agtgcgcccgcacaaatggaaaattgaaaacgaaaactgcaggatgtcagtgtcagcataaattttgacggaacccaaacaagggattttggtacaattcatgcttaagcttcatcatgagagggctttctgcacctcaacagtcacttcctttggtggtttctcggcgtgcagattcgccactaagcccttcttggagtagtagtcaatcacctggatgaggccaattgctcccatattaggaataagatcgatagttaaacatcatgctcaatttctttataactctactttcctaattgattgaagagaataaacaataaacccacatggcataattcaaaactacgaataaaaggtggaaaacacagaaggtccatgaggatgactataaatacatgcgtggagcatcaaagttaaaggacgattccgacaaaataaaggccagtcccaccaaatcactgaaggactttatgcagaactgtagcatagttaactatacaaaatacattatagcagaaaaatgtcaattaagaaataggatattggtacacttagacaataaaaagaatatttataaggaaacaagtagcataacttaagaaatacatattagctgtagtagatagaaattttcccggaagaataataacaa

SEQ ID NO: 39819 - DNA, 680 bp, Setaria italica
  misc_feature (1)..(76): n is a, c, g, or t
  Peptide Sequence Number=SeqID_105793
nnnnnnnnnnnnnnnnnnnnnnnnnnnnnnnnnnnnnnnnnnnnnnnnnnnnnnnnnnnnnnnnnnnnnnnnnnnnaaattttcaaactcactgtcaaagaattagtacaaaacatcgcgttccatcatgccaaggattattgcaaaagaaaacccggtgacgtttacggtgctcattatctgatcaagtatcagatgaaaatagagaactttaaaccttggcacgtcagtatcaattctgacctctacaacatcatcataagatctaattagagttttttttaggaaaagtaaactaattagagtttcacaatttgatctccaaaatggtggtacgttaagagagggctttctggacctcagccgtcacttccttcggtggcttctcagcgtgaaggttcgccaccatgcccttcttggagtaatagtcaatcaccggttcagtttgtctgtggaaagcttcaagcctagacttcaaaacctcagctgtgtcatccttcctttgaatcagtggttctccagtgacatcatcaactccaggaacctttgggggtgcaaattttgtgtggtaactcctaccactggagggatggatccatctgccagtgattctttcttccaaaattgcatcatcaattctaatttgtcaagaatttaagtaacctttgttctaaccttta

SEQ ID NO: 39820 - DNA, 1303 bp, Setaria italica
  Peptide Sequence Number=SeqID_105794
tttttttctaaaattcaaactcactgtcaaagaattagtacaaaacatcgcgccccatcatgccaaggattattgcaaaagaaaacccggtgacgtttacggtgctcattatctgatcaagtatcagatgaaaatagagaactttaaaccttggcacgtcagtatcaattctgacctctacaacatcatcataagatctaattagtagtttttttttttttttttaaggcagcgaagaaaattttgccaagtatgaattgctgtaatcatcttagtattagtaccaaaagaacagcttgcctcattcgaaacagaaattattcagacagttcccgagcttgtcaaagctgtgataaaatggtgcgcccgcacaaatggaaaattgaaaacgaaaactgcaggatgtcagtgtcagcataaattttgacggaacccaaacaagggattttggtacaattcatgcttaagcttcatcatgagagggctttctgcacctcaacagtcacttcctttggtggtttctcggcgtgcagattcgccactaagcccttcttggagtagtagtcaatcacaggttcggtttgtctgtggaaggcttcaagccttgacttcaagacctcagctgtgtcatctctcctttgaatcaatggctctccagtgacatcatcaactcccagagcctttggaggtgcaaattttgtatggtaagtcctaccactagctgggtggatccaacgaccagtgattcgttcttccaatattgcatcatcaattgcaaagttcagaaccttgtcaaccttagttccttgctttgcaagcatctcatcgagcttttgagcttgaacaacagtgcgagggaacccatcaagaatgaatcccttttggcatgaaggtttcttcatggcttcatcaataatcccaacaaccaaatcatcagaaacaagctctcccttgtccattgcttcttttgccttaacacctaaaggagtcttagcagcaacagcagctctcaacatatcaccggtggctaaatggcataagcaatattcatctttaataagaggagactgtgttcccttgccagatcccggtggaccgatgaggatgagtcgcttgtcgggcttggagctgcacttcatgcggcggagaagctcgtgcatcagatccagcgatggcacatcctccaggttcgccgccatcgccgcctcgagctctcgcctcgcttcccttgagctcggagagtcggaggagggtgggtggatggggttcgggctctgttgcgcacttgcgctcacgcacttgg

SEQ ID NO: 39821 - DNA, 605 bp, Setaria italica
  Peptide Sequence Number=SeqID_105795
cagtttatgcccataataccttctctgaagtctggactcttcaactgctgccatcgaacaacttatcactgttttcgagctttgttcctgctaaccacaaatgtagttgtatggattagaccttccttcttccaaaccctgtttcatttcaaattcattctcaagacatgcattcatggactagggacatccggtcgactagaaatgaatgcctttcttcctcctcgtgaggcgcatgcttgaaatattagttgtttaatcgttttataaattcctttttcttgttgtttacactcgcttttctttaaactgtatacagtcagcagagggtttttgctgtccaagtattcgagctacataggttgatcaaagtgagtctgcggcaaataatcaacgtcttctggctcatgcttatgggcaggtgaacttacgggtaattttgagtttgaagtgtgatttaaccattgtttgtgttgacttgcaagcaggtgcagaagctgatcgcggcatctccacatctacttattgagggggatccatgcctagacaaagccttggcggcgagcaagaaaaagctggctggaggagatgccgaaaagcagcat

SEQ ID NO: 39822 - DNA, 441 bp, Setaria italica
  Peptide Sequence Number=SeqID_105796
ttaagtagtagtactaagttgagaagaggaaaaggtcacatcaatggtgtggagcacaacgatgatttgtctgattcctcagtggaatctctacccgaaatggagatttcgccagatgatgttgtcagtgctattggcccaaagcatttttggaaagccagaagagctattgtcaagtgcagaagctgatcgcggcatctccacatctacttattgagggggatccatgcctagacaaagccttggcggcgagcaagaaaaagctggctggaggagatgccgaaaagcagcatcaatctgctaaatacaaggatgatgttcaacagacgctgcagcagctagagcactcaaaagataacactgaagcggaccagccttcaccaactcaagatgatgtagttgcagtccaacataacaatcaagccgcagcaactgctgctg

SEQ ID NO: 39823 - DNA, 2342 bp, Setaria italica
  misc_feature (2320)..(2342): n is a, c, g, or t
  Peptide Sequence Number=SeqID_105797
cccgcgccgccgtggcacgcgcaccggcccgctcccggcgcggcgacctccgccgtaccatcaacgtcggccagccaggctggcgggagtgatagacctctcttcccatcatattgtgtgccttcaactgaacctgttcgttcatcagatcatatgaatgccaactccaatggtcgggctggcaatgctacaagaacagaatctgggaggctgtccacacatcttaaaagcaaggataccaatgctgcaggactaactgcggagtgtagttcaaaacatagagagaacaccactaagaattcttcggggaagaaattgactaacgatgatgattttacagttccttccgtcttatattctggaatacctccacattccactcaagaaaagttcacccccttccctaccaaaagtccatataagagcatgcctgcaatgtataaatcttctgcaaaatgttctaacactgacaggacacacttggaaggaatgaaagtttctgatgcaatatcaatggggtctccaggtattaaggagaaagagccaacaaaagtgaggatagacttggaaatcgaagagagaacttcatcatttcaaacatcaaaagagaagtcggggagactagacccaaaggtatcttcatacagggataagctgaacaaatataatgttgctgataagcaaagttctgaaattgcgagctatcagactaggaacaggaaggagaatgctggtgaaacccagaaccctccagaagctgaaatggcaccatcagctaagccatatgctggtatggaacagaatggtaattctgatctattggagcttggcttaagagagacaggtgagaagaggaaaaggtcacatcatggtgtggagcacaacgatgatttgtctgattcctcagtggaatctctacccgaaatggagatttcgccagatgatgttgtcagtgctattggcccaaagcatttttggaaagccagaagagctattgtcaatcagcagagggtttttgctgtccaagtattcgagctacataggttgatcaaagtgcagaagctgatcgcggcatctccacatctacttattgagggggatccatgcctagacaaagccttggcggcgagcaagaaaaagctggctggaggagatgccgaaaagcagcatcaatctgctaaatacaaggatgatgttcaacagacgctgcagcagctagagcactcaaaagataacactgaagcggaccagccttcaccaactcaagatgatgtagttgcagtccaacataacaatcaagccgcagcaactgctgctgttaacagtaatcctcccacaatgcctactccttctgacaacaagcagaacagctggtgcattcctccacctccgaatcaatggctagttcctgtcatgtctccatctgaaggacttgtctacaaaccttatgccgggcactgccctccagcaggaagctttttggcccccattttatcccagctgtgctcctgtaagcctcccttccactgctggagatttcatgagttcaccttatggtattcctatgcctcatcagccacaacacatgggtgttcctggtcctcctccacccatgccaccgatgtacttcccgccctttagcatgccagtgatgaacacagcagtgtcagcctctgcagttgagcaagtgagccatgttgcagcatcacggcctaatggacacatagagcagcattcacggagctcgtgtaacatgtctaacttgaggagcgaagcactgtcagccgacatttggagattccatgcctcaaaggacagtgagctgcaaggaagcagcgcaagcagtacttttgataggcagcaaggtgaaggaaggggtcctgcgcaacccttcccttcatcttcagttggaaatgggcaacctcaaccttcatccgggagcagggagaatccgggccgagtcattagggttgttccacacacttcacgtactgcttcagaatcagcagcgcgaattttcgagtcaataaagatggagaggcagcaaaatgattgatgatgactctgcaattgtatgctgtatgtttcttgattggtagagttatatacatgtttagctaagagcctagacaattagtgctagctgctgtattatttttgaccggtaatattatattagatacatataattgcgataaattggctgacctgatgtcttgttcactgtaaatatgcactcgggtgtctctcagaaggaaggcctttgttgtatctgtagcctgcattggtcattagtacaacataattctgtataaaaaannnnnnnnnnnnnnnnnnnnnnn

SEQ ID NO: 39824 - DNA, 1115 bp, Setaria italica
  Peptide Sequence Number=SeqID_105798
gtcgtggccaccatcgttggcggcggcggcgccgccacgcccgtcgtcgcgctccgggccgacatggatgcgctccccttgcaggaattggtagattgggaatacaagagccaggaaaatggaaaaatgcatgcttgtgggcacgatgcacacacaacaatgctcctgggagctgctaagctgcttcaagattgcaaggatgacttcaagggtaccataaagcttgtattccagcctgcagaggagggttatggtggggcctattacatcttacaagaaggctctcttgatgatgtgtcagcgatatttggcttgcatgtcaacccagacgttcccttaggtgtcgtttcatctaggccaggaccctttgctgcaacagcaactcgattcttagcaactgttaatggaaaaggtggacatgctgcaggaccccatcaatccattgatcctgttgttgctgcatctactgccatcctcagtcttcaacaaattgtcgcccgggaaatcgatccgctacagggtacagtggtatctatcacttttgtgaagggaggagaagcttacaatgttattccagagtcagtgacctttggtggcaccttgaggagcatgacaaatgaaggtttattatatctcaagaagaggatcgaagagattgtagaaggacagtcagtggtacatcattgcactgccactgtggacttcatggaggacaaaatgagaccatatccggctgtgatcaatgatgaagtgatgtatgctcatgctaagtcagtggctcagagcttccttggggaagagaatgtcaaggtttcttccccggtaatgtgctccgaggattttgggttctatgctcagagaatggcgggtgccttcttcaacattggaagccacaataagagcacaatgacaacagtccatccacctcactccctcactttgtgttaggcgagtatgtgcttcccgttggagctgcattccatgctgccgtggcaatggagtacttgaagaaacatgcatcaatatgaaaatgaatgggaagatactttgtggtatgctttttcatgcaggttcttcaagcctcaatatccttgaagaacctgcatgaaaagcat

SEQ ID NO: 39825 - DNA, 487 bp, Setaria italica
  Peptide Sequence Number=SeqID_105799
aagacaagactagaagaaaacgaaccagcatccttcccagaatctgaatacccgatcatcacttcctaggcttgccactgatcctgtttctgtaccaatcaacagagaacagtcgggctagtgctgctggtgccccctcaagatctgccagtttttcaaacaacggcacaactctcagtggccttttcacatgacattcacgctgcaagagctcaactgcaagaacatctgagggagctgtcgccatagatattacataagcaccaaagctgtctgaaggaagttcagctaacacatggaaagtctctagaacatcagcaatctcatctgacttgggaaggtcaggaccaaataacggcctctttccgttaagttctgagagtaaccattcttggcgtttctcctccggccattcacgatatgatccaattccgaggtattcagttatagcatccataacatcagtatgccggtcagattcttgcct

SEQ ID NO: 39826 - DNA, 428 bp, Setaria italica
  Peptide Sequence Number=SeqID_105800
aaacacattggttgaagtgttcaactacactattcgataaagatgccgtaccaatggctcttatcccattttcttctcgtgatagctgactagagaaaattgttttagtatttgtcaaccaatgcactatattttctaaggaagaattgaatctgtctgttgcgggatcaggcttctgaaattgaatcagacgctccagtgaatttaaggcctgaatttaaaggggagaaatcatagccagatcatattattctccaacctaaagagctgcataagagtggcgtgtaccccggtattgctaacaattattgtgactagctcaccgataaatttctctttcctccctctccaaaggaagaaataaacaaaatggttagtcagcctggcttgtatacaactacttgatcgatttgatgttcaaaagattc

SEQ ID NO: 39827 - DNA, 347 bp, Setaria italica
  Peptide Sequence Number=SeqID_105801
cttgtggtgctcggtttcgtcgccctcgtcgccgcgttttgctccatctgcgtcgcgatctgcaacgtcgaggcagagaaggagaagatacggaggaagccaatagattcgctctggatccaattccacttgtgcacgctgcgaatttagcgaggccctgctccgaacgatcttattcgccccagaagaccagccagtgctgtgtgttctcatgcttggattgctcgtccttttggctttcgtcttgctcacacttgtaggatttctgctgaaagccttctcgccggtcaagggatctcacatggagagaagtggttcagtcatcatggatggttgggtcttgagcc

SEQ ID NO: 39828 - DNA, 178 bp, Setaria italica
  Peptide Sequence Number=SeqID_105802
atcagcaaccaaaatgtacaagcactgaaatcaaccaagatgcactgagatccatgttgtcaagttcttgtgaaaaggttgtctcggtgcttgggttttttcaagggctgaaaactgaagaaaactaggttgtaaacgttgacttgtgaaaaaggttgtctcggtgcttgggtttttc

SEQ ID NO: 39829 - DNA, 1145 bp, Setaria italica
  misc_feature (1122)..(1145): n is a, c, g, or t
  Peptide Sequence Number=SeqID_105803
cactaccgccgcctgtttctccccctccgcgtccgacaccgccgccgatttctccccctccgcgtcgaacgccgccgctggttgcttccccttcacgggcaactcggcggcctgttgctccccaaacacggtcagcaccgctgccggctgctccatctcccgttgcacggcctactccgcaaccaccggttgcttcccaaacacagccaaatctgccgctgccgcctgctccacaaacgccgatccccgcaacggtcccagcagtgctgtcaggtgcggcaccttcgtcgactttctggacagtgtgctcggcttgctgccacattcaccagtacgaccaccaatacgagacacgcaagctgcggtgccgtagctgctgccagacatttgtagctgaggcaatggccgagccaccacctattgtgccgggcactgacatgtattactgcacctggggtttcttccccgttgggttccctgggtgtcctggctttgaaagaatggccaattcacagccacggggaccagatcagctgaatgcgccatggcttggaggcaccgatggtatgaaaggtaagactcgggataatgctgagagtggggtgccaccagttagtgccccagaagtagaggtaccagctgtgacgccgcctgcgaagccaatgagagtgaaggtgggtgcaaagaagcgcggtcgccccaagggtagtaagaataagaagaaattgtgaatgctaatgatgaagaggatggttatgatcattgatcagattgattagttgggatatgcattcaatcacattgccatttagatcaaccgaagcaggttcaattatcactttctattggcaggatctttcatgagcatggcaatcttattgatggaagaattctttcttttctagataatgttaatctctggttcttgccacattgccttacttgctattatgctttagctgtcagccgttgttgatctagagacagctgagttgatctaaaatgataggtgaatgcggctggatactgtttattgcacatttgagtttggtgctattgtaaactgtgctctgtgatggaatgctgcattaactgaaatggtctaaagtgctagttaaaacnnnnnnnnnnnnnnnnnnnnnnnn

SEQ ID NO: 39830 - DNA, 529 bp, Setaria italica
  Peptide Sequence Number=SeqID_105804
cagcaggcttcatcactggagaaccatcatcattgtcatcggtgctatctacttggtacttcttcttcaagtgccgccgtctttcagccttacaagtctttttttcacaagctttttgtttgcggccatgtggagaggagaattcgtcatcactaacatctataacatcacgatcatcaataaagtcagattcatagctgtcctcattggcatcatgctcctcatcagtgtcagactgtccaatatcttccccataagattctgattcatcatctcccacattagacctgctgcttgcacggacataatatccagagagatgaatggaactctgaccaattactgagaagacaacatcatcgacctcctctaactcaatctctagacggcacatctcagccaattttggatttaaactacagagtttgatggggatcttgttgccaacattgcattgcagcaccgtccttccagcagcatcacaattgctgagtgtagcctgactaaacgtcggtagtacggtcctatt

SEQ ID NO: 39831 - DNA, 248 bp, Setaria italica
  Peptide Sequence Number=SeqID_105805
gcagggatgcattcccaaagctgaggatcctacgtctacagcagtttaggacgtgttcactgactagggaggtgacgtttgagcagagcacctcacctaacatggaaacaatatacatcaagaattacctgttgacattaggaatcaatggtatcgagaaccttccaaaactcaaggaggtctatattgagggttctatattggcgaagcaagatatgctaaaagaggaagcaggtagacacatgaat

SEQ ID NO: 39832 - DNA, 495 bp, Setaria italica
  Peptide Sequence Number=SeqID_105806
agtacggatcgtatccagaatcagcgacctctgaggaaaaggcgttggggtggtaatagttagatgctggaaatatcttgagagcttgtccatgatggtttcttcatcaagattattcctgcctatgatgctcaaattcttatattgttacttttgtttattctgatggttgggctagggaaacaaaatataggaagcattacttgatgttatttttatagtatagtatctttcatagtttcagagtaataagtttcacaaggcaatcatacttcacaatgtaatgcgtttgtactggggtgcattcaccattgaggggtgatttactatcccctgggttttttaagcttacacttatgcatgcaggcaaatatttctgtgttttttggtggcaagatctgtctgcagttttgctgtattgtatagctgtagagaacaacatatcatctctttatgctctgacatcgagtaccgttaactccagattccttgaaa

SEQ ID NO: 39833 - DNA, 359 bp, Setaria italica
  misc_feature (1)..(35): n is a, c, g, or t
  Peptide Sequence Number=SeqID_105807
nnnnnnnnnnnnnnnnnnnnnnnnnnnnnnnnnnnactttaactttaatgctgttcattgtttggattcaactcagaattgctcggtaacaagcattacaaagttacaaccccaaatttctgcagcaaggagcaacaggctaccttggctcaaacggcacccagcactatgctagtctggcatcggcaggtgccaaaaacaaaaaccagaggaactgaacaaaatgaaatcttaaaaaaataacaaagctgcataatattagttgtagctgcaggtacatatgagtgctctaccattacgttacagaacgtcccaggaaaagcacgatgcagactcatttgctcgaactagcacaagct

SEQ ID NO: 39834 - DNA, 592 bp, Setaria italica
  Peptide Sequence Number=SeqID_105808
aggaaaacgtaggaatcgtggtttcaaatccaaaagcatatacatgagctccttgcgaaaaccatggcccttgtatgtatctgagggcatgagtgacacttgatcaaaccatattaccccccttttggaagttgttagatcaagtcgtgaagttctgcatgtttcttgagctaatagtttcagttctacccttgtccagtttgacacgtcaatatcttgtatatatgctgatgccaggttttgcaatgcacctgaaggtcttgaacatgtgagtgaagctgtcaactccacagattctggtgatctgatgtacatgactagattataggtttttccttcttctatgttcatgccccagaatcccgggttgtagacgccaacaccgccagttgggcacttgtcacatagaacctcaattcttagagcaacaatatttctagtgaaacaggagacaggatcagtcgtcacatatatggaagactcatctccgatgatgctccatgggtctatgtttgaaggggtatggggcctcctgcttcaaaaacctctgttgctaacaagctcctcccagattccaccagctccagcatgg

SEQ ID NO: 39835 - DNA, 404 bp, Setaria italica
  Peptide Sequence Number=SeqID_105809
ctaattgtgggtttgcacaagatgactatttttatcaggttcaagcataaaacagtgtggcaaattttgaagaagaaaaaatattgacgaaaatcaacaattcctaattactttaaaatctatgaatctttgacacaacaataaaaagtgattgattggcaaagtaaatggtacagctttatcttatctgaaacaaataagctgatcatcagttcatcaccctttcaacatgaatcaatgtgcacagggttgaacattttttatcccacgaccatggctgaaattatgcgtgtggatggaatgtttttgtgcaatgacaatacatagttgatagtttaccaaaaggtattaattgtcctaacctcctacgctctctttacaagcgatatggtaatgcttatgtg

SEQ ID NO: 39836 - DNA, 472 bp, Setaria italica
  Peptide Sequence Number=SeqID_105810
gggcgaccattggagaacgagattgaagtggtacagcacggagtaccacgaggggcacgaggagtacgaggtggcggacaggatgctggctctggcggagaagcacaacatctcggtgcgcggccacaacgtgttctgggacgaccagagccaccagatggactgggtgaccaagctcggcgagggcaagctcaaggccgccgtggcgaagcggctcaagagcgtcgtctcccgctacgccggcaaggtcatccactgggacgtggtgaacgagaacctccacttcaggttcttcgaggacaagctcggcaaggacgcgtccggggagatcttcaacgaggtggccaagctcgacggcaagcccatcctcttcatgaacgagtacaacaccatcgagcagcccggcgacatggcgccgctgccgaccaagtacctcgccaagctcaggcagatccaggcgtaccccggcaac

SEQ ID NO: 39837 - DNA, 409 bp, Setaria italica
  Peptide Sequence Number=SeqID_105811
ggactagattttcttttggtcctcaagctaagggtagaaagatcatttcacgttcgcgttatgtgctgaaaaagtccaaaaataagttttcggtgaaaaaatatgacggagtgctattttcagttaacgtctgtacctttcagtggtattttgcagaagtcgcaatcttcgatgctacagaaccaattttccctaaaagtttcaccatttttcttgccaatctagcttataacatttgtgcgtctacattacccaaatacaaggacaaaaaagagggtggcacaggtgccacactgccaccaactaagtggataaaattcaaccagtcacaactaaacgaccttgacgtagaaagaaaaatggagatggagctgaggaaagaaaaatgaccggttcgcaacataaacgg

SEQ ID NO: 39838 - DNA, 500 bp, Setaria italica
  Peptide Sequence Number=SeqID_105812
tctagggtagggttgcgtggtcgacctcggcacgccggtgacggtgatggctcgggcggcgtacgacgtcgtcgaggaggccgtgtggtcggacctcgagcgccacggagcggagcgggtggggcggcgcgggtacggcctctgcgtccgggcgtcggaggcgatgaaggggcgcctccagtcgctgtcgcttcacttctccggggacgaggaagcggtgctggtagtcgcgccggagcagctgttcttgatgatggatgacgagcaggggcggatcgcgtgccttgccgtaacgccgggacgccgaaccgtcatcggcgcgttgcagcaggtggatacgcggttcgtgttcgacctgaaggactccaagctttcgtttgcaccggagtcgtgcatccgggacaccgtaccgtcgaagccgtttaaatgatgatccaaccatgctattttcgtaataaataaaatcaggaacacatcgtgaagatctcgtgtaaaaaaaa

SEQ ID NO: 39839 - DNA, 580 bp, Setaria italica
  Peptide Sequence Number=SeqID_105813
ggttttgcggttcctcgctggtgagtgccaaccagaccaatcgctcttcttctcccagtcccaggaggagctgcgaggattttcgctactcccctccctccactgatggcttctcttcttctccctccgcggttcacttgttccctgcccccttatcatcgtatcaggggtcaaatacattacaagacagatattttggggaagaacatggctaagcctacagtgtggttgcttaaccgaactgtgtatgctgcgtcaaggacttctcaagatgtggaaggttcaagtggtgaagacagtgatggtgaaacttcaactaaaaagaaaagagctccaagacgtggaagaaagaaagccactacagaaacattggaaggtgaaggagaagaaagccaaataaactctgaacaagcatcccctgaagagactaagaaagttaagaggcgaggccgcaagaaagctactactactgcaagcttagaggaggggatggacaaggcaaaggagccaaagaagaggggaagaagaaaagttaagactacagaggaatctagcgacgatgaaggagatgatcggggcc

SEQ ID NO: 39840 - DNA, 1100 bp, Setaria italica
  misc_feature (1)..(38): n is a, c, g, or t
  Peptide Sequence Number=SeqID_105814
nnnnnnnnnnnnnnnnnnnnnnnnnnnnnnnnnnnnnnatttatttgaaattgattaactttgttcaagaacaggaagctaacaagttgtttcatacaatgcttgtttgtaactctaatatcctgactactatataatgaactcgtgaatcagaattgtttttttccgccgaattcacataagagctgcgcatcttttttattaaaaagaagcatgatatgttcgattataacgacgcgagccaacgggtgcacacgcaggaacgccacttagctaaacaaacaaaccaacgaaccaaggttatcgccccaatattttcttcaatagtaaggtacctagccccaggatatatatgacgctacgatcattcgttcatagatcagccttcacttttccgcatgaagctttttgaggacgcatgcgcatgggctgtagaaccctggtgacggtgggcgcttggtgccacgggcaggggggctcagggtaggggacgaggcgcccgaactcttcttcgcacgggctttccgggcagctagcttcttgcggacgggtgcgcctgggcgaggcgacggcgagccgttgcgcttcggcggcctccctctccctgctggcgccggaggctggtcgtcgttgcgcttgttaatctccttgagcatggccagcatctgttccatggagagcttggggtcctgcttcattctgtccgtaaagttgctaatccctttccgcaactccccaatatctgcgaggagcttgttcatcgacggcaaaactttggccagttgaaacccagccggggagacgcccgcgtcgtacgacgccctcctagaggcgtccgagagcacttcgaatgcctcctttatccggcgaaaacttgccctggattcctgcgtcgtagaagaatccccctccagccgccactcctcgaccttcttgtggtaggcggcgtcgatgttggcggcggacgcgcacgtcgccacgcccagcaccgcgtagtggcacggcctcactgagcccccgcacattgctgctcgatctctgtctgccgtgctctcgcgctgacggcgacgactcgccgcgtaccggtaagtaaatttaaa

SEQ ID NO: 39841 - DNA, 316 bp, Setaria italica
  Peptide Sequence Number=SeqID_105815
ctcccaagtcccaacccaaccaaagccttccgggggaggtaaaagtaaagaggcgggttcgtcgtcgaagactccaagtccaacccaaccaaagccttccggggagcgaggagagctgatagccgccaccgccgccgcagccgccatgtcgggagggatcgcgcgcggccgcctcgccgaggagcgcaaggcctggcgcaagaaccacccccacgggttcgtggcgaggccggagacgctcgccgacgggtcggcgaacctcatgatctggaactgcaccatccccggcaagcaggggactgattgggaaggtggg

SEQ ID NO: 39842 - DNA, 465 bp, Setaria italica
  Peptide Sequence Number=SeqID_105816
ggtatacttcctctcacccttcatttcagtgaggattaccctagcaaacctcccaacgtgcaagttccacaggcttcttccacccaatgtctatccttcggacagtctgcctttctattcttaacgaggacagcgtaagctttgcagataattttgtaggtctctgtgatgccacacttgattgattttgtggtcttactgttccaatttttgcttgtcagggctggagaccagctattactgtcaagcaaattctcgttgggattcaggacttgcttgatcagccaaatcctgctgatcctgctcagactgatggctatcacctttttatccaggttagtcaaaagtgattgaccacaactacacaactgttgggtgcatctgcttgtccaaaaccatactcagatattcagtcctgtgtttgtaacatttcatttggctttgcaggatccaacagaatacaaa

SEQ ID NO: 39843 - DNA, 1088 bp, Setaria italica
  misc_feature (1075)..(1088): n is a, c, g, or t
  Peptide Sequence Number=SeqID_105817
cccctccggttcggttcggttcggttcgggttcgtgaggtgttccggttcgggggtgagaggcagagatggcggcgtcggatgttgagtaccgctgcttcgtcggcggcctcgcctgggccaccgacgacaactcgctccacaacgccttcagccccttcggcgaggtcctggagtccaagatcatcctcgatcgcgacacccagaggtcccgcggcttcggcttcgtcacgttcgcgagcgagcaggcgatgcgcgacgccatcgaggggatgaacggcaaggagctcgacggccgcagcatcaccgtcaacaaggcctggcgcaagaaccacccccacgggttcgtggcgaggccggagacgctcgccgacgggtcggcgaacctcatgatctggaactgcaccatccccggcaagcaggggactgattgggaaggtgggtattaccctcttacccttcatttcagtgaggactaccctagcaaacctcccaagtgcaagtttccacagggttttttcacccaaatgtctatccttcagggacagtctgcctctcaattctcaatgaggatagcggctggagacctgctatcactgttaagcagattctagttggaatacaggacttgcttgatcagcctaatccagctgatcctgctcaaactgacggttatcaccttttcatccaggatccagcagaatacaagagacgtgttcgtctgcaggccaagcagtatcctgctctggtgtgaggatgttgggatgctaaagatccatgacccatcctgcacatccgcataatagctgcaacatcttcaattatgcatctgaatatggatttgacaagatataagttttctggagtatttcccagtgtaaacatgaaccttttgtgatctgtagatctggcattggcttgaaacaaaattgtttccttaactgctgtaagtgctggagtgattaaatttcatgacattcaacaatctgtaatctcactttggattttgcatattgttaaagagattctgtgtttgggagatgtatacaaaaaaaaaaatttaggcaaaaaaaaannnnnnnnnnnnnn

SEQ ID NO: 39844 - DNA, 993 bp, Setaria italica
  misc_feature (948)..(993): n is a, c, g, or t
  Peptide Sequence Number=SeqID_105818
tagttcctaaccccctaaaaaaacttcccctagtccggtaggtcgtacccgtaggtaagtaggtagtaagtccgtccgccgccggagccatgtctggaaacttaagaagcgcaaagtccaacccccaaaaaaactccccagccggaggcgacccgaggaagaggagaagccgccgccgccggagccatgtctgggggaatcgctcgcggccgcctcgccgaggagcgcaaggcctggcgcaagaaccacccgcatggtttcgtcgcgaagccggagacgctgcccgacggcacggttaacctgatgatctggcactgcaccatccccggcaagcaagggactgactgggaaggtggatattaccctcttacccttcatttcagtgaggactaccctagcaaacctcccaagtgcaagtttccacagggcttcttccacccaaatgtctatccttcagggacagtctgcctctcaattctcaatgaggatagcggctggagacctgctatcactgttaagcagattctagttggaatacaggacttgcttgatcagcctaatccagctgatcctgctcagactgatggctatcaccttttcatccaggatccaacagaatacaagaggcgtgttagactgcaggctaagcagtatccggcgttggtctgagaacaattgcccatctagggatccatgctgcacatccgcatagttgttgccagtgtcttgaatgaaagaccaaatgtaacatggtgctttgagaagtaactattgtcattgtgaaccgagtgcgtctgttaacggtgctgttaactgtcctgagcgtgtgttttgtgggataatgtcaaaacccttgctttgtctggtttgtctcaagaattgctgtgttgtctaactaatctaaatgtgggacggtcagtatgcctggaaaaaaaaaaaaaaaaaaannnnnnnnnnnnnnnnnnnnnnnnnnnnnnnnnnnnnnnnnnnnnn

SEQ ID NO: 39845 - DNA, 475 bp, Setaria italica
  Peptide Sequence Number=SeqID_105819
tggcgtcgccgtcgtgcgagaactattcagctttcgtagccgtcgtcctcctcgtcaccgtcgtgacggcggcggcggcgcagcatttgcgttgcagctgtggcaagcttcgtaacgagattgacacattctagcttaccatctgcagcgtcctacgaatactgggtgaacgccaccgctgcttcaccgagcgccagcgccgctgccagctctgcggccatgccggcttctcctcccgcggcacccgagcctgtggttggactcgtgaagctaccacctccatggccagccggcggcacgccgccgccaatgccgcggcccccggccggctttctcaggcacgacactgttaaatttgtaggatctctatgtgcaagaagaactagcgggtaaacaacttgttcttacatgaaatagatccttaagatctaaacagaagaaaaaaaaaaaaaaaactaaggaagaactagaccaa

SEQ ID NO: 39846 - DNA, 600 bp, Setaria italica
  Peptide Sequence Number=SeqID_105820
cctctccctattctccatcccggccgggtcccccgccgccgccgcggtgcgctccaccctggccgagtgcgaggccccgcggttcccgggcgtggcggcgcagcgctgcgccacctccttcgagtccatggtcgacttcgccgcttccagcctcggcacccgaggcatccgcgcggggatgaccaagctcagcagggaaggcgcgactccgaggcaggcgtacgtggtggagtccgtcgtgccgctgccagtgattggcagggacatggtggcctgccactgcatgccatacccctacgccgtcttcgggtgccacaccaccaccgccgccgtgttcacggtggccctcgccggcgccgacgggaccagggttgaggctctgacggcgtgccacaaggacgccacgcccggcatcttcgggccgacgtacaagaagctcggggtcacgccggggaccgtggcggtgtgccacttcctgccccaggacggcaagctctggatgcgcaaatgaaaggcttcgaacgtgcgtggcgccagcatcaagaaagcagtgcatggaaaaataagtgtggctggtcacgtatttcatcgcctgtgaac

SEQ ID NO: 39847 - DNA, 378 bp, Setaria italica
  Peptide Sequence Number=SeqID_105821
gaacggaccactggaataaaattgcttaacttattctgcctgaaatcagcagaagttgtgttttcacaaactctctccatctgacccaggggaaattcggcggcctcctcgatcccttcctctcgaaagccaagcccttccgtgtcctccggctcctccgcgcacatgacgccgccggccggacagccccacctccggcgttcttcttggcacgaggcgcaagcgcgcagctggtgctccgctggtaggaggaagaaacacgaggggccgggggagagggacagggagaacagagaagcaaagcaagtcagtagggagaagaataattggagcgtgaagggaggaggggggaggaatccgaggaggagagcaacacag

SEQ ID NO: 39848 - DNA, 575 bp, Setaria italica
  Peptide Sequence Number=SeqID_105822
ccctggcgaatttagatagcattattagagaggaggcccagatcgccatccaaagaattagtagcaggaatcgatcagctcactactcaagcaagcaaagctgcaaagggtgtgggggaacgaaagggagagcgagcggccgggtcggcgatgtgctgcggcggcgacgacggccgcgagtgccggccgctggggtttctgctgggcctgccgttcgcggtgctcgccgtcctcgtctccatcgtcggcgccatcatctggatcatcgggctgcccatctcgtgcatctgcccgtgctgcctgtgcgtgacgctgctgctggaggcggcggtggagctcgtcaaggcgccgctgcacgtcatgacctggttcacctccaagatcccctgctagcgcctgatgcgctaggtagacgatgatgggggtcatggccatggcagacggcaggatgatttcatttgtattgggctgtggctgccgatcgatgtgcctcttctttcttctgtttcctcgctcatgtgctcatgtgttgatttgagtataagatggattgattctcgtgacaaaaaaaaaac

SEQ ID NO: 39849 - DNA, 523 bp, Setaria italica
  Peptide Sequence Number=SeqID_105823
gtaaaccacgaatatgtagtacatcaacattctagaatgatggacggtcggacacaatgcacatgtccctttttagacttattggtagcatacatgtccttttctttcagaactcatgatgccatgccagctgattttcatatctgtgaaatcaaaggacttcgtttctcacttctttatgcccatatatcttcagagatcagcggcaagttcatagaggtaatctcaagtgcccttgccatttcaatatctgtgaaatctgtaaaatattctggcatatcaggcaccacaaataaattttcatagctttcatcctgaattccatggacatcgttattaacaaaagttgagatactgctttggttatcatggacaattggtacgctatgacttgttgtctcaacaacatatggatgaattatgccatccttcttgcaaatgtgctggccataatagtcaacattgaacagcctcacctttccacttccatcggtttcctctgttgcactgtcttggttgcaag

SEQ ID NO: 39850 - DNA, 294 bp, Setaria italica
  Peptide Sequence Number=SeqID_105824
ctgtctccagcagcgccgacagagaccgacgagtcctcagaagagtgcaaggccatggcttcctctccttccggcggaggaggaggagcacggctgttgtttccggtggtggtggtggcggcggccgcgctagctggggcggcgccggcgtccgcgtgctacacgcgcctgttcagcttcggggactcgctggcggacacgggcaactaccgcttcgtctgcggcgacgactccgaccccgtgctccggctcccctacggcgagactttcttccaccgcgccaccggccgcttc

SEQ ID NO: 39851 - DNA, 512 bp, Setaria italica
  Peptide Sequence Number=SeqID_105825
tagtgttctattgagggagcatatgagtaagtggttgacgactgggaaacctttccctgggcatattaccatactgccgatgagggaacacaaatcaacaagtttagccaaatactgattgtaaagaatgagtaaatatcacaaaactacacttctttagggaactatcccaaaattactcttttttgtttatattcacaaaaacacacttcttttggttatatcattaaacctttttgtattgattttgaagaaatacactttctttggagcaaatttttaatagcactttgaggagtctggaaccgcacatcattacccacaccctccataatatgccatgtgggtccaggactccaggctgctcaacccaacaaaagtaccgagactaaagtcattcaacggttcaaccacatgccatgtggtactatattgcatcaaaaagctaactgttgcatgctcccttcccctcgtaggaactaggaaaccttgaactggcttgccagcaacaa

SEQ ID NO: 39852 - DNA, 489 bp, Setaria italica
  Peptide Sequence Number=SeqID_105826
catgtattttcttaccgcttacagacactgtgttcggtaaataccttttatgatattaaagtggatggttattatactaacacccgcatataccttcataggtaatagcatttctttaacaagttacaaagacagaaatgttttgtacaaatgtagaaatgaacaaatgaataggttccaaataacagtgcgtatacaaagttcagctgcgcagaatgaacatatagtaagataaaataaataaccaatcatgacaaaagacggtttcattatgggcaatgacacaatagttcaagcataaaaaatacctaatgtaactggaattgtatcacactacataattgaaggaaaagagcaaaacagcaaagagcaaaacagcatatcaaatatttaggctccataagatttatcttccacaagtataaaaagatggaacctgctttgatctaacacgattattaaattgttcgtacaccatggatttcaaat

SEQ ID NO: 39853 - DNA, 514 bp, Setaria italica
  Peptide Sequence Number=SeqID_105827
tcttgtttagggtccttcttggttctaacctatttagttcgatgactgggattgtttgaagaggatggtgcggattttcgaagcccaatgcggctcgctcactcagtacggcatgaagtacatgagggcgtttgcaaacatttgcaacagtggtatatctgaggcaaagatgagggagtcaagcatcagcgcttgcggcggttacaactcggcgaggtggagcccaatggctcaaggacacagcgcttgataaaggaaaagcttctcattcgtgaaggtcttgtcaccatactccatgacatgagaaccctctttgtacttcttcaagtttgaggttcttgttttcaccacttcgtactggtccttgattgtttccttcattagattgtgggtttgactatcttccatccaagaaacactgtacagatcacctaaacaggtaatgtactcaggagggggtgatgggtccatcccaggacaggtatgttccccaacttattttcaacaggtattt

SEQ ID NO: 39854 - DNA, 535 bp, Setaria italica
  Peptide Sequence Number=SeqID_105828
tttgtctagtcgtttagtctatttagtctaggtattctaaaacctttgtattaaaggtaaaggctttctcattcgtgaaggtcttgtcaccatactccatgacatgagaaccctctttgtacttcttcaagtttgaggttcttgttttcaccacttcgtactggtccttgattgtttccttcattagattgtgggtttgactatcttccatccaagaaacactgtacagatcacctaaacaggtaatgtactcaggagggggtgatgggtccatcccaggacagtatgttccccaactattttcaacaggatttgaggcagtagtgacataaatatttagatcttgtggcattaatccctcaaagatactgccactttcacatgcttcaacatatataaccattttcgagtagctattggaagcatgcttcttttttaaaaccttgatgaagtcaccagcatagagatatggcaaagtttaggacaataaccaaagaaaactaaccaaaggaaacccccaaataagaaataacaa

SEQ ID NO: 39855 - DNA, 668 bp, Setaria italica
  Peptide Sequence Number=SeqID_105829
cccgtctaactgctcgtacctcttccacatgaagagaagatctgcgtctctctgatttactgcaccctttgggccaggccaaagcagcgtgtttgcagcgttagcattagcaggatcaaaaccttgataaaggaaaagcttctcattcgtgaaggtcttgtcaccatactccatgacatgagaaccctctttgtacttcttcaagtttgaggttcttgttttcacctgtccaacaaattatttgtttttttttgaagttctttgttccatattcctaagaaagcaggtgactagctcaagctgcaatttaccaatatggaggaggtgtgtttaagacttaccacttcgtactggtccttgattgtttccttcattagattgtgggtttgactgccaattagaatcagatcagttcaaaacagcaggcttagtaggtataccagtcataaataatcgctaccaagcttggataagcacaaaagcaatatgcttttgcttgtcaacggtcctgttgctgctcggcaactaatacttccctgtccttttcaattatctgctcttttcatgtattttctattaccgcttgcagacactgtgttcggtaaatacctttatgatattaaagtggatggttattatactaacacccgcatataccttcataggta

SEQ ID NO: 39856 - DNA, 1426 bp, Setaria italica
  Peptide Sequence Number=SeqID_105830
ttggcctggcccaaagggtgcagtaaatcagagagacgcagatcttctcttcatgtggaagaggtacgagcagttagacgggggatctgaagagaagctgagggctctcagagagattaaagaaactgttcaacacaggaagcatcttgatagcagcatcgatttcatcgggagacttgtctttggatttgagaacgggcctaaaatgcttgaggctgttagggcctctggtcaaccattagtcgatgactgggattgtttgaagaggatatggtgcggattttcgaagcccaatgcggctcgctcactcagtacggcatgaagtacatgagggcgtttgcaaacatttgcaacagtggtatatctgaggcaaagatgagggagtcaagcatcagcgcttgcggcggttacaactcggcgaggtggagcccaatggctcaaggacacagcgcttgatccgctgcagcctatagcaaaggtccccgaggtctatgaattatgatgacatcctttgtgcgaactcgtgtgatctggggaatgtaagccgctcagaatgtgcgttggttgatcagctgtatatattgcaacgtgtgcccgtaccatggtaaagtctgatttgcaaccaactgccgaaatgatttaagatcagatgcgaatgttgtgaacatatagtaagataaaataaataaccaatcatgacaaaagacggtttcattatgggcaatgacacaatagttcaagcataaaatacctaatgtaactggaattgtatcacactacataattgaaggaaaagagcaaaacagcaaagagcaaaacagcatatcaaatatttaggctccataagatttatcttccacaagtataaaaagatggaacctgctttgatctaacacgatataaatgtcgtacaccatggatttcaaatgagtcttatgatcttacctatcttccatccaagaaacactgtacagatcacctaaacaggtaatgtactcaggagggggtgatgggtccatcccaggacagtatgttccccaactattttcaacaggatttgaggcagtagtgacataaatatttagatcttgtggcattaatccctcaaagatactgccactttcacatgcttcaacatatataaccattttcgagtagctattggaagcatgcttcttttttaaaaccttgatgaagtcaccagcatagagatatggcaagtttggcataccaagaactccaggacccccatgatctgagtaatagataaatatgtggtcatttggtttactgtctataaccttcttactccctccagtaattgcacttctattgcccaagagcacagcaaagaaattttctagttagttgtaccttggttctaccttgttatttagtttcctttttggttaacttaccttagtta

SEQ ID NO: 39857 - DNA, 1514 bp, Setaria italica
  Peptide Sequence Number=SeqID_105831
cctcgccgagttgtaaccgccgcaagcgctgatgcttgactccctcatctttgcctcagatataccactgttgcaaatgtttgcaaacgccctcatgtacttcatgccgtactgagtgagcgagccgcattgggcttcgaaaatccgcaccatcctcttcaaacaatcccagtcatcgactaatggttgaccagaggccctaacagcctcaagcattttaggcccgttctcaaatccaaagacaagtctcccgatgaaatcgatgctgctatcaagatgcttcctgtgttgaacagtttctttaatctctctgagagccctcagcttctcttcagatcccccgtctaactgctcgtacctcttccacatgaagagaagatctgcgtctctctgatttactgcaccctttgggccaggccaaagcagcgtgtttgcagcgttagcattagcaggatcaaaaccttgataaaggaaaagcttctcattcgtgaaggtcttgtcaccatactccatgacatgagaaccctctttgtacttcttcaagtttgaggttcttgttttcaccacttcgtactggtccttgattgtttccttcattagattgtgggtttgactatcttccatccaagaaacactgtacagatcacctaaacaggtaatgtactcaggagggggtgatgggtccatcccaggacagtatgttccccaactattttcaacaggatttgaggcagtagtgacataaatatttagatcttgtggcattaatccctcaaagatactgccactttcacatgcttcaacatatataaccattttcgagtagctattggaagcatgcttcttttttaaaaccttgatgaagtcaccagcatagagatatggcaagtttggcataccaagaactccaggacccccatgatctgagtaatagataaatatgtggtcatttggtttactgtctataaccttcttactccctccagtaattgcacttctattgcccaagagcacagcaaagaaattttcagtagtgacctggtcacctgtatagtcctttggaacaccaggatatacattttcacctttaggatggttaatgataaccccaggccttgggttcagaatgttatgggcaatatcatcgtacatgaacaccacgatgttctcctccttcactcctcccttcagcagtatctggtatgcatggcatacatcggcctggtgccggtagttcccgtagcctgaggagcccgcgacgagcacggcccacctcgtccccacctcatcctcctccgccgccggagcagcagcagcagcgttaccccccttctccgtcggcatccgtatcagcggctcccactcctcctccgccccatccaccgacgccgcggcggccaccgccagcagcgagaggagcccacacagccacgcagcagctgccatcaccggtcaccaagggggggcggcgccagagacgagggcgaccgagtaggtgccaagagagctgtgaa

SEQ ID NO: 39858 - DNA, 1168 bp, Setaria italica
  Peptide Sequence Number=SeqID_105832
atggaaaatgaatataaatgaggcacatttacatgcagatgctattctggccatacaaatccttcctgagcagtgaaactcccagcataaggtttcacctgctgctccaccagaacaccacctccacctcccgttaccactcttcttaccactactgcagcatgccaagtgacagataacaccctctggttgctattacataccatcaccggttcactactatctggcagcacacgataacatcatcacccggctaaacggtgacaacataagcatacaatctagtcagatgcaactccagcggccaacctcaccatggtctagccatgggcctgtttgatgtttacacagggacacaggggtattcgatacagctaaaacagaatgttaactacactagctagttttttcagcaataccattttcgacgggcccctctttcttcacctcaactgcctgataaggcacctcactcattggttgagggattggcaggtcaccaaaatcttgcgggtagaactcgaagtctggcccaaagttgaatttgactacacagttttgctcgttagggagcgtgtacattgacgcagctgggtaatacctccctccaggaatgtccttgaaggcactgccttggcataccccgttcttgaagtagcatatctcactcccaggaacaggatctgctatcttctgctcctccttagggacttgcacatgaaaaggcattcccttgtactcaaccaggtcacgttgcttaggttcataccgctccccatcaggcagcgaaatgtagaacccgaggacatctccctccccgtacccttcatcagcgtacttgtccctccaagccttatgcaccttggcgccatcgatgtcgcggtacccaaacccataggcgtcatacccaaccggcgtctgaaggtccgccttgttggtcacccatccgagacgcgtgtggccagtggcgccgagatgcccgacattgacctcaaagtaccacgcgccggccgcgacgccgcgggtggcgcgcaccatgcggtagcccttggtgctggcagcggtgaggcggtcgtcggagacctcgatcctctcggacttgaagaagcgggagaggagcacgggctgggaggccgcgtcgtcgttgcgctcggcggcgaggcgggtc

SEQ ID NO: 39859 - DNA, 523 bp, Setaria italica
  misc_feature (523)..(523): n is a, c, g, or t
  Peptide Sequence Number=SeqID_105833
cagggtaccttacttactaccaacgactacttagaatagaactactccaacagcaaccgtttgcctcatgtcacggacagcaaaacgaccaagaggagggtactcagagaaggtctccaccaccatgggcttggtgggaatcatcttcaccataccagcatcaccattcttcaggaacttgggctccttctcaagctccttaccggatcgtctgtcgatcttggtaatgagctcagcaaacttgacagcaatgtgggaggtgtggcagtccagcactggggcgtagccgttgccgatctgcccagggtggttcatgatgatgacctgggaggtgaagctggcagcctccttggcagggtcatccttggagttggaggccacggaaaccccacgcttgagatccttcacagcaacgttcttcacgttgaacccaacgttgtcaccaggaagggcctcctggagagcctcatggtgcatctcgactgacttcacctcagtagtcaggccagtgggaccaaaggtn

SEQ ID NO: 39860 - DNA, 267 bp, Setaria italica
  Peptide Sequence Number=SeqID_105834
tctacatgagtatgatgacgacctcggcttcgataggcgacgatgaccaccaggggttcgatgggacagtgttgctgtcgcatgtgcctgctgtggtgcttgtgtttgtggccatcatgcacatttgcgtcctgccgccatggggaccggatggagttcatctacacaccaagagtatagctaccttttcgagatggatttcctatgttttttaagctccaaagacgcagttcggcaccaaagtatggcagaggaagggaatgcacc

SEQ ID NO: 39861 - DNA, 325 bp, Setaria italica
  Peptide Sequence Number=SeqID_105835
atgcaaggctattttacttacatttgcactgcaagcacttcgacatgcctgtcaatttgaggaacatcttggaagcagaaggaaaaaattgtgcgctggaattgaagttgctcaatgaccgttacctactaatattcacagtcctacaaggtttttgacaacggaacaccgttgcatattgctcatttgcacctacgtttttaagaggccaggtgggctatagattgcaactagtattactacattagtcaagtatggaactaggaagaacattgaggtgtatgcacacagttctcttaatgattttccatcaaaggagttagac

SEQ ID NO: 39862 - DNA, 610 bp, Setaria italica
  Peptide Sequence Number=SeqID_105836
ttttttttttttgtaactagaacaagcatgaacacagatttgcatgtgacatgaaatctgacaagaaatttgtcaaaaaaataaaaccccagagcaattaaaaaatggcaaaacttctttacagatgattagatgaactgcatcacggagacacggatccaattttaggcaagccagagccagattccgtctcctactagagccacaggcccacagctagatctcccacacattgcagtagacggggcctccacatcctcaccttggactgctcacacattgcagtagatggagcctccagcctccacatcctcaccttggactgctcgctgctcatccagagcttgccgcggccgccgggagctccgctcagtttgctgcttgcccactcgccgccgctaagccaactctcttgagccttcctacaggtcttgctgcgagtcgtttcgacatcccctgcttcctttcaacaagatctccaggctccgcatcactttctacagcgctccttctgtgcatcctctgcatctagcccaagagcagccctcatagtctgaagctggttctccttccgtgccgcagcttggtggctctgagtgtctgtgaaccc

SEQ ID NO: 39863 - DNA, 779 bp, Setaria italica
  Peptide Sequence Number=SeqID_105837
cgttcttatttccgattgctctgatatttcaaatgatctaggtttgaaatctatcatatgctgacctcttacttctcagatccagaacaattgcatactactgcgacattttgtttcagttaacagtaatatacttttggtgtgttataggtcccatgtaataagcacacaaggacgaaactctcctacatctccgtcttcttgattgcaagatcatagtctatatctaaaacttacacccatgcttacccttcctacaggtcttgctgcgagtcgtttcgacatcccctgcttcctttcaacaagatctccaggctccgcatcactttctacagcgctccttctgtgcatcctctgcatctagcccaagagcagccctcatagtctgaagctggttctccttccgtgccgcagcttggtggctctgagtgtctgtgaaccctttgccctgggaacgaggcccaccttcctccgccgccgcctcgatctcggcggccttgcgcgcctccccgacgcgctcctcgatctgggcctccgtgtacccatgctcctcgagcgcgtccctcagcacgagcagccgcagctccacctgccgcttccggtcgtgctccaggatgtccttgttgggcttccgcgtcctctcgaggacggagccggtgtgcggagggttgggggtcccgtagccgccagccgcggcggcggcggaggaagagggccggggcttcggcgaggaacttgctcgcctggacgtgcccgctcgtgcccggacccccgcgggg

SEQ ID NO: 39864 - DNA, 253 bp, Setaria italica
  Peptide Sequence Number=SeqID_105838
gcccatttttttaatattatcaatgttgatccaatgtttgacttaaaaacaatataagcacataaaagtttttgcaagaatgtcatgactcaggtattacagatattcaggataagttacagggaaaatatgttaagcaggcaaaaggtagccagtgcacctcactcaatttcaatttgttgaggtgcatcattttgatctgcctcacttgattcttcagagctgttttcctcagctattccagaagcctcca

SEQ ID NO: 39865 - DNA, 377 bp, Setaria italica
  Peptide Sequence Number=SeqID_105839
atctggcaatccttgatcttggaggtaatatgctacatggcaagattccaaattctataggtcagctcaagagattagaggagctccatttggagaacaacaacatgactggggagctgccatcaactctgagcaattgcacaaatatcataacgattgacctcaagggcaacaacttcagtggagagcttcagaaagtcaacttctccaacctgagcaatctagaagtattggatcttctatacaacaacttcactggaacaattccggaaagcatttactcatgcagcaacttgattgcattgcggctatctggcaacaacttacatatgcagctttcaccgagaataggcaatttgaagtctcttgtttcctgg

SEQ ID NO: 39866 - DNA, 446 bp, Setaria italica
  Peptide Sequence Number=SeqID_105840
acacggcgtgcaaggctaccaatatagcttgactgattcctctcttgtaagtttctaattctggcacctgcagagacttcggttctaagagtgcctaaaggggaggaagcaactagctcattgtatattgcttttgtgggtcgatgctttgcgatctgggtcaggacgcgccgccacgccatgggcccgaatccctagccctgcgccgcccggaccgacgagatcccgaggaagaagcgcccacgcgggcggaggtttggggggattgggcggtcggggcggacggacgattcccacgggaacgaggctccgagccgcgcggaggcgaaggcaggattaggcggcggcggtggcggcgcggttgaagcggcagcgggagggttggatggaggcggcggcggcccaggtcacgcgcgagcaggggaggttggaaggaagaagtgaag

SEQ ID NO: 39867 - DNA, 2550 bp, Setaria italica
  Peptide Sequence Number=SeqID_105841
ttttttttttttttttttagttcatcagagaagctgagaaattgactcatcagctaccagttaccacatttgtattcaagcacacaggataccttattcagaatgtgttacaatttatgctctgtaggtacataaggcaggcggatcaaaggctaacaattattaggttctaaacaacagaaatcattttggatgtgggtacaaaactgattcgagcaccagctaaatgtgcctactacaatgtgtaaagtcttgttttgccctcgaggcacatgaacagtagcttacacacaatcagtattttctattgctgcagcagtttagcatatcctgatgatcctcttgatcgtcaattgctggaacatcttactagtttggtgaaatatacacaatgcaaactggtgggtgctccatgcactaagatccgataccagccacccccttggctttggctgccgcctgctgtgcagctgcagcagctgcagctgctgccgcagcagctgatgcagctggtgatgcaggggaagctggtgcggctggggtcttctgtggtgcttcaatagcatgctcctgttgctgcttgttatttacctgggccaatatgttctttatctgggctccagtgagggtctcatgttcaagaagtgcgttggctagagcatggagctccttattgtgtttcgtaagaatagtctttgcattattgtatgcattctccaagaaattcttcacctcctgctcaatcaaaagtcttgtttctgagctcatgctctttccatcatcttcgtagttgtaagagacaaggccgacttgcttgctcatgccatatttagtaaccatagctcttgccgttgcagttgcttgctggaagtcagatgacgcaccagatgtcacttcagtatctccaaatataagctcctctgccacacgccctcccatgcagacatccaagtttgccagcatctgtttccttgacacactagtctcatctttttcagggagttgggccaccattcctagggccatccccctgggtactatggtagctttgtggacagggtgagctccgtctgtgtggatggcaacaagggcatgccctccttcatgatatgccgtcaactttctgcattcatcagaaataactgctgacttacgctcactacccatcatgattcggtcctttgcatattcaagatcattcattgtgacagcttttgcaccatccatggcagccttgagagcagcaacatttaccaagttagcaaggtcagcaccagagaatcccggtgttcccctggcaatgatcatcaagtccacatcatcacccttcaagacctttgacatgtgggaatctagaatttgccgccggccctcaacatctgggttgggaacaacaatatgacggtcaaaacgcccaggtctgactagggccttatctagtgattcagggaagttggttgcagcaatgacaattatcccctcgttctgcttaaagccatctaactcgacaagcaactgattcaaggtcatcttcatatattgttgatccttaggattcctgctcccaccaattgcatcaatttcatcaatgaatattatacaaggagatcgcttttttgctgcagcaaaaaggtcgcgcactcttcgagctccaactcccacaaacatctcctcaaactcacttccgctgcatgagaagaaaggaacaccagcttcaccagcaatagcccttgctagcatggttttgccagtgccgggagggccaacaagcaagacacctttcggaagttttccaccaagacgtgtgaagcgcttgggatctcgaagataatgaactatttcctcaagttcagatttggcttcatcaacaccctttacatcactgaacttcgtattagactctatgcttggttggacctcttcattcagaccaaggcctttgctgattcctctatcctcgatgagagccccgatgcccgaaataagaaggaaagttagtgcaatgcttcggaaggtacgccaaagctgatctttaaattgacctgtttctgctgtaaccatgtgaataggtgcatttgcagtgccaagaactccatcttttgttgcttgaccagcaccaattaatgctggaatgctgccaaagctttcttccccccttgttgaagcagcaacacctctctgtaatgttttaagcaaggtgctctcatccagcctatcaacccttacaagagctttcacatactccgaaagtgctgcaggattggaatggagcgaaggttgactttcaaatatttgtatgacacgctctgggtcacttctgtaaatctctttaagcagagaagtttcgcttggtgcatctaggtcccgcacacggcgtgcaaggctaccaatatagcttgactgattcctctcttgtaagtttctaattctggcacctgcagagacttcggttctaagagtgcctaaaggggaactaaagaataccgaataaccaagaccaacccccttaggactttaggactagaccgacctagactagtagacaagaca

SEQ ID NO: 39868 - DNA, 608 bp, Setaria italica
  Peptide Sequence Number=SeqID_105842
atcggcaacggcgatcagcattttgccatatcctcatcccggctgtcagccacttgagcaattcatccaaacatcaacagcaagaacaatcatcagcaaaccacaccaaagtgaatccttcaagaaacatcctctttctacttccaagaatatctccttttgatgtcatccaaggacacatttcagacatcaataatggactgaagcacatgcatccgaagattgaaaactgaatagcagcaccaaaacagcagcatgcaaattgcaaggagtagcagaaacattaatatgatctttcagcactttgaccccatcctagcaccataggagttggtgaacctctcttgtatatgtctgctttcttgcttggaaaggatcattgccttccagagtccacacaggatgtcattgggatggatacttcatatcattacagtagttcaatatgtatcctctagccggacgcaccatcgcatcagaccgctgccctccccagtggtcgccggctcgccgcgcggtaatgagcggactgattggggcggagaagattgggccgcggctggggtttgtcccgtggacctgcggcctctgcctcgcaagtagcaacg

SEQ ID NO: 39869 - DNA, 367 bp, Setaria italica
  Peptide Sequence Number=SeqID_105843
ctatcggcaacggcgatcagcattttgccatatcctcatcccggctgtcagccacttgagcaattcatccaaacatcaacagcaagaacaatcatcagcaaaccacaccaaagtgaatccttcaagaaacatcctctttctacttccaagaatatctccttttgatgtcatccaaggacacatttcagacatcaataatggactgaagcacatgcatccgaagattgaaactatatgcaagttaaagagaaacatcaataacaatgcctccacaaatatttacatggaaggccccgcaaacatctcagcaagaacaaagcatcaattatcagtttcatttttcgcgacaagcataaaagcaatcaca

SEQ ID NO: 39870 - DNA, 684 bp, Setaria italica
  Peptide Sequence Number=SeqID_105844
catggagatttaaagccaagcaacattctcttggacttgaacttgcatcccaagatttctgattttggcttggcgagaacatatagtccaggtgtagaggaagagtttgccgaccgcatagtaggatcaattggtttcaccgctccagaatgtagggaaagacgtattttctcaatcaaatcagatgtgtatggcttcggagcattgcttctcgagatagtaagtggacgcagatgcttttcacttgcaagtggagaatctggagatgatcatggatttctgaataggaaggcctggcgtttatggagagcaggaagattgatcaagcttttccattcacccctaggcaatgaatctgagaggacagagatactaagatgcatccagatagcactgctgtgcgtcgaagaggaccctgcaaaccggcctacaatgcaggaggttgctctgatgctcagctgccacgatgttgcactgcctatgcctcagcgaccagcttacctaacggttggaaaggcgcgcgcccactaataggcagacatctgatgggataaattcgcaagtttttcagtttaccgaagtgtatgcatagctttgtttcatgcttatgaacatttttgaagacccctggaaatcctcaatttttttgtccaattgagagagaaagattcctagattacgttt

SEQ ID NO: 39871 - DNA, 696 bp, Setaria italica
  misc_feature (641)..(696): n is a, c, g, or t
  Peptide Sequence Number=SeqID_105845
taagtcttagtaaagagttgctgcacgctgggcccgggcaacttcagcggcgacgagctcctgtcgtggtgcctgcgccggccgttcatggagcggctgccggcgtcgtcgtcgacgctggcgacgctcgagagcaccgaggcgttcgggctcgacgccgccgacgtcaagtacgtgacgcagcacttccggtataccttcaccaacgacagggtgcggcggagcgcgcgatactactcgcccgggtggcgcacgtgggcggccgtggccgtgcagctcgcgtggcggaggtacaggcaccgcaagacgctcacgtcgctctccttcatccgcccgcggcggccgctgtcgaggtgctcgtcgctgggggaggagaagctcaggctctacaccgcgctgctcacctcgcccaagcccaaccaggacgatctgctgtgagtgacagagatgcgcgcatgcgtgacaggaacggccgcgtgtgcactactcgtaagtgaatgtgagattgaactcgagccttggagatggagctccaggtgcactgctttaatggctttacacatggcccgtgatgtgtggttaacactattaaatcctatttactaagcatgcgcagcaacttaagaggacctaaaaaaaannnnnnnnnnnnnnnnnnnnnnnnnnnnnnnnnnnnnnnnnnnnnnnnnnnnnnnn

SEQ ID NO: 39872 - DNA, 507 bp, Setaria italica
  Peptide Sequence Number=SeqID_105846
tacgaccgcctgctttacaaatttattaaattaattagcaatagcagtagaatgttcctgagctgaattaaaaagcattgatgtttgcatcctaaatcataaagccatttaaaaatggaaataaggaacacttttctgcatttctccaaagagtaggaacataaataagacaataaattattgaattccacataagtaagcttgactctgactttaggataggcaaggtgaatgcttttggagtttcattagtttaagaaagtcaactaagtcaaaatgcccattggtaaaagattattatgtacatgtgacaataatctcaacctgaatttttatccagcttgccctccattcaaacagatttcaaataagtaacattaaagttcaattctacccccagcctaaatctggaaattacgtatgaaatttagaccaatcagcaagccacaaagaattatataataacccacatgagtacatgtagaaaagtcctaataatcctattct

SEQ ID NO: 39873 - DNA, 861 bp, Setaria italica
  Peptide Sequence Number=SeqID_105847
taaacgaaaaaataaaggtaaaagaaaaataaagaaaacaaactttaaactaaggaaaacaacttaccaataccacttgaccgttagttgctcaaggacctcgagctcgtggatgcccatttatcagagatcgaggacttggaggctatcgtccgtgggtcgcccttgcttgatgctctcatgctatctgatgcatatatccttaacaacgagctggcgggttgcgtgattgaggcgcccaatctccgtagcctgacaatcatttcggtggttgtttatggctggcaatttgggggctgccgcgtctcgacaacgctaccattgatttggacacctatatgtacgagggtgatttgggagaattccttgccggagttgctcatgctaggaagctcactctcacaacattctacctaccgaaaatgggtgatgacactttactggaaacacttccatacaaatttttcaatctaaggagcttgtttctttgcacccacttttgtggattgtattccattttagcaaccttctgcttgctaaggaatgctcctagccttgaagaactggaaataacgattaatggggatcaagagcaggaaactgaagcaaacacagaattccagaatatacaatggacaaatgggatgtgtggcagccttcaggttgtgacgataaatgacatttcctgtttgtcaaatgagatgtgctttataaaactggtcttatctaaagcaacatcgctttcgaacaatgtctattattcttgatgatgaattctcaaggtctaatgaaaatatactaagcgagtttaaataccaatagaagagcttcacctcatgccccaagtctttttgcaaaggt

SEQ ID NO: 39874 - DNA, 1223 bp, Setaria italica
  Peptide Sequence Number=SeqID_105848
cccgcccgaccgccccctcctccctctttcgttctttcccagtctcccgtcccccgtctcccctcccccaatcaccagccgccgcttcctccacgcgccgcgcacgcagctgacctagcagagaagcatcccgagatggcgatggccctgcgccgcctcgcgggcgtgtccggatcgccgtcggccgccgcggccgcgctgctcctccggccggcgctgacccgcccgatctccaccggcttccgcgaggagcgcgacaccttcggccccatccaggtccccaatgacaagctgtggggcgcgcagacgcagaggtcgctgcagaacttcgacattggcggcgagcgcgagcggatgcccgtgcccatcatccgcgcctttggtgtgctcaaaaagtgcgccgctaaggtgaatatggagtatggccttgatccaacaataggcaaggcaataatgcaggcagctgaggaggtcgcagagggaaagttggatgatcacttcccacttgttatctggcaaactggcagtggcacacaaagcaacatgaatgccaatgaggttattgcaaatagggcagctgagattcttggacacaagcgtggtggcaagtttgtacaccctaatgaccatgtgaataggtcacaatcctcgaatgatacatttcccactgttatgcatatagcagcagctgttgagatcaattcaaagtttatcccaagtttgcaacagttgcatgattcacttcacgcaaagtctgttgagtttattgacataattaaaatcggacgtacacatacccaagatgccaccccgttgactcttggccaagaattcagtggctacactacacaggtcaaatatggaattgaccgaattaattgtacattacctcggatgtaccagcttgctcaaggtggaactgcagttggaactggcttgaacactaagaaaggatttgatgtcaaaattgccgccgcagtggctgaagaaacaaatctaccctttgtgacagcagagaacaagtttgaagctttggcagcacatgatgcttttgttgagagcagtggtgctgtgaacacaatatctgcatcccttatgaagatagcaaacgacatacgcttgctgggaagtggccctcgctgcggacttggtgaactaatcctgccagaaaatgagcctgggagcagcattatgcctggaaaagttaatccaacacagtgtga

SEQ ID NO: 39875 - DNA, 484 bp, Setaria italica
  Peptide Sequence Number=SeqID_105849
tactacgtctattacccaatgtctttagctatcaagatcataggactgggacaagaaggttccttgtgtctacatacgacgagttctggagaaggtacaatgatatggattccaagattcgccatcactacgaagttatccaggagggttcaccttgccacatttactttgatcttgagtttgatacaagattgaacaagaagagagatgcagatgaaatggtcgatatattggttgctgttatatttagtgccttacacgataaatactctattgaagcacaagaagagtggatcacagagttagactcatctactgaagagaagttttcacgccatctaatcattcgtatacccaatactgcattcaaagacaactcccatgttggtgcatttgtctctgaggtctgttcacaaattgcagctcagcgtgcagccaatcctaaccttgataaactgtatattaccaaagagagtagctacgg

SEQ ID NO: 39876 - DNA, 722 bp, Setaria italica
  Peptide Sequence Number=SeqID_105850
ggcagtgcaacacaatgtacaaaatcaagacgcaagtccgcatccgaccggatggatggacggcaaaatgccacggtgaagcacgcgacgatggcagagagaatcgccagcggatcggactcgcccgtctcgatcgatctcgaccgctcagccgcggcacctgtcgatggcgctacagccgcgggtgtagcggttggccacggggttcgggcttctggcgtcgtcctgccggctctcttctcgcagttgccgagcaccttgcagctgatcatcttgctcgggtacgtgatccactccgcggcctcgacttcctggggccccgctaacagcagcaggcacagcgttaccgccaccacggctagcctcgccgtcgagttcaccttctccatactgatgagctctcgtcttacaacggagaagatgtatggagaggtgttctttttatttgtctttgtctttttttttcttaatataaggcgactctttgttgaggtaggagagaccaagattttgtaggggcaggctgcctaaaatgtttgtggacgagagcggaattagggtctgagaaacgcctaggcttctatttttgaaggtagtttttactcgttttggaattgggacaggctcgtggtccaattctgagtttaggttttccttctatgagctagagagagtaaatacttaattataggtgcacagctaatataatgtacttagaatct

SEQ ID NO: 39877 - DNA, 295 bp, Setaria italica
  Peptide Sequence Number=SeqID_105851
gagaagacgagcgaagagaatgtgcagctaaagcagtcacttgatgaaaaaacaaaagccttagatcttcttattcaagagcaccaggcagttaaagctgaacttgaacaggcattaacaaaacttaaagctgcagaggatgagaaccagagtctgattgatcgatggatgctagagaagatgaaggatgcggaggctcaacgagctccaataagctgttcgtctgggaagtcaatggggggcgtcctcgtcacactctgactggtcacacaaaaaatgtttcttactgacttag

SEQ ID NO: 39878 - DNA, 1354 bp, Setaria italica
  Peptide Sequence Number=SeqID_105852
gtgcagctaaagcagtcacttgatagaaaaaacaaagccttagatcttcttattcaagagcaccaggcagttaaagctgaacttgaacaggcattaacaaaacttaaagctgcagaggatgagaaccagagtctgattgatcgatggatgctagagaagatgaaggatgcggagaggctcaacgaggccaattcaatgtatgaggagatggttctaaagctaaagacagctggagttggtgctatacaacacaatgcacagcaagaagctgatggcatcatacggcgttctgaaggcggttatatggaaacaccaatcccatcaacgtgcacaatcaccattcgtgctcatgatggtggatgtggatctttgatgtttgagcataattcagacaagctaattagtggcggtcaggatcaaactgttaagatatggggtgcatatactggtgccttgacctccactctacatggtgtattgggatctgttaatgatcttgctgtgaccaatgataacaagtttgtggttgctgcctgtagctccaataagctgttcgtctgggaagtcaatggggggcgtcctcgtcacactctgactggtcacacaaaaaatgtttcttctgttgatgcaagctgggtgaagagctttgttgttgctagttcatccaatgatcgtactatcaagatttgggatctccagacaggtttctgcaaaagcaccataatgtcagcaagcaaccccaactcactagctttcattgatggtgacatcatttgttcgggtcatagggatggaaatctccggctatgggacatccgtagtgggaagtgcactacacagatagctgctcatcttgatgtcacctcggtctgcgtgtcgcggagcaaaaattttattcttacaagtgggagagataatgtgcacaacctttttgatgttagaacattggaggtttgtggaacattcagggccacaggtaacagagtggtgggcagctggggcaaaccttgcataagccctgatgaaaattgcattgctgctggttcttctgatggttctgtttacatatggtcaagactgaagaatgacacgccaaccatcctacaggagcattcttcatcggttcttgcaagtgcatggtgtgggctaggaccccttgccacctcagacagaaatcatatttatatttggtcttgagatatctacatttttattaatgatccaatccaagactggaggctttcacttcagtatgctaatattagctttcctccttactgataacactagctttcatgtgaatggcctagctggtttctgaacgttgtaaatatcaaaattgacagttcaccac

SEQ ID NO: 39879 - DNA, 477 bp, Setaria italica
  Peptide Sequence Number=SeqID_105853
gtcattaattgagattttctacgaaaggcatcttgactatttggttgatgtaatagcatcctcttgtccccctcgatcaacagctaactccgttggtgctggtagaaatgctgaaggacaccgtatcaaacctgagattttgttaaatgtttgcgagctgctgtgcttttgtgtagttcatcatccctacaaaattaagtgcaattttcttatgaacaatgctattgagaaaatccttgcattgactcgacggagggagaagtttttggtcgtagcagctgttaggtttatgcgtactattatatccagaaattttcaaatctgcagaaatgctattaccaggcgcagttgcctttatgcataacaacttcctgcaaagaagtgcttctaggtgctatcagcaggatactagctcttcctctttaatctgagcagttgagcagaccatgattgcctgaacttactgctcattcctga

SEQ ID NO: 39880 - DNA, 659 bp, Setaria italica
  Peptide Sequence Number=SeqID_105854
atcctttgcacataggctcccttgtccttacgattagatgatctgcctgttgtcctcacaattactggaatctggattgaaagtggaatgctttgcatcttgcttggtgacactgctaacagtgtttctggtattttgcaggttctgttcttgcatgaattttgcactcttagtaagagcttaccacttgttcagcagttgcgattgtttcggtaggcccttcaatttcgttctcttttctttctactgtaaaggcataacataacacaacacggccatggtattgtatcagttctccaaatgtgcaaatgcatggcgtaggctatctgtactacaaaaatgaaaagaaatacaaccatataataccagtgtgctgagcttggtgttgtcattgttttcactacctggcaatctcactatcgtttgacttcagatttgctgaggatatcttgtcataggtatatcaggggttatcattcagatttcatgtgttcattaccttgtctcgtggtgcacaacatggttaatagatgcatacaaccaacccaatgtaccttacagattcgaagactattctgctgctattcagataactgtggactctatttgcttgctgtaattattagttgcacgccatgagctaaccacctacttttctt

SEQ ID NO: 39881 - DNA, 801 bp, Setaria italica
  Peptide Sequence Number=SeqID_105855
gtaaacaataacgaacacgcgcaacgcaaaaataattggcgaaaaccggaggggtaaaaggggaaaggcgacggccgcctggaggagcgagagggcggaagagagaagggggagcggcagcctctcagctcgttgatggtggttagggtttcgccgcccgcgccctcgacccgctgaagaaccacaaccggcggcggaagaggttccagcgtcgctcgccctgcgaggctccgggggaagaggcggcaggcagcggcgcgcggctcggctcggctcgatggcggagcacgagcggagggacgcggaggcggggggcgacgccgcggcggcgacgcacacgagcaacatgcagcgtgtcaaagtataccgtttggctgatggtgggaaatgggatgatcaaggaacagggcatgtttctattgagtacattgaggtatcgaaagaattctgtgctaatatgggtgatatgtactatttcttttatatggctctgttaagcttaatccaccactttatcaacacctccgtttatttaatagtgcccaaagatttgtttgcctcttaatctactagtttgttaccttgttgcaacatgtttggctacctcatgctgtttctacagatacaaacttttcgacaacttatgtttttcaatgacacaattttctgatcacaatgctttgtgtaaggccaagtttttgaattgaaaccaattaccctagtatcatgtttttatgaagtagattacagttgcatcttttatggtaatatactgtgatactccaccataatttaaaaacc

SEQ ID NO: 39882 - DNA, 1048 bp, Setaria italica
  Peptide Sequence Number=SeqID_105856
atcctcttgtccccctcgatcaacagctaactccgttggtgctggtagaaatgctgaaggacaccgtatcaaacctgagattttgttaaatgtttgcgagctgctgtgcttttgtgtagttcatcatccctacaaaattaagtgcaattttcttatgaacaatgctattgagaaaatccttgcattgactcgacggagggagaagtttttggtcgtagcagctgttaggtttatgcgtactattatatccagaaatgtaagtattatggatttttaacttatttacatcgttagaaaattcccttgaagttagcactactgtcatggttgatatgtattcaatatttatcaatgtatcatacctcttactgatctcactttatggtctagcaatttcactaatgatgtgctattacaagtttcaaatctgcagaaatgctattaccaggcgcagttgcctttatgcataacaacttcctgcaaagaagtgcttctaggtgctatcagcaggatactagctcttcctctttaatctgagcagttgagcagaccatgattgcctgaacttactgctcattcctgaattaaaccagaccccagtatttgtcttttttataactttattcgttggattctcagcacaattaacccagtcatatatatcttcacttgtgcttactacaatccagagatatgactagaaaacaatccttgttgcttgtgataaattaaacaagcacctaactatcatattcgtatcccacttgatatagtgtatattttgtaggatgagcatcttattcgccatgttgtgaagttcaacttgttgaaaccaataattgatgcgtttgttgaaaatggggataaatacaacatgctacattcaggagtactcgaactgttggaatacatacgaaaggaaaatataaaagctcttgttatctatgtcattgagtctttctgggatcaacttgcaaagtttgaacactttgggagtattcaggccttcaaactcaagtatcaacagtacctggagagtgctgaaccc

SEQ ID NO: 39883 - DNA, 3376 bp, Setaria italica
  Peptide Sequence Number=SeqID_105857
gaggaggatgggatcgagcggcggcgcggggagattggaggatttggggggatgggaaattggaatgatcaaggaacagggcatgtttctattgagtacattgagggttcgaaagaacttggtttgactgttctggatgaggaggacaatgagacgctacttgtgcacaacattacatctgatgatatttacagaaaacaagaagaaactatcatttcatggagggatcatgaagcagcaacagatttagcactaagcttccaggaagctgcaggatgctcctacatatgggaaaacatatgtgacattcagagaaacctacagttcagtaaccttggtgctctggaagttggtcctcgtcaatcgtcagaatctctagaagcctctagaataatgcactcaaatgatgattcgttccgctctgctaacggtgaattcagggagcttccccctgttgagttatctaatcttcctttcattctaaagactgtattggagggcggcattacggatcagattcgcgtggcagagttgataacacaagatcgtgactttttcccaaagctagtggatattttcagaacgtgcgaggatttagagagcttagatgatcttcacatgattttcaaattagtcaagggaataatattgttgaacagtccatcgatctttgacaagattttctctgatgagcttattcttgacataataggtgcccttgaatatgacccagaggttccacgagtgcaaaagcaccgtgcttttctaaaggatcatgtagttttcaaagaggccatacatattgaaaatgtttctgtggtttcgaagatacatcaaacatacagaataggctatcttaaggatgttatactaccacgaatattggatgatgccactctagcaagtctgaacacaatgattcatacaaataatgcttctgttatttccttactaaaggatgatgctctttttatcagacaactatttgctaggatgagatcatcagatatttctatggaatcgaaacgggaattggttctgttcttgcatgaattttgcactcttagtaagagcttaccacttgttcagcagttgcgattgtttcgggatctttcaggcgaaggcgtttttgaaataatttctgatgttttgcaaagtcatgatagaagaattgtttcagctgggatagatatccttatactttttcttaatcaggaccctaacctattgaggtcatatattgtccagcaagaaggaaattctcttctaggacttctggttaaaggcatggtaactgagctcggtgaggaaatgcattgtcagtttctagaaatccttcgaatactgatggattctttcactatgtctggagcacatagagacgtcattattgagattttctacgaaaggcatcttgactatttggttgatgtaatagcatcctcttgtccccctcgatcaacagctaactccgttggtgctggtagaaatgctgaaggacaccgtatcaaacctgagattttgttaaatgtttgcgagctgctgtgcttttgtgtagttcatcatccctacaaaattaagtgcaattttcttatgaacaatgctattgagaaaatccttgcattgactcgacggagggagaagtttttggtcgtagcagctgttaggtttatgcgtactattatatccagaaatgatgagcatcttattcgccatgttgtgaagttcaacttgttgaaaccaataattgatgcgtttgttgaaaatggggataaatacaacatgctacattcaggagtactcgaactgttggaatacatacgaaaggaaaatataaaagctcttgttatctatgtcattgagtctttctgggatcaacttgcaaagtttgaacactttgggagtattcaggccttcaaactcaagtatcaacagtacctggagagtgctgaacccaggttgagtgctagtgtgcctgacatgagaaagaaggcagaacaaagaggtcttgagaaggaagaggaagactacttcaatgaggacagtgatgaagaagattcaggctctggccggcgggctaaacatgcacagaaccagcatagcaaggctaaggtgcccaatggaagtgaagctgataacgttgaaggtgcctctaggcctaaatctgccggacttgtggactatgacgatgatgatgatgaggaattcaatccaccaccaaaggagcctgctaggccttcggaggatgatgtgcccttaaatatagccacagtgaaacggagaccagtgaatgcggtggatgggaaacatgcagatggggaggttcgcaagaggcaaaaaatagaaaccagaattagttgtgctaaaattgctgctgtcactagtacatctagtaagcacacagatctacagaacaaacatgctccacactcgcctgcatcaagcacgccaagtactgaagccaatggtgttcttagggagcatggcacaaactctgaggagcatcaacattctgtagagaatgcagaagcttcctgtcaagctggaggtgattgtataaaagatgttggcagtatgtctaccgagaaggctgtaaataccacgaacccaagtgattcggagccttattcagtaagatgacaacttctccaaagctggtttgtcctgtatccaatccatccgctggccgacaggtaggaatcggaatgtgtttagctccaaaggctgaatccatcgatcagagctggaagcatggttggaggtgacataggttgcacctaccttagtatctgaagtaaaatcccagctgtcctttttgagcatgtaaagttaattttctacaaggaaagatctgacaaacatgagaatccgaatgactgtcggttagaacattgaatgggccttgctcctgctgctgcgctcgctattgtatctctttatgaactaatggagtagcagggaatatgtgccttttctccattatttctctccacaatcattgactgagatgttactgttgtaaaacaagtaggaagaaatagttccggttgagcagcgtttttcgcaagagtttgtgctaactcacccaatatggttgtaatttgttgattcatagttttggctagacatgctgtcttggataaatatcttagccatgtgatagaataatttatgtagaatgttttcttcttttagcttagatgtgcttatgctcatttggcaaaacatatgcgggactgtagtaaggtagcatttgaaaagtgcattgagatgcattgggaggaaaaaatggataccatgtttgcttgtgatttgttcgttttctaagtcttggtaggttgtatttgttattaaaagtattgtttggtctagtata

SEQ ID NO: 39884 - DNA, 369 bp, Setaria italica
  Peptide Sequence Number=SeqID_105858
ccgataacagcaagcagtaaccaccatcaccaccaggaccataattctgagtctcactaccttgcaagagcaatccaataaacatgattgcatgcagacagtttgtgaagaacctgaaatggcttttgacaagaacagactgtaactgaagtaagaaacatcattgagtggtatcagctggtgctcatgtgcatggttgcaggaaatgtttgatacgggtatgcacccagaacctggaagccgatcattttggaacctaaaatggctgaaactaggacaagaacattgtccattattacaaacaccataatcaccacaggccaatgggtaatcacagaagtccatgaccatgctcaatacattaaacaa

SEQ ID NO: 39885 - DNA, 326 bp, Setaria italica
  Peptide Sequence Number=SeqID_105859
tttttttcacatcaactgtccccaatgacatctttcttaatttcaacagtacaaactcaacaaatttaaatcagattgaagctcctcatacagagtatgtaacagcacccgtctatgctatcagtagagtagatcaggctgtcagcaaacagcagtgcacacaccttatcatcaacagatcagaaatgcagtatgccagtaaaaactcagacacacacacacacacacacacacacattgcacttatacacacatactactactcttggcaatctcatgagctatctgcctagattttacagctccgtagtcgttgagacatcaat

SEQ ID NO: 39886 - DNA, 309 bp, Setaria italica
  Peptide Sequence Number=SeqID_105860
cttactacatgaatggggttatatgagggagagtagtctcttactgcagctaacctgctacatgaatatttgaacccctgttgtgtgttccaattggatcaatgagccatatagatactcttatctgataaacagtctagcgggatgaagttgagactagctcatattaaatggcacctatatgtacttttttgagatacccaactatgtgtgctgctaaagcatacgtgaggcagtggaccatctacgagccattttatgaggtgataagtgtagcactgtacttgtgagttcattcagttttcctcc

SEQ ID NO: 39887 - DNA, 624 bp, Setaria italica
  Peptide Sequence Number=SeqID_105861
tcgttcttacgttcggtttcgttgcacgcggtcgtcaggatgcgcgccgtgtttcagtccctggatgtatcttccttgttgcgtgcgtgttgctgatcccaagtctggtgatgctcatgcttgggccggccaaggggtcctggatggagagggttggttccatgctttgtgacattggattgttccttcagtgtgttacgtactgcttcgtcaaattcccagcagttctggccgaactgagagctacctgtgcgaagctgaagcgcggaacgaccggactatattgatttcatgatccatgaatcatccaaggtctggcttgagtgggattttgctggtgtagaagagctccgtttttcttccatgtcagtgactggagctgcaagctatggtgattgctacatgctatcatagttctccagctggaaataaaccattgtggatgtatcataatctaggatgtaattaaggaggtgaaatatcacttctgttatgcagcagttcgtcagaactctgctatgctgtagtaggcgcatatatgcaattgtataaatacaaaatgtggtttgtgctaaaagattggtacatagtcgctacaaaaaaaaaaaaaaaaaaactaaagaa

SEQ ID NO: 39888 - DNA, 842 bp, Setaria italica
  Peptide Sequence Number=SeqID_105862
cgttcggcgaggtcgcgtcgagcggcgcgctcgcgccgccgccgccggccgccgggcagccggccctcagcgacgccgcgaaggcggcgttgatgtcggtgtcgttgtagatcctgccccggtagttctggcactgcgcctgccccatcgtgtgggctccagacagagcgaccatgtcggtgctgctcaggcctttcctggcgaacgcggcgagcagggtgctgaggctggacgccggagaggggaggtcggtgttcgcggtggagaggctcgccgtggtggagtccctcctgccgagcggcaccgtccacgatggccctccaagcgcgacgacagagtcacgagcggcgacggcgaggatgtcggcgcacgacacggtgcgcgggcacagcgcctccagcagggccttgatggtgtcgatgacgccgaaccccctcagcgaccccgcgttcgggcccgcgcccttctccccggtgaagttgcccgtgtcgtcgagcagaacggacgcgtcgcagccctgcacgaagcagtcgtggaagtggagccggagcagggagccggccgtgcgccggtccagcagcacggccgccctcacggcggtcttgatggtgacgagcgcggcggggcacgacgaggcgtagaacgtcggcgacagctgagcccgtgcggcggcgaccaccgtggccagcgccacgaacagtgagagcttggagtggcgaaagcgttggctgctgcgcgaagcagacatgaatgagcaagtaataaacccctgcagacagcagactgagcactcgctcctgaactcaaacgtgtctgcaagactgcgatgctttgagtttctt

SEQ ID NO: 39889 - DNA, 657 bp, Setaria italica
  Peptide Sequence Number=SeqID_105863
aaggatgtcctgtagatggcaaatcccatgagggcaggaatagaagaagaagagcacaggcgagtggagcaaaggttcatagcataagccttcacaagagctctgcaaagtttccaattgtttccatagaaccaccaggcaaagaagacacagaaatttcctaatccagcgaccattccaaaatttttcatgttctatctgcctcctgctcttttggtagtaatcatctttcttctttcctgaccaagaaagataatgctctcgatatgccgttctctcagcagacatggcagctaaaatcacaattgtgggtaataacacaaaacaaaagtgaggtagaacaatgaccatgacatctggaatcccagtatgtactacttcgttgccactgttgggtcttttaagaatccaacctctacgtgtcatgtatgtgagattatcatcctcagtaatagggtgaccaaatagccatggtaagaaaactaaatagatagtgtacaccaagagcaaaaaccacacaagaatcaccctggccagttcaacaaagagccagatgaaaccaccaactaaagacgttaacaatgtcctctgactaccatttgtgtatagagacttatatgtgaactgatctttgaataccacagctgaaacttgtgg

SEQ ID NO: 39890 - DNA, 639 bp, Setaria italica
  Peptide Sequence Number=SeqID_105864
ctgcttcctcgccggcgacagcgcgggcggcaacatcgcacaccacgtggcgcggtgctggacgacggccagcgccgccgcctctccgcctccctccaaccccatccgcctcgccggcatcatcctggtgcagccgtactttggcggcgaggagcggaccgaggcggagctgaggctggatggcaaggcgccggtggtgaccatgcggggctcggactgggcgtggagggcgttcctgccggagggcgccgaccgggaccacccggccgcgcacgtgaccgacgacaacgccgacctggcggagggattcccgccggtgatggtggtggtcggcgggctcgacccgctgcaggactggcagcggcggtacgccggcgtgctgcagcggaaggggaaggcggtgcgggtggtggagttccccgaggccattcacaccttcttcttgttccccgtgctccccgactgcggcaggctcgccacggagatgaaggctttcatggatgagagcaacgcgtccgagttggctgccagctgatcaccaattgcaatcggaatgcctgcctggttcttgtggcgaaattcgtgctcagagtagcgtatttgggatgaaatcatctcagctcgttccgttagtcgtaa

SEQ ID NO: 39891 - DNA, 204 bp, Setaria italica
  Peptide Sequence Number=SeqID_105865
cgtcagagaccaaggagaaggccatccccaaacttcttcttcatcttccccaagcacctcagggatgaaggagaaggccatccccaaacttcttcttcatcttccccaagcacctcagggatgaacttggcccgatctactccaacgccgccctacaccaacaagcagccccttgttcatgctctcattatcggtgacaattag

SEQ ID NO: 39892 - DNA, 632 bp, Setaria italica
  misc_feature (1)..(61): n is a, c, g, or t
  Peptide Sequence Number=SeqID_105866
nnnnnnnnnnnnnnnnnnnnnnnnnnnnnnnnnnnnnnnnnnnnnnnnnnnnnnnnnnnnnattttcttggacagacgattaccagcagcagcgaacgtttaaaataaccagatttcaaaaactgaagtttaaactagaatgcagttcatccaaaagccaaagttgtacgttcgaaacagaggattaagagcaaaaaatatatacaatattaaccagctgagatatcattccagccatggcgacagccatttccaaattcggcagtcccaccgagctctcagtcgacggaaagaatctagtaaccatgatacgatgaggactagaagtggctcacaaactactctgcaattttgctaaccctgcaaaacttgcaatactccataaagcttgagtggaccaatattatattatataacacccagaaattaggatatttagtatgatgagcgctgacttgatgccagctttaaaatcttctgtcagttgataagaatcttgtcagaagtccaatggacctttacaaggcatatcacagtgaattcagggctcgtcgccatttttcaataccaagtgtccatcttcagtagaaatgcagatctcagtaacaacctgatggtactccctatcagta

SEQ ID NO: 39893 - DNA, 1095 bp, Setaria italica
  misc_feature (1)..(42): n is a, c, g, or t
  Peptide Sequence Number=SeqID_105867
nnnnnnnnnnnnnnnnnnnnnnnnnnnnnnnnnnnnnnnnnntttttttgaaggtggagctcaacttttttttgcctttagtcatgataaagtattgcagtctgcctgcctttttcagtactttatttacacctaggctgaaaacgaaatttagcaacataaaccattgttgcacgaaatgaacgagctctgccatgttcgtttgtgccgtcgtgcctgcttgatcagcgtccatcatcgcctacatgctacgacataaaccagtagacaacccaacacaaaacgagaggcaaacaaacaccctatctacacaacaccaacaagtacagacgaagtgccccgtcatactccatcgtcagcccagcagcatcgatcaaactagtggaaagctgaccaggcagccacgcgtcatagccgcgccgccacgtacgacaattccctggcttcaacaatccgtcgtatcctcccccgattcgcccggcgctacggctgcggccgccgcgtaatcgtcacgtctccgccgaagctcgcccacgagcttcctcagggcggcggcggcgcccgtgccgtcgcagcccatgaacacctcggcgatgtcggcgggcgtgatgcgcaccccggcggcgggtgcgagcaggtcctccgcctcggccatgaggtccctcaccgtgtctgggtcgtcgccggcgtcctcgcagccctcgtcgccgacgccgaggtagttcttggcgagcacgcgcagcgcggggggcgtgcagtagccgagctcgatcttgcggtccatgcggccggggcggagcagcgccgggtctaggcgctccgggtggttggtcgtgaacaccatcaggcgctcgccgacgcaggacgaccagaggccgtcgacgaagttgagcaccccggagaggcttatggattcccgccccaccaccgccatggccgccgcggcggcgggcgaaatcgcggcgagctgcgccgcggtctcgtcgtcggcgccgttattgccgttcttgttcttcttgttgcggtcagagaggtcgagggagcagtcgatgtcctcgacgacgacgacggactttggcgtggtggagacgagcg

SEQ ID NO: 39894 - DNA, 544 bp, Setaria italica
  Peptide Sequence Number=SeqID_105868
agataaagatgtagcagtgcatatatatgaggtagagagatagaccggccatcccatccctcttgccaccggttccctcctctgcagccaccaaagccctgcttcccggaggccagagctgcaacgatcatggcggccgtcccggtgtacagcatcacgagggcggagatcgacgagttctggaggaggaaggaggtggaagaggaggagcgccgcctcgctgccgacaaggaggctgcaagaatcaaagccaaggcgctcaagatggaagactatgtgctcttcgagcagatgatcagggagatcctcgaggaggggaacacaggaggtggggcaaccatggggccggctgctgccggtagcactgaggcacggatcattggcatcaaacactggtggacaagaagtgcttatgcttatctgaatgcgcctgcactgtccatggatgaaaacggtggaagcaagcatgctatcacatatattccgcaggagagatgcaccatgttcttcgcatcaactccatgtcagccaaattccatgcttg

SEQ ID NO: 39895 - DNA, 659 bp, Setaria italica
  misc_feature (75)..(75): n is a, c, g, or t
  Peptide Sequence Number=SeqID_105869
cgaatgcaaatcaactagactaaggaaccaagagtcaatacgctacgtagatacacaatttagtaatgtatgttntaaaaatgtttctgatgatgcagtaccaacatggctatttcagaagatcaatttatcacacggttccatgcttatattatagtgcttacgtcctaggagaagaatcttacatatccaagtgcatatggatatgacagaccaccttcttcttccactgggtgcaggtggacaagaagtgcttatgcttatctgaatgcgcctgcactgtccatggatgaaaacggtggaagcaagcatgctatcacatatattccgcaggagagatgcaccatgttcttcgcatcaactccatgtcagccaaattccactgcttgtgcgatcttttaggcgttcatgccagggaaatgctgggaatgttgggaaatcaggaaagatggatgtgattatgtgtcggttatactttgggtcgaataagttgcacatattgttaacaatttggtgtttaattgtataatatctgtcttccagtactacttaccagatcatgtaacaaatattgataaccatgttgcttcacatataaagtaagatcgctgctaatgagaaattgtctaaacagcgttgcttgccgctaaaaaaaaaaa

SEQ ID NO: 39896 - DNA, 541 bp, Setaria italica
  Peptide Sequence Number=SeqID_105870
gtcagccacaatacatatcctaaatcctaattatttctcatgcctatgctgataaaaataggacttgtcttttccaggaagatagtgaaactggactcatctcttgcccttcttgaagcaaagctccacagtattgatgaaaatattgctctgggacacccaacaagccaaaaggcacagcaatcttcgtcggatgagaaaaatttttgttcggaaaaatttagtgggtgaatcctctaggtctggtgattcgtgactaagctatgctgacaggaaacactaggaattgcgaagagtcagacttgttcagcccagctttgggaaatggcagttctacatgatgtcaatgtaccatatacgggtgtcgaggacaaacaaatgcgccagagctaatgaagttgaaatactactcacacgcagatagtttatgctcgttcaaaggtcgaaacagttgggttttggtcaacttcaactcgtgctctccagatgtggttgtgtatgtcctggacgtttttttttgccagggtgaaagggggagaac

SEQ ID NO: 39897 - DNA, 319 bp, Setaria italica
  Peptide Sequence Number=SeqID_105871
cctcacaaatcagcctggccacactcatctacagtctcatattaagaagtgatcaattgaacttttacaatactcaagcaagatttaattcagcaagccagcaggtatggatgccaccttggatttgctaagatttggatggaattttaaagacatgggccctcaaaatccatcaaagagttcacaatagtatagagcatcagagtttcacctcttgctcctggacaccaggggtggttccaaaaacatttctcattggcgtcactcctactgttacctagcacagcacgtctatgtataagcgttgttcgctattgac

SEQ ID NO: 39898 - DNA, 405 bp, Setaria italica
  Peptide Sequence Number=SeqID_105872
cacaacactcatttgtgcaatcctacaggcaacaacaagcttttgtgggaggcatttcacacttctcaaccgtgatcccgcaacatccatttgccatctcatatctgccatacctatacaaccagcttgccatttcacagctgccttacttgcacaaccaacttaccatcctacagctgccattttggtacaaccaactcgccatctcacagctgccatactagtacaaccaacttgttgcaaaccctgcagccttcttgccattcaaccaactagctgtgaggaacccgctgcattttggcaacaacccatcattggcggtgccttcttttagattaactatgagttatacttcagtaataaaggtttcatgctgaagcatgttgcttatttcaaataagcaac

SEQ ID NO: 39899 - DNA, 541 bp, Setaria italica
  Peptide Sequence Number=SeqID_105873
aagactagtttttagaattaagtggccggaaacctgactggtgagtgatggatgcgctgctctaacctgcgagtgatggttgtgctgagctaaccaattaaggcagtttggatgtgggctgtgcttgttgcttttctgctttagtagctttatggccttaccagctaaaggtcagtccgtttgggctctagcacgttgatacatgcacctaattaatacctgagtaaaaaattagatattcaaacaattttggtatgaccttctccaaactctgcaatatgaagccatgtgcttcacatcctagctgaatttcttgataacaaaagaagaaagttagcataagaataggcaaaagatactttaggcatctatctatcaggtgaagaacaacctgcaaaagggatatgtatatcaaggttggcagaatagttgatgaaaattttgcagatatctgcattgtctaatatctgggcatgtcttaatattcagtaaattgtatatgcatctcttcaaaagcaaagctagtgtagtgctaactacc

SEQ ID NO: 39900 - DNA, 236 bp, Setaria italica
  Peptide Sequence Number=SeqID_105874
tctcctcccctgtggtctcaatataccaaagtagcacttgctgagtaaaaaattagatattcaaacaattttggtatgaccttctccaaactctgcaatatgaagccatgtgcttcacatcctagctgaatttcattgatgattgatcgcccctgcgatagtagctaagccaaaagcagaaactggatgtattttgattccaggaaggtcatctatggcctcttcagcaactcaga

SEQ ID NO: 39901 - DNA, 505 bp, Setaria italica
  Peptide Sequence Number=SeqID_105875
tttttttttttttttttagttttaaaattacaatataatttaaaatattaaaattacatagatccttaacgatctacatagaggtgtaaattacagtaggattttcatatagctatttagcttatgatatgcttgctgacgatggcatttgagctgttttgattagtggccggaaacctgactggtgagtgatggatgcgctgctctaaccagctaaaggtcagtccgtttgggctctagcacgttgatacatgcacctaattaatacctgagtaaaaaattagatattcaaacaattttggtatgaccttctccaaactctgcaatatgaagccatgtgcttcacatcctagctgaatttcttgataacaaaagaagaaagttagcataagaataggcaaaagatactttaggcatctatctatcaggtgaagaacaacctgcaaaagggatatgtatatcaaggttggcagaatagttgatgaaaattttgcagatatctgca

SEQ ID NO: 39902 - DNA, 426 bp, Setaria italica
  Peptide Sequence Number=SeqID_105876
gttgtgaggcaatacgaatgtaacgcagagcattgaaccctacaaattcaactggagagattaaaaaatgtatccatgattctgaatttaggtgatcagactgcaacttatttggatcaattcagatatctcagtctcacctttcagatatctacatgatgttttcaatgtgaatagcaaacataacaccaaggaatcagggttaactgaccacacaccattgatgattgatcgcccctgcgatagtagctaagccaaaagcagaaactggatgtattttgattccaggaaggtcatctatggcctcttcagcaactcagcaccgtgcccagccagatgctacaataggcaggccaagggtgcttgtggactgcttcacgggcagcaactgttgcagctgacgactacgcacactgccatgcagtt

SEQ ID NO: 39903 - DNA, 1493 bp, Setaria italica
  Peptide Sequence Number=SeqID_105877
tactttcaaactttatgacaaatgtgcgcaaacacctaattatgaaaatagtaaatcggcatatttgtggcaaaataaataaatgcagttagcacttcgagcaaagaggtaagcataacatcatggaaaacatcatacagcagaaaaatccttaaaatgttgaccctttccttaacataaaggtacaattgacatttatgaaacaaactactggaatatatgggaatgattcatctcctccctgtggtctcaatataccaaagtagcacttgctgcaaaaagtgcagttccttttaggcaattagaaaatatgcaacaaacaccagaataactacggagtacaaacagggctgcatttactatcttagcgctaggttcatatcttgctgccacctcaacatttgctttgacaataattttaaacaacagtattttggttcttttaaataatgcagatgcagcttaaatgaagatgcatcatgtgcagtatgtagcatgggtacagggaggcaactcaaagaatacagacatgaaaagaggcaaggtatgagtaagccataaatatatcagaatcggagcatcacctgagtaaaaaattagatattcaaacaattttggtatgaccttctccaaactctgcaatatgaagccatgtgcttcacatcctagctgaatttcttgataacaaaagaagaaagttagcataagaataggcaaaagatactttaggcatctatctatcaggtgaagaacaacctgcaaaagggatatgtatatcaaggttggcagaatagttgatgaaaattttgcagatatctgcattgtctaatatctgggcatgtcttaatattcagtaaattgtatatgcatctcttcaaaagcaaagctagtgtagtgctaactaccacgaaaaagggcagcatgtaggaggcttaaccatctttctttcttgattccataagttgtgaggcaatacgaatgtaacgcagagcattgaaccctacaaattgatgattgatcgcccctgcgatagtagctaagccaaaagcagaaactggatgtattttgattccaggaaggtcatctatggcctcttcagcaactcagcaccgtgcccagccagatgctacaataggcaggccaagggtgcttgtggactgcttcacgggcagcaactgttgcagctgacgactacgcacacttcaggcttcaacgttgttccccagtcctaaatcaccagcacccatatcaacactgatgccaagcagggagtccaactgatccttgccgcactcatagcagcattcttctcagggaacccggccactaggcccatgccccccacagcacgcatctgaatcagctttcttatcaccaaatcgagcacttgcaatcaccgtatccaaccaccctccatcaaaacggaatacatactcacagaattgaactgtatatcaaccaaattttctcatttacgaaaaaaaatacatgtg

SEQ ID NO: 39904 - DNA, 909 bp, Setaria italica
  misc_feature (1)..(24): n is a, c, g, or t
  Peptide Sequence Number=SeqID_105878
nnnnnnnnnnnnnnnnnnnnnnnnacttattagatccttaacgatctacatagaggtgtaaattacagtaggattttcatatagctatttagcttatgatatgcttgctgacgtattggtcatttgagctgttttgattagtggccggaaacctgactggtgagtgatggatgcgctgctctaacctgcgagtgatggttgtgctgagctaaccaattaaggcagtttggatgtgggctgtgcttgttgcttttctgctttagtagctttatggccttaccagctaaaggtcagtccgtttgggctctagcacgttgatacatgcacctaattaatacctgagtaaaaaattagatattcaaacaattttggtatgaccttctccaaactctgcaatatgaagccatgtgcttcacatcctagctgaatttcacgaaaaagggcagcatgtaggaggcttaaccatctttctttcttgattccataagttgtgaggcaatacgaatgtaacgcagagcattgaacccattgatgattgatcgcccctgcgatagtagctaagccaaaagcagaaactggatgtattttgattccaggaaggtcatctatggcctcttcagcaactcagcaccgtgcccagccagatgctacaataggcaggccaagggtgcttgtggactgcttcacgggcagcaactgttgcagctgacgactacgcacactgccatgcagtttatccccaaacgaaaatccccttcaggcctttctaacgttggtttccccagtcctaaatcaccagcacccatatcaacactgatgccaagcagggagtccaactgatccttgccgcactcatagctggaaatcaaattaaattagccaaaggataattatttgaatcctcaataa

SEQ ID NO: 39905 - DNA, 729 bp, Setaria italica
  Peptide Sequence Number=SeqID_105879
actggtgagtgatggatgcgctgctctaacctgcgagtgatggttgtgctgagctaaccaattaaggcagtttggatgtgggctgtgcttgttgcttttctgctttagtagctttatggccttaccagctaaaggtcagtccgtttgggctctagcacgttgatacatgcacctaattaatacctgaaataagagagagcaggggaaaacaaaactattaaatacttttttcagtatggtaaaaatttgaacgaaaaacctttgtaatttccatgctatttgaaacttgctacatccattcttctatttataataaataaaaaagattgcataaccagggcatctcactgtaaaagtaaaaaggagttcatgcaggcagattacaggatgacgctctaaatacatataacactcaaaatactaatttcagaagcagtacaatacaattcagattacctacaatacttggatatatagtacttaaagtactaattttaggagtggtatagattttataaaatcaactaatctggtgcaatcaggttgtttcaaacaattgtggcccatgctctgatggagtgccagatgaattaactttgaatatggcatgataagtttaatcaaacattatatattgacattgaagagaataggaacatcgatcaggaaggaagctatttcgaaaatttaccctgaacacttctaactttattgacaaatgttgcgcaa

SEQ ID NO: 39906 - DNA, 814 bp, Setaria italica
  Peptide Sequence Number=SeqID_105880
ttaacaaactgaatggattgctaagaacaagggttgaatacactgtatgcgacacatcctcagcaataattaataaagggacactcaactgtgtcgtcttctcaagcaaaggaagtatctcctggacttcgttcacacgctgatcagttaagagcactctagcattttcaaattcaacgattgctttgtcatgatttgtgatgaaatgtggagaaacatatcccttgtctatcttcattccttcctgcacctcaactgtggtatatatcgaagatgatgactcaatttttattataccatcaggacctatcttctccaatgcgtcagcaatgagattgccaacatattcatcattgccagatgatattgaagcaacagcttttatgtcctcctttgtactcacgggaatacatttgctcttcaagatcttaattagctcgtgaacggctttgtcaataccccttctcaaggcaactgggttaggcaccagtggcaactgccaacaacccaagattgatgatttcccgagccaaaacaattgctgttgtagttccatcgccaaccgcactatttgtcttggatgctatctcttgaagtagcgaggcacccgcatgctcgagcgcatttgggagctctatcgccttggcaattgtgacaccatcgttaattactttagggacatcatcttggtcaataacaacattcctccctttggggccgagggtgaccgcgacggcgtcggcaagcttgtcgatgccggcggcgagcccgcggcggcaggcctcgccggtagatatgaccttgacgtcccgcc

SEQ ID NO: 39907 - DNA, 471 bp, Setaria italica
  Peptide Sequence Number=SeqID_105881
gtctctgtgtcggtttcaggtttggaggagaagggaagcgccggctctgctgctgctggtgctgctcgagccccaaagggaagcaatggttccaaggcgagggcggcggcagctgctccggtcgtcggatggccgccggtgcgcgcattccggcggaacctcgcctcgtcgtcctccaagccggcgtcccacgagccatcgagccagaggggcagtgactccaccacaggcgccgccaaggccatcgaggccggcaagaaggggctgttcgtcaagatcaacatggacggcgtccccatcggccggaaggttgacctcagggcgcacgccggctacgacacgctctccgccgccgtcgaccacctcttccgcggcctcctcgccgctcaaacatcaggaggggagcaggaggtgatcacaggggtcttgaacggcagcggcgagtacacactggtctacgaggacgaggaa

SEQ ID NO: 39908 - DNA, 162 bp, Setaria italica
  Peptide Sequence Number=SeqID_105882
gtatgaataaagtactgttgactgtcatacagcgatgaaaaatagagttgatgagcaaatgagtgatgagtcatcagtcatgagttctggctatgtaatttgcaagtaaatattattatttttaagcatgaaccggtgacacaaacatgtgaaatgcatgcc

SEQ ID NO: 39909 - DNA, 454 bp, Setaria italica
  Peptide Sequence Number=SeqID_105883
agagcgtcgcggccgaccatgggttcctggacgacccggccgccgtcatcccgctcagcgtgttctggctggtgccgcagttcgccatacacggcgtcgccggcgccttctcgtcggtggggcacatggagtttttgtacgaccaagcgcccgagagcatgcgcagcacggccgccgcgctcttctggctcgccagctccatcggccactaccttggcacggtgctcgtcacggcggtgcagcgcgccacgcggagccgaggcgattggcttcaggacaacatcaaccggggcaggatcgatagctactattggctcgtcacctgcctcatggtgcttaaccttggctactacatcatctgcttccgtttctacaccatgaagccattggagatggcagacgaacaggatgaccatgacaaggagtgtgagctctcctctctccacaaaatggt

SEQ ID NO: 39910 - DNA, 403 bp, Setaria italica
  Peptide Sequence Number=SeqID_105884
gaaacactcggtccctccagaccagatgagcaattttggcacaaccgatctttccttctggctcaccacgacatccctctccccccaccccaccccaccacacacacaccgcaagtttagtagaagatcatggtagcaacagcagcggcaacgctggccatgatagcgccactgctgagggtggcaactccggattgatcagcatcagctggtccctcggcaggcccctcagcagcaggggatgctgcggaggttgacggcaagggagggcttgatgcgtcatccttcgaagaagacggtgtggaggtggtggctggcgcggcagctgggccagacttcctagacgttggagcggcggcggcggcttcgaggggccttagcagggtcagatttcttggcagct

SEQ ID NO: 39911 - DNA, 344 bp, Setaria italica
  Peptide Sequence Number=SeqID_105885
gtcttgggggcaagtttatcaatccgaaggagctacataatagaatgctttctatgtctaaaagattcagtttgactttggacattgaagcaataggtaaaactaaacagtacagagtttggacttcaaaaaattttgtgctgtgcaaagctgctctacaaaattgtgatgcgctcgatgatcatgagtattgttcggattttcggcctccggttccatctaaagaatcagattctcttaatgagctcttgttcgaagaagatcgtcatgataaaccagtccatgatctcctgagtagccatgaagcttgtgttgagcttctcaactatctgaacaagatacct

SEQ ID NO: 39912 - DNA, 593 bp, Setaria italica
  Peptide Sequence Number=SeqID_105886
cggtggtgatcgccaacgtggccatgttcgtcgtggtcatgttctacaacaactgcccgcgcggcggcggcgactgcgttggccggggcttcctccgccgcttctccttccagccgctcaaggagaaccccctcctcggcccctccgccgccacgctgcagaagtacggcgccctcgactggtacaaggtggtgcgcgggaaccaggcgtggcggctggagtcctgcacctggctgcacgccggcctcatccacctgctcgccaacatgatcagcctcatcttcatcggcgtccgcctcgagcagcagttcggattctggaaggtcgggctggtgtacctcgtctcgggcttcggcgggagcgtgctctcggtgctcttcatcaggaagggcgtctccgtcggcgcctccggcgcgctcttcggcctccttggagcgatgctgtcggagctcatcaccaactggaccatctacaccaacagatttgcagccatgctgaacctggtcatcatcgccgccatcaacctggcgctgggcatactcccccacgtcgacaacttcgcgcacatcggcgggttcgccaccggcttcctc

SEQ ID NO: 39913 - DNA, 702 bp, Setaria italica
  Peptide Sequence Number=SeqID_105887
aagcactataactaaaaccatctagaagtatatcatgtttggaccaaaaaggataaatttgttgaatagggaatttcaatcgcactaggcgtaagatgatttaagaaacattgcaatcaatccaaatgtgcagattcctctgccattacaaatttagcaccacattacactgtaagcttctggttacaatgacaacaattattacaaacttatagcaaacaatggacatgttgcaaaaatgattctgaaagattagaaattaagacaaaactaaggtttatagctttgtaatgccatagaccctaactagtaatgcccaactacaataccggcgactgttgaaagcaagtatttagtatagatgctaaataatctacacaaagtacatgaacgcgaggaaagaaatatttaaacatgggacaaattaagtgaagagtcaataaacaggaaatgatacaagagaagaaaggtagccattagggcatataaaatgtctagagttaactatcgaggatttaatagcatggcatctggtgtaactttgataattcacatcaaaaattccaacattttttactagccatgacaccctacaagactatatcagtagagcttaggcagaaggtgaatatagctaggtatagaatgttccactacttgtctgccagaataatacacagccctttgacgaacgggcctagg

SEQ ID NO: 39914 - DNA, 815 bp, Setaria italica
  Peptide Sequence Number=SeqID_105888
tatggctactcactttaaattccaagtgtgtaaaatgtaaatgcaccaatacatcacaccacatgcaccacctcgaaaaggaccatattatacagtataatgacaaaaatcaaactatgaataatgaaagatttttgacccaggtgacacaaatatcaacatcatatttcccaagacaaccaatccatttcaacacagtgccacttccactcagcccaatctaacacttactcctaatagcaatagaccaagcaaaaacaggcagcaacgaacaaatgaaatgaaattaactcggtatgccgacaaccaatgtattcctaattgacaagctgttgcaggtcgatgcgccaggatgaagccagctgcttcattatctgcactggtgtcgctccttcccaatcatcgggcagctcgatcgctgtagcctcatgaagtcccagtagaaggtcttgcttcgcgtctagagggatcccaagataatcagaaccgttttccattaccaaatcggtcaactgctgaagccaggtcaaggctacatcatagaagctttcttccacaagaaactgccccacagcatgtaggacttcatttgcaacctcatttgaaagttgatcaacaactggtccagtttgctccatcaactttacaagtagttcggcatcaccagttgaaagaacctcagcatatgcagagtccatatcatcaacatgaacagcatccattgcacggtccaggcatcccaaagtgggcctctttcatccccttgattgtcatcattcaaagcttctccatccagttcaggaatagctactctt

SEQ ID NO: 39915 - DNA, 2023 bp, Setaria italica
  Peptide Sequence Number=SeqID_105889
agaaccgtttttccattaccaaatcggtcaattcactacagtttcccttcaaccttgagcaatccagtaaaactgatgggccttcagtctagaccaaatggaaagccgggcttctgctgaagccaggtcaaggctacatcatagaagctttcttccacaagaaactgccccacagcatgtaggacttcatttgcaacctcatttgaaagttgatcaacaactggtccagtttgctccatcaactttacaagtagttcggcatcaccagttgaaagaacctcagcatatgcagagtccatatcatcaacatgaacagcatccattgcacgggtccaggcatcccaaagtgggcctctttcatccccttgattgtcatcattcaaagcttctccatccagttcaggaatagctactcttgcagcagcccttgaacttccattatcttcaccagccactctaatagcttccagtgttgcttcatcttttgaggcccgccaagcactgcgagcagaaggaccctcaccaaatctaaagggtccctgccctttgtcccaacctcttcgaggacctgcttgatcattacttcgttcatttcttggcatcctattgtcagacgaaacagaatctaatcctcttctcgcattcataccacttcttgatccagaataagcgtagtcccattgttcagaatctggtctccaagaagggcttcttaaaccagaagcaccatctgcagaaaaatacctttctgcaaatcccatccgtccatcaccactcctcccaaattttgcattagaatattcatggaaaccattgtatttagatgatctgccgggagatgaatcaaagcccagcgctggaccaccacctctccggcctgaagagagtgatatttccctcgccatttcctcaacaactctctcaagaccacgcactctgttctctagagtaaccatgctgtcatgagatccgcccatgaaatcctgcagcatgttcatgagactggtttgctgtctctccaaatgtgacaactgcctctgtatggctaaccaatttgttttattatttatgaatgggccttctccagggatgttcatagtgtcttttgcactgggttcacccctatcttcaacatcagatgccctagcttttgcatctttgttcctatttcccctttggttagtccatctatctcgaatgttttgaaaattagagctagcacgcatttgagtcagatttgcttcgtcttcagctgatccattgctgttagctggaccaacatgatcaccatcttcttctggttcttcacttctcaaatgagattgtagagtcttgcgggggactacaacctcaacggccaagccatctgttttccttgtctcaagcttttggaaaaattcagggttcagttccctgtcagttaatgtcgatcttttctttaaaagaactgcagccttttcagctatgctactgcccttcgcattgttactaggtgaatctggggaggaatcttcaaaggattctgattttccacttctttgcattgacctttttgtgtccagcttcccttcaccatcagctgggtccttatttctaccatcatttgcatcttctccagttaactttttccacaactgtactgcatcaatcatgctatctctaacaggccttaccttatcaaaacggcaagcctcgagagcagctatggttggggctgccccatcacctatcaagtgacctgaatgggtagccaagacacataatgtatcagcagctgcttttctagtagcccagtcgctgttctcaagacagtcacgaatactttgcagagtttgcggcatattctgggagctgattgctccaacctgtgccaaacttcccaagacgcccagcagtgctgccttcgcctgcacgccttggccaccaagcagtttgcaaatcctaggaccgagcttcccaaacatcccgatgacaccaggcccaggccctgtcccctttcctaccgttctttggtcgtaggtct

SEQ ID NO: 39916 - DNA, 475 bp, Setaria italica
  Peptide Sequence Number=SeqID_105890
tcttttctattctaaattattatatacatgccataatgattttgcttcgaatgattttattaaaatgccaacatatcttctttcaaattccatcaacgatgatagccgtccctttgcaacatggtctagccatgatgatgagggcggggaggagaagtaggagcatctaacagaggtatgccagattcgtgatccttatttcaacgatcctcatcacttctgtatacgtaagcagctttctaatgcagtccatgtccctattcggtacagccctgacatccctgcagcagtgatcccaagtcttaggcgcgacaatccttcttgccatcctggaaaggtatttgcggcagtcgtacaggatggcggccttctgctcctgggtacaatcagccatcacgtggctaggagagactattgcaaacacaaccaggaggagcactattttcccaggcattcgttactttaggtcttaatt

SEQ ID NO: 39917 - DNA, 501 bp, Setaria italica
  Peptide Sequence Number=SeqID_105891
taaacagaagggtggttggggacacttgcctttctccaaagaaaagttgctcttactacttttcagctcttgctctcttggaattctcaatctttaaagctttcgaacagcaatccttctactcgaagcaatcatcgacacaaccatacaaagcaaacaaacaagtataactaagaacaatacaccaatcaaagaaaagttttaaaagagcatactacaggatagggctcgattctaagaacacaagggcgcaagaaagactagaaacggtgctatggttgaaaagatacactatcgagagatttggatcataaaagaaaagacaagagctacatgtttcattcattttagttgagaaaaataatgtaaagatatttcagagaaatatccttagttggaattaagcaagttatatttatatatgaaaagacgatgtgaagcttagtccaactttatttataaatatttaagtacattttaagtaattaaatatttgatttt

SEQ ID NO: 39918 - DNA, 1245 bp, Setaria italica
  Peptide Sequence Number=SeqID_105892
agcctccaagaagaggaacgaggaggagggtgaggagttgcctctgaaagcaagccatcattggctaccaaatgcaggcatgcatatagcgaacaggacaagaagaagaggaagaagaagaacaagaagcaggagcagagctgcagggcgccgagaagcggctggtttctgccaccaccatgtcctatgatcagatgctcgccccgcttttcggtgccgggcgatcggcgtggagagcggctcagcagggcggcggcggcggcgacgcggtgacgaggcagatactcaagtgcacgagatggcagctcgaggagaccaccgacttcgtcacctgcccctaccactactactgcgacagctcctacccgggcgactactccgccgccgtcgggttcctcgtcgccgccttcgccgcgtactgcttcctctccacgctcgcgttcaccgtcctcgaccttgtgcggggcaacggcggcggcggcgcgccggcggccggcgtcaggggcatcaagcggaagtacctgctcccgtcgggcccgttcctgctcccccttgtgctgctcgcgctcgccaaggggcagcgggtcaacgccgtgttcccgctcgcgcagctcggcccggcattgctgctgctgctgcaggcgtcggcgctggcgttccggaacgaggccgacggcgacatccggtacgcggtgctggaggcgtccacggtgtccggggtgctgcacgcgagcctctacctggacgccgtcgtgctcccctactacacggggctcgaggcgctccggtggtcgcgcttctccggcgagtgcgcgtcgtgcctgtgccggatggagcccctcgtcgtcggtggcacggcggtgcagtaccggggcctgtccaagacggcgctggccatcatcttcgcgctctgctcgcggatggtgtgccgcatctacggcgaggagcggctcagtgcgtggacgcggtccgcgctggaggccgtgggctgggtgttcgtggccggcgacgcggtctacctcgtcggctgggtggccgcggagggcggcgtcgtcggcgtggcggcctacagcctggtcgccgggctcgtgttcctgagcgtcttcggcaaggtgtaccggttcttggcgtgggtggagacgaggcagtcgcagtggaaatccagcctctgccacagcgttgtttgattcacactctaaactctcgtcggagttcatcctcccctcagagatctgtaaaaaagaa

SEQ ID NO: 39919 - DNA, 461 bp, Setaria italica
  Peptide Sequence Number=SeqID_105893
ttgaagactttgaaagtccactacaataaattgttctgtggaagctcaaatcattgagaaattgatatattgaggacttcagcagcagactcaattccaaacttagcacaaagcatcaaggcttgagagaaaaaggcttatctatatctttataaataacagctcatgtttcctcgccttcaaccaaagaaaaaggaacagtgaagatgaagaggggcaacaaaaacagcaaagccagcgtcttagcatcacaacaagaaacaaagatgtttggtaggatcatatggggatgcaaaagttatctctctgggagcagatttctcaactatttaacacaagagtgcaaggtcaacaggtgttcctaagagcatgatggtagaagcttagatgtcggtcataaataaaaaataacctgtttagatcgtgcgatagcttgatcagtttcattcattagttgattg

SEQ ID NO: 39920 - DNA, 672 bp, Setaria italica
  Peptide Sequence Number=SeqID_105894
aacaggcatgtcagcatgggtgctgaaaaatggcttgacatagagatatggaactctcctgcagaatgtttcagtgcattaaaaaaagcgtggttatcgcattgcaaccacttgtttgggaactgattcggtttgtgtgtatgacatggattggtctcaaccaacggctattgttgtgggcaatgagctaaggggtataagtgacgatgctctagagttgtctgacttgcactgtagtgttcctatgaaaggcatggtggattcatttaatgtatctgttgcagctggaatcctgatgcaccatgctgtttgtgatagattttcccgccttggtcatcacggtgatctgttaccagaagaaaatagaatattgcttgctgaattctatatgcgacatagggaaagcacagctaccatagttcatgaatatgctaaaaggaaggcggaaaattttatggccagactttgagaacatcttgacgcagacttatggcgtagcgcaggtgatcaagctgggtgatttgtttggcaatcagatgttggcttatcctgtgcgttttttctaacaacaaaccagctgctatttttcttgtagagcaccgttgggctacttggtcttcgagagattcaagacgacgattccccacaggattgcgggcaagaatatgaccc

SEQ ID NO: 39921 - DNA, 177 bp, Setaria italica
  Peptide Sequence Number=SeqID_105895
tagtctgcatattcaacgcgctcccccgacccgatcgctcgctacccgcgcgcgcgcgcagcacgcagcagccagcgggcgacatgaaccgcctgcaccaccacggggtgatgccgccgccggggacggggcagctggcgcgggcggcgagcgcgccgagctcggtcctcgccgcca

SEQ ID NO: 39922 - DNA, 650 bp, Setaria italica
  Peptide Sequence Number=SeqID_105896
cgcgatgacagtggaaaccatgatggttgtggaggtaccctgagtcattacgactgtatggggttcatcgatctgcgagatatcattgccaattgtcaatctcctttgttctctttttctgaggaagctgcccggttgtgaaagcattagtgtaatggatacatgtcctgggctccttctccttgtgtagctatagatcatccatgccacctagctacatcgagtgcaatcccaccgcggagcaatcggtggctacgcctgacactaacaggacaccacctccgtacaacaaagcatctatctattttatttttagtgatatattgtgatataattatctttgggataagatgttgtcatgtataattattctcgtgataacatgtttttttataatattatgatagcatgttgaattctgtagaatcatgacagctcttcttttggaccttccttttgagttttgaccatgtcacattgcaagttgaatagttttcataattttattcccccatgaaagctttgaccagttgactgtgtcaactggtttcctttgctcatagtcttttaccatgttcttggctgattcactgtaagtatagatgctgcaacaacagggtgtattcaaatactctggtcagataagatgg

SEQ ID NO: 39923 - DNA, 176 bp, Setaria italica
  Peptide Sequence Number=SeqID_105897
ggcttttgagagacgatcagcagccctgctgagatagtagatcctgagaggaagcgacggcacccagccagccagaccgtacactcgcaagagccaccgcgcgcggccggagaagcaagaaaagaatccgccacgatcgccaccaggatcatcctggcggattctttttcttgctt

SEQ ID NO: 39924 - DNA, 608 bp, Setaria italica
  Peptide Sequence Number=SeqID_105898
tcccccggttctagtgccctgccagcgtcttgctggagagcctacgtttgtatcgcttgagcacggaggccaggttctccttccccttggggaaggcgacgtctccagctgccgtgccaatccggcccttgcggccagagacagcctgctccacgcccttgatcacctccaggatctcagcagccgtagtgaagctgccggggatgggcttgccaaccgtgcctgcgttcgtgaggcaggcgcacccccgttaggggttccgggggcttggagaatgcaggttcaatgattcctgaagacggttgagaacgtaagtatacttcccccaaagttctggcctactttccacacgggaaaggtctagcacccgatggatacaccagacactgaaactcacaaccagggaagcctgccaaatgcaataatctccacaattgggccctctgcacatggcattggcgtctctgtcatcacttgttttttctcgtgaaactctctcggcttcagagacttgatcaattagattttcatcacaaccgccgttttgaccaaagagccaacccgatccttccagcttacaacagcttcatgatgcaaaatctaagaga

SEQ ID NO: 39925 - DNA, 1619 bp, Setaria italica
  Peptide Sequence Number=SeqID_105899
tgtctaggggttgtattaactattagggtctacttaactattttgtaaggtccccctaaaaaagggtttaaccttgtctagtagtaagtggactttacaatgctgcatcagcagactacatttcctttccttgtacaatttggggtccttttgtgcacatacgtagttacccttatacaacatcacatgccaaaaaaaagagcaccaaaagaacttgctggaagggattggtcatcaggcgaccggtccctgcaaacgtcgtgcaacgaaaaaatccaggactccgggaggctgatggcacgtccctggagaacaatggtcaaactccctaaaattgtaatcgctgtcgaccaatgccttactgtcccttgctggcaagcctccgcttgtaccgcttgagcacagaagccaggttctccttccccttggggaaggcgacgtctccagctgccgtgccgctcctgcccttgcggcctgagacagctgtctcgacatccttgatcatctccaggaccactgctgcagttgtgaaggtgccccggataggcatgggaatgggacccattgctgatagtccactgtgtgccggaccgttgagcactctgatgtctttctgaaggcaagcacatatggtcagggcactccgaggcttggagaaagcagggtctaggattccctgaagacggttaagtacataagtatacttgccccaaagttcaggcctgctttccacttgagacatgtccagtactcggcggatgcaccagacaccaaaactaacaacaagggaagcacgccaaacgcagtcctctccacagttgggcaatgtgcgcatatactgaatgtccgcctgatcagaagatggttgctgaagatcaccatgaagcagttgattctcagttgttccttgcagcaatagcctctctgctgcagcaactcgatcgattagatcttcatcacgcccaccactttgcttaaacagcccccctgaaccctctagcttcaggagcttcataatgcagaacctaagggactgaagaagcttcatctcagactccttataagagaaatcatccttggccatgccacctgatctgccataaagattaaagtcgcctttactgagctctgcacttgacatgccaaacaattgctcaaatggttgcttagcccaaagggatctagcactagggctcatacttgactgtgctgagaagatatcactttgcagtttaggaggtgaaagttcatcgaacgctaggggagctgcaggtctggctattgagtttgcatattgagatctttctgatgccatcctgctaaggtacgactggggtccaatggcaccacccatctttgcttcgttcaacagtgcagttctgcttgcagcaattattgcagaaatatcaggtgagctgtgatacttctttgagtaagcagatgagccagcactttcactcccatcaacaatggaaggatcataatacgatctttctgtcatcattgaacctatgcgggatgttgctgcaatctgggaaggagtagcacccagtgaagcaagagattctggttacgagaatgcatcatggaatcaacataggttgtgcagcaggcgcaga

SEQ ID NO: 39926 - DNA, 556 bp, Setaria italica
  Peptide Sequence Number=SeqID_105900
agacaaataagacttcgaactttgcaaaaagttcttgaaaatttcttgtagttattcgcaaagtttctattttactattttagttaagctagtaactaaatgaaatgtaccaaaatgatctgattcacaatcttccatgtcaagtggtacaagcacacaagttaaaacctttaacgaactttagagatgcaatggtagatggcatgaataatgattccactatcacgacaattcgtcatttcctttcagcgcacaccaaccaatataaagcacaatgcaacaggtttgaactttgcaaaattttcttttagttattgaaaagtttctacttgactattttagttaagcgagtccacatcaatagcctaatccagtgcctgtacagaacctgattccctaaagcttgaccaatacaccaggatagcttttgctaacactaactgataactaaatgaaatgtagcaaaatgatcagattcacaatcttccacggaaaaaaaaagttgagctcagatggcacaggcgcacaagttcagaaaacctaacaaactttcgag

SEQ ID NO: 39927 - DNA, 343 bp, Setaria italica
  Peptide Sequence Number=SeqID_105901
tggtcttttcacatagtcccatatttcttggaggctttgtttgtttctttttattcttttatctctaaactgctcttctcacttcttttcatgcagaaaggtccttagaggacctgatggagctgaaagccatggcacaagaactatgtgatgaatgcacaaacctcagtagccaatgcgatcaactggaagaaagggtatcagtgatgggctttcacttttctaaaaaaaattttcgcatagtttttgtggacttagggttgaattacaaccggatagatttacttgggaaaaaatagcaagtttgcatcactgggttttccaaaccatgaactttctatat

SEQ ID NO: 39928 - DNA, 3896 bp, Setaria italica
  misc_feature (35)..(35): n is a, c, g, or t
  misc_feature (3817)..(3896): n is a, c, g, or t
  Peptide Sequence Number=SeqID_105902
gcggcgcggcggaggcggcgagatagagagagagngggaatcggcttggtctctccgccgagtttgagttgatcggggaggggaactgatgatgggggcgcgggagccggtggcgatggagataccggcggaggaaggggcggcggcgaggtcgccgccgcggcggatcaggaggaggctggtggagggggcgcgcggcggcggggcgccggcgagcgtggaggagatcgaggccaggctcagggaggccgagctccggaggcagcaattccatgaatggttggcctgcaaagcaaggaagaagccgcggagcccgtcatggtcctctcaggaggaagatcatgggcagcgccttgaagcaaagcttctggctgctgagcagaagaggttaagcctcctggcaaaggcacggaaccgattggccaagttggatgaactccgacaggctgctaagaatgatgtggaaatgcggtttgagaaggaaagggaagaacttgagatcagagttgagtctcgtgtccggcaggcagaggagaatcgcttgaggcttctgcatgctgatatgcagaagcgagctgcgctgaaggagagaacagcgaggtccctggtgcagaaggcaacatcagagagcaaatacatggagcaagtgcggactgcaattttgcaaaagcgcactgctgctgagaagaaacggctgaggttgctggaagctgaaaagatgaaggctcaagctaggcttttgcgcatccaaaaagccgccatgactgtatgcagccaaagagaaacagagaggaaaaaactgaaagaacagttggacagcaaacttcagagggcaaagaggcagagagctgagtatttgaagcagcgaggaagccctcgcaattctgcccatgctgattacatcaagcatgcggatttcttctctataaagctagcgagatgctggagaatatttgtgaaatccaggaagacaacacttacattggttgaagcttatgatgccttgggaattaatgagaagtctgtgaaaagtatgccctttgaaaatttagctatgtcaatggaatctcctacagttcttcagactacaaaggcattacttgaccgattggagagacgtcttgtcatttctcattcagtagcatcttcgtcactggaaaatgttgaccatctactgaaacgcgttagttctccaccgaggaggaaggtacctcctagcagggagggaagaacacgggcagttgcaaaaagatcagctaaaagttctgtggcaagcatcagattgcctagatactcactgagggttgtgctttgcgcttacatgatactggctcatcccagtgctgttttaagcgggcaaggtgaaagggagaaacagcttatggagtcagcagcaaactttatcaaggaattcgagctgttaattaagataatacttgatggaccagggcggtcatctgatgttactggtcagaggaaattccggactcagttggctaattttgacaaggcgtggtgcacgtatctttactgctttgtggtgtggaaggtaaaagatgcaagattattggaggaagatcttgttagggctgcatgcaagcttgagctgtcaatgatgcaaacatgcaagctaactgcggatgggcagtcaccaaataatcttactcatgacatgaaggcaattcagaagcaggttactgatgatcaaaagctcttacgcgagaaggttcagcacctgagtggcgatgctggcattgagcggatggactctgctctttcagatacgaggtcaaaattctttgaagcaaaggagaatggaagtccattagcagcaccagttgcaaatgtatttacccctttgagcattaattcgtctgggaagaccccttctgtggttaaggagaattcgaggacaaatgctctaggatcaagttctgttgcccgttctctgcttggtgcttcttcatcaagcagtacatcaccagtgaagcagctgacagagaatgagcaaatggtcaatgaaatgcttcatgaggatgacagtgcttttgctggaaggtctgatagtgctaatactgctgaggaggagttccagaagaaagtgagagaaacgatggagaaagctttctgggactcggtcaccgactcaattagaggagacatgcctgattatagtcgattgatcaaccttgtaaaggaagtgagggattcattacatgagttggccccaaaggagtggaaggaggaaatactagagaatattgacatagaaattctgtcccaggtacttgggtcaggttcccaggatgcacaatacttggggcagattttgcagtattctctagctatggtccgcaagctctctgctgctgcaaaggaggatgagatgaagaaaagccacgacaaactattgagtgagttggctgcaagttctgaagtcaatgacaatggcatcaactcatttgtcattgctgtcatcaagggcctgcgtttcatactggaagaaataaaggaactgcaagcagaagtgagtaaggcacgaatccagttgatgcagccgattataaaaggatctgcgggagtggagtacctgcagaaggctttcactgatcgctatgggccacctgacaatgcatcagcttctctccccctaactatgcaatggatttcgacgtcgaagaacattgtggaagaagaatggagtgaacattcagactgtctttcaataataccatcagcaggccaggctcctgcccttgttccagtgctccgtgctggtcatggaactccagtagagcaaccatcttcatctgcagcaggcgcttctggtcaaccagagtgcaagggtgagaagctggacaagctgataaggatcggcctgttgcaactcatcactagcatggaaggcttgcaaatgcagtcaactcctgaaagcttgcaaattaatctgctgaggctgaggtccgtgcagagccaattccagaaagtgattgcgatcgccacaagcatgctcgtccttcgccaagttctgatgagtgagaattcagaggccactcctttggaactggaaaatgccatctcagaactcttcaaggccctcgagaagatactggacagctcccctgatgctggcacggaagagattgtggaggcgatgatcagcgcatcagcctcagttggctcaccatcagaggagaaaattcaggccaggaggcagatgatcacccgggtgttcctcaagagtctccagcccggcgacgtggtcttcaaggtggtctcccgggcagtctactgtgctttccgcggtgtagtcctgggtggcagcagccccaagggccagaagctggctgacgcagcaatgcgccgcatcggcgcagtgaagcttgtcgacagagtggtgaaggctgctgaggtgctgatcaaggtggcaacggtgtcagagaaggtccatggtccttggtacaaagctctgatgtgaatgccaacggtttggttcttattgtgaatatatagacggtcaaaatgtgtaaattccctgtcccactgggtgaggtgggaggtatggcgttgtacagcaatttatagttgttgatcagtaggaagttcaggatgtgaagaattctggtgaactgggcgaatatggatgtccgtgcaccagaatttagtctggattcaaaggatgctaaattgcatctggggatgtaaattgtgacgtggtcttttgattttagaactgaataatgtaaataattgatgaaagttatttatatgctgtgcaaatgtctgcttgagaacagaaaaaaaaaaaaaaaaaaannnnnnnnnnnnnnnnnnnnnnnnnnnnnnnnnnnnnnnnnnnnnnnnnnnnnnnnnnnnnnnnnnnnnnnnnnnnnnnn

SEQ ID NO: 39929 - DNA, 385 bp, Setaria italica
  Peptide Sequence Number=SeqID_105903
ttcatatgcattttgcaaatgtaggtcccagtttgctgcatttgtcaaggacacccaactacccgagtaccaaactaacaatacaacggaaactctgtgctaggcagaagctcaatgcacttgtgagaatagaaaaggaaaaataaagtggaacaaaacagaagtattttgagttcaaacattatttaggtacagattaacctaagtataacacaacacaccatgcttgatcaaatcacagctaataaagtcagtatggagatgattcagaagtagctagggaccttgctggagaaccagattagttctgacagtaaccaggttttacgaatctggttcagactaaaaggttttctagaaaactggttcaggtaattccaatatg

SEQ ID NO: 39930 - DNA, 570 bp, Setaria italica
  Peptide Sequence Number=SeqID_105904
gctttatcctttttgttccttagattccggtttgtacatggatgcttgaacacatgcacatacaaaactaacctcttaatacttaactactagtactatgattcaccaaactaatcagcttcttaataaacactaaaaccgtaaacatgtgtattactatcaagtgagtttgctgtcagacgagagtatctcccgcgggaccggaaaggtaaacgatctcgttacagcctcgtcggcgcaggaggatctctttggactggcagcttcctatcgccggagaccgatcaggagcagtcgtcgtgcaccgcggcggccgtcatccggaaggcgcggtcccaggcgtagcggaaccgcacggccgagttgggctcgatccggcagccgttgccgacgaggtagtcgcggccttcccggcggaacaggcgcgggtcgacggcgacggagctcgcgaagccctcggagcggaggtacacggcgcggacggcgcacccgcaggtgttgcgcacctccacctcgaacacagggtcgaacccggccttctcacccgtgttgctctgctccaccgccacg

SEQ ID NO: 39931 - DNA, 381 bp, Setaria italica
  Peptide Sequence Number=SeqID_105905
gcgatttcggtgtattagctattatttcgtgcggaattgcagccctgttggaactactggtgaatttaggggatttagtgctcgttcgcatggttccctctccctctggaatttagtgttgctgggaatataacgtatggatgttacgagggcctactgggatactcgatagttcgtgtggtagtttattgctgtatagcacttccgattttgcgttctcttgcaaatttagtgggttcagttaacaatacttaacattatcaccttaattgatgttccctagtttgaaaagtcccggttcagtatgaattcgggcttcgctgtggaaactttattagacacattgttggtttgaattgtgcattcttgctggagttgata

SEQ ID NO: 39932 - DNA, 348 bp, Setaria italica
  Peptide Sequence Number=SeqID_105906
aatacttctgatttctgttgattttccaggtttttattatcttagaaatgaaactatatctgtaaatttccattggtcatagtaatgtaagacataaaatcaaatgcattagattggggttctttcagattagatcttcattcatggataacatttttccctttagggtttgcagaagaatatagatctagattgcagttttggacttgtatgaaacggttcacatcatgaatgttattctattctagatatgaaacattagctaagcacttaatcatggtgtcgtattcatgacaccatgctatgtgaataatattctagacatcactacagaaataggtattattt

SEQ ID NO: 39933 - DNA, 272 bp, Setaria italica
  Peptide Sequence Number=SeqID_105907
tgcacctcggcgacttcctcgtgggtgtcaccccagtcatcttgtggatttgtttatggttcctgggaactgataagctaggctgtgtgagtgtgtggataagaggaaggcgttgctagtcttattttcttatttagtaatgctacgtgcaagtcgtccgacgccaacaacttccttcagacggacgcgtggcgtaacaagattcatatcttttttactattgctgtttccgacgccaacaacttccttcggacggacgtgtggcgtaacaa

SEQ ID NO: 39934 - DNA, 778 bp, Setaria italica
  Peptide Sequence Number=SeqID_105908
caaaagcaatgatatggttttcgatttgacatagagtccttttaaattgtataattagcgctgatatttggaagacgaagtatgtaccaaaaaagtatattatatagtgcaacaaattttgtaagcatcattccacaatgtcttatatggatagctttgtaagcatgcatatgaattctgattgtcaaagtggtcctgatgccctggataatgccaaagaaaagaaatcggcagaagaattgccaccttacatgagaccctcataacactggtgctagtgtgctgaatggtactaatgagaagcatatgcttcagggctacaatcttttaataccaatcctgaaatgaaaactgcaatcactttgcaggctaaacatcaccaatttagtctgaacccacacaaaaggccaccaaaggctagaactggccaatgtcatgactttgaagtgctttaggttgtcagtgaacaaaaatttgtactgtttggtaactgcaagtccatagagatagcctcaattcatatatccttgccgagaaccacaggtgttgcttctttagatatgatccttgtctttgccgtggccatcaaacacaggggactcgacaatgatgaatcagcgctgaacttgatgggggttggcagcgctgcgcagctcggccttgcaaccgcgctccgcccatagcgtcgtctcgcggctcgcacctcgcaggtgcgccgcccagcttgggtctattagtcgttgtcggtctagggaccttagggtaaccttttttgttt

SEQ ID NO: 39935 - DNA, 620 bp, Setaria italica
  Peptide Sequence Number=SeqID_105909
cagcagagcaggagcagagtgctgcctaaaaggtgtcacagcagagggcagctcggctctccacattgcagccagctgcgggtacctggagctcgtcaagatggtctgcgctcgggacatctcgcttattaaggcaaggaacaatctgctcgatacacctctgatttgtgctgcgagggctgggcatgtggatgtggccaattacctcatggactgtgctatggatgagcaagaagatttgagggcgaggaatttggatggggagaccgcgatgcatgaggcggtcaggaatggccatttgcacgtcttgcagggactcatgtcaagggatagtgggctggctggagtagcagatgagaatggtgtgtctccgctttacttggcggttgcgtccaatcgggctgacatggtcaaagtcttgattggcaaatcttctaatcccgagacatcgttgtgctactccgggccagatggacaaactgcattgcatgctgcggtctacgtcagcagagaaatatttgagtctctgcaagttgtattggagccatgagctttgtcgtccattcgtcatctgcttttctttcttaaatctgtatcttctcatgactgttggatctctc

SEQ ID NO: 39936 - DNA, 422 bp, Setaria italica
  Peptide Sequence Number=SeqID_105910
acacatcatcctagcgaagctaattgagcatgtgtggtagcaaatctggatccatcgaagaggagtcagtggagtgggggtgagggcatgacggagaaggtcgtcgtaggcaagaaattaggaagtgttgatgagggatggaggttttgggggtgtcttgttggtgtcagacgtcgttgagacatgggtagtggcggcggcggaacaggaggctagggtcgatggggagaaaggttaggttaaagaggtgggagtatgggccgtttagtctgggtcacatgaattacggcccaaaattgaggatatgccaaaatagtctatataagtctattgagaaaaaaaaattggaaccggagaaatgggcgttggatcacatgaatcgactgtccagaatttagggcatgcctagttggatcctaagg

SEQ ID NO: 39937 - DNA, 755 bp, Setaria italica
  misc_feature (753)..(755): n is a, c, g, or t
  Peptide Sequence Number=SeqID_105911
tgaatgctgcatccagggtgtctcttatctcccaggtagcgatccagttaaactgaattcccaggacctcatcgagattgctggcaaacaattctactttctcctagcaactcgctctttctctaccactcctgctccgggtgctcatgctttgctaccccaaacaccaaccttgattctccctggtcaccctggaacacatgacaatgatacagaggatcaacagctcctagaagaagagagaaatgctgtgtcagctcttgtagtcctgatgtctgacatatgtagtcctggagaatgggtgaatatggagaacctacatttagagattcttgaacgctttggtgagaatgctttggtcaggaggtatctggcacgagaggatgcctcagtctcatcaactgaaacagaaggcaggccatggcgcagcctgttgccactactcaggaagcacccagagtatttcgtcatgagcacagtgaccagaggggaagtaacatcagagtatgctgcgttggtatccctggtatccatggggaatgaaccatgaagaaaaactggtatgagagtgcgagaaaaaaagttagaaccattctctgcatgatgatgctgctcaggttaccatcagcctttgttctaaagaaactgggacatcgtttattgcacctgaggctcattgtatgtttgtaacatcggactgtatccatgaaattagcatcatcatgcagagaaatggttctaacctgagcagcnnn

SEQ ID NO: 39938 - DNA, 472 bp, Setaria italica
  misc_feature (449)..(472): n is a, c, g, or t
  Peptide Sequence Number=SeqID_105912
cattcaaggctaaatccagttgggctgaaatctatggtgccttcttcaaaccatcatcatatttgggacagagagctaaaagcggcatacccctgagcgcatcgagctcatccctgctagattctacgagatctcgcatgtaatgaggtgctacttcaacagttggcagggaagtggctttggtagtttgatacacatctacgaactcaagaaaatggcctagaaactgtaacattctcctcatttcctaatcgggcttcttcaagatcagagcaataaatggctatgcatccttttgcagtggtgtatggtttcctgcctcgaaaaaacttttcctatgctcaaaatatttttttttcatcaagatgtctccggtcctcacaaaattggttggctctccttgttgtatcaccctgaagaagtattttcacctctgttacttaaaagtnnnnnnnnnnnnnnnnnnnnnnnn

SEQ ID NO: 39939 - DNA, 516 bp, Setaria italica
  misc_feature (462)..(516): n is a, c, g, or t
  Peptide Sequence Number=SeqID_105913
ttaatggatgaaaatgttgtgattcaggcttctgatcttgatattgcgtctgttcttgggatgggctttcccaagtacaggggtggtcttatcttctgggctgatactgtgggagcaccttatatacattcaaggctaatccagtgggctgaaatctatggtgccttcttcaaaccatcatcatatttgggacagagagctaaaagcggcatacccctgagcgcatcgagctcatccctgctagattctacgagatctcgcatgtaatgaggtgctacttcaacagttggcagggaagtggctttggtagtttgatacacatctacgaactcaagaaaatggcctagaaactgtaacattctcctcatttcctaatcgggcttcttcaagatcagagcaataaatggctatgcatccttttgcagtggtgtatggtttcctgacctaaaaacgaaaaaaaannnnnnnnnnnnnnnnnnnnnnnnnnnnnnnnnnnnnnnnnnnnnnnnnnnnnnn

SEQ ID NO: 39940 - DNA, 242 bp, Setaria italica
  Peptide Sequence Number=SeqID_105914
ctatttacatctgacattgctcttacatcccatgttctgtagtctagtaaggactacttccaattttctttatttttggcaactgcatatttgtctataattctgcacatgccatggagttatagacaaactgcctgatagttttgacctttggttgcagttctctagtgattttgctatcctgttgtttcactatgatggccaagtgagtgaatgggatgaatttgagtggtcaaagcgag

SEQ ID NO: 39941 - DNA, 1640 bp, Setaria italica
  misc_feature (1578)..(1640): n is a, c, g, or t
  Peptide Sequence Number=SeqID_105915
ccccgccgaccctctagactagggtttcgcctcctcccccgccgccgctccattgccgccgcgccgcctcgcgcggcattccattccaggtgggcgtcttattggtgtacatcagcttccagctaccatcgttatgctcccattgagcaatgcgtagtacctgccgctcacaagactccacctttgctacttttacgactatactaggcaatggccaaactcccagttgttgcatgcagtgcaattaggaaacctaacgaaagcatgaggcttattgtagtaacaaccgttggtgtggtctttggtttctttgttggaatttcattcccaacagttagcataacaaagcttcactttccatctagcattgtttcctatataaaggacaggaactcaggcctgtcaactcaagctatacttaatcatgcttggactgcggccaggaacgcaaggggaaatggctctgaaccaaactcaaatgatacattgaagatttatgtaccaacaaacccaaggggtgcagagagcctagcacctggtattgttgtaccagagtctgattttcatccccataggttatggggaaacccagaggaggacctacccttcaagccaaagtaccttgttactttcacggttggcatttcacagaaagagaacataaatagggctgtcaagaagttctctagtgattttgctatcctgttgtttcactatgatggccaagtgagtgaatgggatgaatttgagtggtcaaagcgagctatccatgtaagcgcccggaaacaagcaaaatggtggtatgctaaaaggttcttgcaccctgatatcgtggcagcctatgagtacatatttatctgggatgaggaccttggagtcaatcattttaatggcgatgagtacattaaacttgtcaagaaatatcaactagaaatctcacaacctggtttagagccagataagggattgacatggcagatgaccaaaagaagaggggatcgtcaggttcacaaggttacagaggagagggaaggctggtgctcagatcctcatgttcccccgtgcgctgggtttgttgaaataatggctccagttttctccagagatgcatggagatgtgtgtggcatatgattcagaatgacttgattcatggatggggtctcgattttgctctccggaaatgtgtggagcctgctcatgagaaaatcggtgttgttgattcccaatggattgtgcaccaagtggttccttctctcgggaaccaggggcagtcagagaacgggagggcaccatgggaaggggtaagagagcgttgccggaaagaatggggaattttccagacaagaatggcggaggctgagaaagcatattacgagatgatgggcgtgactcctccaaacgtaacatttgtctcgtaggatgaaattctgatgttaattacacacattggctttttttgtccaccaatagcccttggagtagatttagatattgatgatatatgtagagcacacgagataattatatatatgttaatcaaaattcgctgatcctttttcctgttataaatttcacannnnnnnnnnnnnnnnnnnnnnnnnnnnnnnnnnnnnnnnnnnnnnnnnnnnnnnnnnnnnnn

SEQ ID NO: 39942 - DNA, 243 bp, Setaria italica
  Peptide Sequence Number=SeqID_105916
cgcagctgcatgggtcaggcattttgataagccggggcgtcgcatcgtgcagcgcttattggcggtagttatggctacttttttggctgcagtctatgctgtggataagcatactgtttggtatgctttggtctttccttgcttggactttaacccctgactgaagaacaagtttttgcctggctgaatgcttcctgtttaggagaataggacatgagagatatacctctatatctatacgag

SEQ ID NO: 39943 - DNA, 440 bp, Setaria italica
  Peptide Sequence Number=SeqID_105917
tggcgcaaactcttccctcctcatctcctcccgcaaaacatgcaagccatcctgaaccctaccattttgacataatgcatccaacaattcctcaacaacctctgacgccaacccaaacccctcctcctcatgtctgcacgcacaagcagcgccgcctcagcatcccctgccatacaatgccccctaaccaaccattcaaacgtcgtggcacttggatcaattccatccatctccatatttttaaacatctcctctgccatccctacctccccagcacggcaatagccaccaatcatcgtgttgcacacaattacatcaggctggatcccttcctgaaccatctcaccccacagtcctcgtgccttctccacatctctacaatcgcagtactcagccatcctaatactgtaggtgcagacattgtcctgcaggaatatttg

SEQ ID NO: 39944 - DNA, 288 bp, Setaria italica
  Peptide Sequence Number=SeqID_105918
cgctgaggtcggggtcggagtcgaaggagaagggggagcccggggtgggggttagggttccgaggtcgaagcccccgggggagaggaggttgcgtgggcaggcgagatcctcctcgatggactgggagagggtgacgtaggagagatcgccgaacccgtcgtcgccgacgtcgaggaagagctcgtcgccgaagtccgccatgggaggcgggcggcggcggcggcgcggcggtggggaggggaacggatggggtggtggtggtgcggccgtcgccgtgtgaggcgtgg

SEQ ID NO: 39945 - DNA, 416 bp, Setaria italica
  Peptide Sequence Number=SeqID_105919
aagttgctgagaaggttgcctactgatcaaccctagtcaagagatgcctgatttggaggaatcaaattcgatagagagctaaatcatgcgatttcctttatcaaactgattagcaatttttggctactaaagatgtttttgatccaaatggtttttgccagtgcctcgtgctggaccgggcttgtgtaactgaagtagtctctaatctttgtgaggatgagtgtgttggtgcttgagggccgatccctgcatcatgtcgcctattaaatgctctgtagccaactaggattcgtttgtattgtgcggaatcttagccaatgatagactgatgaactagtgattgacttgttgacgtttcgaaatcattacacgttactagagtttattcaattcgaaatacttaactaggttaaaaa

SEQ ID NO: 39946 - DNA, 414 bp, Setaria italica
  Peptide Sequence Number=SeqID_105920
cggccacgggccgccagcatccaccacgctgctctcagggctcagatcctgatacagctgcggcggctgcaggaacgccgccgaggggaagtcgagcgccggcgtcggcaccgcgccgaagccatcggacgccgccgcgccgcagctgcaggagccgaagctattgcaggagttggtgacgctgctaccgtcggggctctcgaccgcgctcccgccggagctcgtaggctggtcggcgaggatctcgaggaacggcttctcggcggcgagcagcgcggagtgctccgggtagtgctcgaacttgtcgtcgatgtcttcggccatgagcatgcggttgatgtaccccagcacgatgtccgagaatgcctccgagtcgtccggctgcccggccgccgccggagcgggcgcggccgc

SEQ ID NO: 39947 - DNA, 687 bp, Setaria italica
  Peptide Sequence Number=SeqID_105921
gaaggtgaagattgttctagtagcagttatgcagcaagtactattcaaacatctgaacccaagcaatagcccaaataactttgagaaagtggtccttgctccttacgttttaagagtcaacaaatgcatgcactctgccctcaaggtttgatcacatggtgctcagtcagatgagctttttattcttatctgtttgaatgcccaagacaactgatacaaagtatgttaacgaataccaaaatgattctttttttccttttaaaggatgagtacattaatcgaaatgaacattttcttgctgtccatacttatccagtgcaatcatgtttcatttgtaggaatatctccctgataacaacaaactaaatgaagttccgattctatttgatgtactaatttcattatgcggccaacttttttttacctcacattttatcactctgagcaaggcccagtgaagcatcagtttctttgcaaggccctgtgaagcatcagtttgagcaacattgcacttgctttccacttctttcttccttcaaataaattgaagtttctagcagtcatggtaacgtttgggtgcagccttgcctgaagagaggggagtggggagtcctactgtgatgcattgtggcctgtactccactgaactgcatactggataatgccacttaaaccattgaagtaatt

SEQ ID NO: 39948 - DNA, 243 bp, Setaria italica
  Peptide Sequence Number=SeqID_105922
cgagacgatgctccacttcatcgcctgcgtcaccgacgccatgcgcgcctcctcgtccggcgtcgtgctcaacaccttcgacgccatcgaaggcgccggagctggccaagatccggcaagagctgtcccgcccggccttcgccgtcggtcctcttcacctgctcgccccggcggcgcagcaggaggagcagcacgcgccggaccgcggctgcctggcgtggcctggacgagcggtcgaaggtg

SEQ ID NO: 39949 - DNA, 355 bp, Setaria italica
  Peptide Sequence Number=SeqID_105923
cccgaggggcggagcatggtgatgctgcgcgtcacgggaggcacgggcacggcgcggctcgccccctcagcggccggcggcgaggccgcagccgcggacaccgaggaggaggaggagggcgagaaggaggcgtacttccggagcttgccgaggccggagtccgggcgaggcccggccaccgtgtcgtcccaaagctggtccaggagacccatgcaccgtgcacgccctgcgcgttctctgatctctacgtgcgtgcgttttttgcttaagaagttaagactgagatcctcttgctctgctctctccggtgtctgaagagatattgagagggagaagaaggctcgatctggcagag

SEQ ID NO: 39950 - DNA, 703 bp, Setaria italica
  Peptide Sequence Number=SeqID_105924
tttagttaaaatttatgaaatgttggatcatcttgtgggatggatggagagggaggcggtgactgacaaacaagcaattaaacaacataagcatgcactcttcatgtaaaatcgactgagaacactgaccctccgtcctaacgatggaaatctaagataatcgtcgcactccacttagtcttaattcagcacttcatggatttttttttccttcatttcttcacgtcactaataacctgaaaaatcaattttgcaaatatcaatcggttggtaaccgaaagaaaatggtaatatggtcgtgaaatggagtattcttgctggcatgcaaacatgattgctacacaccaaacaaaccgtagaaagtagtaactgctatttaattaaatacatggtacattttcatcttatgaatagacaaaaagaatgctgctattataatacggtgtgcgttcattagggcatgaaatatcagttctttcctagagatactcagtagctattcatgatcactggcaaactctagctgtattacttcacagagaacacccgtgcgtgctcttcttggtaccaatggcttttgtcagaaaactttctacactgccatgcaagctgatttgttctcgaaagcaattattttttttaaaaacgttttttaaacgaagttctcgaaagcaatactttctgacccttctgcttcaactaa

SEQ ID NO: 39951 - DNA, 481 bp, Setaria italica
  Peptide Sequence Number=SeqID_105925
gttcgaggccagacgtgcgaagagcaaggcgagcagagagagaaagcttgctaggagggaggagaggttggcccaggtaagataatgtcttgttaactcagacctgcatttatttctgtatttgtgtggcaacctgctgattatatgacgctggaatgccttttaatgcccatgtgatactaggattctgaactgggccttgtggactagcaaatttgaactgccattaaatagttattttttgatccactgaaacatgaaagtatgttcttaaaacatattttagagccatgcattagttttattagtttgtcttaaaaagtatgttcttgatccactcgaacatgttaaaaaaatgttaatcttgctacttgtagagccccgcattagttttattagtttgtcttaaaaagtatgttcttgatccactcgaacatgttaaaaaaatgttaatcttgctaatgcggggctctacaagtag

SEQ ID NO: 39952 - DNA, 1379 bp, Setaria italica
  Peptide Sequence Number=SeqID_105926
agcccacatctgaggaatcgccgccgcacccaaccgcatgccactgcgccgactcgctccgcacctcccgagcccgcgccgcttcctccgctccctaaaccctagccccgccatgtcgccggccgccgacgccgctcacctagccacggcggccgaccccgacgaggacctctgctccagcgccgcggaatcagctgccgctgcggcggaggaagtcgcgccggcgcggcccctcccgcggcctccggtctccgcggaggagaggatcgagcgcgcgtggtcgcactggaggcgcctgggagccccgcggctgatggtggcgccgatggtggacaactccgagcttccgttccgcatgctgtgccgccgctacggcgccgacgcggcatacacgcccatgctccactcccgcatcttctccgagaacgagaagtacaggtccatggagtttaccacgtgcaaggaggaccgtccactttttgttcagttttgtgcaaatgaccctgacattttgttacaagctgcaaagatggtggaaccatattgcgactatgttgatatcaatttcggatgcccgcagcgtattgcaagacgggggaactatggagcatttctcatggacaaccttcccctagtaaaatcccttgtgcagaatctatcagctaaccttcatgttccagtctctgttaagattcgcatatttccacggttggaagatacattagcctatgcaaagatgcttgaggaagctggtgcttctcttgtggctgtccatggtcggacaagagatgaaaaggatgggaagaaatttcgagctgactgggatgccatcaaggccgtcaaagatgctctaagagtacctgttcttgcaaatggaaacattcgccatatggaggatgttaacaactgcctggaacatactggtgctgatggtgtgctttcagctgaaactcttttagaaaatccagcactctttgctggtttcagaacaaaggaatggaaagacgatggcgatgagaatggagatagcggcttggaccaggctgatctagtgatcgaatatttgaagctgtgtgagcagtaccctgtgccgtggagaatggttcgatctcatgtccacaagatgttgggggactggttcagggtgcatccagaggtgagggaggaactcaacaagcagaacaaactcaccttcgaatggctgcatgacatggtattgaggttgaaggaactcggtggaagagtaccactttacagaaaagagagtgcactgcagacaacagcgaatggggtagctgctagtaatgcctgataattccccaccaattttgagatctgcagcgccaatttttgggaagatggaatatatgaaaagtcgg

SEQ ID NO: 39953 - DNA, 357 bp, Setaria italica
  misc_feature (36)..(36): n is a, c, g, or t
  Peptide Sequence Number=SeqID_105927
accagcgcctgcaggatcgtgtagtctccccctgcncgggcgggctgaacatgtgccggaggcacgagcccaggcagccggacggcggcggcgacgtctcctctgtttgttcagtggtgctctgcagctggctctcgttggccgccggctcatcagctgccaccatctgcaggtcagcagctggcttctcgacggtcacggtggggtgctcgcggagggactcctggagctccttctggatcttgtactcctgcttgacgacgacggcgaggggcaggaagaggacgaggagcagcgcggcggcggacaccccgtaggcggcgtgcgagaagttgacctgcttctgcacgacgatca

SEQ ID NO: 39954 - DNA, 523 bp, Setaria italica
  Peptide Sequence Number=SeqID_105928
tagcccatccaaacgggagggctaatgggagggctaaactttagcccaccccctaaaaggtgcaaaagcattagctggtggggaggagctaatggtttgtgaaaagacaaaaagtgggggagagaaagggaggaggtgaggagataaagggcaaaagtgacatttcatggactttagctctatccattagccatgtctccaaacgggagtgctaatggatggaagtgctaaactttagataggctaaactttagcacttgcttttttttggaaaaaaactttaacacttgctaaactttagcaatagcacatccaaacaggctcttactacaatacaatttaaacacaagagtagcaaaagaattaatgagagggcaagcttaaagttaattgattatgctagaattttgtttctttttaatggtacttcagtaatataggtaatatggaaatggaaaaatgaacttccagtaaactttctttagatcggtgcatggaaacttggaaattgtgtagtggtaaa

SEQ ID NO: 39955 - DNA, 383 bp, Setaria italica
  Peptide Sequence Number=SeqID_105929
gtgtttaaagtcgtcattgctgccctcgtcgctactgctgtggaaatttgggaaattcacctttggggctcttgagttcgtttctccccctttataatctgaatcccacaagtcatcatcttcagtgcctagcccatcatcattactgtctctgaatgtagtgctatcagaagcagctaatgaatttcctggggtccaattagaacttctgaatcccccaggaatagaattctgcctgccactggatctgctcttctcattcctcgtacttttgaatcgttgaggatggtcatcaggcgcaccactatcattgttgaatccaagaaaattatccgtgtcatcaccagagtcccattcttcaccggaagcatcaatctcactat

SEQ ID NO: 39956 - DNA, 471 bp, Setaria italica
  Peptide Sequence Number=SeqID_105930
tgtaaaaccaccgcttggctagacctgcaagaggttgccctggatcatcatgatcaggatttgatgcgactctcctgtaaacggcatagtgccctcctccacatttcccgtagtgctccacgacagctgaaagaccatataacttgctccttgatgatggtgactgctgtggtgatgatgatgaactactggccacatcaacatttgcctgaaattgacaagtggtcagattgttaccgcccaacttaaatgtgatcaaactatattcatacagagatcaggtaccaaaatgttaaaagtacagtaaacaaaaccaaacacatgaattgagttccctccagtaggtagtacatttaggcttatctgcatattcagttgtcgatatagatggagggctgctggccatctctttgcatgttcactgccaaaggtccaggccccagcccagtgcttgatgcacctcccgacaag

SEQ ID NO: 39957 - DNA, 615 bp, Setaria italica
  Peptide Sequence Number=SeqID_105931
cttgatgacaaatagactctaaattttgtaagatgagtatgttcgcgactcaataagctgctacaatctttcatagaaaggagggtggccttcgcacccaaaacatcatcctctgaaacttctgatacatgaccatctgaaatgtaaaaccaccgcttggctagacctgcaagaggttgccctggatcatcatgatcaggatttgatgcgactctcctgtaaacggcatagtgccctcctccacatttcccgtagtgctccacgacagctgaaagaccatataacttgctccttgatgatggtgactgctgtggtgatgatgatgaactactggccacatcaacatttgcatttaggcttatctgcatattcagttgtcgatatagatggagggcttgctggccatctctttgcatgttcactgccaaaggtccaggccccagcccagtgcttgatgcacctcccgcaaatggggatagattgagaagtaaaggaaaagaaatatgtcccttatgtttgatgggctcaccatcaaatctgactgaagcacgtagtaaatgaatgcacaaaatcttcggacatttgtacttgtattaattctaacttgtcttttgt

SEQ ID NO: 39958 - DNA, 1005 bp, Setaria italica
  Peptide Sequence Number=SeqID_105932
catggaatagagtattctcggcttctggactatgtggaatgctgcagctataggaaatgcctctgacaaaggcataaagatggaccagaagcgtaagaaaaacagaacaattaatttcctgtgggaagttcccaccattgaggaggatgtattgctcaacagaagccagaatttggttgtcagcggcaagcctttcattgtagaacgagcaggcatacagtatagaaagaatagcgcattggcatgatgccaagttgaagtcttctgtactacattgcccaagcaaatacatcagttctgtggggtctgatggcagataaatgtgtgcatctctaatagcttccccataattacagcccaaaactctgtcaacaatggaactagtgaccaaatacaccactgattttacatgatcagtaggaaataagcccatgaatccaaatgacaggctaaaccatgatgatgatgctagcaactcagcaaactttaatggctttttgtcagttgcccttgacaaaataatttggaaaatctgaaggatccctgccaatgattcatcatcattaccatctaccacagcattttcaagccaatgcagtaaaatcgttccacaagtttcaatgatgctatcctcaagatccttcttgctagaaatattatatttgctcccttcaaggcagaacaggaagtgcttctttcagaagaagaagggaatgaggaattaggatcatagaatcatactcatgtgataatgttgaagatatagcatattttgatgcttcttcaataaatggtggtaatttctcaatatcatgagcatgaggtgacttcagaatctctattaatattgagcaaacgagaataaaggtctcagaactcatgccaagttcaccattgccatttcttctcaagattgcagtcaaagtacagactatctgttcttcttgtggcagcgagaggataccagaacaattgaccatgcagatccaaaacaagttctaaaac

SEQ ID NO: 39959 - DNA, 563 bp, Setaria italica
  Peptide Sequence Number=SeqID_105933
aattttagtgacttgttcacggtgaaggtcatggagcctggtgctggttcaagctgcggtggctccttgagggctccggctaccgcgtcacatgcattgaccttgctggaggtggcgttgatcctaccgatcccaacacagtccggtcgttcaagcaatatgacaagccgctcatagacctcatctcaatcttgccagagggggagaaggtatgtgcattgttattcctttttgctaggaaacttatgttaaattatcgagtaatatcttggcatatcaaaagctcaaatgatttgtgctattttgaataaaaggcatcagatcagattacatgaaagcaggtggagctggtttcagctaaatcttaagtgcacttaagtattgatccttgttgtatctagaattatacctgacgaaattacacacttgctgtacaatatgaatacatgtcagaaactatagttgctccagcaaaaatgcttaaggtagttaaggagctttttacgactaatgttcaaattgtgaagaatagaattagagtagcatgctaactcatttcaatc

SEQ ID NO: 39960 - DNA, 728 bp, Setaria italica
  Peptide Sequence Number=SeqID_105934
cctcctcctcctcttctcattctgatctggagcgatggcaatggaagatgaaacacgagaagcagctgatgggacggaagtccaagtagaagctgttgatttaggaacagtccattttgaagcacacccagaagttaagcttccgtctatcatggagatcaagaatgtgggagaagccatcgattcaactgcaggaacgttggagattccagaggaccaagttttagtagaagcaccctctgaactcgaacttcctccagaacataagctaaatggcgaagcatcttctccgaatggccatatggacaaagaagagaagatttcaaatgcgcagctgcatgagaatgatcaggaagaagcagaactagaagggacaagtgcccatcagagcaatggaatcaataaagaagaggtgactgatggtttaagccatggagaaagcacaacagaacatagcagccttctgaagcatgagaaagatgaagaacccagggatgaccgacaagattcagaaggtgttacagtggatgatgacttggttcaggaagacacactgcaacctgacaattctattgagcagacagatgatggtcagcgagatcagaatcaggagccagaaaaggcaaacgagggcacacaacctgccagcattgcaaacaatgccgatattgaggaagctgaggcacctactggattccaaactcctgtggagccacatatggatgatt

SEQ ID NO: 39961 - DNA, 954 bp, Setaria italica
  Peptide Sequence Number=SeqID_105935
aagaagctattcatgccaacggattcataggtgcaaagatgatccgggcaaagttgttacataagtttctgtgggtatatgttagttgtttgccaaattggtgtagcctatttgattgtgccaaagaagggcagcatgatcaatcatgccagttgttttcgatcgcagcagcaataaaaaaatgcctcttcaactctttctacaagttgttggatcatcaaagattgacagcatggtaacaaagttctctcttggaaaaacactttcagagatccctaccaatgtatacaatcagctcatggatactcatgccaagggccgactatcacgtttaataaatattttagataagctcaagttgatcagacttgtaaacagacatgtagaggattctgatgtgcaatcagatgcgctgcctacacattcgctggagctccgaccttacattgaagaaccttcaccaagaattgttccatcatcgcacgccaatgtaaaccatcgtccaaaaatgcggcatgattttcagctttcaaagcaggagtgtgttgatgcttactgggaaacattaaagtactgttacttgtcagcaggcttggctgagccaagtgccttccctggctgttgtgtacctgaggtttctcatccacgttcgtggagttcgctaagaataatgactactaaacaacatctggaattacaacgtcttatgaatgaaagtgagatcggggaactttcttataaagtttgccatataattgcaaaggaattgaatctctctgtgcaacaggtactctgtgcttcctccaagaatagacagatttctggtacacaaaatcatcgaaaatttagttcaaaatcaagcgctcagaaaaggaaataggtctgctgatgagattagcatgaagtttattaagcaaaaagttgaagctcgtggatcagctgaacagagctcag

SEQ ID NO: 39962 - DNA, 668 bp, Setaria italica
  Peptide Sequence Number=SeqID_105936
aggtaatacttagaataatagttctggaatctgcagtgacttggagtacatatcaagataccgattgatagaattggttgtaattgcagtggagattgttctacctctgaacattgcttgtgtgctaagcgtaatggttctgaactaccctatgtgtcaacaaaaaggaaaatgctaatcggaatgattctaaacatagcagtgttggaaggttagtggagccaaaagctgttgtgtatgagtgtggtactaattgtacctgccactgcaactgtgttaacagaacctcccagcaaggattgaagctccgcctggaggtattcaagacagaatcaaaaggttggggtgttaggacgtgggacactatacttcctggagccctaatttgcgagtacactggggtactaaggaggactacagaagttgaaggattgctggaaaacaactacatatttgatatagattgtcttcaaacaattaaaggcctggatggaagagagcaaaggcccggctcagaacttcacatagcatcacttcaatctgagcatgactcggtggcatctcaagcccctgaatattgcattgatgctggttctgttggcaacattgcaaggttcataaatcacagttgccaacctaaccttttcatccagtgcgtgttaagctcc

SEQ ID NO: 39963 - DNA, 1042 bp, Setaria italica
  Peptide Sequence Number=SeqID_105937
ttctctcctctctcctctcaacctctcctggcaggcaggccgcgaagatccaatccaaagatagcgcaaccgcctcccactcctccccttatttgaggtgccaagaatccaatccatccgcgaaagcgagcaatttgatttctgagacaggcagacagagaagagaagcatcgtatccatggcggcggtgatggttgcgaggcagggccgtgagctgcagcgctacagcgacagcacgggcggtcgcatcgtggtggggtgcgtcccctaccgagccagcggcggcgccggcggcgaggtggaggtgctggtgatcagctcgcagaagaagggccccgcggggggcgtgctgatccccaagggcgggtgggagctggacgagtccatggacgaggcggcccggcgggaggccgcggaggaggccggcgtggtcggggagacgggcccggccctgggccggtggtgctaccgcagccgcagctacgacgcgacgtacgaggggttcgtgctcccgctccgcgtcacggcggagctcgaccggtggcccgagatgggcgcccgccgcagggagtgggtctcccccgccgaggccatcgcgcggtgccaccactcctggatgcgcgaggcgctccagcggttcgccgacaccgtcgaggcctcgtcggcggcggcggccccggtgaaggccgcggcgatcctcggctccgccctgtaggcaggcgcgcgcgggctcgctctggcgtcgctcgctccgagtcgtgccggctcctggcctcgcgcgtttttcggccgtttcccgcgcgcgcgcggcgggaggctctgggctgctccgccgtcgccggcgccggccagcggaacggggatgggtagagatggatggaatgcaaacattgtactgtgaccaaatcgatgtcacaaggacacgggcttgtacattcttggctggttggggaattcagaaacatgtagatctgacgtagtttaccaaactcattgtgacacggagaatgaagaaacggcagcaaagattttcaaccaaaaa

SEQ ID NO: 39964 - DNA, 720 bp, Setaria italica
  misc_feature (1)..(40): n is a, c, g, or t
  Peptide Sequence Number=SeqID_105938
nnnnnnnnnnnnnnnnnnnnnnnnnnnnnnnnnnnnnnnntttttttaagttctgcagagtaggtaactcaaactcgactagaaatggtgagacaaaatactatacaccatacgtcatacagaggttacagcttagttaactgcgagtctacagcatgcttatccaaacaggtgctcttcgacttcttcatcaggccaagcaggacaccgagttcggtagctgaacacccgccggagcgtcgacacctctgtgttgtaactggaacaggaactgggactgtccaggtgtggccgtatcctgggcgtgtggtggaagattccaacgactccatagaccagtctcacttagctctagctggattgaaggattcgtggtcaagaactatcctggaaaaaagtatatgataaaattggcaaggatctacagagatatcatggcgaatctagctcgccgccgggatgaaaggagaaaatgtcgcagtgagtcatctccacatagcttaatttggtcggtgcacggttttgttgtctgcctttgccgatgtaatcgccgtctcacctctggccgcatcccggcggcgagcagccaccgcctacggcgccagcgaggaacatgaacgcgacgagtggcacggcgagcactgcgagcaaggtggacgcaaaggtgcaggccaggccagcgagctgcctgggggtccccgtggcatgggcgcgccgggg

SEQ ID NO: 39965 - DNA, 683 bp, Setaria italica
  Peptide Sequence Number=SeqID_105939
cgccttggggtcaatgtatgctgcggtgctgttccttggtgtctcgaattccatctctgttcagccggtggtggcagttgagaggacagtcttctaccgcgagagagccgccggcatgtactcatttttcccatacgcatttggacaggtcgtcatcgagctcccgtatgcgttggttcaggccaccgtgtacggggtcatagtgtacgcgatgatcgggttcgagtggacggccgccaagttcttctggtacctcttcttcatgtacttcacgctgctctacttcaccctctacggcatgatgtgcgtcggcctcacgcccaactacaacatcgcctccatcgtctccacggcgttctacaacatctggaacctcttctcagggttctttatcccccgcccaagaacgccgatctggtggagatggtactgctgggtatgccccatcgcgtggacgctgtatggactcgtcgtctcgcagtacggcgacatcaccacgcctatggaggatggcaggcctgtcaaggtgttcctggaggactacttcgacttcaagcacagctggttggggtgggcggccgccgtcgtcgtggctttcagtgtgctcttcgctgcattgttcgccttcgccatcatgaagctcaacttccagaaaagatgacgctatatatatagatatacca

SEQ ID NO: 39966 - DNA, 815 bp, Setaria italica
  Peptide Sequence Number=SeqID_105940
ttcaattcatgccaaggatcatgtgctccaaggtcatgggcaacagctccgattactttacgaatcccccaggtaccatcagcaagaaatctgactctactgttatcttcccgcaaaacagctctagcaaaatcacgttgaatgcttaattcaatcttaggaaacagatccaaaagagcaaaagaggcatagaagtgtacgtcgtaagtgcaccacatgaagtactctattccttccaggtacaaaaacttcccaacgttttctttgtcatcaatctcatgtgggtcaaaaccgattaggggaactgtagaattgcaactgctatcacgaagtgatgaatcactgtcctcaaggagacttgaatttgacttgttatcagcatcaaccaccaaagattcactatcaatccaaacggttcctccagcaactaggaagtacaactcattgaagagagtaattttgtaccattctggaagcctctcatcactgagaatcggggtctgccacttatcaatcgcctcttcccaatgtttatacttcatcaaagcgtcttgtaccaaatttacagctgatcttggcgaagttccatagaattttgtatatctcctgtagtatgtacttcccttttaaaatttaaccttaggagaagaccaagccaacgcaaatacgactgtacatcttccatgtggttcaacccaggtggaagcagaaactgctgcacaaactgtatcacccagtgaagaaggcatgctggcaccagcattgaaattatctcggtcaaaggaaccatcctggaccattgtgccccacatttc

SEQ ID NO: 39967 - DNA, 374 bp, Setaria italica
  Peptide Sequence Number=SeqID_105941
tggaacattggtatgtctaaacaaaagaaattccttcgggtttctcttgttgtcaaagtttacttcttttagcaaactatcatgctctctgtgaatgacttgatcacccaccatgtttagcatccatatcccattatattattctgatttggtgaatgaatgcctttcatagttttatttgcattgctgagtagcaaagcccttcctcaaagcaactctggatatggcacgctccattcagacatcatatatctacacatattccttgccttgaggtacatgtgtgggcccgccagtgcacacatggcacaccctgcgcttgtactaatcaaagtttgttcatgataaccatgctcaccggatatacacaaatt

SEQ ID NO: 39968 - DNA, 1049 bp, Setaria italica
  Peptide Sequence Number=SeqID_105942
aacagtcttatccgtgggcatgcaaaagaaggtgtgcctgaggcggctcaggagattcttgccattatgacgcgccgcgaggtcccaactgaccctgaatcacacgcgctgctagttgatagcttcctgaagaagaatgaggcagctgatgcaaagacagcattggacagcatgatgcaacagggtcacctgccgagcccagctcttttcaagtctgtcatggaggcgctcttcaatggtggtcgtgttcagactgcaagcagggtcatgaagagtatgatagagaagggggttactgagaacatggacttggcacataagatactggaagctctcttcatgaggggccatgtggaggaggcgatcggtcgtgtgaatctgatggtggaaaatggctgtatgcctgatctagataagttgctggttggcctttgtgagaatgacagagtgatggaggcgcagaagctggctgattttgcattggacagggactttaatgttagcttctcaacctatgacagagttctggaggccctgtacaccgaggagaagacactgcctgcgtactccatgctttgcaagatcaagaacaaaggaggtgttgtcaatcagaaaggttgtgatgctttgatggagagcttaaaatctgaagggtactcaaagcaagcagatattttgtctaagatcttggcagagaatgcgccatcaacgtcgaagaggggcaaaagggttgccatgggtgcttagcaaggtctgccatcttgtggaaactatccatttttttcctttttgacttgaagaaagatgtgatgtctttcttttcatcgatgcttcttgagctatttgccaagagggtgttttcatcctataagacaagaagcaggtacatttactttctgtttggagaatccccgatttgttcatcttagcggaaagaaacatatgcaataatagcaaagatgtacctcctgttataaattttgttgcgaaatttagcatttattacttaacagagtaactccttaaggttcatgccaaactaaactaaa

SEQ ID NO: 39969 - DNA, 527 bp, Setaria italica
  Peptide Sequence Number=SeqID_105943
tttttttttttttagaaatatttaatcacaagatactttattttcaatacgatcaaggatcaacacataatttacagcctaggatgcatatccaataccataacataattccacactcacattacacacagctagatagcctggcacgccaaggcattagactttgtccgattacagggctccaagcaaacataccactttaccaattacacactcaggacatgtaatacacgcaactgcttatagtaatcaacacgaattgctaagatgggatgggcatggaccatgtgctctgaagagctcacgtttcatgatttgctctgacccgcatccagttctatgttctgaagcctaagcttcctctcatcagaaaggagcttcgcaaaacgtgtgagcatatcagcatatgttcgagtacgcctatcttttggcattggctcgatgtagctgttcttgcaatcatccttgcttagtagcttatgcagtaaggtttttcttccctaattctttaattctagttccctttt

SEQ ID NO: 39970 - DNA, 798 bp, Setaria italica
  Peptide Sequence Number=SeqID_105944
tagtgttggagatggagttgggcattcctgatctttgcatctgttctactcctgattatgtttatatggaactatgggagtaaactaaagtatgacagtgaagtcaagcagaagctttcaaaggatttaatgagaaagttggggcccaaccttggtaccatcagagctcctggactaggcttagtctgcagtgatattgtgaaaggagttcctgcaattttcggtcattttctgacctcccttcctgcgatacactctattatagtctttgtctgtatcaggaatgtgccggttcctgcggttccccaaagtgaaaggtttcttttccaacgtgtatgctcaaggagctatcacatgttccgctgtatagccagatacgggtacaaagacaagaagcaggagcaccacagtgtgtttgagcgtctcctgatagaaggccttgaaaaattcatacaaagggaggcagtagagctatccctacaaagtgaagacgatgttgactccgacgaagagcctcccacccctatgaagatcatcacagcgccaaacggcagcctctactccctcgatgtccctcttatggcagacctatgtgccttcaacacaagtcattcctgaaaccagctgctcgacacctcatgtcgatcctgtactggactatgcacagaacctcgaactggagctggcgttcatcaagcagtcaaagcagtctggtgccgtgtacctcatcgacaaccccattctattctaaggtcctaggtaaggttactttcttatttggtttttctttttctttaa

SEQ ID NO: 39971 - DNA, 707 bp, Setaria italica
  Peptide Sequence Number=SeqID_105945
tagtactaagtaagtctagggtagtctacctactagttgttgtttttcctaccacagtgtgtttgagcgtctcctgatagaaggccttgaaaaattcatacaaagggaggcagtagagctatccctacaaagtgaagacgatgttgactccgacgaagagcctcccacccctatgaagatcatcacagcgccaaacggcagcctctactccctcgatgtccctcttatggcagactatgtgccttcaacacaagtcattcctgaaaccagctgctcgacacctcatgtcgatcctgtactggactatgcacagaacctcgaactggagctggcgttcatcaagcagtcaaagcagtctggtgccgtgtacctcatcgacaaccccatcatcaaggccaggaaggactcatggttcttcaagaagctgatgataaactatttcttcgcgttcctgaggaacaactgccgccgggcaatcatgttgatgagcatcccgcactcgaacatgatgcaggtgcgcatgacttcttatgtctgaatgtgggagcagcctggttgtgttgttgatggctgtgatagataccacactgaccggaaaagaggaacagtgtaacagtggtgagtggccaaagtccaaagacgatacctgcacacttgggcttatttagaaagtgatagcttcaattcggttgtcatagggatcaacg

SEQ ID NO: 39972 - DNA, 841 bp, Setaria italica
  Peptide Sequence Number=SeqID_105946
cattttattattttttgggaggaatcctttttcaggctttggctgtccttggtggtgcttttatgtgcaacaggatctgaggccatctttttcgaatcttttgttactttcccgtaagatatgttcagtatatgtttgtgcttcttgttcttccttgccttgtcttggcgtatctaggacaagctgcttttctcattgccaatccaaagtcatctgagcaggtcttcttttcatctattccaagtggagttttctggcctgttttcttattggcgaatttggctgcactgattgccagtaggacaatgactgttgctatattccagtgcctaaagcagtctatagcacttggttgttttcctcggctgaaaattgttcatacatctcgaaaatttatggctaaaatctacattcctgttgtaaactggttcctgctggtttcctgcttgggcttcattgttttgttcagaagcgtatatgatgttggcaatgcatatgctatagcagagcttggtgtgatgataatggccacggtttatgttacaatcataatgcttctaatatgggagtccaatattactaaggttctgttgttttttatcacattcctcttcttggagctgattttcttctcgtcagctctgagtagtgttggagatggaggttgggcattcctgatctttgcatctgttctactcctgattatgtttatatggaactatgggagtaaactaaagtatgacagtgaagtcaagcagaagctttcaaaggatttaatgagaaagttggggcccaaccttggttaccattctagtagtcttccttggtacttaggtcttta

SEQ ID NO: 39973 - DNA, 1246 bp, Setaria italica
  Peptide Sequence Number=SeqID_105947
cgcccgccgcccggagaaggctgctcgccgcgtccgtcggggtcggggagccactcccggcgcaatccttgggtgaggtggccgtggcgctggaggtgcgtgaggatgagtacgtcgcgaattccattgtttcttcagaaaacctgcctccccctgacgctgacgagatagggccagttcctgaagccaagacagtgcgcgtcaagttcgtgctgaagaagcagtgcgcgttcggggagcagttcctcgtcgtcggcgacgacccggccctcggcctgtgggatccgagcaaggcgaccgcgttggattggtcggaacaccacgtctggacggcgaagacggatttgccggcaaacaagttgatcgagttcaagttcttgctgcgagaagcctcggggcacgtccgttggttgcacggcgctaacagaactctgcgaattaccgagaccacaaataccttggttgtccacgaagactgggaccacgccaagaaacagagcgtctacgaggaagaagagctctcgatcggggaagaagatgtgatttcttcagaggatcttgcaggaagcaacggcacaatgctggcagataataacatcataacggatgagtacctggggagtgagtcggaagcagtagtagcagacgctcctctgcagggggaaatgatggtagcaaatgaaacggaccagccacagttggcgttgcacaaagacgagacggttctagaagagctccttgaagaagtaaaagcagtagcacaaaatgggagcaacagcaacgacaccaccttctgccaggaaggtgccctgctggcaaataggccaagtatattagaaaacgacttggcctgggctgggaaagccatgcagcaggtgctccggatcctcggtttccagatcggcacaacaaaaacatgaaattagcatcacgaatctgtgtgtatgttgcaaacttgtttgggagaatcagttgtgccttcaccaactcatttctatgctgcaaggaacggcagcactgaggatagcaattgcagcaggaaaacagcagctgtttcgccctgcaccgtgttgcatatagcaagtagtagtagtgcaagtatgttcagtttaggaacagtaactaataaggtgagcaccgtaaaaacctcatactgcttgtcatgaaggcagactccagctgcccagtctggcaatctcagttccaatgagaagttgtatactaaaagtaaaaaaaaaaaaaaaaa

SEQ ID NO: 39974 - DNA, 622 bp, Setaria italica
  Peptide Sequence Number=SeqID_105948
tgttaacaggtgtttctgtccgtttatcctaatccaatgaagtatagttccaacatgtggttcattgaacctcatcatctagctgtttcttctaaccacaggaaggtgggtaataatttctttacacggacaaaagattagctgcttgccggttgcctggcaaaaaaggtggtatctgcttctagtcaaggctgactgcttggcttttgtaccgttttctccaccctgtgttcacacttcacggtatttccctttttttttggaaggaccactcgtcgatattgatctcctgggttcgtgatatcatgtcatgctatcttttggggtccttgtcctgagtaggggtagaaaaatggacccaacacatcataacataatttattgatttggtggttatggctgcattgctttttgtcctatctagcatagtttaagtacatagtggttcatgaattatgttaccttttggcctgttccccatcatatggcaccataatcagagttaatataaaatcaattaaattcttagcagccacccagagcagtcactagtgccatcagaaggcatctggtctcattttaactgggcagatcttacttgttacgtttgttcttttattct

SEQ ID NO: 39975 - DNA, 1298 bp, Setaria italica
  Peptide Sequence Number=SeqID_105949
ttttgttagtagttgtcctgtaatccttgatgattttagttgactgggaaggctgtcgatgcgaccgttggtggtgacgaggctacttctggtgaggtagtcgctaccaccaaggatgctgttagtgttgtggctgttgaagatttgtcggtgggggtgccgcttgtaggttcaggagcagcccctaagcctgcagccccgacactgtcagctaccgagttgccagtccttgaccaggcagttttaggtttgcctgttggggtggtagatgttgtgaaggtagaatcaccggtgattgccgctggctccttgttgtccaatgttatcgctagtggacttggcaaaaaatattgtttctccgactgaccctatggcgctgagtacttgaccggtagttgctgagaggaaacgtgtacgattgccgccacgttcatctcgggatgcggaggacactatccctatggacataggagtggagccttgtccttcgactactctttctggtcccttggttgatttgactgttgatgacgttcctgaagttgacacaagccgtcttggtgccactatgcccatgcttcaaaaagtgctccgctcagtgcgccatcttcaatgtctattggtggtaccctggctttagttgatgtgactaaagcggatgaggctggcgtaccgggtactatcttgggtggagctctagagcctcagattgttaaaaatgttgaaggtctagtgcttgagctaccatcggagtcaaagttttgaagagctatccagagctttcaggatctttatgaaagatctcaaaggaatgctcgggccctccaggagaaaaatgattctgtgcaacgattggcgcaattggagcaagagtgaaaccgtctcagtgagtccttgaaagttcatgaggagcctgcagagtcttttgccgtagagtggagggaccatgaagtgttgcaagagaagttggagaattgctacaagtgtttgaacaagaagtatcaagagctcaagagaaaagagcttattgcgagtagccagcatcttgactggaggaatccgcatgattgagtagctgatgaggctgaccgtctccaggcatcgcttgccgaagctcaagctgcatgtgagcatcatgttggaggtatgccctagaggcaatcatagagatgatgatattccatttgtatccatgatttatattgtgttccttgaatatccattaaaggctacttgaattgattggcaattatgtaaatttatgtgaaactcttacttgtatggttattctaaagtta

SEQ ID NO: 39976 - DNA, 339 bp, Setaria italica
  Peptide Sequence Number=SeqID_105950
taaatcaccaaccaatttactgatgattgcactgcaattatacaattgtgtcttatttctctatacatgtttcaccaacatcagcgttataataaaacattaacatctgttgccttggatgactatacagccttgttgtgcttccagaaagtagccattgggagactgttggaggtatgccctagaggcaatcatagagatgatgatattccatttgtatccatgatttgtatattgtgttcattgaatatccattaaaggctgcttgaattgatttgcaattatgtgaattgtatgtgaaactctttacttgtatggttattctaaagttgtccctaa

SEQ ID NO: 39977 - DNA, 1002 bp, Setaria italica
  Peptide Sequence Number=SeqID_105951
gaaagctgttggaggtgacaaggatagttactcgtccaagcaagtaatggatgctagacttaggatggatggccttttcgagcttgaagagcatgctgttcaatttgttgaagaatttattgctctgtatacaaatggtccagctggtggtggtggcatcagcactggacagaggaaggaaataattctacaaaagatgctggttgaccgggaaaacatcttctggcgagcgcatgcaaagaaggcaagcattccttgcctacaggatcaggccacagattctgaaacggttcagatgcatatttcacaatcacagaagaacccaacaagtcgtgcaatgggcattcaacacgttgacacaagcatggggacagcaccccctgttcgtgcttcacctgggaaaaagattgccctttaccatatagcccacagcagggtcggtgataaagggaatgatatgaacttctctgtcattcctcacttccctggtgacattggccggcttatggcagtgatcactccagattgggtgaagaatgttgtttcgcccctgcttgatttgtcatcatttcctgatgagcaagcgatccagcgtcgaatcaatctgcttgagcttgtgagtgttgagatttacgaagtcccaggcatatgctctctgaatgttgtggtgaggaacattctggatggtggtgtgaactgttcgagaaggatagataggcatggaaagactctgtcagatctcatattgtgccaagaagttgtcttacccccatgatcgactgccccacccggccacccgatgtagactgatgtgtaccatgagcaatttttagaccttgtgtgaactctgaaataaacttggaatgctagtggcacaggtgagccgatctgttggaggtatgccctagaggcaatcatagagatgatgatattccatttgtatccatgatttgtatattgtgttcattgaatatccatcaaaggctacttaagaaaaaaaaa

SEQ ID NO: 39978 - DNA, 351 bp, Setaria italica
  Peptide Sequence Number=SeqID_105952
ccccgcgcgtcagtccgctgccgccggctccgtcacccgcctcactgccctccgctcgccttcctgcccagatcccagcctacctgcccgtccagcctcctgctcgcctgaaggtcacacctgttggaggtatgccctagaggcaatcatagagatgatgatattccatttgtatccatgatttgtatgttgtgttccttgaatatccattaaaggctacttgaattgattttgcaattatgtgaattgtatgtgaaactctttacttgtatggttattctaaagttgtccctagtcggtgttcatgtgaggacacacatgaatattagactagcacatgtattagttgaa

SEQ ID NO: 39979 - DNA, 348 bp, Setaria italica
  Peptide Sequence Number=SeqID_105953
ttacgtagaatactaggaaagaaacaagaatcaaggatttcaaattttccatcaagttgcagaagtcgatagagaagaacgatggtgtcaagggtggtacgctggtgccacttcatatggagtcagattctggaggcaagggtaaaagatcatcaagaacaagcaagaggaggaattagtagcctccagcacttatcatgcatagtggcgctccctttgttggctagcaagttatttctgaccggaagacttgggtgcgaaccgtattcttgtgtattattactggtagtctttctcagtgctagccactattcttttctcaaaattatgagctgacagtacacaagg

SEQ ID NO: 39980 - DNA, 1334 bp, Setaria italica
  Peptide Sequence Number=SeqID_105954
acccaataattagatcatgttctatcaaattacgcatcgaagttttttatttcagataaagtaaacttgatttatgtcttctttgtgttgttcaaccaacattacatacatacacgtggtactcaacattatgtacacacgtggcacttcataaatagatactaaatttctcattttcctgggcatagtttgaactttaaatgcctttctatttgacgcaacacttcatttgttattttcacttctcatattttgctggttgttacctgtcttgtttagggcattgcatgcctaactattctctgccatcttcatgtgttaattgatcagaaagattggaccaagacatcagtgggattttggcaactacttgtgatcactccttccagtgttcatgcgtttcagtgtgggtcaattcatcttgtccggtatgtcagttttgtcagaagcagcctgaaaattctacttgctctgtttgcccaacttccggaaacctctggatatgtgtgatttgcggttttgttggatgtggaaggtatcaagaaggccatgcaaaacagcactggaaagacactcagcactgctattcgctagatttggaaacacagcgtgtttgggattacgttggtgatagttttgtccatcgtctgaatcactcgaagagtgatgcgaaaaatgctaaattcaagtcaaaatgtaaatactctggggatgactgtgtgaactgcacgtgcgatgatgactcagacatgggtggagctatgttcagcagcaaagctgaaacaattgtggacgagtacaatcgcctcctggcaagtcaactcgaaactcagagagagtattatgagggacttttgtctgaggctaaaagaaacaaggaacgccgcatctctgaagctgttgataaagctgtgaatgataagcttcaagagctccaacttaagctcgagaacctaatggcggagaaaaagaaagttgcagataagaatgaaaaactaactaggagccaagacatgtggcgtcagacactaagagatattgaggaaagggaaaaggcacagttgaaatcgaaggacgaaacaattcgtgatctggaagaacagatcaaggatttcaaattttccatcaagttgcagaagtcgatagagaagaacgatggtgtcaagggtggtacgctggtgccacttcatatggagtcagattctggaggcaagggtaaaagatcatcaagaacaagcaagaggaggaattagtagcctccagcacttatcatgcatagtggcgctccccgaaaactaaaaaaccctttaaaaaaagttaaaaaaagaaaaaaa

SEQ ID NO: 39981 - DNA, 724 bp, Setaria italica
  Peptide Sequence Number=SeqID_105955
ttatcgttggtcattgtgggaactgtcattcctttatctcactaatggtatcccggtatggccattgtggaaaaatggacatttaaagtttaaacaagtgcaggtgaaacttgtaatcaagttttcaagaaaaattaatacactagtggtaaacaaaagcctacatcatctgagaacaactatgcatgtcaattgtagtgaaatcatacaaatgcgttcttgattaaaatgtactactagtctactatgcaaacccatactgatggatatagttggccacttcaaattagttatttcacctaaaaaccatagtttgctttgcatttctagaattagtcttgatagagccataggcatcaaccacttttcactaaaagtaacaattttgttctacttacaatattttgaagcacaatgatatttaattgttccttgtttggctatagcaacccagtgcatcatgaatgataaattcatatgccctaaaattgagccaaacttattgtttctgtgtgcaaattcattgtcaatatattttttcaatcagtgcgcttgtccttgtagtatgccgtacagtctactttgagcttcggctaggaaattttgtatggtttcaatgtttgatgtaacatctcttctttttcaggtctgcatgttgttgttataatgtttacaggttatttggttggatttgccatgttcaaagctctgttcaacaatagcc

SEQ ID NO: 39982 - DNA, 1014 bp, Setaria italica
  misc_feature (978)..(1014): n is a, c, g, or t
  Peptide Sequence Number=SeqID_105956
agctctcacagctgcagcctgcacagccatggcgacgaccaccgccgcgccgggcctcgccgtcgccgcaaccgatcccgtccgctccttcctctcctccaccgccgcctcgggagacctcgacgccgacctccgggagctcgcgtccgcgctctcctcggagcccgacgtcccctaccgctccctccgcgccatctggtgcgccgcctcgccagacgcccgcccgcccctccgaagcctcctccggggcgccgaattcgttcttcccagccccaagcctcgcgagaagagcgatgagctcaaggctaggctggagaagctccgggagatgcaggagaggaaggagtacgccgagctcgtcagggacgtcgcgccgcccagcagggacgacagccccgagcccttctcatcctacaaggatcagatcggattcggtctgcatgttgttgttataatgtttacaggttatttggttggatttgccatgttcaaagctctgttcaacaatagccctgtactgaatgctgctggaggtatcttaggagtagtcggtggcatgctggtggagaccgtccttttcatcatcagatcatcaagtaaagagttggcgtcctctgttccaaaatcaaagaaagttcagtaggcacttgaagtgccctggttagttggtgggggaatggtgataggccttaccttctgaagcttatggagcatttgtttgagttcaaaagatgcaagttctggaatagatgcagttgacatcccgtttgagtttgtataagaaggaataggacagagggatgcaatttagtgatctagtagtttgtacctcgcccagtgactggcgcgctaatcattgaagagcatgctcctatgttgcatctgcatatatgtaaatgtaaaaactacatacaggagtctggtatgtttgattatatgattgaagagtatattggatcattattttttagttacacnnnnnnnnnnnnnnnnnnnnnnnnnnnnnnnnnnnnn

SEQ ID NO: 39983 - DNA, 671 bp, Setaria italica
  Peptide Sequence Number=SeqID_105957
gccaactcaataaacctttatcctccagccataagaaccttcgggttaaactttttacacgaagcgagaacaaaagtgtaagtagggtgctatgtgtacgtgtgcccgctcctcagaagggttgggtggtgcagtttggaggacagggtgttacaagttcaaactgcttttatgttttcaaagatgccatagacagcccatttcatatggctaaatggttgcggtagacattgttgccacgttttccccctgaaatcaacataactattctgttggttcctggtctcaagtctcaactactagtctactactgcccttacccttagtttgctaacccaaacattggcacacttttcttgtgtttttgaaagaccaggattaaattcagaggggacacaacgttttctgaaactgaactgtgtatattttatcctctttgctttgagcaacaataatttgcttgtttttctgtaggtttgtgcatttttggagagaaagtgaagtgccattgccaggcactaaactgccagggatacctgggcagtcaaataaagaacccaactcaaaactatcttgcaattgtagcagagcaagaacagttgagggaacattcgcccacacaacgacgcagctctgctccaatattggagtcaatggctcatttgttaccc

SEQ ID NO: 39984 - DNA, 537 bp, Setaria italica
  Peptide Sequence Number=SeqID_105958
tcattatttttgaaaaaaaaacgttcagctacaactaaaaacagggacacttactcatcatttgtgcctcagtcttctgtagtatagcactgtacattgtgttaaaacgtttctcttatcattccctttttgtttatggttcagcttttcctctctgaacttcatgctaccatcatactgggaccattcaccctttggtcaatggagaaatcggtttactgaaattttgctgctttgcttctgatttatgagctaatccttgtgaagcttattgtattgcacagctttgcctcatgcatttttttcctctctttgtttaaaacattttttcagtcattgacgacgccatatgtgaacaaaggctttgggatataagaacgcgtggtgacaaaaacttctacatgtgcgaaatcagcaaagattttacaatagatgcgacatttaaaggaaatgtatcacgttttctaaaccacagctgtgaccccaactgtaaactcgagaaatggcaggttgacggtgaagaacaaagaagtacga

SEQ ID NO: 39985 - DNA, 506 bp, Setaria italica
  Peptide Sequence Number=SeqID_105959
tattttgtattaaaaagaagcgcactagtgttcatgtggatactgggtgcacgaactgcagagctgattctacttgcaaagaagattgtgaatgcagccaagaattgccgctgctcagatctatgtaccaacaggccattccgcaaggataagaaattaaaattgttaagacagagcattgtggatggggtgctgttgcattggagccattggagaaaggtgattttgtaattgagtatgttggtgaaggtaaggttttattttcctgctataattttagttaaaaatagaaccaacagaaatagtaagctcttgatagatgacccttccgcgcaacatttgtggtggtggggtcacattttgctatgttctcaaatatggtcacatttttgctatgttctcaaatatgcagttgtccatgcaaattttaatgcgctctgtctctccaaaaaattactcaaactttccattatcattgtccatgtacccttaataagttagtactc

SEQ ID NO: 39986 - DNA, 883 bp, Setaria italica
  Peptide Sequence Number=SeqID_105960
cgtgtacagttgcagcacatacgaaatgtgcaccatggccagtgattcatctaaaagacaatcgaggaagtgcaatttgctggaggcatccttccgattggcttctgcaaaatgaggaatactttgtttgctggtgacagaatgctgactttaccaacagcatagaggaagtgtttcgccggctacctcttccatatgttaacgaagaattcaatattgattcaaccattagggatttttctgaggctgtttacaagccacccccctatacgtccatcaggcgcaatgtatatttgataaaaaagaagcgcactagtgttcatgtggatactgggtgcacgaactgcagagctgattctacttgcaaagaagattgtgaatgcaggggtctttcgatgagttgttccaagaattgccgctgctcagatctatgtaccaacaggccattccgcaaggataagaaaattaaaattgttaagacagagcattgtggatggggtgctgttgcattggagccattggagaaaggtgattttgtaattgagtatgttggtgaagtcattgacgacgccatatgtgaacaaaggctttgggatataagaacgcgtggtgacaaaaacttctacatgtgcgaaatcagcaaagattttacaatagatgcgacatttaaaggaaattgtatcacgttttctaaaccacagctgtgaccccaactgtaaactcgagaaatggcacgttgacggtgagacaagagtcggtgtcttcgcctctcgttccgtcaaagttggagatcccttaacctatgactacaggtttgtgcattttggagagaaagtgaagtgccattgccaggcactaaactgccagggatacctgggcagtc

SEQ ID NO: 39987 - DNA, 2121 bp, Setaria italica
  Peptide Sequence Number=SeqID_105961
tggaggcatccttctgattggctcctgcaaaatgagaatgctgagtctactagcagcatcgaggaagtgttttgccggctacctcttccatatgttaacaaaaacttcagtgattcaaccattagaaattttgctgatgctgtttacaagccacccccctatacggccatcaagcgcaatatttatttgatcaataagaagcgcactggtgttcgtgtggatactgggtgcacagactgcagagcttattctacttgcaaagaagactgtgaatgcagacacatcagtgtggatggggtgctgttgcattggagccattggagaaaggtgattttatagtcgagtatgttggtgaagtcattgatgacacgacatgtgaacaaaggcttcgggatttagaaaagcgtggtgacaaaaacttctacatgtgtgaaatcagcaaagatttcacaatagatgcaacttttaaaggaaacgtatcacgttttctaaaccacagttgtgaacccaactgtaaactagaaaaatggcaggttagtggtgagacaagagttggttttttcgcttctcgtgccatcaaaattggagagcccttaacttatgagtacaggcctgtaaggaggtgtaaagataaggtaccaaattgcttgtttctggaacaccaacatctcccgccatctcatccattggatctcatgtgtgaagctattgctacaagacgcccacacaatgcaaccattggtgccagtgctcaacatgttgcaagcattggtgaagagcaaaataatatgaattccacgcaaataatggttgactttggaaggcaaggtttggaccatgaacttgaccaagatctccatgatgaatcattgaatgtctcagctaacgatgccgatcaacaagccgaaagaaatgatgagcgtgtaactaaaagacctttgaccagatcaaagagaggaatatccaagaaacacaaggttatagcagtgacgctgacgccttgtgtcgaggagactggatcagttcatccagagttcagaagtgtacaagctaacgtgaatgaatcattggatgtctcagctaatgatggtgatcaacaaggccaaagaagtgatgagcatgtaactgaaagacctttgagtgcatcgaagggaggaatattcaagaaacacaaggctatagtagagacgccttgcagcaaggacaccgggtcagttcatccagagtccagaagcgcacgagctaacatgaacgaacaagaagcaaatcaaggaaaagattactctatatcaagatgcctggatgtgctagatgccatggatgatgtgccagatgggatcaagatcctcgcctctgatgtcttcatggatgtcatgaagcgggagatgtttctttgttatgcaccaaaacttcgtggtccatggttgaagaaggaagttgacaagcttcagagttcacgcctggttaactaactctctgtaagctgttctgttatcctagccttgtatccagctgcgtgccaggagatacttgtgctgatgtaaccggtggatttcatctggatggtaaaactgtgtatatatctgtttatagatggatatatcttacttggagtgttcggtatataaaaataaatgttcctgctataattttagttaaaaatagaaccaacagaaatagtaagctcttgatagatgacccttccgcgcaacatttgtggtggtggggtcacattttgctatgttctcaaatatggtcacatttttgctatgttctcaaatatgcagttgtccatgcaaattttaatgcgctctgtctctccaaaaaaattactcaaactttccattatcattgtccatgtacccttaataagttagtactccatctgttcatcaacatgaaggcattttttaggagttctcaaaagtagattttgacctttaatttctcttgcaatacattgtcgaaaactacaaaattgatatcaaaattcatttgaatgcaaatctattgatgcagttaactaattgttggtcaaaagttgcaagggttcttttagttgaataataattttgccaaggtaaatcttgcaagttgccttatgcaagttgttctaagttt

SEQ ID NO: 39988 - DNA, 592 bp, Setaria italica
  Peptide Sequence Number=SeqID_105962
attatgcttttataaaaacttatggccatgttgcatcttggggactgggaagtcgaaaacaccacattttggaattaatggcttatttttttatttgtactttggtagtttttagtactagtgatgcaactggaatgtgtagtaaaataaagatttgatgaggaacttggttaagtttctaatgatgtaaagcctcaggaaaaaaagattactttgtctagtacaactgtagaagtactactgtctcatcacgatgaagtgcatttcgtatgtgatagttattcatggctacactaacatgcttatttcataggaagtgtttcgccggctacctcttccatatgttaacgaagaattcaatattgattcaaccattagggatttttctgaggctgtttacaagccacccccctatacgtccatcaggcgcagtatcctaaagcgttacttgtcagtagtgaagatttctattctttctggagctatatagttagatgagctttttgtttgtctgcttttcattcttgcacaagtgcaccatggttatttccttcatttgtaaaagatgtatatttgattaaaaagaagcgct

SEQ ID NO: 39989 - DNA, 442 bp, Setaria italica
  Peptide Sequence Number=SeqID_105963
aggcatccttccgattggcttctgcaaaatgagaatgctgactttaccaacagcatagaggtgagtgcaagcatgacataactgcacctttgctatcttttcttttatgattatttcattcatataaagtgtgcatgttgttttcttgaataaaccattttcagagcttctttagcagcctgtctttataatggcattgctgggtaggtttcagaatgtgcttttactactcttaaagaagaaaaaaaatagttagtgtaaactaatgttttagtactttttccactatttgtttgcatggttgaccactaatatgtgtataagtatttgaatggccgcatagaaatggtattagcatataaaaaaaactctaccagcgggggaaagactaccccacggcattacacgaagaaagaaatctcagccaagccggccgagaaaa

SEQ ID NO: 39990 - DNA, 1324 bp, Setaria italica
  Peptide Sequence Number=SeqID_105964
tgttccatcttaactgtgttgtgaaaggtacttcaaacttcaccgctgaaagcttcaggtgccctcaacatgcctgtatggtttgtaagcaaaagatgttcttttggcgctgtgggcgttgtacagttgcagcacatacgaaatgtgcaccatggccagtgattcatctaaaagacaatcgaggaagtgcaatttgctggaggcatccttccgattggcttctgcaaaatgagaatgctgactttaccaacagcatagaggaagtgtttcgccggctacctcttccatatgttaacgaagaattcaatattgattcaaccattagggatttttctgaggctgtttacaagccacccccctatacgtccatcaggcgcaatgtatatttgataaaaaagaagcgcactagtgttcatgtggatactgggtgcacgaactgcagagctgattctacttgcaaagaagattgtgaatgcagacacatcagtgtggatggggtgctgttgcattggagccattgggagaaaggtgatatttatagtcgagtatgttagtcattgtttggttgtaagttctatttgtacgacgccatatgtgaacaaaggctttgggatataagaacgcgtggtgacaaaaacttctacatgtgcgaaatcagcaaagattttacaatagatgcgacatttaaaggaaatgtatcacgttttctaaaccacagctgtgaccccaactgtaaactcgagaaatggcaggttgacggtgagacaagagtcggtgtcttcgcctctcgttccgtcaaagttggagatcccttaacctatgactacaggtttgtgcattttggagagaaagtgaagtgccattgccaggcactaaactgccagggatacctgggcagtcaaataaagaacccaactcaaaactatcttgcaattgtagcagagcaagaacagttgagggaacattcgcccacacaacgacgcagctctgctccaatattggagtcaatggctcatttgttaccctgggccaactgtacagaggcttttaacctgagaagtaaaggcaaaataatccggctatgctgggccggcaagaggaagagaacatccctcgcggtatcttcaacaagcatgccaacattggtgagtgaagttcctgctgcggatatctgattgcccgagctcctgctgaaacagcaggcatatgctcgtcctgtacaataatttcatggtacattctttatatgcattggttggaaacaattctttcacattgctcatctatgttgtaacctaccacattctttatttgatctcatagg

SEQ ID NO: 39991 - DNA, 213 bp, Setaria italica
  Peptide Sequence Number=SeqID_105965
aagataggcaataggaccagagagctgctatggcgttcacggcgaagcacaaggaggtggctgctgagactagcgaagccctggaacaacagttccggcccatcgtgcctaggcccatggcaccgtcgcctccgccattgcctatcggcgccacggtaagaagcatccaatggaaggcgcagaagcgcagccgacaagactatagtagggcct

SEQ ID NO: 39992 - DNA, 497 bp, Setaria italica
  misc_feature (416)..(497): n is a, c, g, or t
  Peptide Sequence Number=SeqID_105966
atgagagaggacgtcatatgcaaatgggtaggtgaaggttttgtccggaaacaacatgggaaaactttgtatgaagtaggagaggagtacattgaagatctcatcagaaaaaatatgatccaaccgatgctctataaccatgataataagcatggtgattcatggagatctggttgacgttcctgtctctaaggcatattaacggatattttgctgtcattgattaaacctcaaacctcaaaatgtatggcgtcactgaacctcctcattcatattactgattaccctaacagtgtttctcctgccgtgtaaaagaggcagtggctcctgcttaattaggtaaacttgttgcaattatgaaatttttaacatttttgtagagtaagaactggacactatagtttttcatgtaaacnnnnnnnnnnnnnnnnnnnnnnnnnnnnnnnnnnnnnnnnnnnnnnnnnnnnnnnnnnnnnnnnnnnnnnnnnnnnnnnnnn

SEQ ID NO: 39993 - DNA, 1968 bp, Setaria italica
  Peptide Sequence Number=SeqID_105967
aatcatgagttatcctccccaatcttcagatattttcttcctcgtcgtattcgtcttcacatctgactcctggcgctaccttttgcactgtttctgagcggggtgtgctgccaaagattggtctaccggccggccaccacctgctggattcatcgggccatcgatcgcttctctcgccggttagcctgccggccagctgcatgccgtgaggtctcctctatctgttcgcggcttgatttgttgccaattgcaagccatggacgtcgtgacgggggcgatgaccatgctcctgcccaagctgggcgatctgctcgcggaggagtaccagctgcaggcgagcgtccgggacgacgtcgccttcctcaaggccgagctggagagcatggaggcggcgctcctccggatctccgaggcgccgatcgaccggccgcccgacgcccaggacaggatctgggcgcgggaggtccgggagctcacctacgacgtcgaggactgcgttgaggccttcctcgtgcgcctccaccaccacgcgcccaagaacgacctgcagggactcaggggattcatcgacagaggcctcagcctactcaagagggccaagatttgccgtgacatgggcgccgatgtcagggacatcaagagacgcatcgttgaggtcagcgagcgccgcgtcaggtacaaggttgacggtgttgctgcgaagcctggcggcccgaccgtcgacagccttcggctgtcggctctgtacggcaaggcgaccgagcttgtcggtacccgagagaggagtgatgagttggtcaagatactgatggagtgtgatgaggcatcgaagctacggctgaaggtggtttctgtagttgggttcggaggattgggcaagacgaccattgctaaaatagtttacgagaagctgaaagggcagtttgattgcgcggcttttgttaccatctctcttgatcctaacatggagaaggtattcaggaacatgctttgtcaacttgtccatgaatgtaatatgagcaattcaacgcgtggtggtgaagcacaaatcatcaaggaacttaaagaattcctccgaaacaagaggtacttgattgttattgatgacatatggagttattcagtgtggaacacagtccaatatgctttgattgagaatgaatgtggaagcagaataattacaacaactcgcattcttgccaaacaagcttctgctagtgtctatcaactaaaacctctttctcttgctgattcaagaaatttattctgccatagaatatttggcattgaagacaaatgtcctcctaatcaattagctgaagtatctgagaatattttaaagaaatgtggcggtgtacctttagctgttattacaatagctagtctattagcaagtaaaatgagaaaggaaaatacagagaagtactggtatgaagtatatcaatccatgggttctggactagaagaaagcatagatgtgaagaacatgagaaggatattatgtcttagttactatgatctgccgccacatttgaagacttgcttattgtatctaactctatattttagaggattatggtataatgagagaggacgtcatatgcaaatgggtaggtgaaggttttgtccggaaacaacatgggaaaactttgtatgaagtaggagaggagtacattgaagatctcatcagaaaaaatatgatccaaccgatgctctataaccatgataataaggtatggtctttttgtgtgcatgatatgatgcttgatctaatcacttccctctcagaggaggagaattttctaaaagcattaggtggttcgcagccgatatctgtgccaagtaagatccgccgattgtcccttcaaaacattaaggccaaaggtagaaggcaggtggaaaccatgaacttgtcccatttgagatcacttattgtgtcaccggaagcattcgctttgttgccagccc

SEQ ID NO: 39994 - DNA, 2987 bp, Setaria italica
  Peptide Sequence Number=SeqID_105968
ccacattgaatgcccacatagatcaatgcctttctgctgaatctaatactgagcttgttgaaacagtccttgtgaaacctaaagtgaagccaaggaagaagcgattgctggaggacatatacaagaccgcccttccatacactcttgaggatcttgaccggagaaatggcactaattgggcagttgagttggctatgtccacagtgagcaaagaggtttgcactgagaaccaaagcccagaagtggcaccatttgaccgaagagatgatgaaaaagaaggagatgtctatgttgattctaatggaataaaaattagaattttgtccaagtgtagtgatggacctttggtgttgagggatgatgattcaaggaaagttgcgaagcatgagactggaaaatgcatactgatgagcaaaaagataccaaagtcgaaaatgttgaagaataagaagctcaagatgcatagaaagaagtacaacaaaacaaaccatttgaactcccaggttccagcatactcacatgacgatatcaatgaggaaacctctgaggaggagcggcattcgcggaatccttctggaagcaccagcaattgtggttctgtgactatgaggcagtgggcgtgctccaaacgctcagatattaccaagaattttagcagaaagtttagtgataaagtggcatctggagcacagaaatcagataggagcagcatgcttggctttaatgattcccaaattacagaaagtcctgctggggtgttttcttctgagtcaccagaagacatggccactacctcagaagccattggctttgaacagagcaatgcaagattgctcggatcaattcctacatggtcgtcaaagacccctctgcagagtggcatcgtgccaaaagtacctagatcagctgcagctcttgcaaagaggaaaattaaggagattggaaggagagaagctaataagctagataattatgatatagagaggaatccctcctcagctaaaagatctgaagctaggagtctttccttctccactgcagggccaagcaatggaccaaacaggttagtgcctacatctaagaagatccggaagcaccgatctatgttgaggactggcaagcgtgcattttcatcttctagtagtaggctcgttcatggttttggccgagatcacgaacctgacaccggacatgtaaataagaaattcagagtttctaataatgagggccccaagaagtttgtgaagcacacagaagaggatacagcggataatgactcctcttttggaactgacatgccagaatcaggacagcaggatgatcagtatgatgtgccacaagaaacagagggtacacaaatgtattatgaaggtgaagaacctgaaactgatgtaccatatgattcaacatccagaagtaatcctgttgactgtcaaataagcgatggttccctgagtcctgaaaataacagatcagcaggtaatgttttagttgaaggctacagtgtagctgtggaggatccaagctccagtgagcaattagcacatcatggccaggagtccaacagtgttgtcaataatgagacggaggaatggcagatagatccggcttcaacaaaggaatctagtgcctgcttgactaataacagggacatgggtcctggagctcctcaggataactcatcaataacgtcaaatagagaagactctaaccaagagcagggtttgccactcggacgggactcgctggattctcctatttcaactgcatcaaccatgtctcctccagctgctttgaaggattcaaggatgaacgaatcagaaccaggtccttctactggtagaactgttgaagagcgaaccactgggagcttaaatcaagaaaacaagtctatacctatagcaagagaaggtgaacagatgcccaatgaaaagcctttccgttgttcttgtcaggagaatattgccagggattctaatcaaagtgctgtagtcagacctccaatgctgaattttactggaaagcaggttccacagttgcacattggtttaagggcatcatcatgtttcagcacataccaaagaaccagcacaaagcccaacccttgcttggatacacatgatcatccattagcagctaaggtgtcagctgaatctgctatgaacctcccatcttacacagcagattgtatgagccccgcattacaaaatcagcttccttcaccatcaaatcctatcttgaggctgatgggtaagaatttgatggtgatgaacaatgaagagagtgtgcatcctcagccaccaagttcagactatatgttgagggggaattatgtggcgcctgttggttttgtgcctccgaaataccaacatctcagtaattcagcgtttatcaacacacccccaaccacagcaagtcaccaaatgcctctaccaagtgttcaggctggcagctttgttggtcctccattgcatggtggttcagtgatgcaatctgaccatcatgcgctgcagaaggcctacagaaacattgtgccagtcatgcatcatccaaattacatgatgaaagaagtgattgtgattgatgattctcccgaacacagaagtgagccacaagttagcatgcttctcccccatgccccatctccagcaacaatgcccacaccaaacactatgccaccccagccattttactgccttccatcacaaagcccaattttgccaagggatagggctgttggatccatgcctgtatacgcaaatgttggctcaatggttggtgtcggatcatcaagtcaaggaagccaaacagaagtagccaatccttacatgcaaaatccattcttcgcgcagtctgcaactggttacttaaaccagccaatgtactattcacagaatctgcggcgatagtttctcagtaactcaatgaccaggagaactccatttagcttgctggtcatcactgtcaaaatgggggatgagagtttt

SEQ ID NO: 39995 - DNA, 415 bp, Setaria italica
  Peptide Sequence Number=SeqID_105969
actagtctgctagctaccgtgcctccagtgtgtgctcgtgctaacagcagcaatggcgcccgctcaatgtgtggcctcgcagagggtgttccacttcggcaagggcaagagcgagggcaacaagacgatgaaggagctgctgggcggcaagggcgcgaacctggcggagatgtcgagcatcgggctgtcggtgccgccggggttcacggtgtcgacggaggcctgccagcagtaccaggaggcggggcgctccctgccgcagggcctctgggacgagatcatcgacggcctggcgtgggtggaggaggaaatggggcgcccgcctcggcgacccgcagcgcccgctcctgctctccgtccgctccggcgccgcggtgtcgatcgcccggtatgatggacacggtgctcaacctgg

SEQ ID NO: 39996 - DNA, 440 bp, Setaria italica
  Peptide Sequence Number=SeqID_105970
tgggatttctattttgcggtttcctcgtcattgcgtccagtcaaggtcaccatggtgggacatcgagctgggagggtgtgacagcaggtgttgtgaatacgatggtgatggtgtatccttcaaggtcctcttgtcggagcaaagaatcttccccatgacaaatctagtttgaaggaatgttgatccgacagaaatttggcgaggatgtggtacctgcaaccggcggcatggccatgcttagtacttgtggaagtaatggcggtgcccgatccaagtagttgtcttcgttgataggtgtaatgtgatttgactgagatgccattgttgttgtgtgggagatgaggaagatgcaaatctgataattatctttttgtgtttttagtgttgttagcttggcggccgataaaaaactgcaccgctgtaattggcgccattttctt

SEQ ID NO: 39997 - DNA, 688 bp, Setaria italica
  misc_feature (101)..(101): n is a, c, g, or t
  Peptide Sequence Number=SeqID_105971
attagggacaatgaacatggccaggagctctcctttcagcaaatgggtatgcaatgttgcagcacatactgtcaacagctagcaccaattatccggcttcngaaaaaggtcgtgtctttactggcatatgtagctgactttcagctaagtgcaggaaagtcacaggctccattcttaagcaatcaccttttcataaaatctgtagttgacatgatatcagctcctgaccttgaccttgaggagaaggctttgttagctgttaggagtctgctgcagcttacttcagctgatgcctcagatcttcagaagttttcaggcctggatgataccctggacgcattgagagtacaattggacgagttgacatcccaagaggaacgaagagagtatgctttggaagttgaaatcctgcggagagaagtccagatcatgttccaacagaaattcaatcaggtattgcaacatcaaatgaaaaatgacaaatgaaggcaaatataaacacttgagtttcatgggatcgtggacaattgatacaacgtcacaaaacagtgactgtatcgcctatcaaattactgaagaaagaactgcaatggaaccaatttcactgccattcctgcttcgtgtccttaaaaacgtttcctaaaatcataatacacccattggttgctgctgctgttcatatgcaaat

SEQ ID NO: 39998 - DNA, 225 bp, Setaria italica
  Peptide Sequence Number=SeqID_105972
cgcagctcgcaggggtggatgcttatgggctcatctcgatgattgtggaggctgcgcggacggttaagaggaaccgggagacctgccagctgcttgcacgccgtgcaaggatgatcggggaccttctgcagcagctcgaaagaacacggctgaagcagcacatggagacgaggaacccagttgagcagctggaggagacgcttcggcaagcatatattctcatcg

SEQ ID NO: 39999 - DNA, 1175 bp, Setaria italica
  misc_feature (1)..(38): n is a, c, g, or t
  Peptide Sequence Number=SeqID_105973
nnnnnnnnnnnnnnnnnnnnnnnnnnnnnnnnnnnnnntttttttttttttttttttgtcctgaaattagagtttctaataatttgaggataaattacagaaacaaatcataatgactctctcagtgtacaatttgagttcaagttctggaacggctccacgtgtatattacataaatttattctcccacaagatctgaaaatgagacatgattacatgaacaaaattaacagcgtaataattaacgatgtatcccgaagaaaactaattaccgctttgccagagtacccgcgcgctactacattcaccggccaaccggcctacacctcgacgctgcatcccgtgggctgcgcgaacttgagcgccgacagcgtggcattggcgccgccgccgaagccggggaagcccgcggagagcacggcggggcagctgacgaagaggtggtagctcccggacacccagcttccgaccttccacttgatgcggccgtcgaccttgacctgcagcgcgacgaacccggcggcgacgtcctgcttcatggcgtcggcgacgtacccggcgacgggcacggactgggccgacaggaccggcgaccagacggtgacgtcgcggtggccctggtactgcggcggcagcgagacggggaccgtgacgggctcgtcgcggtaggtgacgaagacgtcgaggcggcggtagaggacgccgacgtggtcgttggggttgcgggaggccagcgtcacctgcgccgacgccgagagggacgggtcgcccacggtgatggggcggcggagctgcaggtcctgcaggtagaaggacggcttggaggggcggagcgcgaggtagacgacgagcgcgacgaaggccacgatgaggaccagcgccaggaggcacgacgccatgcacccgcagcagcgccgcaggtggtgctcgtggcggtggtgcttgccctccttgctcatggctgatcagtggtcacgaccgcgctctgctctgctctctcccctgctccggtgagctgtgggtgtgcctggagctctgagctgaacctgctgtgtgtgagtgagtgagtgagtgagtgagagagagtgagccgtgtggtgtaggaaagcgtaatggcttttaatttaaaatcggtggcggcggtagtggctacacatcgcatgggtcaacgtaag

SEQ ID NO: 40000 - DNA, 444 bp, Setaria italica
  Peptide Sequence Number=SeqID_105974
ttgttgccgaggttgtaagcattggtcacctccaacaccgtaatcttgtgcagttacatggctattgtcgtcgaaaaggtgaacttattctagtgtatgaatacatgtcaggtggaagtcttgacaggtacttgtatgatcaagagaacaagcctactttgaattgggatcaaagaatgcgaataatcaaaggaatagcatctggcttgctttacctccatgaggaatggtagaaggtagtgctccatcgggacatcaagccaagcaatgtgctccttgatgatgaaatgaatggacatctaggtgattttggtctagcaaggctatatgaccatgggggcgaacctcagaccacacatgttgttggtaccataggatacctagctccagagctagcacgaactagcaaggcaactccacctactgatgtatttccttggtatg

SEQ ID NO: 40001 - DNA, 235 bp, Setaria italica
  Peptide Sequence Number=SeqID_105975
ggctgctcagcgggctgcagaggacgcctttcgccttcccagagtggatgagcaggtgcacaaggcggtcatggccgcgaacagggcagccacggctgctcgtgtggcggcgatcaaggcagtccagaacaggatggatggcaaattttgtgatacctatgtgtgaattgttgtgttggaagaccatggtttttccccctttaactgtacgttagggtagtgaaggacaataact

SEQ ID NO: 40002 - DNA, 439 bp, Setaria italica
  Peptide Sequence Number=SeqID_105976
gggagtgcctcggagatgaaagagccagcaagtactaggcagagggttggtggatgcaagtcgtctgccaggcctgatgcaccgcagcatagtggatctggctcggatatgtctgaggatgttgaatcttcgagtaattcatcagatttcactaaagaaggaccatctgagccatgccctcctgtacaggccgtggagttgcctccgtcatcgggagacattcctgtgccagaagagtccataagttatctcttttctgtttataacttcctgcgatcgttcagtgtgcagctgttcctgagtccatttgggctggatgattttgttgcggccattaattgcagtgcgcagaataacttgttggatgctgtacatgtctcgctattgcgtgcactgaggcggcatcttgaatctaaatctgctggaggatctcagcttg

SEQ ID NO: 40003 - DNA, 958 bp, Setaria italica
  Peptide Sequence Number=SeqID_105977
cccgttgccttgattgctgtactgggttcctatggatttgcttgctgtccaggaagaagagcattgttggcatcttgttaaagatggacaagcaaagtgttcctgatggtgcaaagcttgtgacataccagtggaaccttccgtactcaacaagtgagattattagaaggttggagctgcttgatgaagaggatgtggttggcagcggggggtttggcacagtgtacaaaatggtaatggatgatggcacatcatttgctgtgaagaggattgatctcagccgtgaaagtcgtgacaggacctttgagaaggagctcgagattttgggcagcatcaggcacataaatcttgtcaatctgcgtggctactgcagactccccacagcgaagctactcatatacgattttgtggagctgggcagcttggattgctaccttcatggagatgaacaagaggaccagccattgaactggaatgcacgtatgaaaatcgccctgggctcagctcggggtctggcatatctgcaccatgattgctcacctgggattgtgcatagggacatcaaagcaagtaatatccttctggatagaagcttggagcctcgtgtctctgattttggccttgcgagactgcttgtggacaatggcgcccatgttaccactgtcgtggctggtacatttggatacctagcaccagagtacttgcagaacgggcatgctactgagaaatcggacgtgtatagctttggagtgcttttgctggagctggtgactggaaagaggccaactgatgcatgcttcatcaagaagggactgaacattgtaggctggctgaacacgctaacaggggagcaccggctggaggacatcatcgacgagagatgcggtgacgtggaggtggaagcggtggaagccattctagacattgctgcgatgtgcacggacgccgaccccgggca

SEQ ID NO: 40004 - DNA, 575 bp, Setaria italica
  Peptide Sequence Number=SeqID_105978
ttttttttgcctttcgaatacagtatgggatgaagaacatctcctgagtgcaacacatcaatattacaacctgtttgttctaccgttctaatgaccctgtggtgcacttttggttttgtcttacctgctacatgcttccttcaatgaatgtcaatttcctgttgcaattaccattttatatttgttaatcctcaagaatctagcacttgacggttcaggaggctaaagctaacaaatcatctgatactacacttcttggatcagctgatgcccaggaataattttcagcttaatgatctcggaacatgtcgtcatccagtcaggctggacgagccaggttcagagaggccagcagggcagcaaagctccatgccaaggccagcgtcatcggccaggaactcactccacggccactgctgatcgccgaggccctctctcgccgcctctgctccgaccgacgacgatggccgccgctctttgtcgggcatggaccacgggttgccgccgctgggagcgctgctgctcccgttgccgctgctggtgcttgggctcacgacgccggccgcggcgtccaa

SEQ ID NO: 40005 - DNA, 807 bp, Setaria italica
  misc_feature (777)..(777): n is a, c, g, or t
  Peptide Sequence Number=SeqID_105979
gttggttgactctcagcctttccttgaccatgatatgtttgctgttatgtctggccctaccattgctgccattgcagtggtatttgatcattcggagcatgaagacgttctattgacctgtgtggatggcttcttaggtgttgcgaagatctctgcatttcatcatcttgaggatgttttggatgatcttgttgtttctttgtgcaaattcaccacactattaaatacctctttggttgaggaaccagttactgcatttggagatgacctgaaagctaggttagctactgagacattatttactatagctaacagatatggtgattacatacgtactggctggaggaatgtattggattgcatcctgaggctgcataagctagggcttctccctgctcgtgttgctagtgatgcagctgatgattctgaactttctcctgaagctgtccaaggaaaggctgctcctagtgccgttcctccatctcatattccagtgatgggtacgccttggaaatcttctgggcttatgggaagatttagccagctgctctctcttgacagtgaagaaccaagatcacaaccgactgaacagcaacttgctgctcaccagagaactcttcagacaattcagaaatgccgcattgatagtatatttacagagagcaaattcttgcagcctgattcattattgcaacttgccagggctctgatctgggctgcaggccgaccccaaaaggttgccagttcgccagatgatgaggatacagctagttttcngcttggaactgctgattgccataacattaa

SEQ ID NO: 40006 - DNA, 1793 bp, Setaria italica
  misc_feature (1)..(19): n is a, c, g, or t
  Peptide Sequence Number=SeqID_105980
nnnnnnnnnnnnnnnnnnnttttttttttttttagctaggaaattattccgatcttctttaaatgacgaactcgaatcactaattcacttacagaagatgacaacggtatagtacagtgtacagtacagccatgatgaggccggcacagctaggaataggatggtccttccctcctgcttactcgaggtgatcgtgcggccgaagcgacatgaacatggccgcgtagtgcctgagccgccggtccccatcgtcgggaccggcggccagcggcggcgccaccatcgcggtcacgtccatcttccttgccctgtaccggcgccacgcgagctggatgttgacggcggcccaggttcgccagttagacgagtagtaccgcgccgtgtgcttgagtttctcgttggcgaacttgtaccggaagtgttcggtgatgaactgcaggtccggcgcgtcgaggcagaacgcctgcgccgcctcgacgcactcgaacgtcgccgacgacgccgggagccggtccacgaaggggcggcgcaggcaccacgacagcagctcgtcgcccaggaagttgcccgcgcccagcatgcacgtcgccaccacgcccttggtcagcggctgcgtgctccggagcttgccctgcaggatgaaaaccatgcgctgcaccgggtcgccctcccggatcaccttctcgccgctggagaacaccagcggccgcagccggtcgcagatgttgtccaggatcaggtcgtccatgccatggaacagggggaccctgcttaaccagctcgaggcagaggtagcgcttgatgtcacgcctgagtccttcaggcaggtccttgatcatctccatctcctcgtctccagtgacagccgcccagcgttcgcgctcgaacttgcggaccctttgcctcaggcgggacggcagctgcctccgtctcatccaccattccatgtcccggaatcgcagctgcatcttccgcttccttgccaggacggcatgcagaaatacctgtatgtttcctatcagcaatgtgaatagcatcaggccactgaggacattgattatgctgaatatcacctcaagaccattgcttgttggggcgaggtcgttaccgaaagtactgagagtcatgaggccccaaaatataggatagagtattttgacagcaagcgaattgcttgatataacaggaagagcccccaaatagattccataagcaaaggacccatttccacttagacaagtagacatgttttgttgactgaaggaggtcatgtttgcatcacatgcgagtccattaacattcgatgaccaaggaggatgaaaacatatctccttggaacaagcaagtgacattagatcgcaactgttatttttcttgcattcttcctgaaggcaggaggcaatacgctgaattgcaagaacgtaccaacaaccacctgcgatatgagatgcaatgaaataggcaaatagatttagaccaaatccccaccatattgttccaaagatgtaaccagtcaccttctgcattttcctcatgatatgaatactgtggtacaccttggggaggaattgaaatatgaatatgagcagcaatattgtcatgataaatttaacttgctcctcccttattaactttggtataaccagccagaagatgatctgcggtagggggaggatgacgaagaggtcgaaccagaggcccttgagggagcgggcgtagtgcgcggcgatggcgcgggcgtcccagacgagcttgccgcagccgacgacgagggactcgcgggagacgtaggc

SEQ ID NO: 40007 - DNA, 249 bp, Setaria italica
  Peptide Sequence Number=SeqID_105981
cagaaacaggttgtgttggaactaatgtggctggaccttcgtcggtcaaaagtagagattcaccagcaatggtttcaactgggtcactttcttctcatgctagctgttcctccatctcatcatctagtgcaatggtagagtctatgctgcaaatggaacctgatgttgtacagttatctctcccacataccacccctgcagagggctttgaatttaatttctcacgtgacggcatgcagaccacttggg

SEQ ID NO: 40008 - DNA, 561 bp, Setaria italica
  Peptide Sequence Number=SeqID_105982
tggtgaatgtctggattgcctttgcaagaacaacaaaggctttgattgttcaggctgatcgtgatgacgacgatgatggtgatgtcgagacaccaaaggcaaacctggacaacgaggtttggcaggggctggagtcggcatttgtttcaattgtgctgacactgccgtcaaatagtcaagctgagattttatcagagtggctccagtcaaaacatgttcgatatcctgacttgacagaggcgtttgaagcctggtgttacagatcgaaggttgccgaaagatgccagttcatattcctgagtgacattgatcgcgtatcttgatccttgactagtctaatcgcgctgtggaaaaatgccattttgttcatattcctaccatctgactctcgaacttgtcactgataggattgagttgctgcctttcactgaaacagtcataatggagctccattatcttgattccaactcaccccagatcaggttgtcagttaagttttggtggattatctgcttatgaacttacattgtaactattcgttcttgtttaattttggtttaa

SEQ ID NO: 40009 - DNA, 281 bp, Setaria italica
  Peptide Sequence Number=SeqID_105983
tccccccaatagccgagctgtgcatagcctgcaaaacagcatgctgaatggaagaatttgtgcccaaccaaatcctccctttgaacctaagcagcccatcctgataagagaaattagaaacagactgcccatccaccaccaatttggctatcatagctgaggaagcaaggtcatcaaaataaccatccacaattacttgggtccattcagaactagacatagaaatagaatagcaatctgcaacctcatgagcccttctagacaaggcgtcagcgcaaact

SEQ ID NO: 40010 - DNA, 417 bp, Setaria italica
  Peptide Sequence Number=SeqID_105984
tttttttgtttcgagtcttataatgacataaaactctttataacaagcaatagtacatatcggttcaaattcaagacgttcatcacaactcggcatgatttacaaagcaggcaagcagctactacccgcatttgtcggttattcatcgaaaacatcgataatttcacagcacataccgcatccgggtacaaaaggaaggaatagatctaacaaatttgtagacgccgcagctcgcttagttggtggtgaacttggtgacagccttggcgccctcgaagacggcatgcttggcgagctccccgtggaggacaaggcgtacggaggtctggatctcccgggaggtgatagtgggcttcttgttaagtgcgggtgaggcgcgcggcttcctgcaccagcttctcgaagatgtcgttggtg

SEQ ID NO: 40011 - DNA, 540 bp, Setaria italica
  Peptide Sequence Number=SeqID_105985
aatggcacactgttagcgacagcgcagtaacgcgctgctgaggctgattgcatgacacgccgatccagcgacagaaggacacgttggttgtccagcttctggcaaggatgccgagaggatccgagagctgagctttgaaagctagcagcgcggcgaggtcggtctcgctgccattgatgtttggagttggacttgggcctggggaagacgaagaagcagaagccacaccagtaactagaagggacagtgagatgaccaacaattgcaccaggatgaacgagctgcttgcagtggccattggagcgtgccaggcttatttagttgttcaacgagacactcacaaaaaatgcatgcagggagtgtgttgcggttcatatctatgaccagctacgcagcaacgttttgtaggaaagtagcttgactatattattttttcctagttaatttccaaatttcagctttccttgaaaaaaaaaaccaatgtcagatgaccatactgtacgcttgccatctgggcgtgtttggctaaatatgttgact

SEQ ID NO: 40012 - DNA, 593 bp, Setaria italica
  Peptide Sequence Number=SeqID_105986
acaaaaccacgccggcttctccttcgactacctccccggcgagagctggcagctctgcgacgtccgcgacggccgcgtcctcctcgagcgcctcctagagcacgatgaggacagcgtcgtcttctcccccgagctcgcggtgtgcgaccccgttcaccggtgcttcaggctgctgcctcccataccacaagacctaatcgcccatgtccaggtccagggtaacaaggcccgctattttgaggccttcctcgtgccatccggacaccaggaggagacatcgttcaaagtgatcggcaggacacactgcgaggagaagctggcagtgtttatcttctcctcagactctaacctctggagagtgggcacatctaccagctgggctgatctaggcttgaccacaccaccagacgatttcgttctgggttggtcacaatatgagcatggctgcttctactgtaaaattatctggagggacaagttgctcaagctcgacatgaacagcatggagttctccactgtggacctcccacaggcgacaatgatgagcgggaattgtcattggtggagggaaaggggaagaaggtaggcttggc

SEQ ID NO: 40013 - DNA, 547 bp, Setaria italica
  Peptide Sequence Number=SeqID_105987
acgtcaaaatacaaaatgatgtcggtaatttaaaatcagcagcagttgaggaaacagtggttgtaggttgatggtataatggagacctgaggggggcaatcaggatcgcttgaactcggttgctctcatacattgttctaaaacaagttcaaatgagtgcatactaggacaacacataatttcagaatctggcatatcctacaattacggctggagcaaacgacttgcatagccagttgtcagacataaacgccacttgcaaggagcacgaacagagacccaaagcccaggaatacagaagccatagcagctgttgtgatctcctttgccaggctacggctccgcctggatgaagttgcttcataaatgaagaaggatgcggtgagcatgagtccgacggagaccatgagggcggccagcgacgggtaccactccaccggcacggggctcgagatcgccttcgccgccattacgccggatctgctgcctgccgttgcggtcgccgcctggtctgcctgcctcgtcgtctctttgactgagtcggata

SEQ ID NO: 40014 - DNA, 1023 bp, Setaria italica
  Peptide Sequence Number=SeqID_105988
ttttccattcaaatcagacagacatgcaaatttccatgatcaaccagctcttggcagcaagagcagttacagaatattatcatatttaggggggaatagagtatggggcagagaaacaagagaattacttaactcgtgtaatttcttgagtaatccaccagcataactcaaaaatctaccaccagatcagactaacttcagctatcaggcagactagcctaaatactactaaagaatgaaaagaacaaaatggtttcccgagcttgcgaaaaatgtacgggattcagttgtgaggttgcacactgaaaatgagctcttgtggccactaggcaggcagctcatgcactgatgacacctgacatccatggcacaacgacaggagcagtcggatgagaatctcggtacggctcagagtaacggtctttgaagtttaatttagggtggtctgcctgtttcaaccagcattcttgatgtttgtgttcatatttgtctggcgagtagcatccatactcagatggacagtaaacccaaatattgcacttcaaagctcctggcttggccctcttagcctgatctatacaagcttgacagcaatctgcagcactttctttgtggtgtgttaagccccatctaacagcagtgccaccataatcagtatgcagttcagcattgcattcagggggcaaaggtggaccaggtactatctcttcttcttcttgttcattctccggcttgtcatcatgttcaatatgatggacagtgggaggtatccaaagaccaatgtcctccaatagcattcgccagttaaaatccaaggctcgctttaacatccttgacttttcactggagaggccaaaattagataaattctgagttgatgaacttctgatatacttaagcttctcaacacgccatgactctacagcttctcgttgttcggtggtattgcgattctcccccaaatcacgcagcctctgcaaaatctcatgcgaaactttctgcttcagctccagcggcagctcc

SEQ ID NO: 40015 - DNA, 413 bp, Setaria italica
  Peptide Sequence Number=SeqID_105989
ttttttaaaagattacaatgcattgattcttggaaggaaaaaaactaaagaaagaaactgcaacaatcagttcttgatcttacaagagcatctgaacaagattacaattcatggtcttgatccacaagggctacatcggattggttctttccaatcaagctacaaaaactcatcacagcaagactacactacaagaatcagttctgtcctaatgctgctgacctcctgtatttctgcccactagaagaaactgatgaaaccacaccgatccggctgagaagaaagagctgaggacagtggcgcgtcctcctcgtcgaaccaccggtggctgagcgcctccgccgcggtgagcctctcctcggcctcgacgctcagcaggccacgcaagacctcgcgcccggcctccgacagct

SEQ ID NO: 40016 - DNA, 463 bp, Setaria italica
  Peptide Sequence Number=SeqID_105990
gatttcttacaaaagtatcatacttttttctgcatgtcaaacactattttgtgccatgttttatcatttggaggccattctagtccagggagttgtcggtaatagaagcatgacgttgtgtcatgtgtgctatgtcgtaaattgctgatatctttttagattaaggaaagagttcaggtgccgatatctacgtttaacagcatgtagatctcaggtgcccgggcacgcaggtgccaagccgccgcttccgcactccacagccctgccctgcctagctacgagccgtccacttcgcgtacgggccgcaagcacatgcagccgcgatcataagctcgcgggcggccgccaccgagatctcacgggcgtgaccgcgtgagatcatcagagacgagaaaacaaggacttccccttgtctcgcctgcagatcactgcgtccccctcatgattcaccgcctctaattgt

SEQ ID NO: 40017 - DNA, 332 bp, Setaria italica
  Peptide Sequence Number=SeqID_105991
ctttcgactgcttctactcgatcttggccatgcccatcatgcgcttgctgacggcgtgcacggcggcgccggcgtcggcgcgcgggtccaggcccgacccggacatgtagttgcggacctcgatccggatcatctcctgcatcatcgacaggaactccgcgctgaacggcgccggggactgtggcggcggcggcggccgcggcgatgcgaggttcatcgccggcggctccagctggaacggcaagctcggttgggttggcgggggcgggggcggcggcggcatctgagaaggagccggctgctgctgctgcatctgtacaggaggtggggac

SEQ ID NO: 40018 - DNA, 1310 bp, Setaria italica
  Peptide Sequence Number=SeqID_105992
cttcatattcagcagcagcaaagggggagaggtagcagtggcagttgcccccacgcaacagcaactcagatggcgggcggcgaccgcggctcctccgacgcggaggcggagctccggcggggcttcgagaccctcgccgtatcgcagccggaccctgcggctgcggtctacgaggtccgcctcaaccgcccggcgcagcgcaacgcgctcagcccggcggccttcgcggagatcccgcgcaccatgtccctcctcgaccgcctccccaccgcgcgcgccgtcgtgctctccgccgcggggccccacttctgcgcgggcatcgagctgggcgggcctgggaacccgctcaccgcgtcctcgtccgggggctccgaccccgtggccgccgccgaggggctccgccgcgcgatcctcgagatgcaggaagcgctcacggcgatcgagcggtgccggaagcccgtcatcgcggcggtgcacggcgcctgcgtcggcggcggcgtcgacgtcgtcgcggcatgcgacatccggtgctgctccagggacgccacgttcgtgctcaaggaggtggacatggccatcgtcgccgacctcggcgcgctgcagcgcctgccgcggatcgtcggctacggcaacgccgccgacctcgcgctcacgggacgcaagatcaccgccatggaggccaaggagatggggctcgtcagcagggtgttcgattccaagaaagagttggatgccggcgttgcaaagatcgccaaagagatagctgagaagtcggcatgggcagtgatgggaaccaaggctgttttgctgagaagcagggatgtgactgtagaacaaggcctggagcatgtcgccacatggaacgcggcaatgctgagatctaacgatctgaaggaggccatcagagccttcctggagaagcggaagcctgtgttctcaaagctgtaatgatcagatactattacctctatatgcataaggaagtgaaaagaataaagtggggtgtcagaagtagacaggaagtagaagtaccatctgtggttgcaattggcgaaacatccatccttgtcggggatcaagtcgaaccgaagttgttttggttgatttacgtcagatgatcccaggatgttcctgttctgttgcctgttccagctcgtacacagtgtcatttcttcggcatcatatacgatattagtttttttttttgatcaagcaacggggggcaagcagcccacctgaaacacttccattgatcacccccaattcgctgaatcccccatatgattgatttgttctttgtcctaaaaaaa

SEQ ID NO: 40019 - DNA, 823 bp, Setaria italica
  misc_feature (1)..(5): n is a, c, g, or t
  Peptide Sequence Number=SeqID_105993
nnnnncaggtgggtcccacgaacggtgttaacaggagaagaaaacggtgcttgtcccgtctatagcgatctctccaaccaaacaaaaaataggatcatcccatcccattcaaccaaacaagaaatgggatcatcccatcccgaaaaactggaacgggaccgtcccgttctacattgtctcccaaccaaacgcacccttacgtaagagctagactggatagaactgaacaaaagggggaaaaaatttagaaaagaaatggctagattaagggaactagacaggggggtttggaaggaaggatccttgtttgtttgtttaaacgatagctttggaatgaagccggtggagctccctcttctcttcacttgccgacgccgcacggcctctgtttgtttgaaggcagcgagattgctttgccatgccgtcgttgcacatgctggttcttgatgcggatcgatcgattcgccgattcatcgttatcttcttcgactgcttctactcgatcttggccatgcccatcatgcgcttgctgacggcgtgcacggcggcgccggcgtcggcgcgcgggtccaggcccgacccggacatgtagttgcggacctcgatccggatcatctcctgcatcatcgacaggaactccgcgctgaacggcgccggggactgtggcggcgtagtacttcctcttgagcgtggagttccagtggttcttgatggcgttgtcggtgcgtccggagaggaggcgcgcgatggttgcccacttgttcccgaaccgcgcgtgcgcgcggaggatggtgtcgtcctcgtcgggcgtgaaggggcggtg

SEQ ID NO: 40020 - DNA, 902 bp, Setaria italica
  Peptide Sequence Number=SeqID_105994
agggaacaagggaacaagacgaacagggaggtcgccggaggaggaggagcctgcggcggcggagagggcggtcgcggcgccagcggcggcgggagcacgaccacaccgcctgcgcggggcacggggcggtacacgtgctgctgctgctgcgacgtcacggccggagccgccgacggcatgacggaggggaggctgtggtggctggagtcgctgaggtcggacccggaggggctgccggggctgaagcagagccccgggtggccgtcgctgcttgtccgcttgagcggccgctcgtcgtccgcgtcagccgcagcagcagggccggcagcaccgcaaccggaaccagcggcggcgtagtacttcctcttgagcgtggagttccagtggttcttgatggcgttgtcggtgcgtccggagaggaggcgcgcgatggttgcccacttgttcccgaaccgcgcgtgcgcgcggaggatggtgtcgtcctcgtcgggcgtgaaggggcggtgctccacctgcggcgagagctggttgcaccaccgcaggcggcaggacttgcccgaccggcccgggatggagcggctgatgagggaccagttgcgcgcgccgtggcgcgccacgagccgctgcagggcctcgtcttcctcggggctccagggacccttgatccggtccacgtccggcttcccgccggcgccgccggcgcggcacgacggggaggaagaagacgacgccatggctaaagacgagatgagcggctggtttgatgtggatgtgtgtttgtctgtgaccgactgattgatttgtgatgattggttgatgagatggagcgagttctaggaaggaagtgggggaggaggaagaagggggaaggggagaggaggaggagcagaggtgggttgtct

SEQ ID NO: 40021 - DNA, 756 bp, Setaria italica
  Peptide Sequence Number=SeqID_105995
ttaatttagtaaagtactaaagtaaaccttaactgtagtcgcttttggcaaaacaatccctcagccaaagagccttgcatgtctagaagttggtggagtagtttttcccaccggtcggttaagtcttgttgagcttagtagctcagccttgtttgtggcatctctttcaggtgaagttgaagcttctaagtgtgctgctgttggcacttggcctccccagcttcgtcctgggtggacggtcgagtgagacccctcctcgaatggtgaggaaagggaccagtgatgtcttgattggcctcatcagggacatctgaccccggcgctagccccgctgttttatctttccactgctcatgaactgtgtaatactcggattttcgaaccagtgttgtaataaaatttggaacttgtttaagaggttgatctgttgtattctctggaaccactcaccttcgtgtgagccatactaacttggtcctgtgaggtggtttatcggatgaaatccgacggatcgtcgagttaacttgattaaagcatatgatcgcgtgataggcgacttaaatgtgctttagttaagttaatccgaggtgttccgccacattcgagttcttcatcaggttgagtctacaaatgtactcgagcactaccatgcggctagaatgtgctcaagccttatttaacttagtcttgcatctttcaaccttggattttatatggaagtgcaacgaaaaatacgcactacatatggagtagccc

SEQ ID NO: 40022 - DNA, 1552 bp, Setaria italica
  Peptide Sequence Number=SeqID_105996
ccgacgcccgccgcgccgcacactaccgacacccccttcgccgaggccgtcaagggcgccgcgctgcagctgttcggcttcgccgaggccatcagcatcggccgccgctcccctgagaagctcttcaagatcatagacctccacgacgcgctctcggacctcctccctgacgtctccgatattttcgccgcctccaaggcagcggagtcgatatacgtgcaggccgttgagatccggtcgcgtctcgccgacgccgtgagagggatactctcggagttcgagaacgccgtgctccgcgatccgcccaagaccgcggtgcccggcggcaccatccacccgctcacccggtatgtgatgaactatagcagcctcatttgcgactacaaggtcacgctctccgagctgatcgtgtcacgtccatcggctagtgcgcgtcttgctgctgagggcaatgagctcgtgccgtccttggcggaccttgagcttcctgagcttgagaaccagttgccgcttgcctcccacattgtctggatcattgttgttcttgaacacaacctggagggcaaggcggcactctacaaggatctggctctttcacatttgttcatgatgaacaatgtacactacattgtgcacaaggtgaaagattcgccagacctctggggcatgattggtgatgactacttgaaacgtctcaccggcaagttcacaatggcagccacaaactaccagcggacctcgtggttgaagatcttgaattgtttgcgtgatgaggggctccatgtaagtggtggattttcgtcaggaatatccaaatcggcgctgagggagcggttcaagtccttcaatgctgcgtttgaggacgcgcatagggtgcagtctgggtggtgtgtgccagacaaccagctaagggaagagctaaggatctcaattgcagagaagctgctgccagcataccggtcgttccttggcaggtttcgacatcatatagagaatgggaagcatccagaactttacatcaagtactctgttgaggaccttgagatagcagtgggtgatttctttgaaggtgttcctccttccccgcataacaggaggagatcacatggatgaagaacttgtacctcaggcattcaactggactgctgttgctatttattcttttattcttcacacggaagctggtgctggcatttggggctctgtttaactgttctgatactatattgctgatcttcaaccagagatggcaaaatatgaatgcattttgggatcttgttgaagctgtcaatcgccccagtggttcctgctctgtaagagaacttgttcatttgttacactattattatataaattttgcaaagtagcatgtccatataggaaattctttcagtaatgtttgatagttggaactcatggcatttctgcccctgttttgcatcagcctttgttgccctttttcattgttaacaattatccaaaggtctatgctttgtggattagatgtaaaaagatttacatgactctcatgtaccacatgattttgtaatat

SEQ ID NO: 40023 - DNA, 1677 bp, Setaria italica
  misc_feature (1657)..(1677): n is a, c, g, or t
  Peptide Sequence Number=SeqID_105997
caaaggctcctacttcgccgtcacctcctcctcctccgcggcagcagactgcgccgagatcctcggccggagcgcatcctcccacggagtctcgctctacggcggctggagcttcgattctgaatcttctataactcccaagatctgtatcacgggaagcacatctgctggcctgcaccagattcttccatggttgtattatcacaaggtcattggtgtttcgcatttttttctctttgttgaaggagaggctgcgaagccagctgtcacctctgttcttgaatctattcggggtgtaaaaatcatttacagaactaaagaactgaaagagagacaggacaaaagccgcatctggaatgagacttggctgggaggtttcttttacaagccgtgcaattatgaactatttgttaagcaatcacttaacatggaaatggctattattatggcaagggatgctggaatggattggataattcaccttgatactgatgagttgattcatccagctggtgcgcgagagtactctctaaggcgattgcttttagacgttcctgacaatgttgacatggttatcttccccaattatgagagcagcattgagcgggatgacatcaaggatccatttactgaggtttcaatgtttaagaaaaattacgaccatctcccaaaggatacatactttggcctatacaaagaagcaacacgtggtaatccaaattacttcctcacttatggtaatggaaaatcagctgcaagggttcaggagcatttgcgtcccaatggtgctcatagatggcataattacatgaaaaccccaaacgaaattaaactggaggaggctgctatcctgcattacacctacacaaagttttcagacttaacttcaaggagggataggtgtggctgcaagcccactaaagaagatgtgaagcgatgtttcatcttggaatttgaccgattggcctttataattgcatcaacagctactgaggaggagatgaggaactggtatcgagaacatgttgtatggaccgataaggacaccaatttgaaactattgagaaagggtgtgttgacacgtatatatgcgccaatggctatcatccgtggtctcaaggaatccggcgtcttcacctccgcagtaacatcagcgaaagcgcagtcaaaaacaaagtcgtcgaacatgggtcttgagaacaaggagtccatcctacccaatgtaacagctgggcaatccacattggaaggtggccatgagaaattgcaagcaactgtaagaaagatcctagaaatggttgatgcccaggaggaagctatgccgccaatgtcaccccccggttttgttgagctgattgaaagcgctttgtcatgaggccatgtgagattgatcaggcgatcttgactgatgtcgctcctgggcagatgaaactttaacaatgcatatgcagcgtggaacatatagatagcagaggcttgtttgatcgatgtatcttgcgactccccccatgccttgtgctgatgtaaattgcttccatcacgtgggctggtaagcaagtgcaagacatgagaataacatactcactgtaatatatacaacagaaatcaggcgaatctttccccgggtttaagttaaaaattgattgaataaaagttnnnnnnnnnnnnnnnnnnnnn

SEQ ID NO: 40024 - DNA, 368 bp, Setaria italica
  Peptide Sequence Number=SeqID_105998
ttccaacaaacctactaacttttctgaaacctcctcaagactagccaaggaggcatcaggagcaagttctgaaactcgatcaaaaaagctatcagctattgttttcagacggctatctttcacataactcgagaatgtttcacccaatcgtgccaaagcatttgataactttgtcaccagctgtggttcttctgatgtaattgttcctaccatgttcttatctgctattactggaacttcagaaatttgaggttgagaagtggacatattcttggcaggaacaacaacacttgcttttgctgtagaactttcatccatactaggatctgggggcatatcagatttggtgttagctgcagcttagttca

SEQ ID NO: 40025 - DNA, 320 bp, Setaria italica
  Peptide Sequence Number=SeqID_105999
cccgcgtacaaaaacacgaccgccgacggagggaggcgacgtggtgcgtcgtcggcgatggcgcggggccacattgcgcagtgcctcgggggaatcctcgcgcgccgcggcgccgccaccgtcgccgtcgactcaggcggccgcagctttaccggcgcggagttcgccgacggcgtgcggaggctcgccgccgggctcgccgggcgcggaatgcgtcccggcgacgtcgtcgctgtcgtcgccttcaacagcatccagtacgtcgagctgttcctcgccgtcacctacgtcggagcaatcatcgctcctctcaactaccg

SEQ ID NO: 40026 - DNA, 1080 bp, Setaria italica
  misc_feature (13)..(13): n is a, c, g, or t
  Peptide Sequence Number=SeqID_106000
ttttttttttttntttttttttttttttttttgtaatgggactgcaatgcaattgagaaattagtgtctatcattatctcaaaagaatgtcgacaacagagcagtggagaaagatctttccaaagtcggcacattccaagcctacgcattatcctcacgcatatcagttttccgtttagccatcatggacagccgagcatcccgctcgcgctcaaactcacggtaatcggctcgctgcaggaacgattgcttgtcgaggtactggttcgagctcttcttgtaggcgtcaagctcctcctccacgcccttctcttccttgtactctccccagtctttcttcgtcttgtccaggacactcagcttctgcttcttacgtatctgctcgaggatgttgtcgacagcggagggggcagcaccgcctgccttagccttctcgattgcctccttggaattagcatcaaccaatttcttgatttcaatgtccttgccagcaaagtcccttacctcagtgatctccactttccctcttccagatgccacagcagcagcatttttggcagctacaagggcagctgctgcaagttttttggcatcctcactcgtttcatgttgtgcctgttgctgcccattttgggggctttgattggcagtagaagcattactaggcgaaaggcctagaacagtcatccaattcttatttgttggcttatttttcttttcttttgctgtattactgaacttggtcatcataggtgtgggcatcttattaggtaatccactgttcattttcttccaaatatcctccacacgtgattttgtgccaacatcatgagactcttgatgtgagctactggcatttgcagaactggtaagagtttcatctggaaccacaccttttgaccctgagccgcccgcgtctccggcggagctcgtcgacgccatccccgaatcaatccctcgcgtccccggcggacggcggttgttggcttcggcgtctgctcgggcggcggaagcggaggtgtcgccgcaacgagagagggagagagacaagggagagaaagcgaatttggtgaagagaag

SEQ ID NO: 40027 - DNA, 788 bp, Setaria italica
  Peptide Sequence Number=SeqID_106001
aacgaaccaaggggacaaccaagggtagaaaaggaaactgttactatcataggtaaggacaacaacaaaccatgtttcataatcttacttcagagcaaatttgaatattacgctccagcttgcttgagtagaatccaaggcgctctagggcacttccacattaaggagctactaagttccgtgcatggccatgacttctgaagatggagacatcctggctctcctgtcagaaccaagtctaacagaagagcaacttgaggcttctgaatctgatgatatattgcctgctattctagaagccattaaatcaaatgcgaaggcagttgaaccttcacccgaagaggctgcctgggctgattcatgtttcgttcagacttctgaactgtcagatcatgactggggagcaatgaggaatgccttgcttgatgcccttgagaagccaacagaaagtccctttgatacttctgaagctgtgcatgaccaaggcgtccattctatctcagaggcaaaacgtcagcatgatgatgtgcacatggagcagatggacaatagcgatgatgacaaggatagtagtcaagattgcgaagttgctgatgtaatcagaggtgcagatgaacatggaaagcaaatggatagttatgcagtgaaacccgaggatggtgatgagctggcttcacctgaagttcttgagcaggcagagtcgacagattctatcttcaaggtttgggatctggagctgtctttttccgatgatgatgatggagagcttgaactcatcaaggatctga

SEQ ID NO: 40028 - DNA, 757 bp, Setaria italica
  misc_feature (723)..(757): n is a, c, g, or t
  Peptide Sequence Number=SeqID_106002
tgtcttgtattgttaattctgtcaagattgcgaagttgctgatgtaatcagaggtgcagatgaacatggaaagcaaatggatagttatgcagtgaaacccgaggatggtgatgagctggcttcacctgaagttcttgagcaggcagagtcgacagattctatcttcaaggtttgggatctggagctgtctttttccgatgatgatgatggagagcttgaactcatcaaggatctgaagaagctcctcaaggagaatggcagccctccagaggctgtatatccaaccttgcctcttgatgacacaacaaagtccttggatcagattaacatcgatgagcttgtggtgggcttgagtgacttgtcaatacagcaaaccaacaagtaagaattgtaggactgtagcgcacctttatccatccatctgtgatcttgtggtttgctctctacgacagcactaatcacttctttgagaggggtttatagacctaaggtttaggccaactgttgtgctgtgtgtcctgtaggatctccatgttggttgctgctaatacttgagtattagcagcaaatggagatgcttagattgaattcatgacttttaagtagtttagttactaatttgtaacgcgtgctggtgtctctttgtttttttccttctttcttgacccgtgtcaacataaccataaaagttagcttttaagcatgtgacggattgagttaacnnnnnnnnnnnnnnnnnnnnnnnnnnnnnnnnnnn

SEQ ID NO: 40029 - DNA, 426 bp, Setaria italica
  Peptide Sequence Number=SeqID_106003
ttgaactgtgagctgtgaaaagttgatgtgagctgcgggttatggaaaagatgctatgagctgtgaaaaagctgaaagccgtttgattgaaacagctgtgatactgtaattttggtaaaaaataactgtaatacccttgaaggtttgcaggtttgcgagactgttgatatgcaaatgtatggtaaaacactgtgttacattattctactaattagaatgaaccatatggtacaagcaaattggttgaaccactcatacggaatcatctatgcatgcatcatgtggtgtatgcaaccaaatacaccttgaaaactccatgtgacaccctggatgaccgggcagagaaaaggcagacatcatttttgcattgtggtcttcatacgtctctttgaaactccagaacacgtagggctccgtaacatttgg

SEQ ID NO: 40030 - DNA, 587 bp, Setaria italica
  Peptide Sequence Number=SeqID_106004
ttttcaatgttgagggatgacagtgaaggcctgctaacaaaatcacagatcctgtgaactcgttatgatgtagataaagatagtggaggttagcaatgagctaaacgatcttggtaggtcaccgctgaaagcgttgaatgacaaatccatcgtttctaagctatccatgtttacaaaaacatcaccaattactccagagagtttattgtagctgaagttcaggtatttcagggagtgcaaccatggcaatgatgctggtatattcccttcaaacttgttggctgccaaatttaggtgttccacatttgggggcaaagtgggcgggatttcaccagtaatgttattgaagctcagatccagttttttcaatgactgaaacttgagcagctctgggccaagccatccaccaactccgagcccgctaatgcttattgtgacaactgacgatcccttgcaaaagacgcctcgccaccgtccacgcccaccaccctcactgcatgggtcgccaccctggaatgtccaaccagaaagctgccacggcgactccaatgtgcgatataacccccaaagtcctatcgcatcggggg

SEQ ID NO: 40031 - DNA, 482 bp, Setaria italica
  misc_feature (413)..(482): n is a, c, g, or t
  Peptide Sequence Number=SeqID_106005
tcttgtaaattgtcctgaatgttagttggcccatcagctgtaatgttggcttgatattggctgtgaaaccggtgaagggcgacgcgttgctgttcttcagcctccatcccaacacgacaacggacacaaacagcttgcatgggagctgccctgtcattgagggcgagaagtggtcggcgacgaaatggatccatgtgcgatccttcggttccccgaaggcaacgactggagaatgccgagacaaagatgatatgtgcccaaagtgggctgatgccggggagtgtgcgaagaacccggaatacatggtgggtaccagagactcgcctggttcctgtgtgcagtgtagctgtaaacttctgaattcaatggctgatgatcagaataaagaaagctgtggttctagaaaaaacccnnnnnnnnnnnnnnnnnnnnnnnnnnnnnnnnnnnnnnnnnnnnnnnnnnnnnnnnnnnnnnnnnnnnnn

SEQ ID NO: 40032 - DNA, 540 bp, Setaria italica
  Peptide Sequence Number=SeqID_106006
ccaattccccacaggccttgttttattataggaagtgtgccttccccataggccctgtttactatagaaaatgtgccttcccccacagggaccttaatctctaacccactcctcaactgataaaaaggtgtgagaggaatggtgactcagtctaagggaagagaaggacaaagaaaccataaaacttatgggacatttctgccctaataccattggacaaggactgataaagctaattagacaaggccaatgggagaaaactgcatctttctggaccccacattgatacccccccatctttaagggattaaaaacccctacaggacaatagagagcaggggctcttctccccactccaagcagccctgggagctatttgctttcctgtaataaagctttgcttgcttgctgcctgtgtgttcctagagttcacttttcaactgtgtgaacaagaacctggattcccataacatctttccagcatcagcttcgcttttcttattccctcttagtgatcaacttaagtcaaataatccaaag

SEQ ID NO: 40033 - DNA, 417 bp, Setaria italica
  Peptide Sequence Number=SeqID_106007
tatcttcgccttcctccagtgtcgaagtagaatgaataatcagatggatcatcatatgggatgtaagttggcttgaaagacgcgaagtccgcaagatatagccaattccaagaagtaacgagcacgttctcacattttatgtcaccatggcaaactcctttactatggctctgctccactgcatggattaactgcacaaccaaatgatctaagtcggcaaccatctctgaaaagcaagccatttcttcgctatctgactgaggaaagggcgtgtactcagtcggtcgtgcaggttgttgaagaaatactgtctcaaaagatatgccgctttatctgtttgcaaccaaacctggaagggccatacgtgggaaccctcgatccccttgaacgtgttcctaatccgctccagcctccgct

SEQ ID NO: 40034 - DNA, 782 bp, Setaria italica
  Peptide Sequence Number=SeqID_106008
ggacatctcccgatctgttcaatcgttgagctgtccatcattatttcaagtatcttttcaaaattgtcttgagtcttctcaaccctggcatctgagtcaagtggaacaatatccgagaagaacttgtgcagaaagtttgaaaaataaactgggaacacaacagattcgtatttttgtagatagcttcgacacggtagcctttttttgggggtccaactggatcatgtgaagtatcatgtcacgaataccagtatcttgtatcttgtgtagaagaagcatcgggtcatattgaccacgccgataagacagaaggtttgaaaactcaaaaagtgccacgccgtcaaggaaaagttcagcaagaacgcacccaagagaaaatatatccattgatggttgcaggggtgcatcagctgcaacttgggactccccaccatgttcgtagaatctttcaggtgctagatagcatcttcgccttcctccagtgtcgaagtagaatgaataatcagatggatcatcatatgggatgtaagttggcttgaaagacgcgaagtccgcaagatatagccaattccaagaagtaacgagcacgttctcacattttatgtcaccatggcaaactcctttactatggctctgctccactgcatggattaactgaaaagcaagccatttcttcgctatctgactgaggaaagggcgtgtactcagtcggtcgtgcaggttgttgaagaaatactgtctcaaaagatatgccgctttatctgtttgcaaccaaacctggg

SEQ ID NO: 40035 - DNA, 498 bp, Setaria italica
  Peptide Sequence Number=SeqID_106009
tactaaaaccaaaagggcaactgaggctcttgaaattaatgtattaattacttctgaaaaacaatgggaaagtggtaagccactaccaatcctaaaatctgcattgcctttactatcttgtttatgatcataccagatccttacagcatggaaaaccagagaaagcttcaaatgatacgtgtttaacaacttaaccagcagtcccgtaattggctgctctgtccaatgatacaaaagttctgctggtacaacaagatacagattggcaagtggcttaagactaagcggcttgctgtgcagctctggacgtgagggtcagagcagattgatgtaatctttggtcctgacttcaatgtgatggaatggggcttgctccctggactctaaagaatacagattgggcatgcctacttaagatcagcacactgtactttgtgttaggataaccaatacaacatatttgcctcacagtctcactctattctgggacatattggg

SEQ ID NO: 40036 - DNA, 479 bp, Setaria italica
  Peptide Sequence Number=SeqID_106010
atatatcatcccttgttagcacacaagaagtttgacacatgtatcatggatgaagctgggcaaataacattaccggtatcactgggaccattgatgcttgcaactaagtttgttctagtaggagaccattaccaacttcctccacttgtccagagctctgaagctcgagaaatgggatgggcattagcttatttggaggttatcagaagcacatcctcaggcaatctcagcactacgctgccagtaccgcatgtcatctggcatcatggagctgtcaaatgcattgatttacggcaataggttgtgctgtggttcattggaaattgcaaatgccaaactcaagttttctggtcgagaatcagtgcaattgaagttgagagagatcttgaacgctgatagggctgtcatctttgccaacacagatcaaataccagcacttgagacaaaggatcacagaactgtgaacaatcccacagaag

SEQ ID NO: 40037 - DNA, 661 bp, Setaria italica
  misc_feature (645)..(645): n is a, c, g, or t
  Peptide Sequence Number=SeqID_106011
tagactaggtaggtcggggcaatgaataaaaacttccattcaggctatggaagtactccatggggtggttcagggcgtggttttggtggtggactagatttcacacttcctcctcacaagacaatatttgatattgatgtggatgctgcatttgatgagaagccatggaaataccctggtgctgatatttcagacttttttaacttggctttgatgaagagaagtggaaagacttttgcaagcagctggaccaactgcggctagagtccagaatgcaatctagaatacgggtgtatgaaagcggccgctcagaacaggattatgatccagatttgccaccagagctagctgctgcgactggtcatccagacatatctgttgacaatcgcaataaaacagataacggtcatacagatttcgatgctcaaggaagaggtcctgcaaatgtgcggacaccagtgatgacaggaagacctatacaagttgaaaatatttacacagatcggattccaactgctgattcacgcccacatcgaatgcgtgagtcagattctgttatcgagattgtgtgccagggccgtgattcaatggatgatgagacagtggaccaactgagaaggattctcaaggaggtaataaaaaggntcccatgatgttgagg

SEQ ID NO: 40038 - DNA, 591 bp, Setaria italica
  Peptide Sequence Number=SeqID_106012
tgtttgttttttttttttttccctaagttcaggatctctatcattgatttgattatgtttatactatgttctatgtgtaagggtaagaaacttagcgccactcggcgactgtacacaattgcagccgaaccttacactgtaaagcatccatggcactgagaatactggagcaccggcaactggattccgcggtttctacagaagaaacgggcaccggtgggtggagctggtggacagacgaagccgtctgtcactaccgcaagctcttcctgcgcttctccctggacgagagcgaggcggtggactcctccacatcctccagacaaaccgactgcatctggacggcgatcagctgggaccgaagggaagcagatggtggagaagcagagacgcccctgcttgtgctggatctcctatgcagccagcggcgagcgtgctcgttgccaccacccctgctgttgcgctgagaggagcttgtagtgggagatggaggcagtgtcttcctccagttcttggagctggtggcggcggcatcacgccttctgcttgaacttgaccctttgctccgcgcacttgttacaaagacaactg

SEQ ID NO: 40039 - DNA, 892 bp, Setaria italica
  Peptide Sequence Number=SeqID_106013
taggaagactaatttacatcggatgcaggctgagggtgcagaagtgaactcggtgacatggaacacaattgccggcggttacattcagatgcgtgattataaggcagcagttcggttgatttgtgatatggtaagaggtggtgcaggggttgactttgtgactttggtgattggattgaatgcttgctcgcgggcaggatggttgaggcttgggaaggagatacatggattggcagtccgcatgcactgcgacggaattgagagcgtgagcaatgcggtgatcacgatgtatgccaggtgcaaggatatggagcgtgctctcatgctgttcaaaatgctgaggtgcccaggcctggtgacatggaatacgatgatagctggttttgcattgtcggatgatgcagaagaggcttctaggcttttccgtgaaatggtatgcagtgatgtggagcctaattatgttactgttgtcacctaccttgcactctgcgctcgtgttgctaatctgcaacatgggcgggagcttcacacccacattgttaagcatggtttcaaagggtattgtttgttgtggaactctcttatagatatgtactccaagtcagggaggctctcggtggcacaaaatgtctttgataccatggatgaccgtgatatgatatcctacacttcaatgatcgcaggatacggaatgcaaggaaaaggggcagttgccctgcgccttttcaaccagatggttgacagtgggatcatgccagatgccatcatcatggttactgtgctctctgcttgtagccattctgggcttgtggatgaaggagaagaactttttgacaagatggttcattcatttggtataaaggtccccagatggaacattattcttgcatgg

SEQ ID NO: 40040 - DNA, 872 bp, Setaria italica
  Peptide Sequence Number=SeqID_106014
atttcattcattaaatcaaatgcaaaaggagaaagaagctaactatttatcagctgcgaagataatcaaattaacaatagattgtgcaagcgcattctctggaccgaatatttctttccatcactacttgtgataagcacactcttttttcaattttgtaagctcgagccctccagttgttactttaaatgtgaacacaatcctcagctcaaacttaggtcagcctggtgggggtggctggtggcccactataggtcactttgcaaaggagcaaactatcccaaaattcctatcagattgtgtcatcaaaatggatagttggatgatgttccatatcggataaaccaaatgaatgtacctaaaatccacgctatcactaatgtttataatactatgtaaatctaagtcaggtttcctattttgctacatcagtgtaaaatgaagtccattttgaaggataatgcttcaattctttggcatatccatgcttctgaatcaggcataaaggtgctgagtgatcacatgatgtgatcaactctcccaatccatacacggcagcctcattgaagctgggaatataatcagaaggccctccttttctggtaccacagggtggtaagtgatttttgtttaatctggagatagaattcttcgacagatatcctgagtctagagatgtaattcttggacagaatataattgtatcaatgttgaaatcttcaagatatctttggtaccacataagtgatatcaaacaaattgaacaccatcaattcagatggtcaactatgtgtatttcctgtacagtcattggtcaattgacagcatcttttgttccgtacatttgcatcagttgtattcaccaataatct

SEQ ID NO: 40041 - DNA, 528 bp, Setaria italica
  Peptide Sequence Number=SeqID_106015
gctaaattataaacaggacatgctaatagttaggaacttaaatgcagaatgtttgatcgcaattgcttctgcacaactcaaataatcttggaggaatttacaaatgaacaaaacagggagcgcatgagattttttccttcgagctggattttttgacaaatcaaaattgtcaagcactcaagctccttatcagacattctataataattaactccaattaaatttacaaaattttgttttatgctttgaaaaacaatttaactggagacagtaaatgaatttctttatcaaaggcacaaaagtactcaaacaaattgtcaaatgatgataacacatttgggacttttttatgacagtagaaaatagccagcatgattttgtactaaactgttcccttaccaggcataaaggtgctgagtgatcacatgatgtgatcaactctcccaatccatacacggcagcctcattgaagctgggaatataatcagaaggcacccttcctttttcttggtttaccttacttagggt

SEQ ID NO: 40042 - DNA, 1214 bp, Setaria italica
  Peptide Sequence Number=SeqID_106016
gcgtgaagacaggcacaggcacaagattgcaccgtgaagccgcgtaaagaagacctgactattatttccactgttactatggtgtttacacgatgcgtaaggtggcaaagcgcttagccagagcaccattctgacgactcgcaacacatcaaatttactcccacctacaaaagtggggacccacttctaatgccccaacagcttgaggatagtactgcagcagtgcggcctgttcagattccaacttgttgagccatgaattatgagtgtttagaagcctaacagagtgattctgtgttgagggcaggaaaatacttgatgccccaagcggtatcaccttttgagccactttggtttgcctggcttctcatttgctgttggtgcaggattagattgggatacaccagactgaacagcaggagagttcatcctagaatcatcaggttgactagcaggtttcaacagaagtgacagtccatccaaactttgaatttcttcacggagaaagggtcctgattttagatcatctgccaacgaaccttcaggcagatcataagaaaagtggacgttcgctccagggacaaaaccagctgtatagaagtcctgtgatgtgtctagtatacgcttctttggaggtactgtataaagatagaatggcagatctggtctagcaagtactttcatgagcaggtccactagactatgaatcctatctgatggaagaaagtcagcctcaagaatgtagccatcagggaatcgcaccctcattaccgcctttgctatctttgctcgctgagcagcaagttctgcctcacgcatcatgcgagtcttcagcattttagatttctctgccttcctgattgataccaagttgcggtaatcagcaggctgaagctcataaaattcatcatcttcctcataatctgcactgggcagcttgctcggttgttgagcaaatttctctcttgaaaaaactcggatctggtgtccaagttcctctgacactgctttcaacttgtccgcggcgtgctgcgcgtcggcgtcgagatccatggccacggacgccggcgagaggtcgtcgtcgccgtcctcgcccctcttcctgcggcgagtcgcgcacggccagaggagggtggtggtggaggaggagggaggggcccgcccggtggtgtgtgtactctgcttccatcttggaagggaagggagaggaaagg

SEQ ID NO: 40043 - DNA, 618 bp, Setaria italica
  Peptide Sequence Number=SeqID_106017
cccgccagcggcggcctcctcttcgattcccatgccacctcctcctccttcactcgcgagacattggagcgggagctcaccagctactgtcgttgcctcaccttccgccatcacctccgtttgccgtggtgggggtgtcggaggttcagccagcgcggtgatgccaacatggcttctgctactggaggaagtggcgatggtgggggcgatcatcgttcctcttccggcaaggggaaaaccatagttgtcccttgggataagccgaagaaaatgagcatgttggagaaagcaatgcttcgttatttgcagaaacgtcataagcaatcctcaaggagcggaaggcacgaccttgtatgtcaagcttgattcgttagaagacatctacaagatgcatggccaccactagtgttactgagacgagtacgtggacctcagatgaatcaagaagctcagtatttcaaagttctacgacggtatcgagtggatcagggattattttgattatttttctgaatttgtaatatgatactgtgtggactattttgattttttcgaacaattggttattgtgttctgttaatttggattttttttgaatttgttaaatatcgttaatta

SEQ ID NO: 40044 - DNA, 520 bp, Setaria italica
  misc_feature (483)..(520): n is a, c, g, or t
  Peptide Sequence Number=SeqID_106018
tccttccttcctttctacttcgtcgtagtactatttggtagtcgggtagtcttcaccagctactgtcgttgcctcaccttccgccatcacctccgtttgccgtggtgggggtgtcggaggttcagccagcgcggtgatgccaacgtaagcgaccggccagtggtgtaagcgccgaagcattatgaactacactacgttgtgttattttaattcagcaattttagttgatgcctgagctactaagctgggtttatatgttttgtcgatgttgttgtttaatatgctctattaagttctattgatgttgatgttcatgtgttctgttgatgtcgataattatcatcagttgatgtatgtgttcagttctgttcagttgatgtttaaactgctttgtcgtgttgatgtacgtgttgaattctgttcggttaatgtttaatctattatgttcaattggtgatgagagtaatttgttagttaaaacgnnnnnnnnnnnnnnnnnnnnnnnnnnnnnnnnnnnnnn

SEQ ID NO: 40045 - DNA, 652 bp, Setaria italica
  Peptide Sequence Number=SeqID_106019
gcttctaagtgcctgggtatgcttaccagattgaaagcgattttagacctcccataaactatgaagcatggaaatggtacagtgagcaagggatgccttcagattgagggaccattcttggaattcaggccaaggggtcatcctcgtggtcagcaacaacttccacatgtaaattaaatcagcttatgtacaaccgaatctgttagcaacaaaggagaacatcaggcgctaaatggctgcagcggtctctgcacaaaagggtgctccaatagctgagcagcagatgggcggtcatttggatttgcttggacacacttctctatgaaatcacgcgcatcttctgataatgtattaggaatttctggtggtattcccctaccaatattaagcaaagcgtgtatccattccatatcagggtacggaactttgcctgtcagcatctccaaaaccgtgcagccaagactccatatgtctgctggaggtccgtgtggcttagccttagcaacctctggggccatccagaagacagttcccttgctagatcttgcctgactcaaaattgacatctcctttgcaagtccaaaatctgccaatttgaccagtccacttgcatcaactaggatattggcacatttgatatctctgtgcagaa

SEQ ID NO: 40046 - DNA, 251 bp, Setaria italica
  misc_feature (230)..(230): n is a, c, g, or t
  Peptide Sequence Number=SeqID_106020
ttcacgatcacgagacagtccccgttctacagtgcggggataacacgatcacgagctgagctcgacgactcctgccgtgtcgtaattcgggatgaggtcatctctgactcggagagggaagcgaggccaagcacgtgcttccaaataggggtttcccgttgctgcactcgacagggattagtctcaaccactcaaatgctggaactgaaatcccgaatggcaacgggttnctcctgtccaacaatttgcag

SEQ ID NO: 40047 - DNA, 668 bp, Setaria italica
  Peptide Sequence Number=SeqID_106021
tttttttaattttttttacctttttactttttcgttcgttaatttagtctttcgttgggtcttccttctaactttgcttcccgctcagaaaggctctggtcatagactacaaattgacttatccaagtgggactgcaactgctgttcttataaacggattccacacacccaaaggagaagagaatgcaaagaagcaagtcaatggattcctgaggtgcttcacggtcagcctcctatggagcttctttcaatggttttacacaggtggcgagggttgtggatttcttcaattcccaacttttggtctaaaggcttggaaacaaacgtttttcttcgatttcagcctcacatacgttggtgcggggatgatctgctcgcaccttgtgaacctttcagccctctttggtgctatactttcttgggggatactgtggccactcatcagcaaacaaagggaaactggtacccagcaaatgtaccagagagcagcatgacaagcttgtttggttacaagtccttcctgtgtgtagctctgatcatgggagatggtctctaccacttcaccaaagtcatggttatcactgttaatagtttacatgaacggtccaacaacaacatattaagaaggtaaatgtgcattgagaaagccactattcgtcactgacctc

SEQ ID NO: 40048 - DNA, 338 bp, Setaria italica
  Peptide Sequence Number=SeqID_106022
aacgtggtggtggcaaattccttactaacgcattatatggtcagtgctcacatcctaaaggagtatttagcatacacagttaagagcgccagagcggtaacatatatgcttaatactccttttaggatgtgagcactgaccatataacgtggtggtggcaaattccttactaacgcatttaagttttctatataatcagatccactataggcttagatgcagtagtgggctagtggcactcccttgtaggaagtagatcatatggcatacgcttgtaagaggtgttgcaaacttaatcatttgccatgagtctagatgggctcttcataagcatgtgg

SEQ ID NO: 40049 - DNA, 410 bp, Setaria italica
  Peptide Sequence Number=SeqID_106023
tggagacggcgtgggagcggacgccgagggcgcggagcgcggcgatggcggcgaccccggcgcagttgcggagcgggtccttggagaggcgggcggcgaggtgggggcgggacggggaggtgacggaggcgatggagacggtgccggggggcagggtggggtcgagggtggcgatgacggtgtcgccgagggagagggaggcgtcggcgacggcgcatccgaggaagtcgaagcccgggccgaggttggcgacggtggctggcgcgaatgccgtgacggactggaaggccggggcggggtcctgggcggcggcgttgaccctgagagctcgggagcggggagagacgagggaagggcggagggcccaggaactggccctggccctggccctttccctgcgggtggagggg

SEQ ID NO: 40050 - DNA, 2685 bp, Setaria italica
  misc_feature (2652)..(2685): n is a, c, g, or t
  Peptide Sequence Number=SeqID_106024
tgcaacagggatcgttaggactcgacaatttcaagcttctgaagaggcttggttgtggggacattgggactgtgtatcttgctgagttggtgtactccttgtctgtccgtgttgaatcagtcttcttgggccatggggtcgtctggctgtagctccgagatagttgagtctaccgaggaagaatttgacagtgcgcccattggtggctccagcttgctgcatattaaactcagagatgaggagaaacgcagcaaatgtcatgattatcctgtggaagatgacctcgaccagcttcttaaagcgattgatagtaggacattccgtcgggcacttagtcctggcagtacaggtggagatgcgctgggaaagggtgttctcaagaaaccagctaggtctgggctgtctcaaaatgcaggcatcgggatatcctccaagactgttaatatgaagcaggcgttgagaaggctatgcatttcccaggcatcagaaatggctgcaatgaagaggctgtcgatgtcacctggatcttcgagttcatctgaagctgggaccatccacaggctctatgcctctttgatggtccaaagtagtactgagggtcttcttcatgatgatgaaaagatgaacctgattgaaatatcgctcactccggagaagatcgacaagagttcgtctagaggtacgagcgagttcagtgaagactgtgagttcgagacagccgatggaagtgcagtcacctctatccgttctgtgtcttcaacttcagctgaggttcggaagatcagaatccaagatgtcatcagtggtgaccctattgatagtgagagttccttggtggaaaatggtaaattaggaagtaaaatttctgcagctactgatgatggctccccaagagtcccaatcttgagcaaacccatcactacatccagacttgtcaagccagtcttccgatgcaaaacggctggtaagaagaaagtgaaagaagaaccatcttcgttgggtgattcctccaatagcactaaattctgctcttcaaaggagtcgatttccctcgcatcaaccagctgctcttcaacatctagtgttacaaatcccaccagctgtgcagaagaagagaaatcaactccaggaccagaaaaatctgatgaaacatcttccgagtggttgggagcagaggaaaagggcgagtgctcccagaattcaaagagcagcattagtgagtatggttgtagcacaagtattagtgatgagagccaatttggattgtgtggctatagtaacaggccacacatggcaaaggatctgcgctggctaaccattcgtcagttggcattgcaacagggatcgttaggactcgacaatttcaagcttctgaagaggcttggttgtggggacattgggactgtgtatcttgctgagttggttgattcagattgcttatttgctttgaaggttatggatatcgagtaccttattaatagaaagaagatgcttcgagctcaggctgagagggagatactagaaatgctggatcatccatttctcccaactctttatgcccattttaccacagacaatctctcatgcttggtcatggagtactgtccaggtggtgatttgcacgttcttcgtcaaagacagcctggaagaagctttccagagccagcagcaaggttttatgttgcagaagttctccttgctttggaatatcttcacatgctaggagtcatatatcgtgatctaaagccagaaaacattctagtccgtgaagatggacatataatgctatcagactttgacctttcactgaggtgctcagtgaatccagtgctccttcggtcatcctctgtaacagcaaaccaccaaccaaggaaacttgcaggaccttgtgcagagaactactgcatcaattcatcatgcctccagcagccttcttgtgcccaaacatcttgcttcacaccacgtctaccatcaattccaaagcctcggaagcctaaatcttcccagaaaaggcttcctcagcttgttgtagagcctattgatgcacgctctaattcctttgtcggcacgcatgagtaccttgcaccagaaatcatcaaaggggatggccatggaagcgctgttgactggtggacctttggtgtcttcctttatgaacttttatatggcaagacacccttcagaggacctgggaatgatgaaacattagcaaatgtggtctcacagaatctccggttcccggacaacccagctgtgagtagcaacgccaaagatctcatcagaggtttgctggtgaaggagcctgagaacagacttggatcgttgagaggagctgctgagatcaagcagcaccctttcttgaaggcttgaattgggccctgatacggtccgctgctccaccagagacacagccttgcaatgtcgtgactctcgcgaaagagcggaagaagaaagaaggcaagtgccttgagttcagaagtaactccgaggacctggaattcgaagttttttagtgaggccctggtacagtttagcattatttcctctgatagtctacattttttcttttgagtagccaaaggctgggggtgtacatgcagattcttgtatttcagtaactgctgtccctgtcaatagcatcactaaattagnnnnnnnnnnnnnnnnnnnnnnnnnnnnnnnnnn

SEQ ID NO: 40051 - DNA, 1273 bp, Setaria italica
  misc_feature (923)..(923): n is a, c, g, or t
  Peptide Sequence Number=SeqID_106025
atagatgagataccacatacaactatttttatcctaggaaacaatttattttaggaaactgatattcttgctggagagatgaagccttcataacatctgtggcccattgctagagacggtattagcggccataacttccacaatatagcttttgcttcagtaggtaaccatatctaatttccaacaccattatgttggttcatacatataataatcttaaaatatgctggagtaacactatggaagtgaactgacaaatgaagaaggatcaggaggagtggggactgtggggactgcagctgcttcgtcaagcatttgtgtcactttgagcattgtaggtctcattgttgggtcctcctggaggcaccacaatgccactgccacaaacctttccaccttcatcaaattgagaattgcttcatcatcaccctccaccagaaaatcaaccctgccgcacctataacagtcatttgcccagtcagtcagtattttttgatcttcttcagcctccaactcaacattccgccggcaacagatgagctccaacaggatgaccccaaaactgtaaacatccaccttggcagtgatgccaatgctcttgaaccactcaggggctacgtatcctcgggtgccccggatacctgtattttttgtgtctggtttgttcggagaagtttggctaagccaaagtctgagatctttgctgtgaagttgccatcgagaaggatgttctggggctttatgtcacaatggataatctgtgtgctgcattcctcatgtaaagtatagcagccccttgccactccaagagcaagctgagctcgaaggttccactcaagcctgacatcaccaaataggaattgattgagtgatccattggtcatgaattcatacaccaatagtctttcttttccttcattgcngaatcctagcaacctaaccaagttcttgtggtgcgtccgtccaattgtctggacttcaacggtgaactctttctctgtttcatgctcaagcttgtcaattttcttaaccgcaatgtaagtgccgagatcatcttgtaactggcccttgtacacaataccagaggcaccagtgccaagtacctcctggaatccgctggttgccttctcaagctcagcataaattgaaaggctttcaggggcaatcctacattgtttgacgactgcacggatgggatttcctttatggtgatagtacagtaagtaccgaagagtataacagagatcaggacaaatgttcagcaagacagagc

SEQ ID NO: 40052 - DNA, 584 bp, Setaria italica
  misc_feature (556)..(584): n is a, c, g, or t
  Peptide Sequence Number=SeqID_106026
acctaacaatacgaacgtactaccctacgtcgaacggcttcaacgtgcccatgtcgttccagtgcggcggcaatgggcccagctgcgccgccgatgtcaacgcgcggtgccccgccgagctgaaggtgccggggggttgcgccagcgcctgcgagaagttcggcggggacacctactgctgccagggcccgtacaaggaccagtgcccgccgacggattactccaggttcttcaaggggctgtgcccggacgcatacagctacgccaaggacgaccggaccagcaccttcaactgcccgcagggtgccaactacgacatcgtgctctgcccatgattttaccgcgtaggagatatgaccatggagagtaataagtaaataaaagtacttattgtgtttatatatcccacgacaccgagatgagctcaaaacgccgacgcagcagtggcggagcttaacgaaaaatctagaggggccagccaatgttaattgagcttttaaacctaataaataatgccaaaattcacaaaaaaaaaaaaaaaaactaagagaactannnnnnnnnnnnnnnnnnnnnnnnnnnnn

SEQ ID NO: 40053 - DNA, 481 bp, Setaria italica
  Peptide Sequence Number=SeqID_106027
taggacaactaaaaatcatttctgataaagaacaggaggaggaagttagcttttaaggttgttgtccaaattgctctcgaccttgctcgagggttaagctatcttcactcaaagaagattgtgcaccgtgatgtgaagactgaaaatatgcttcttgacaaaacaagaactgtgaaaattgctgattttggtgttgctcgccttgaagcttctaatcccagtgatatgaccggtgaaaccggaacacttggttacatggcacctgaggttcttaatggtaatccttataacaggaaatgtgatgtctatagctttggaatttgtttatgggagatatactgctgtgacatgccatatccagatttgagcttctcagaggtcacgtctgctgttgttcgacaggtgaaaacaatctgctcctagcttgtgtatttcctgcttacatttagctgctgaattctgaacagtggataatacaaca

SEQ ID NO: 40054 - DNA, 1284 bp, Setaria italica
  Peptide Sequence Number=SeqID_106028
acgagcagctggagcgccacctcagccgcgcatggaccatggagaagcgcaaggaggaggcctccgccggcgccaaccagcgcggcggcgccgccgggaggcagcactcccttcgcccccggagggaggactgggagatcgaccccgccaagctcgtcgtcaagggcgtcatcgcccgcggcaccttcggcaccgtccaccgcggcatctacgacggccacgacgtcgcagtgaaattacttgattggggtgaggatggtcataggtcagaacaagatattgcagcactaagagcagcattttcacaagaggtctctgtttggcataagcttgaccatccaaatgtaactaagtttataggagctataatgggtgcaagggatctgaatattcagacagaaaatgggcacatcggcatgccaactaatatctgctgtgttgttgtggagtatcttgctggaggtgcactaaaatcatttctgataaagaacaggaggaggaagttagcttttaaggttgttgtccaaattgctctcgaccttgctcgagggttaagctatcttcactcaaagaagattgtgcaccgtgatgtgaagactgaaaatatgcttcttgacaaaacaagaactgtgaaaattgctgattttggtgttgctcgccttgaagcttctaatcccagtgatatgaccggtgaaaccggaacacttggttacatggcacctgaggttcttaatggtaatccttataacaggaaatgtgatgtctatagctttggaatttgtttatgggagatatactgctgtgacatgccatatccagatttgagcttctcagaggtcacgtctgctgttgttcgacagaacttgaggcctgagataccgcgctgctgtccaagttctttagcaaatgtgatgaagcgttgctgggatgcgaaccccgacaagcgacctgagatggccgaggttgtgtctatgatggaggcgattgacacatcaaagggtggaggcatgattcccgttgatcagagaccaggatgcctttcgtgcttccgtcagtacagaggtccgtgattgacgggcttttctggagctgtggtctgaagattgacccctagatcctgtgtatgtcgattgcatttgttttctgggaagcaaactggttaatggagctagtgtgcttgtgatcccttgtctgagaagcccctcgtatgtaaattctccgtccatcccatctgtaactctgtttatcaatgaatgaaagaaccggctcgctcgtctaaaaaaa

SEQ ID NO: 40055 - DNA, 620 bp, Setaria italica
  misc_feature (1)..(28): n is a, c, g, or t
  Peptide Sequence Number=SeqID_106029
nnnnnnnnnnnnnnnnnnnnnnnnnnnngtcttcaaaaattgctccagtgcaaagggcacggaatgaaccggctgcaagcccataccatttttaacgatagagtaaccagatagttattgatagacacgacagaaagcacagaactaatgtctgtcttgaacggtattcattcactgatcaagcagtacagtatgcaaaaatgtctgtttagattagactaagctctcttccacaagaggggtttccctagacaaccgatgtctcccagatggtcagagacatgagctaccaattcatttactcttgcgctcgctgttgtagtcatcaatcagcttctcaacatccttccagaacagaccttccacaagaacaccttccttagtaaacctgcccaagggagtactgttagtatgcttgtgaatttcagaagaactaggacatcgatacaaacaaaaagttgtgtacatgcacttgagcttgcacaattttgccatgacatggaataagacccagaaagcaaccactgtgattttcaactaacgcgcaagcaattagaatagaactaagactaaataataactaatagaaaactaacaataaggaagttttaaggtagaca

SEQ ID NO: 40056 - DNA, 894 bp, Setaria italica
  misc_feature (1)..(92): n is a, c, g, or t
  Peptide Sequence Number=SeqID_106030
nnnnnnnnnnnnnnnnnnnnnnnnnnnnnnnnnnnnnnnnnnnnnnnnnnnnnnnnnnnnnnnnnnnnnnnnnnnnnnnnnnnnnnnnnnnngttttttaaagttttttttttttttgtgtttcttgaacggtattcattcactgatcaagcagtacagtatgcaaaaatgtctgtttagattagactaagctctcttccacaagaggggtttccctagacaaccgatgtctcccagatggtcagagacatgagctaccaattcatttactcttgcgctcgctgttgtagtcatcaatcagcttctcaacatccttccagaacagaccttccacaagaacaccttccttagtaaaccactttgtcacgctcttagagaaacggactggcttattcgcagagatagactgcgggtccgcactgtctattgtgagagtgtacatgtctgagaatcttggtaacttagaagaaataatgaggccagtgctgttgaaagaacccgcaggagggtgggtgaagaggatggcatccttctccttggtgtagctaaggatcagcagaaccacattcagcgccacatatagtgcgatgcagccgaggaggaactcgcggttttgcgggaactttttcgggtagaactgtgcgagcagggcgacggcgatcacggccgccccgatccccagcttcaaattgcccagtcgggtgtcctccgtgtagcccttgctcttcacgacatcggagatggtctcgtcgaggaggtgcttgatcgagtgcgggtcgaggaggttggccttcttgggggtcaccttcgccggcgtgcccgcagcgccgtcgctcgccatctgcgccgctgctccgcgggatcgtcgacgagggaggggggaagtggtgggag

SEQ ID NO: 40057 - DNA, 476 bp, Setaria italica
  misc_feature (463)..(463): n is a, c, g, or t
  Peptide Sequence Number=SeqID_106031
cctaacctcatatgtctcaaaattttcattttgttgggggtcgatgctcagtttgccccattcaagccgccacgcactatggaagatacaccatcagaagaagaaataggcactcctctttcatcaaccgaaagaaataagtatgtgactgttgacagcggggatgacttagaattacctaggactgagaagcgaatcctttggacacaagaagaagatgtcaggctgatgagctcatggctgcacaattcaacggactcaagcataggtgctgataggaagaatgaacaatattggtatgatgttgctgacacctacaatgagacaacctcaagtcagaggagaagaaatgctaagcaagcgaaggaccgttggcataaggttaataagtggactgacctcttccataatgcttggttgaaggctcggtaagggtttttactaggtgggtataatgatcagntgtggattgataa

SEQ ID NO: 40058 - DNA, 1155 bp, Setaria italica
  Peptide Sequence Number=SeqID_106032
aaaaaggcagcacttgaaaagaaagctaaaaatgccaacaaggacatttactacagatcttgaggagatgaatacatttggtaaaattcaggctgatgaacatgcaaatcggctgaaggtattggaagtacaaaagaagctatcatccgagaagattgaacaagccaagcttgcccacctagcagcaaaggagcaaaaggaggcagcagaggtgcaaagggaggcaagaaagtatgaagttgaagctaggatgtttgagacatataaccgccttctcgctatggatgtagcattgatgtccgatgaggaaaagttagagcatgcaaatacaatgaagtgtttgaagaagaaattattttctgattacaactgagggatgttctgatcaagaaagctgttggatgtttggatcaagaaggttgtcattctgtcagttagatccttgctgttcagttttagtttcaggcattgccgtttcagtttcagtttcattctgtcagatctggaggaacagagagagcacgatgaacaggaggcagtgcaggaagatgacgaaggtgaggaacctgtggaaattgatccagcggatgtttatacacttgatgatttccttgccgaggatgaaaagttagaatcatttcggaggaggattggtgacaaattgaaggccaaatttgaaggagcatcttctgaaccacccagccatcgtcagcgtcaaagtggacctcagatgtatattcctagaaatcgagaagctggtcatgatgatcttgttgctaattacttctctgcaaatcctaactacactgatgagatgttccgtagaaggtttcggatgacacagcctttgtttcttcgaattgttggtgttcttagtgattgggatctttttttacccaaagagtggatgcagctggaagagatggccactcacctttgcaaaagtgtactgcggccattcgatggctaggatatggcacgccagctgaccaacttgacgaggttttgaagattgctgctagcacgtctttggagttcttagggtgtctttggagttcttagggaaattcgccgaaggagtgattgaatgttttggtggagagtacctgtgcccttcaataattgatgaactagaaaaaatcttgcaagaaaatg

SEQ ID NO: 40059 - DNA, 775 bp, Setaria italica
  Peptide Sequence Number=SeqID_106033
ttcactgtctcaattctttaagataaatcacttgataatattacagatgagctcatggctgcacaattcaacggactcaagcataggcactgataggaagaatgaacaatatggtatgatgttgctgacacctacaatgagacaaccccaagtcataggagaagaaatgctggttcgggaagagatcataaaaattgtaaactaaggaccgttggcataaggttaataagtggactaacctcttccataatgcttggttgaaggctcgaagggtttttactagtgggtataatgatcagatgtggattgataaggcccatgctttctacgtagaagacaacaaagatctcaagctgggacattttgtgttgatggaggtatggtacactatccgaaatgaggcaaagtggatatcatacaacaatggtttgaaacaagcacgcaaaaggaagagttcagataagaataatgaaggagagaacatggaccatgtagatctggaggatatggaagaaatcccaagaccagaacatggacccaagaacaatggcaaaaaaatctaaaaaggaagcacttgaaaagaaagccaaagggaaggatattgaccaaacagaacttgaggaattgaatacatttggaaaaattcaagctgatgaacatgcaaaccggctgaaggtattggaagtacaaagaaactatcatccgagaagattgaacgagcaaagcttgtccctaccttagttcttagtttcttttaaggttttagttttaaagg

SEQ ID NO: 40060 - DNA, 1137 bp, Setaria italica
  Peptide Sequence Number=SeqID_106034
tttttttttatgatgaaaatccgagtacatgcacttacattattgatttcattggcatgcaaccaacagctaatacacatctattccgatagcttccatcgattgacataccataacaatccatccatgtgatggaagcatggatggtaagagtagtctaattattatggaaaggagtacatgatggatgatttcttggagtcaaacctccaaatgaagcaatagtcgtcggagttaccagtcaggtgctcaactgcacaaggcacaatgagagaggcagtgccgtcctcatgctgccatgagatctttgcagtgcatgggaacgcgcacctgttacttggcaagcatgacacgatgctgaacatttgcacattcaggaccacctcaccgttcatcctccttgatgcaccggctcccagtagggagttgagccacgggcatagtggttgacccaccatcttcttgtatgcgtcatttgttaggtggacacggttattgttgcagcccgatacgatggctgggagtgcgttgggcagctccagctcagcctccacttccctcgttgtcttcttggacacagccacttccaccaaccatgtggtggactcaacgatattgctgcagtcgatgcagatggtggtgcgcttggggcgagtgggatggggtttaatgaccttaggcacctgcaacttagagatcaggtcacgctctatcaggaacaaacgttccgcatccggcaacggcggccttgatgaagcaaaagaccccttctaagtagaaagtcttcggagatgctcttcatgacttggaagaaaaatcttaggcatgcaccatcctcttgtcaccatgggtgcctcaacatctccggtggcccaccagaacggaggcgaagggtaagacatcgcatccctctccctctttaacaccggagatggcacaggatagtcctgccggatgcgcttctgcgcctgccattgaatgctacttaccttgccgccaataggcatcagcggtggcggcgacggcatgggcttgggcgcgatgggacgaaatcgtggttccatgccctcgctagtctcagcatccaccttcttgtgatgcgccatgaacgccatagcagctctttggtcctattgc

SEQ ID NO: 40061 - DNA, 328 bp, Setaria italica
  Peptide Sequence Number=SeqID_106035
gcaaacttatcatagggtgggtttctgtcctcctcttctcgtttaaaatgactaccacgattaggtacaagtttttgtccaaatgctcttggaattgcctggaatcttgatcttaacatcccaagggttcggatctcacccaagcggctgaaggctccatttacgccaccacatattgtggagaaaatggcataccatatttgcgtgtccatgaagtataccatgacaattggagcccatacagtagtcacaactcctaaattatgctgcaagtttgggaagaactcatgccattcataaggcggcctatccagtgacatgattatcc

SEQ ID NO: 40062 - DNA, 577 bp, Setaria italica
  Peptide Sequence Number=SeqID_106036
gaaatttttgaggttctatcatttcttgattatttggagatagttcctccaaataatcaagaaatgatagaaccttgccgttgtgattttgggctggatgatacccaaaagcttcttggatacttcaagcggctgaatactgagaatcctacattttcatatgcatttcaggttgacaaaaatgattgcttgacacatgccttctgggctgatgccaaagttagaacatcgtactgctattttggggatggtgttagacttgagacatcttttgtagagaatgacgacgttttgccattagttttgttaactggtacatcacctgcaaagtgtagtatttggttgtgcattacttactgatttcacagaatcctcttacatttggttctttcaaaactggattgcagcaatgggttcacaccatcctacatcattagctacaagttataatgaagccattggttcagcagcagcaaaagtatttcctcagacacaccttctgtattgtacttctcagatattaaacagatgcaaggaaaatttggtaaacgtatattctagatgtgcttcttttgaa

SEQ ID NO: 40063 - DNA, 564 bp, Setaria italica
  Peptide Sequence Number=SeqID_106037
ttcctttaggaaaaccaagatccaatatgaggagtagccatggtggcagcagagcgtgtgcgatgactgcctttcttattttgctctttggatgcttcgcgctgtgcgtgcactgtcgctcaccggcgctcaaggatggaggtggaacggagaagagctacctaagaaacgacagtcacctcaccaccccatgccctagttctttgagcgcggccagcagctctacctcgccggtgaatgatgagagcaagatagagctggtgatgtgcgtgtacaaagggttgcagtgcgtggaaggcgagccctgccattgctgcgtgctggagcagccggagcccccatgctacttcacccacagcgagtgcgtggccaagtgccccttctgctacccgccgccgtgctcaccgcctggaccgacggtggaaggccgggcattgcaagcagggagcaataatgctaccatgtaatactccctccgttcattagtctccgtcgcatttggctcgggcacggtgtccaatatcgtgagcaacgagtcccgattgacaataaatccggagcttt

SEQ ID NO: 40064 - DNA, 355 bp, Setaria italica
  Peptide Sequence Number=SeqID_106038
tttattccctactagtgatccctcaaatggaattcgtgacttgcacgccggatcaccatttttccccacagggaatgccaatccatatatatcttttgtgaaatgcattgtgtgctcccaagagtctagtacaggacgtttcaggctggttgcaaatgaatttgaaacaaatactcaaaggatatatgagtgtgattgaccaaactcaaagaaagcagggaaattaaactaaagctaagtaaacaagatagagaccgatggttaaacgtcctaaagttacttacgcgttgagtcttctttatatcacaactcaaataggaatactaaataccgacctacaattagaacttactaa

SEQ ID NO: 40065 - DNA, 336 bp, Setaria italica
  Peptide Sequence Number=SeqID_106039
acactagaaataagagaacctagtcaagaacttgcatgaaatgaaattgctcaaacactacaaggaatatactgattagcgatgaactgaaatgcttcacaaacagtttttcattataaactgtgatttataacattcatgcgatgaacatagttcacaaatcaagcatcataaatcattattagtgatgtttcttattttggtttgtcactaaacctatgatgcatggaaattcatcatacaagttgtcacaaatatttttataaggttacgctacgattgaactagaattcaacgtggccctaacgtggtcatacaggtttagagcctttttag

SEQ ID NO: 40066 - DNA, 1054 bp, Setaria italica
  Peptide Sequence Number=SeqID_106040
ctaagcaagcaatgcatgctgcgactgcgaatgtgctaagatcccctggtccgggtcgtcctgctgcactgtattatggagaactgatgcgaaggaaccggtgctagaagttgccgagccccacgcattccgacgatcggtagtgccctgacttaacatgtatttgtcgtcgaccctcatccggcataatgagcagtagtggatccggcatgcccagcagaaaatatattcctcattctccttgaaatttctctgacgacatttgggacacctgatggtgctacctataggggtcagttgaactttagcactgcggccaatttgcacttcttccatatgcctctcgaacggcgttacatcgctatactgacataactcaaagagcacacattcgttccagaaatggtcatagccactgatggccctgccacagcggaagcagagcaactgaccacagttgccgcacgacatcttgttgcacccttctgatttgacgatgggcatttggcattttggacatagttgaattagaatatcactgaacatttttctgatggtgagcaattcctgcaccatctccttctgggacatcttgcctgacgcctgctggcgtttgatcttttcttctggagttatgcactgcttagctggatggcatggttccttacataaagagcagaagataaaggagcattttgggcattccgcgtcgttgctctcatcttccaagcatccaatcccgcaccttggacaataaaccacatctgacattgaatccaatgccttcttaagaacaagcctatcccaacgttcaaattcttcttacgtaagaagcctcttctacacgaatggtggaattgaagcattgcacttggtatcaaggcataccaactgaaatacgctaccttccttgcatgcattctgcataaggtctccatgcacttcacacaaaaataagtgttggcatgaaagcctgacgaagtttgagcctaattttttcagaattaatgttacttcaggagaatgaacctatagtcagtttcacaagtatagc

SEQ ID NO: 40067 - DNA, 638 bp, Setaria italica
  Peptide Sequence Number=SeqID_106041
ccggccgccgccgccacgtcctcctcctcctccccgtcggccaagcagagccatcaccatcagcgtcgctccgcggccgctgctgccgttactgacccgacaccgccccaccgccacgccagcgacgtcgtcgtcgccgacaattctaccacgcgggcaggctccatcaccgccagtatccataaccaccagctgctgctcaagaaggaggtgctcgacatggatagcctcgagcccgcccaggaggacgctgctgctgatcacgacttggtggtgggcggcatgattgcggatatggacggcgccctcaacgtcctgtgcgcctccagcttccactcgaaaaagcagcagcaacagcatgccactgctgatcacctggagaggctgccggaggaagaaaacaagcggctgctgctggatcgggatcccttcagcttcagcttcttggactgggtgggcgcctcatttggagttgctggagaagcagcagcagcaaataaggcggttacagttagatggctggatgctgcctgatcagcgtcagccaatactcatctagaactgattaagcaaattcctagtaatttgcatatacaggtagccaggccgcccaatttcaaatgcaaatcaagcgcgcg

SEQ ID NO: 40068 - DNA, 629 bp, Setaria italica
  Peptide Sequence Number=SeqID_106042
gcgtcgccatcacccgtggccccgatcagttgctgccgtttcggggccccgtgtccttgttggggctagttgcagagaacaccggcggcaggggggtgacggcgtcgacgcgattgcttgcgacggcaggcttccccttcaagcccagccccatgccggcctcctcgtcgcccttgtcgttgtcgaggccgcccggcttgtccatctctttcccttgccccagagcaccatgtacagcccggcaacgatgagcaccgacccgatagcactcccgacgcgtatcttctcgccgaggatggcccagccgacgatggcgacgacgaccatcagcagtgggctgaacatggacacgtacagcggcccgcgcacctggatgcaccacgacatgatcgcgaacccgatcccggaccccagaccccgatgtagagcacggagtagagcctgatgtcgaacccgagcttccacacgtcgaggctccggtccatggcggcgctgacgcccgcgcactgtgctcccgccatgaggcacatgatggccgtgctggtgtagggcgccgagaagtcctccgccatcctggtctgcaatgaacgaaaccaagaacggaacccaaaggaacggaacgaacaaaa

SEQ ID NO: 40069 - DNA, 610 bp, Setaria italica
  Peptide Sequence Number=SeqID_106043
ttggaagaggaggcgggacgaggaaccggaggtcgaagggacgcagcaggcggcggagcaccgacagagcaccgtgcttgcacctactaccaagactccccctacgagcgcagtaagtgtagtcaaaatctagctaccatgacaaatataacggggtgccgaatgcctgagctcatgtgtgttcatattttgattttaccgtcggcaggtgtggtgagggggtgggcaaaggcgccagttggcgtggctgcaggagatcccccagcctaggagcttgaggattgccaacttcaggttccaaaggcccgcagattttgtaggcttgtagatcttcctgcttggtttaactctcaagtagctccgtgccagacaagaatctagctagcagtgacaaatgacgacgacgatgacaacaccaatgttacaggatagcttttagttcgtgcttataacggtgcaacttttttctagcgcacatgaggtggttatgtacgtcttggagggtgtacacgcgtgtgctttcataggagcaaaatgttgttgcatttatacgagctattacattcgtactgtttcgttaaaatggtaaacctttcgaacgagaaaaatt

SEQ ID NO: 40070 - DNA, 565 bp, Setaria italica
  Peptide Sequence Number=SeqID_106044
ttttttttcacaaatacaatcacgttaacataggacaaccatgaaataatccaaacacatttagtccataaaatagttcgaccatgaaatagtccaaacacatttagttcatcaagtccatgatatttagttctactacataaataagcccaaatgatgagtttagccactagaacgtgatcaatgtggagtgtacgacttcttcgttacatgatgacggcccgggttggtgggaaggacattgacgctaccaacatctgtgcgatcccgtccccatgcctccctcttaggtggtgcgctaccttgtgtcggggtcgaagcgccttgtagttgagaggggccaacctcctcttggccgtacgttgggtcatcgtcctctgagttcgtagtgtcatcagaatcatcggcgctctctagttcaggggcaccttgaggggaaccaataacgagagtcgctccatgactacgtcttcctcctctagatgttgcccgacttgtgctccttgccatgcttgaggatgcacgatgcctcgatgctgaaggtccaaccttgtcaatggcaggt

SEQ ID NO: 40071 - DNA, 495 bp, Setaria italica
  Peptide Sequence Number=SeqID_106045
taaaaagggtaaataacaaaacttaagaaggacaagaaactagaagaaggtgaatactaaattgaaagcggctacagtgaagcttaaaaagactagagaggagagggaccaatttgatgaagccagcaatcagattgtgttacacctgaaaacaaaggaagaagaacttgcaagatccattgcttcatgcaaagtagaagcaagcactgtcagtgcttggatcagctttttggaagatacatggaaattgcagtccttatttgaagagctaaaagaaaaacaggccaatgaggaattggatagatgtggagactgctttgcgaaattgattaaacatcatgttctgcatgcctgttctaggaagagctgagcacttctattgatcgtatcaaaaacctttgtcgataacttgaaaatattcagtgacagatcggtgtcagcagaggatggagctaatggttcgtctaagcaatcaaaaccctcgcaaaatacctt

SEQ ID NO: 40072 - DNA, 466 bp, Setaria italica
  misc_feature (458)..(458): n is a, c, g, or t
  Peptide Sequence Number=SeqID_106046
acaacatatgattacatcatagctttgagggagcaggaggatcaacaagaggttcctggacatcaaagtccacagatgtctattataagctctgttactggatttagcacagccagttcttttggaccacttcatcgtggttcatggtgcacaccaccacgattattcctagaagaccagtttgatgttgttcctccagagatcggcatgtcacagaattcaggcagtaagaaaatgaaagaagaggaagtaggaaggagaaaacctggaccagtgaaaatcagtccttggacactggcacgccttaatgcggaggaagtttctaaagcagctgcagaggctaggaagaaatccaaaatcctgaagccaattgcaaaatatgatgcttcggacaatggcagtaaaccagatcataagctcagcaacaagagacgaccagacagaagaggtttccccgntgaacttt

SEQ ID NO: 40073 - DNA, 938 bp, Setaria italica
  Peptide Sequence Number=SeqID_106047
cgttccgctccggcgccgccatggggttcctcctcgcctccagcgcgctgctggtgctctacgccgccatcaacctgttcgggctctactacggcgacgactggggcgggctctacgagtccatcaccggctacggcctcggcggctcctccgtcgcgctgttcggccgcgtcggcggcggcatctacaccaaggccgctgacgtcggcgccgacctcgttggcaaggtcgagcgcaacatccccgaggacgaccctcgcaaccccgcggtgatcgccgacaacgtgggtgacaacgtcggcgacatcgccgggatggggtcggacctgttcggttcgtacgcggagtcgtcgtgcgcggcgcttttcgtggcgtccatctcgtcgttcggcacggagcacaactccacggcgatgatgtacccgctcctcgtcagcgccgtggggcttctggtgtgcgcggtcaccacggtcgtcgccaccgacatcaccaaggtcagggccaccgacgaggtcgggccggcgctcaagcggcagatcctcatctccaccgtgctcatgaccggcggcatcgccgccgtcaccttccttgccctgccgcccagcttcaccctcttcgacttcggcaacgacaagcacgtcaagaactggcacctgttcatctgcgtgtcggccggtctgtgggccggccttgtcatcggctacgtgacggagtacttcactagcaacgcctacgcgccggtgcaggcggtggcgcggtcgtgccggacgggcgcggcgacgaacgtcatcttcgggctggcggtcgggtacaagtcggtgatcgtccccatcctggcgattgcggcggccatctacgccgggttccgcctggcggccatgtacggcattgcgctggcagcgctggggatgctgagcaccatcgacgaacggggacta

SEQ ID NO: 40074 - DNA, 483 bp, Setaria italica
  Peptide Sequence Number=SeqID_106048
gtcccacggccaagctcgtcaacgccgacggcatgctcaccgaggccggcagccgcttcgcggggctccggcgggagtggacgtcgcacgcgaaggggaaggtggacgccaacggcaacttcaagttcagggggttccacggcacgtacgaggtggtgctcccgaccgcagccggggaggtgaagaagcagaggtttgacgtcaagaagggggacgcgccgctcgtgctcgacatgaatttctagattcgcattcgcacacgccgtgcacacattggtcacggtgattaagatttacgacaaggattattagtaccatctacttactattcgtacatacaaaattgcaaagtgtggtaaattgggattggaatggtgcatgtagatattactgtggtcaagaaatcatgtatctttagtaatggaaagtgtgtagaagattggtattgtactcggtatttattgaatatagactgcagtaaat

SEQ ID NO: 40075 - DNA, 284 bp, Setaria italica
  Peptide Sequence Number=SeqID_106049
gtcgcagcggtagtgctcgaacccctcggcgcggaggagcagggcgacgagcgcgacgtggctggagtccatggcctgcagcgagaacccggtgccggagcagtcgaagttggcgtcggtgaccagctcgcggatcgcctcgaggaccttcttgaggaggctcccctgcaccaacctcagctccaacatcgtggcggcgctctcctcgtcggcggcccggcggcggaagcgggaggggtaggagatcgggaaaccctaggtaggatctgggcgcgcggggtttg

SEQ ID NO: 40076 - DNA, 471 bp, Setaria italica
  Peptide Sequence Number=SeqID_106050
ctttaactattaatctgtgcctactgcagacaggcaaaacatgggtatctacactgcaaataacctgagtggaaccatgaatgtggtgggtagcactaatctattaaagaacactcatactatcattatccatagctattttgcaggccaacaaacacagatagatgcagaggatgggatttgttccaattaaaggtcaacgatgctaaaggtaccttgtcaacagtttggttctgcctgcagacaatgttagcgctcccaatttctcctgaggttgagaacttgacgccctccttagtcaccgagatgataacagtgtccccgatgctgctgaggtccttgcagatcctcataaactcagccgacggcatgcggacgatggcctggtactcggaatccgggatgccgaggtgctcactgtcgatgtccatcagcttcatctcgaaatcggcaatttttattctttgtctt

SEQ ID NO: 40077 - DNA, 546 bp, Setaria italica
  Peptide Sequence Number=SeqID_106051
ttcgtccggcgtcccctgcctccgccgccacccgcgccatgagcttcctctcggcgcggtcgaacgcggcggggtcgctggcgttcatggtgttgatgaggatgagcgtgtacccggtgtccggcaggccgaggaagtcggcgtcggtgtagcggaggaagcagtagtcgtaccagagccgcacgtccgcctggccccggcacgaggaggccgcctgcttcgccgccgcggagatgcagagcgcgcagtcggaggccgggatgtcgccgcggcactgcgcgaggccccagatggcggagctgccgctgccggcggtggccgtggcgtaataggcggcggaggcgcgcgggacgagcgccgcgagcacctggctgatgctcgcctgcgtctgcgcgcccgtgaagttcttggcgcagtacgtgcccaccggatccacggccgagctcagttgcggagcagccgcggtggcggcgatgagcaccagcaacacaagcaccggcgaggacgccattgattggcttgtttgtggatgtcgtcttcttcctg

SEQ ID NO: 40078 - DNA, 905 bp, Setaria italica
  Peptide Sequence Number=SeqID_106052
gacaagaaaagtaggtaacatcagcactatattgttcatcagggcttcatctcctcatcttcctcaatcttaggagccaggtaaaatctaatgtaacccatctctgctatcttgtactcgaccaccactggcagctcagatgaaaggctgatagtcacttggtcagacagggacgatgccttggtgaaggagttcatgtacctcagggcaaaggtcaaggaaactggttcctgcatctctataacggtagcttcctctggcttgtcaacagtttggttctgcctgcagacaatgttagcgctcccaatttctcctgaggttgagaacttgacgccctccttagtcaccgagatgataacagtgtccccgatgctgctgaggtccttgcagatcctcataaactcagccgacggcatgcggacgatggcctggtactcggaatccgggatgccgaggtgctcactgtcgatgtccatcagcttcatctcgaaatcggcaattttatcttgcttgggcgactcgaacatgaaggtgacggtgtcggacccgtcgtcggccttgatggtgatgatgtcgtcgttgccggcgcatcggagcatcttggccatgttgtttaggttcatgcccatggagaggttgcggtcgcagcggtagtgctcgaacccctcggcgcggaggagcagggcgacgagcgcgacgtggctggagtccatggcctgcagcgagaacccggtgccggagcagtcgaagttggcgtcggtgaccagctcgcggatcgcctcgaggaccttcttgaggaggctcccctgcaccaacctcagctccaacatcgtggcggcgctctcctacccctcccgcttccgccgccgggccgccaacatcgtggcggcgctctcctcgtcggc

SEQ ID NO: 40079 - DNA, 1568 bp, Setaria italica
  Peptide Sequence Number=SeqID_106053
ctatacactagcaaggtgtaactctgccacggatcagtcagtcgaagcttgaggaccggctccatcttcccttcagatactcttccaaggaggtgttggctgcaatgaagtcggtgctgctgaagaggcggagtcatcatccacatcgaatgctaggttgatgtaggactggatgttggcgttgctccctggtgctggtggtgtcatcacacattcatcaccatcgacctcgtatgctaatccgacttgtgatcgtgcccacttgaggatatcgttgtcaccttcgagaagcttcagaacagcatcaatttgaggacggttctgaggtgcttgtctaatgcagagggaagcagcaagggtcatcctctcaacttcattggtatggccttcagtaggtaagttgggatctacaagttgtgtgagcttccctccttgtatgatggaatttgcccacatcactaggctctcctgcccttttggacaaccattgcagagtggtttcctgcccgagatgagctcaagaaggactacgccaaaagcatatacatcaattttgctgttcaccttaccatgcatgaagtattcaggagctaagtatccgaaagttcctgcaacgtcattgcacgtcatctgagatgtcacatcagcagcccagactgcgagaccaaaatccgataactttggctcaaagcactctgagatgaggatgtttgatgacttgacatccctatggatcactggacgactgttgtcattgccatggaggtaatccagagcatgagcaactcccacggccacgctgaacctctcagtccaaccaaatatgttcttgcattctttttcaccatgcagtatctcttccagactgcctctttgcaagtactcgtacactaacagaaggtcatcattcttgaagcagaaaccaatgagggaaatgacattcttgtggctaagagagctgacaatctcaatctctgagacaaactccttcagcacctcatcagaatacttcaggatcttcactgctagctccctgccatttgccaaacagcctctgtaaacttgactagtgccaccttgtccaactacacactctggtgagaaatcagaggtgatctttgcaagctcactgtaactgaaggaagaataaacggatgagaatttctctttcagcaaggtcagttcctctggagtttccttgtccaattcttgaattactacagaagattttcctgaattgctcctcaagggaataaccaaccggtcacggagaatatgactggtactcatggagtctggtcttgtggttctgtattccgaatggactggtgaaactccagaatacctactcggtagccgcatcgcccactgcaccacggacatctttgatttgtcaggcagggaagctttccggtctggcaagaacttcttcctcaagaggggccatccagttgctacttctggtgattcgcggcggcaagccttcactgggaccaatgctagtgaaacttcttttgaccgcgcgggagacctcattggtatggatgaggcaggagacctcattggca

SEQ ID NO: 40080 - DNA, 603 bp, Setaria italica
  Peptide Sequence Number=SeqID_106054
tggaggagcggcgcgggccaccgcgcatagcagacggcagatggcccccacccacaccctcctcgcgccgtcgcactgggaaggcccgcgcggccaggcgatcggggaggcaggcgtcctggtggggatagcgacaacggggcgatggcgggcagatctagggtaaggagagagaggtggagaggagaccgagctagctccgccgccgttctccttgagcgggcttccggctcgtggctccagcggcggcggaggcaggaaactggcgaggtgagcctagcggcggggaggcgtggcggccacctgagtcgcccagcgagcgatgcggggccaagtatatgtttattaggaaggattaaagcatttcccagctcagatcggagtaggggtgtaagagcaactccaagagactgctaatattacctccaatatttttttttgaaaaaaacaaactccaacggtccacccaaaactcgagcacaagaaaaaacgtccactcgccccgcgtattttcgcaagccgtggacttcccaagccgcaagatccgctatcgcgctcgttttttttcgggcctcacatctgtcgggatgctacgccgggatg

SEQ ID NO: 40081 - DNA, 401 bp, Setaria italica
  Peptide Sequence Number=SeqID_106055
caggatatgactggagtacgtagaaatatgtttgcattttgcataaagcaaaaatgaaggttccatcgaatcaattgtatgcagccaaatttaaaataacattgtcgtgttttatctttttgagtactccttgatctgtgattttatctgagataagagtttgaatgtttggtaaattgaaaaggcatgcttgtgatatactcaggtgcaccacttaatgaggaactttgaggcaatgaattcctttatctcggtggtgatgagctagatatggtttcttcagtgttacatctgttgccattgggttgtcttaatttatcttggggataaaattaaccaagttagaatgcgtgtatttttcttttaagttggagcactgggatctgaacaaaatgatgcag

SEQ ID NO: 40082 - DNA, 565 bp, Setaria italica
  Peptide Sequence Number=SeqID_106056
ctaccgtctaatataactctccatataagttgtattttaagttcaaagtgtgggatgatataaaactgtagaaaaaggcatgaaatatcgttcaaggcctgccgagttgaccataaagatgtgagtagaaatcatgagtgagggtatgaagtaacaagaaaacgcaccaccaactctattgctcagattcagaactagagtcctacagaaacaatttcctaaatgaactcataactgcagataggcaaaagtatgtttgagagaccataccacccaaatctgtataaaaagagtgatcaacaagatgattttgaagttttaaggtattacactatggaaatagttcacagtttacatacaaaaatgggatgtagattgatccatccattattccgtccaatgcacgttaaacttgaatccaagatcatgataagctataaaccaaataatccagcgaatctccacactccatatcaacgactatatctcaagtgttgacagccaccagtttgatttgcagaattgccacaattatccagcataactcaatcagagaaacatcaga

SEQ ID NO: 40083 - DNA, 2133 bp, Setaria italica
  Peptide Sequence Number=SeqID_106057
cacacgtagtacgctgatacataacgtagcttgagagatgagaataactggacgcactatacatttcgttaagaagcagtaacagcataacattgaagccgtggaaatttaggaacacgatatatttctttacaagacaaaagaaaaatatacatctcatctcatcggactggtagctgcttcattggatgtccccgtgtcatgatctggtccaccacctctgtgaagaacggatgggattggcgccttcatcgccctatcgcccatcgtcggtgaaccaccctgaggcgtggaaccagatgacctgcgtggagctgacgggctctccagaataaagatcgacgggctagcattgccactcctgtatggcgaactcggattggacttgaacaagggcaaaccatcttcacgtcgcaacggggacatggacattatgcgctggctgtcctcggttacttgccctctgtgtgacctatcctctgtaatatcgtagtaatctgcagtcctgacctcctgggcaagggaacatgagcagcagaacaaccactggaaacaatcagtcacgtcggggttgcggcagcaggtggtatttccaggcaggttgaatctcttcctcatctgtattctccaaaagccaccatacagtaaaccaaagaagcataggaaaagaccagtgagccccagtgcctctctaagggattcattgttaatgttgacagctgccaggttgaagataaagaatggtgctatgcaaaagagcagaaacgttgcgatatggacatacatgttgccaaatccgagcctctgcatgttccagccaaagacacagcaactgcagaaaattgacaagtacgcaagagatatctgatcccagaaatccagtagtccgccaacccactcaggcctactctccacgaaacggcgttcatcactctgaatgaaagagtaccttctctcaaatgacttaaaccgtgaagctgccctaccgctctcagttgaggcgacttcaatttgtgcttcttgatcaatgtctgcctgttctgtatcataatccttcccaagtgggctgatgatattatacagaccagcgaatgctgcagcaccaattgcaacagatatagtcagcccaacaccaataggaggccgttcagatctgcggtatcccaggtttagaccgcaaagggcatactgagcaaagcaattcaaattaagtaggattacaacaaccatcatgtgcatccactcattaggcttatatgttccatttttgcaatatgtcttcctaagccttaagatgtccttctgctcccatcgacacagaagcacaaagttgtagatccgctgtgggtgctgataaaggcacatgagcgtgaacaatgcattcagaatttggttgttcacctcaaaccaggtgtctctttgtgatttgcttggcaaagcacgattcaacattccagtcataacaaggaagagaattgcacctgatacagcaacaatagcaatccaaacaaagagggccatgttcataggctcttttatccaatccttggccatcatccaaagatggccccaattaatcttcctgatgaattggaaatggtcatgactaccatggttgtcagaatggatagaacgtgagaactcatcacgttgaagtgcaagctgttgaaacttgaatgaaggggagggacctaacttctttaacctggggccactagaaaggcgattcaagaagttcctaaatccactccatcgctttccctgttgtgaaacaccctgagtggccacgcctgttgtgccaggattgtccgaagctgttgattcgactcgttgagtgtcagctttaagaattccattaccatttggggccattttttttcaggtggagtcttggatatatatacaatccagccactttccactgggtaaggcaccctaattaacactcagacttgttgtgctctttaccacaggattgactgctcccttatatgtatacagaaaagtttgcacatacatactgttggctaaccatccctggaggcccggcgggaagcgaaagcaaaggccgggattccttccttgccgccgccgccgctgctccggattgcgaagccccaggggcggattgtg

SEQ ID NO: 40084 - DNA, 276 bp, Setaria italica
  Peptide Sequence Number=SeqID_106058
cgaaggtggggacaagccggccctccatgggttcctcagcaagacggcgcactgggatgaggcggagcttgtcgtcccccgcgccgcccagggttttgacccaggtggagatggaggcgaggttggccttctggatcaggttgcggagctcggattggacctggtcgacgtcggggccgggcagcctgagggagtggggcgcggggtcggagggggcctcgatgctgagcccgcgctcgcactcggagacgacctcctcgtagccgcgggcgtcgg

SEQ ID NO: 40085 - DNA, 1602 bp, Setaria italica
  Peptide Sequence Number=SeqID_106059
cacagccgccaacatcttgatcacaagctagctggtcattcatttcgacaatcttcaaaagttcatcaaatgaataatctggacacatcatctttgcagttcggagcgaactagcattgatattgtggaaaaatgaggtatatttgaggcgcctagactcaaatttacaattgtgacagttcatccgttcatatatgtccattccaaaaagattatgtgctatgcaagaaatatttgcacaatcccatgatccaacacaattcttctcatgagatttaccatgagagacagtacgagaagtgtacgacttatgcaaacactcaaagattacccccagtacctcagatgcatcgttcatttgcccctcctgaaagaatttgctgttcgggtaggatttactcaaagcgatcctcaatgaagtaggcgcaactgcttctccttgacccttggaagctttgctcaagtcactgaagatatcatataatgcacagacagcacaaggatcttcaacatgcttgtgcagtaatgatgttttaacgaactcgtaccgaaaacgccttatatgccataatgactgaataatcacattcaagaaacaattgtattcaccagcagcatttttaaggccagccccacacacttctgccccatttgaagcacttattgtaccagcaggacaagtatcataaccaaggctttggcgcacagcttcattgagatcttcctgaaaccttttatcaaaatcatcctcaatgcagacatcttctgatggtattccatcactgccaactttctcaaaatttgacttctctgttcctgcagcgtgccctttattaacaaacagtcgatcatctgaaggcaacacatgcagctgattctgttttccatcatgatagttgtgatttgcatagggagctattttacttctactgctccatctaggagctgccgtaccaaattgtggaccacatgccctatcatcatcataaacagcaccaggcacaccttggacatacttcttttgtccttcgctagtacttttcttaggcttttggatgctagggttaccctgaggttttatatgttgtgcatttgtccaaatgccattcattttcagtgttaacctagagaccctcatatcactgctggttaatgcctgttccccgggtgaatcccatccattatgttcccccctaaaactgttctcagtgtagctagagtgttcttgcaatggaacatcagaatagcgaaagtcgccaaacttaatgccttcgagattcccttttccagtgcttgaaagaccagctgtcccaacaacagaagatgcataggtacttctaaattgttctgcaagatgcttctgctttgtttcctcttctatccgtcgttgatattccagagtctcttccagctttctttcctcagcttcaagttgtactctatgcctaagttcttcctcttgttcattgaagtaatcatcacttgttgagagtttgcaatccaaatcatcacaatcagcaacaagttgaaacttctctcttgtttcctcatcagcactgtcttggcaaacaagatactggtcactccagcttgaactccgtt

SEQ ID NO: 40086 - DNA, 4024 bp, Setaria italica
  Peptide Sequence Number=SeqID_106060
tttttttcttttttttttttgtcaacagtatttgatgaggattttgttattcatcgcctataaccatatcacaatctcatggggtcactatgttgactcatgctttacagatttctcggaacacaatacctgccccagagttagtaccgtattccaaatggtgtttctattccaaacatttctcaacgagtgaatacagctcacaccacatcttcattccatctcctcccattagaaaccttccgacagcaaaacaaaggctcctataccagactccacattgtaagcacaaaattctatacatggttggtgcataatgaagagctttagacagattcagctagacttgttcgatggcagtgcgaatgcccccacccacttgatcggcagtgaaatcttattggcagatggaagggtcagaggctcagtaactatacccaaggttaaaggaaaataagagacaaggataatcagctctctttctgcccaagtatgctcagatgactgctcattaagggctcgacaaaagcttacggatcaatgcaactgttgaatactctatccccccgctcaaaacgaatttgctactctatttctaatcttcacgaccactgggaaaaatctatatatctgagggcatgttaaccactgcacagctccccagaagctgaagcataactaactcgcagcctcaaagaaaagcacttgcggttgcaaatgacccttttcacacatcacaagaacatcaccccaactaccaataaccttaacagtctggtcatcatacatgacccaccttccatccttgaaagcgaaacaatgataatgctggccatagtaacaaaccactgacaccagagtgtgcttgcttccttgatctataccatggaagaagatgctaatgtctatctcagttgaaataccagccaaagttgcagatatgtcatccacactctctttgttgttctgccatcccaaaacaactgtaaaaacgtgcgggcgactagaaagaatatggtgtttatgattcaattttccacagccgccaacatcttgatcacaagctagctggtcattcatttcgacaatcttcaaaagttcatcaaatgaataatctggacacatcatctttgcagttcggagcgaactagcattgatattgtggaaaaatgaggtatatttgaggcgcctagactcaaatttacaattgtgacagttcatccgttcatatatgtccattccaaaaagattatgtgctatgcaagaaatatttgcacaatcccatgatccaacacaattcttctcatgagatttaccatgagagacagtacgagaagtgtacgacttatgcaaacactcaaagattacccccagtacctcagatgcatcgttcatttgcccctcctgaaagaatttgcttgttcgggttaggatttttgaaagacctgtccaacgatgcataggtacttctaaattgttctgcaagatgcttctgctttgtttcctcttctatccgtcgttgatattccagagtctcttccagctttctttcctcagcttcaagttgtactctatgcctaagttcttcctcttgttcattgaagtaatcatcacttgttgagagtttgcaatccaaatcatcacaatcagcaacaagttgaaacttctctcttgtttcctcatcagcactgtcttggcaaacaagatactggtcactccagcttgaatccttggggtccttggatctccgagaatccttcaacttcttcttctcttttgacttctcatggttgctagcattcttcttagcatccaaggcaagttctgccaggaaggcttcccttgcagcatcagatctctctctggcatccttgtccaccagctcttccagatgggtttgcaagaacgatttcatgaggggtataagaaccgttcgataatcaagagaagaagcaggtccaagcttatgctccagttgatgcatcacagctacatttcgcataatcttagcatctatcttgctaagctccattgtaatttgttccttcatctttgaaacaaccacatgtaccactgaatcatttgattgcaaatcaggcagcctccaaccttcttcttctgtcccatcataatcacaaaggcgtggggccatgctagaaaaagcctcatcataaccgaagtgtgatgtgtgaacttccttcaaaatagatgagactacatccaactcagatctgctcctgttggtcatcacctcagcattgaagtccaacaactcctcctgccgcttcctgaggagctcctcgtacccttggtagtgccccatctcatccctatcggcttgctcttgagcaaagatgctctctacagaaatcaaggcctcctcatttctcagctgttcaagcttccgttcacataagttctgcaagctgttgaactccctctcaagtgcccgaagaaggtccactccctgatttgatctttcctcgagcatacgattccaacccaatagctgctctccaattgaagatccagcgtacaaccatgaaagcagtgcatcagtatcaacattctcggagacaaactttctaccaaaactctctccatcaatgatcagttctgatgaatcagaattaagtgtaaccttctccagtccatcatgattttttggaaaagtatccccatcacctagtccttcatccttctctaagtgcctattgagtccagaggactgcattaagtcctgcaagaattttactaccttcctcagtgatgatgcctctagaaagcaaatgcaatgtggtgactcatccaacgagtgattgagcagcagtgactcagacagcatccccctgagctcctccatagcaaattgtatcaccttgttcagattgctcactgaaagattcttgttcttcacaaggatttggaacaatgaatggatcctctctaaaatatttgccctttcaacatcatccgagagtggccacttacggtaaccttccctcatcaccaccgcaaaaccatcagactcctcgttgtgtggtgagactgatgattctgacgtgtccgatttgtctttgttactccaactgtccgatgacatcgaatccttgtccctatccaggccaagattgtcggcttgctcttcctcgaacaatttcagtgctgcggtagcgtccaatggcctccagttccaaccaatgagcattcgtgcccagccagcatcaatctcatgcggcaccatatcttgtagctcaggtgagagtatgccaacatgctcccggagcacatgcaaccggtgtgactctgcatccgcaaactgctcccggcacctgccacatacccagaactcccacttgccactcttggcggcaaaccctagcacctcattaagcacatcagatgccacactggcagcatctttctccttatgcatcatggcagcatagtatgacttgagctcagaaatgctagtgtttaagaatgcaagcctttgctccactggtatcgcggcccagtaggcacgcacctggtccatgcgatcagacgtggatgaaaccgtgactttcctagagccgcctcttctccggtcagcacgatgcccacccaccgatgactgagacgatgaggagggggcatcatctccctgtgactgggaagaagtgggggtggcagccacagcgccgttgctctgctctttctgctgctgcagcagcctcattgcagccaggcgtacctcgatctcctggcggcgctcctcgggggtcttggtggccttcttgatctcgtttgggcggcgcggggagggcaaggtggggacaagccggccctccatgggttcctcagcaagacggcgcactgggatgaggcggagcttgtcgtcccccgcgtccgcccagggtttttgacccaggtggagatggaggcgaggttggccttctggatcaggttgcggagactacggaatttaaggaaaccttaaaggttaaacgtaaaaacgttaaaacggggtaaaacctaaaaa

SEQ ID NO: 40087 - DNA, 996 bp, Setaria italica
  Peptide Sequence Number=SeqID_106061
acttccaccacctccgcctccaccgcagaggccgtctggtgcaaatctgagcataactgattctgctcagccctcggttgtcctgcctccaccgcctccgccgcctgggttgccaccaaaatcaaatgacatggaggctgctggtccttcaaaggacactcctgggtttatacaagatactgctgcaagggtcttgccaccaccgcctccaccgcaatcatcaaatttgcctcctctacctccaaggccaccattgcaacctgatatgctaactcctggagtcatgagatttccaccgcccccaccaccgccagattcaaggccacagtatatggctcctggggttgccaggccccctccacctcctccaggattacccccagctcagatgccgatgccaccgtatggtgtacttcctggtccaccacagatgcctaggcctccgtttttgccaggaccccctatgcatccagatgagtttgctgcctttggaccaaggcctcagttacctcagcagccatcatatgtgaagtcagctgccccaacagttgtcaagagaccattagcacagcacactcctgagctgacggctatggttcctgcatctgtacgggtcaagagagaatctgctctcccgaaaccaaaaccaaaggtggtgcagcagcagcagtcatcaacaccgtccatttcaaagccttcagtgaccctcataagaagtgatgtccagccttcctcatcagcacccaagccgccaagcatcgatgattcatatatggcattcttggaagacatgaaggaattaggtgctcttgatgggtaactcaaatagagtagatttctgattgcacttgagcatccgctgtctaaacatcagccccatcttgatctgtggctattgaatcccgctcagatacttgagatcatttcatgtcccaaaagaaaaccttgagattagtttaattggaaaatgggaaaacaattgtaatcaaaaaaaaa

SEQ ID NO: 40088 - DNA, 437 bp, Setaria italica
  Peptide Sequence Number=SeqID_106062
agaacagtctctctctctactcaatattcattggattggatgggatgcagtttcataatcaatcaacagaaaggacgtttaattgcgagcaaatgattccatcatccatcgtgcatcgagaagagaagatagaaatatatatgtatattgcacctcaagaaagtacctgctgtatgtccttaaaacatacgaaattaagcgtgggcggtcgattttctcaattggattatgaattacaaaacgcatgtgcatgcatgcatgagcctccttgacagtcgagctatgtattctttttagctagacagttgcaccttgcatggtactggtttataaattgtgatgtaatgctatatatgtcggctagacgcggttggaatgtctgtccttaatgtaaggccaaatggaggtctaaaatatgatcttatttgttcaaaaaa

SEQ ID NO: 40089 - DNA, 848 bp, Setaria italica
  Peptide Sequence Number=SeqID_106063
tagttatttcttatttctttttcttagttctttgttccttagttccttactttctacttaaagggtttcttcttaactaagttaactattttaatgaatctacaaaacaagggcatcttaagcaatgcaaattcttccttggatgcatcctctcccaaccttcaaagttcacttccctcatcctatgtttcaaaggctgtgtcatccttgaatcccgatcaaccaggagcagcacaatccacttctatgtggagacccacaacatatactgatagaatgagctcatcctctgtttttagtgatggattagcttcagcgtttggctcaacaaaaatcaaagaaaacgggagcagaaacaaaagatgagttgctcagtagtcttttgtcaagacaagaggcagcaattgcttcttcatctgcaagccctctggcgagcaatggagtagtgccaccccaatcagcaaacacaggttcttcaactgatcaacagggagcttcttccttctcacttcaatatgtgcagcgcatgcttgaagaatctcttgggtctgttcagaagtccatccatgaggatgtgagaaatctccacattgaacttctaagacagtttcacatgcaggagatggaaatgtccggcgtgctgaacttggtcttggagaaggtggaaggcctgacaaaggaagtgcaacaattaagacgggagaaccaacagctccggcagcagcttctctgaacttggtcttgttcgttgtggaagagtgcaatttgcgccagtttctgagataagcctggctacgcttcttatacttatttgtttgcttgtctaggtaatgacaaatggatgttcc

SEQ ID NO: 40090 - DNA, 1492 bp, Setaria italica
  Peptide Sequence Number=SeqID_106064
tcacaccatctagtggcaactggtgggatgagcatggaagcgatgatacaaaaaagatgataaaacaggagaaaagaaattgtcaacaactaggaagtttccgtatatggaaggcaatgatgagcctcatccaatctcagattggaggtctactgcaaattcaagacaggatagcatctcatctgtgactacgacatccatgccatcatggaagagtgaactgtctatatcttcaccagagacagcaactggaaatgcattaccagataggctagctcaacgtcaacagatctcacgctttggggcttcagccttttcaacaggtggcttggcatttacagccttacaagattcatcttcagctgccagccactcactaaagggttctctaacaagtaacattttaatgaatctacaaaacaagggcatcttaagcaatgcaaattcttccttggatgcatcctctcccaaccttcaaagttcacttccctcatcctatgtttcaaaggctgtgtcatccttgaatcccgatcaaccaggagcagcacaatccacttctatgtggagacccacaacatatactgatagaatgagctcatcctctgtttttagtgatggattagcttcagcgtttggctcaacaaaatcaaagaaaacgggagcagaaacaaaagatgagttgctcagtagtcttttgtcaagacaagaggcagcaattgcttcttcatctgcaagccctctggcgagcaatggagtagtgccaccccaatcagcaaacacaggttcttcaactgatcaacagggagcttcttccttctcacttcaatatgtgcagcgcatgcttgaagaatctcttgggtctgttcagaagtccatccatgaggatgtgagaaatctccacattgaacttctaagacagtttcacatgcaggagtcggtcgataaaggtttttctttcactgcctttatttttcctatccaagatggaaatgtccggcgtgctgaacttggtcttggagaaggtggaaggcctgacaaaggaagtgcaacaattaagacgggagaaccaacagctccggcagcagcttctctgaacttggtcttgttcgttgtggaagagtgcaatttgcgccagtttctgagataagcctggctacgattcttatatttctttgtttgcttgtctaggtaatgacaaataggatgttcctcggttcctgttcgacatggttgtacatagaatccttagtttagagaagcaacattgaattattgatttctttatttgttgtgtacttgtgttgaactgcttccatgtattttggtggcacctgggtggcctgattttggatggcctatgtgaaggcctaacatataggttttcaatgtagcttttgtcatgctgttatgtgccctctgtattgaggctaaaaacgctcgtccttaaataacattacatactgctttgcttttgaaccaaaaaaaaaaaaaa

SEQ ID NO: 40091 - DNA, 598 bp, Setaria italica
  Peptide Sequence Number=SeqID_106065
tatagagtttcaggttcaggcacgctaatgatagcatgggagtattccgtgaatttggcagatgattccatcttccagcatcttactctttgatcaaggccagtagagaaagcccaggtaccgtctgtccagattcctttaactgctgcactatgagctgatgggaccttatgttggaatagaattttaagtgtaccattgtcatgcaagtttagcctagctgtggtagttgaggagtcctctagagatcctactgtgaagctgaagcactgaacagcctgatcatccccaccacttatgatgcagtatgacttgtcagttgctgagtatgatatgtggagacaattaacgcctgactgatggacaccagataataatagtattggcatcaattcaggtacgtcacatgattgggtacttgaaggcatctcagaatttgagccatcacttccttcatgcactgtgttgtgagagttgtttttcctactacctactgatgaattttcagtagcatatggggtactcgggttgctcccatcaggggtgatttatctccatctctctttttcgaaagaatggtttgccagtgatctccatc

SEQ ID NO: 40092 - DNA, 501 bp, Setaria italica
  Peptide Sequence Number=SeqID_106066
atacctgaagcggatgctccatggaataggcaatgttttgcctcgtctgcagagccggtcctccaggcttccatagtccatgtattcgtacactaggcagccatactctgggcaagctccaagcaagaggaccatattgggatgccgcatgcagcttagtacttcaatctcttgctgaaattgtttccttccctgtgatgcgtctggtcttagaattttaatagcgacattagtgtgatccagtactgctttatatacgggtccatatccaccttctcctatcttgagggccttgtcaaacttatgagttgcagcttctatgtcatcaatcgagtatctcctgtaccggaggtcatttctgttcagtgcatcagttgctttctttctatcctcggcctcccgctttgccttccattctgctctcatctcttctgtgcctcaagctctgcaatcttttgtgccgcttctgctgcctccaggcagctctgcacttcgctttct

SEQ ID NO: 40093 - DNA, 523 bp, Setaria italica
  Peptide Sequence Number=SeqID_106067
ttttactttttaattttagtttacttaattaggtaaacttaataggaaagaatgggacggcaaggggaactgatctttagtccactgactatctccagtagtaaaatgccaaagctataggtgtcagacttgacagagaaaatgccttccatcgcatattcaggtgacatgtaaccgtatgtcccgacaactcgtctagtacttgcttgctgctgattgcttccaaagatccttgcaataccaaaatctgatatcttcgggttcatctctgcatctagcaagatgttgctcgctttgaggtctctatgaattatcatcattcttgaatcttgatggagataaagaattcctctagctacccctttgattatctcgtaacctttttgaccaatcaagcatagacttcattgcaggatcaaaaaaggatttgtctaagcttttattgggcaggtattcatatatgagcaacttctcatcttcatgaatacaacaaccaagaagtctgacttaggttcttgtgctg

SEQ ID NO: 40094 - DNA, 454 bp, Setaria italica
  Peptide Sequence Number=SeqID_106068
taaaggctgcctgggtactgggcgtggcatggccacattattcagcatggatacaactgatgacatgagtggcctgtcagttgggctgtcctgaacacacaatagtccgatatggatgcattgcaaggcttcatcaagcgaacagctctccaaaacccatgtgtctacgaaatcccttgccgtcccatctttccataagttccatgcataagcagtaagacttggataatccattagtagatgacgaggggaactgatctttagtccactgactatctccagtagtaaaatgccaaagctataggtgtcagacttgacagagaaaatgccttccatcgcatattcaggtgacatgtaaccgctatttgaatcaattcacaagcgaataggcataattgaagaattgtataagcacatacaaaaatttaatagttctgaacttctgattagctag

SEQ ID NO: 40095 - DNA, 297 bp, Setaria italica
  Peptide Sequence Number=SeqID_106069
cctttagcttgattgatagtcttgtttgttaaaaatgtagacttggtcttctaaccttggttagtcgtctaaaagataataaccgacctatgtgtgccaccaggttatcagactatactagctggtagctgctcttcatgacctctgttgtgttctgatggtggtgctgttgttgcgttctgctgtggcggaactgaactacctgaagaatcgaacaacatagcatggttggatgccggtgtctgcagaagtcatataaatcaagtgattattttagcaaaattttatacaaaaaaa

SEQ ID NO: 40096 - DNA, 367 bp, Setaria italica
  Peptide Sequence Number=SeqID_106070
aaagtcggcgaactttttcaaatccccctctacatttaaacaacgaatccctagcctaaagtttgctgaagctaatggaggctaccagagttcatgaaggagaagtttagcactatcacatcgccagttcggaggtggaggaaggtgttggtgattgggattgggctgtggcctaggaattcctgttagggccaggagctcagggcagcagcaggtgcaggagcaaacagatccctgcaaagaaacaaagaaaaaactgaaccggtaatcttacaatttttgttgccgctgctgcaagatcttggatctgaacaagtttgtggacaaaaaaaaataacgagcctcacgagcacggctgagatgatga

SEQ ID NO: 40097 - DNA, 398 bp, Setaria italica
  Peptide Sequence Number=SeqID_106071
ttccttttcctccaggcaccgagcggcggagcccccgggagtgatgctaccggggccccaagcggcgtgggagttggagcctggtgcgccccacgtggtccgtccgagcgtcgtgggcttgcggcagcctggagcacagcagcggcgtgaggggaagcgctggtaggcggcgcaccgagggctcggtggagcagcaggaattggaagcaccggcgggcggtaagggctcccgcggcggcggccatgcgtgaggcttcgcccgagggcacgaagggggaccgacggtgacaagcgcggctgagacggggccctacaacaacggcagcggtcacgacgaggctcctcgtaacggcagtggcaggggtcacgacggcctccgcgccggccagatcaacgcg

SEQ ID NO: 40098 - DNA, 522 bp, Setaria italica
  Peptide Sequence Number=SeqID_106072
tgtggtggtggaacagttataaattttaactgtggtggtggttacatgacagtgtggaccattcaaaattcattgaattctatactaagaaaaatgaattttagcatacttaaactatatctcaataaacttgacctacaagattaatagctcccacttactgagtactcttcccaagaattttccaatcctcctatatatacgaagtacactctagtctcctctttttaaaatgaagtgacaacgatcttaaatagtgttgtcctgcatttctttctttctctcttttttctttttaagacagattttcactctgttgaccaggctggaatgcagtggcacaatctcagctcactgcaacctctgcctcccaggttcaagtgattcttgtgcctcagcctcccgagtagctaggattagaggcacatgccaccacgtctggcttaatttttttgtattttttagtagagacagggattgaccatgttggccaagctggtctcgaactcctgacctcaagtg

SEQ ID NO: 40099 - DNA, 287 bp, Setaria italica
  Peptide Sequence Number=SeqID_106073
ttggggttaggttatttggggaggattccttcaaggattggtgggaaagaggggtttctggagttggagaacaattacagaaaggcctcaattccctgattattgtgggtgcctggaatagacgtgcgttaaatggtgtttctccgagcctagctagagccctattgctcgctagtgaggagatgcagttctggggtttggccagggccagatgtatttcttcccttgctacttgtaccagagtaggttggtgctggtcatggtggtgtatttcttcccttgctact

SEQ ID NO: 40100 - DNA, 748 bp, Setaria italica
  Peptide Sequence Number=SeqID_106074
gctctctttctattctccccttccttcggcttcctttcgacaacttccttcgtgcgctgaagagaagctcctacctcctgaccgctgatctggagcgtgtgatctagcccaatgtcttgtacctgcgcgagtgcacgctacgtgctcacgagatttccatgacctccatcaatcagccgaggttgctctacagcaaacaggagcatgtccgggcgatgttggcccacgctgtggacatcggcataccttgtggcaccccaatgttctggcatgcattgcaatttgttgcgaaccgcaacaaggagactatcgctgcgaagatggagctcttgaagaagacattccgatggtcggatgctgaagtggctagtgtagtgtccaggtgcccgtcgctgctgacgatctctgaagatagggcacagcgtgtatcagtttctgttcgctgaggtcgggttgcatccagagtatattgctccgagaccggcattaatcacatttagcctggagggcgtctcatgccctgccactatgttgtgaagtttcttaaggcaaatggattgttggggcatgactggagctacttcaccacagtcatgctgactgaaaaggtcttcgtgcacaagttcatacatccttacaaggaaactgcaccacaacttgctgaagattatgctgatgcttgcagagggaaatgccgtctagatttagattgcaggagcagggtactgcattggcaagtgtgttaacg

SEQ ID NO: 40101 - DNA, 420 bp, Setaria italica
  misc_feature (1)..(1): n is a, c, g, or t
  Peptide Sequence Number=SeqID_106075
nacaaattcaagcgaagcgaagagcacttcagctagcagggatcatgttggagagggcgcggcagttctcggacatgtcgacgagcgacctgttgaggtcgcagacggggttcttggcgcggccttcctgaactcctcgtcgcagttctgcatgtcctgcgccgccatgctcatggtggcgcggatggtgacgccgtccctgaacctgatggcgcgcttgcaagcgccgaggttgtcgccggcgtcgaggtagaagctcttgcagaggttcagcgcccggcgctgctccggggtggccgccgtcctggcctccctcttggcgcgcctgctcgccgccctcacccgcttcttgaacgcgtccacctgcatctccagcaccgtcagcgggtccaccgtgtcgtacttcctggcgtgcttctg

SEQ ID NO: 40102 - DNA, 755 bp, Setaria italica
  Peptide Sequence Number=SeqID_106076
agggtacagttgctccagtgtggctcgtccaaccaacattagtatagtatacggctgtaaaaaaccgcaataaggggctaccaaataccaacagaagggcatactactgaaaaaatgtttatacattgaatcgaggcacaccaatgaaacccgagtcttgttctcccgactctggagttgattggttttcgaacagttttcaatgctttcatgaggaaccctaactcgtctgcggtctgctgtacaatgcttctgaaaattgacaacacaaagtcatcctagttgaccgagaatacacattaaacctggtgtccgagatggaatagctactttcaaaatgttgagcttgggttcatagaaagcatgcaatttatgcaattgcccaccgagggaacgaatagtaaatgaaatttaccatctttttgcaagaatggaagtggtcagtcaggcagcttctcctctgagttcattaaccacactgccagaagcctcatgcaggctattagtcaccatagcatatgtctgagagttaatatgacagtgtctattctccatagcagacagcaactgtgaacaaacatcgacatggccagctttgagcaaaccatcatttagaattttccatacaacctcattatgattatagtccattcctagtaagtcacagaatagtgatttagccttgtcatagtccccttcatcacagatgcctgtaataagatactggtaggactcaagatgaggctgaaacccgc

SEQ ID NO: 40103 - DNA, 483 bp, Setaria italica
  Peptide Sequence Number=SeqID_106077
ttcatgaggaaccctaactcgtctgcggtctgctgtacaatgcttctgaaaattgacaacacaaagtcatcctagttgaccgagaatacactgttcaatgtagaaacaaaactgtcactggttttctttacacttcctcagtacatagttgaagcatcagctgaaaaatgatggaacataagattattatgagaaaacagggaagcaatatacaaacccaccttgcaaacttctaacgcgttctagataaccaaatgcatagcaaagcattttaggaattcatgagtacaaacggaaacaatgaggtgcctttcatttgttcgtatttgacagaataccctgacaagcatgtgttgggtcgggattatgctgatcaaagaccatcctaattcctaactggatgctgcttgtctcaagtcaatgctgtacaatgttatgctgtaagcagctttgcatatgccgctcacagatatcaaaactgac

SEQ ID NO: 40104 - DNA, 772 bp, Setaria italica
  Peptide Sequence Number=SeqID_106078
tgtattttaattgttaattggtttgtaggtaaaaaaaagtagtagtaacttgttttcttgtaaggttgtcttattagtcttgtactatttatttctttcctagagttactatctgcctggagcctggaggtagcaaatgtgatactagtcgtaacattttctctactgattttgtcaattgttctaggatatttttagatggtaatattcaattattagagtgacggtgtgctcttttttactattctataagcatttttgcatgtacagtttccaaatggctagtgaggactcgaaagatatgctgaagaatgtggactggaagacagtgggcggtgcagttaccactgaatctagccagccggtcatcaaaaagcgccttccaaagaagatcaggcaagtccctgagtgttattttctacctcggcgatctttgccttctgcattggcaatctacggtgccgtgtgcgctgctggtgttggtgcaggaatgctacttgaggtgtggataacaaaagatcaaagaggatggtggcattatctgggagatggataaatgatgtgcaccactctttgatatggttgaactagttttggcactatgatgactccctccttgtccttggaatggcaacataaagcctacctgttgcaagacggcaagaccctttgattggtgttttcacacattgcatctactgtatggacctttgcattcacacagctggaaggtgaatatccactggtaccagtaacttgtatggacgtgttt

SEQ ID NO: 40105 - DNA, 461 bp, Setaria italica
  Peptide Sequence Number=SeqID_106079
tacaaccgtgcaggtccggccgccgctttcccagcccgggcagtagcaaaagcaccaatgaggccgcgtgggaggatcttcgcgtgaggaagcacaaaggtgttgaaaaaattctcacggctcatacaggccacgccgtagaaggatcgaccgcccaacggcaaccccttctccttgaaaagcttcagcaccttgagccggggcaccagcctccgctcgatgctgaacttgagcaacgatggccctcgcgcaacagcctcgacctccatgccggcctctttggtcaggaaatctaccgcacgtcgcagccggtcctcggaactcgccaatatggacggcatcttggccaccgccaccgccacctgactgctggaccagccgagggacctgagcagctccatcttggcggtggcgttctgccgcccgatagagtaggccacgacgaaggctcgttggtcggt

SEQ ID NO: 40106 - DNA, 405 bp, Setaria italica
  Peptide Sequence Number=SeqID_106080
aatgtcatacatggtaaattgaatttggcaggacagtgttgttagggcaagcatgtgaataatttatttcgaagctatgaggatgagatctcaacgccttaagcttctaaacaactgtactgcaacccaagaattaaggtagtataaggtggctgatgatgcagggctttttggtgctggtgttagcataatgagtatccctgtcctagatgttgctaaggatatttgatgtccaccaatcatcatgtttgattctgttcaatcttttttgtattgccatgatattattttctcacataaatagcacagctagctgagttaacaacagtttacatagactcatgcggtattttcttcaaatacagatccaggccagcaatcccaagagcaagaataggcgttcat

SEQ ID NO: 40107 - DNA, 669 bp, Setaria italica
  misc_feature (652)..(652): n is a, c, g, or t
  Peptide Sequence Number=SeqID_106081
gttttttttttttttttttaattgcaatatttcctgacttgtattttttttggataaaagcgcgcgcgcccacacacgcatttaggtcctccgaaagaaggcctaataacaacaaagtccctggggcagaagctgtcccgaccaaagcaccgacgacggcagacagcacaccaacagcaggagccagaggctcgacaagagcatggtcccaggtggaagaacctcgtgaggcgaaggttgacgaagagggggacctgaactccgacggcccaaaggtgaagcttcaaccggcggcggagcaaggggctcatccctcgattccagaaggcagagctgctcggacggcgacgaggcggaggtcgacaacgacgagatccagagagcctcaatgcagatcgacgctgagctgcaacagcgtgagtggaggcgacggcagcgacggggatggcggcgtggaagtcccggcggaggcgagcgacggtgaggtggggcggacccgcacgggaaggagggagggggagcttcgatttattagagctcaccgcacaaccgcttccaccgccgacgaagacggcaacgacggcgacaactgcaacggcgaggggcggcgtcgaagctccaagggccacccggcactcatccgagcaaactntgaaaaccatataaaat

SEQ ID NO: 40108 - DNA, 743 bp, Setaria italica
  Peptide Sequence Number=SeqID_106082
cattgattccaatgctaacctctattaccactttactactcagaattagccgtttattggcagatgtttctaaccgatgctattgattcctatggatgcctccagcagcaatttgaggacgaagaatttgaccaagatgacgacgacgacctcggtgatttcatcgtgtatagcgatgaagaagatgctgagatgtcgaagcacaagcatcagcggcaagcggagttggaggatgacattgaagaggaagtggaagaggaggttgagcaagtagaggagattgaggaggaggaagaagaggctccagttgggcagcaagagatacttagcctgagggagcagttaaaggaggaattaggaggaaaaatgctgcaatggctgctggcacctccaaggctagctgttcatcatctgtgaatcagatgataatgccaccggcgaaggacggatatggcacctctttggtccatcaaagccagtgcttgctcgtcgagtcattgaagaaggatgctcatcgatcatgaaagaacgacaaaacgtgccatccagaaaaggtggccaattggtttcaaaggtgcaacctggcacagttgagaatctgcagaagccaaagtttgttagtgaggtaaaaggaaatcaaagcaagattgactattctgcttattgtacggacatctgcatagattgatttataaacttatgttttgacacatacaggagaaaagaaaggttgattgcacttc

SEQ ID NO: 40109 - DNA, 330 bp, Setaria italica
  Peptide Sequence Number=SeqID_106083
gtctccatctgagatcaagagcacttggacaggctaggcgaccagctctcaccggacatgcactctgcccccttcaaaccgcaaatccagggaccacaaatttaaggtccccgaggccttcaatgtatttgatgcccaagtgacacggcaaaggcttgaaggaatgattgctccagtatcctgcaaagaggtattgacagtgatacactccaagaggggagggaatgcagcagcgagcgaccactcagagtggctgctcactgtgatggcaatgccggaagcaatcaacttcaagcttgtgcccatcacatcccttctcaagggagtaac

SEQ ID NO: 40110 - DNA, 252 bp, Setaria italica
  Peptide Sequence Number=SeqID_106084
ccaggatgtggtgtatgtgaagcaggacaactcgtctccactgtctccatctgagatcaaggagcacttggacaggctaggcgaccagctcttcaccgggacatgcactctgcccccttcaaaccgcaaatccagggaccacaaatttaaggttaacaaatcatgttcattaatgtcaaattcaaagttaaattatggactcaacgtccaccagaaaatcaggaagatgaactgagaggtgccggaactttc

SEQ ID NO: 40111 - DNA, 264 bp, Setaria italica
  misc_feature (236)..(264): n is a, c, g, or t
  Peptide Sequence Number=SeqID_106085
aagttattgtaatagctggtcaatcattgggaggatgacagtgtatcatcatcagcagtgtcactgtgtcagtagctagtagaggacagtaggacaccgtgtggtctagtgtcaggcaggtcgcccgggggaataagctaaagctcgccttgggcgccattggcatgctctgatgctactgcaaccagagtataagaataaagcggtgttggtgtaccaaaaaaaaaaaaaaaaannnnnnnnnnnnnnnnnnnnnnnnnnnnn

SEQ ID NO: 40112 - DNA, 289 bp, Setaria italica
  Peptide Sequence Number=SeqID_106086
gtcatggagtaccatcccacaatcgacctcttcacgattttttttttccctgaaagaccacttcaattcttcacgagattgcttttacagttttactctggaatctggatgcgctagcagctagctcttcaactagaagccagcagaagagccgggagcatggcggcgccccgttgctccaagagagatctcctgggcttcttcctcggagccgccgtcacggcggcctgcgtcgtgctgctccagccggctgctccgtgcccgtgcggcctcgtcccgctggcggaga

SEQ ID NO: 40113 - DNA, 377 bp, Setaria italica
  Peptide Sequence Number=SeqID_106087
caagcaattgccatataatagagttatctataaggcatttggctgcagttctcccaataactcaccagcgaagctgaagacttatgccagaaggcaaggcagggcaagaaaatagttttggctggcaggtggtgtggaaaagtatggatgtcaaaccaggtccatccattcttggctcacagaattgaaagtcatgagccagaagaaatagatgaaatatggtcatgttatgagaaatctaatgctgatcatgttgaacattcaagtagagaggcaacctccccaaggaagagtagcagcagagcaattgaagaaaagactagcaacagggagtaagaaccattggaagaaagcaagcatcaagaagccaaaatata

SEQ ID NO: 40114 - DNA, 634 bp, Setaria italica
  Peptide Sequence Number=SeqID_106088
gcccgttgatattgatacccatgcctgcttcagccagagcttatttcagttgacgacgacgacgacgacgaggacgacgagatcagtgctctcctgcgctcgttccagtcaccaaatgaaccggcgagcctctgccttgagcccacctccacagcagacatgctacagctaggcggcggtggcggtagcagcagcggcccgagtgctctaggcgcagtcgagggcagtggccaatcctggaaggccatggtgacaccatacgacaatgtgaccaccagtgccagcattccctggaactgtagtgacggttctatctccatgtcacagcagcaaatatcacagcagggagatgtgttctccacgggtttctctgataccgcaatgcactgtcagccatcaggaaataacatcttgtccgggtttggccagcagctccagccaaacctacaaatgccaatgatgctctctgccacagacttgctacagctgatcagcaggcctggccctagcatctggagcactgctgacagcagtggacaagacgcgccggggatgcctgccgcatcggcgagcatgttcgaccagatgagcattggtggagggaccatgcacattggccaaggctggccggaga

SEQ ID NO: 40115 - DNA, 457 bp, Setaria italica
  Peptide Sequence Number=SeqID_106089
gaaagggaccaaagctggtgcaaaatctgctgcatccgcccctccgtggcctccctcaactgttgggacacccggagagctctgtcaatagatcgcctcattggatacttccaattcatcgtgatcggactggtggcagacaaaacagtccaacctcacaagagtcactggaggtgatcattgaaatccagccacaaagacattgagggcatggatatacagggtggaaaccatgagaaattggtgaggctatgctgtttttgtcaagcatcaaaaggatctgccgttgcagaacccatgctcagcctgttcgtcctgcagcacattagttgggtacagaatgagagcgcattcatttgtttggcctggtgtctaggcattctttgtacatctcgagctgtagattagcgactttcctttcgccacggctgtgcgtggttctttctgttttttcttt

SEQ ID NO: 40116 - DNA, 251 bp, Setaria italica
  Peptide Sequence Number=SeqID_106090
agcatcagtgtatgacaagtgaacaaagttcttctctactacatcatttaatcgttctattatgcctttctcaacccatgtattgaagaaatccatatcttctttacagttctctagaatatactttactacatactggagatatgcagttgcacaagccatgtcatcatttagatccgcgaaggcaagctcaggatttcttctgcaaaccagcatttctgacggtgtctggacagcttaatggcgaaggc

SEQ ID NO: 40117 - DNA, 496 bp, Setaria italica
  Peptide Sequence Number=SeqID_106091
ccttggtagcaggaatatctttgagtagggaaccaccttcagcggtgtttgaaagcaaagtagtcacataaaactgctccccggctccttcacaatccgaggcagtaataatagggcttgatacccaaacaaatccattgtcttggaagaatttatgagttgcatatgccagagcatttctcactcttgccactgcaccaaaagtgtttgtccgaggacggagatgggctacagttctaagaaattctcttgatgcccgtttcttctgtatgggaaaagatgtggggtcacttttcccaatcacagtgatctttgaaaccttcaactccactttttgcttaccgccttggctgattgcaacaactccctcaactagtacagatgctccggtagtgacagagtctatctggtcatagccttctgtatcaggagtcaatacacattgcatattggacaggcaagagccatcattgacctcgacgaataagattgtact

SEQ ID NO: 40118 - DNA, 856 bp, Setaria italica
  Peptide Sequence Number=SeqID_106092
agttcaccaacccgaggaaccaacaaatccatcgcggcaactgtcttcccatcatcattctgtcgcatatagaaagccttgatttccttcgggtaatctctaattataactgggcggccactgaaagctacttccgtgatgtatctctcatgctcactttgaagatccaacccccatttcaccgggaactcaaatttcttcttggacccaagaagtagctcgacagcatcagtgtatgacaagtgaacaaagttcttctctactacatcatttaatcgttctattatgcctttctcaacccatgtattgaagaaatccatatcttctttacagttctctagaatatactttactacatactggagatatgcagttgcacaagccatgtcatcatttagatccgcgaaggcaagctcaggttcgatcatccaaaactcagccagatgtctcgcggtgtttgaattttcagccctaaatgttggaccaaatgtgtaaatatcagatagagctgaagcatatgtttcgccattaagctgtccagacaccgtcagaaatgctggtttgcagaagaaatcctgtgaccaatcaacccttccatccttggtagcaggaatatctttgagtagggaaccaccttcagcgctgtttgaaagcaaagtagtcacataaaactgctccccggctccttcacaatccgaggcagtaataatagggcttgatacccaaacaaatccattgtcttggaagaatttatgagttgcatatgccagagcatttctcactcttgccactgcacctggcagatacagtaagcaatccacaggagaaacttgtaataattacaggaaaaaaaggc

SEQ ID NO: 40119 - DNA, 557 bp, Setaria italica
  Peptide Sequence Number=SeqID_106093
ctgaaagaaactaaaaagaatatcgaattggtgacttttgaagtccagaatgccagagaaggggagaaaaaggagacagcagtgagtaaaacatactgcaccaaaagtgtttgtccgaggacggagatgggctacagttctaagaaattctcttgatgcccgtttcttctgtatgggaaaagatgtggggtcacttttcccaatcacagtgatctttgaaaccttcaactccactttttgcttaccgccttggctgcttgcaacaactccctcaactagtacagatgctccggtagtgacagagtctatctggtcatagccttctgtatcaggagtcaatacacattgcatattggacaggcaagagccatcattgacctcgacgaaggtgacagtcctctgggcgcggcaggtgcgcacccaaccgcgcacggcgagctccttgcccaccaacgcggcgccctcgtcctccccgcccttcacgtccgccacccgcagacgcttcctgaactctcccacggcctcgcccgccggcccggtcgccgcggcggcggcgg

SEQ ID NO: 40120 - DNA, 1293 bp, Setaria italica
  Peptide Sequence Number=SeqID_106094
aacctcattgggagtttttggacgatattaccttcgcttctctccgtcccaaaataagcaataattgtttttggacgagattaccttcgcttctttgtactttataataggaaaagcatcagcgagcaagacaaccctcaaatagagcgacctcacctgacgctataattgcctgcatgggtgaaaagccaagcaccgtacaaacaaaaaccacccttgacaaaattgttagtgttcaaaattacaggaagatcatactcagattgttatcgcggcgaaatttaccttacccacggtgtacgcaattacaccaaacaacgaatctaccagggtatagcttcacttcagattagcaacgagcaactctgtacaatgcatagtaatgggtcatgtggttttcccacccttgtctcccaggcaagaatttcgtaaagtatatatatgcaaacgcctcgagatcgctagaactcggcagagccaggaactcggggaaatgggatggcgtctctgatgttgtcaattccggttgcaaactgtacgagccgttcaaatccaagaccaaaaccagcatggggaactgatccatatcgccgtagatccaaataccaccagtagctctccttgttcaggttttgctcatccaaccgggcttcgaggtgatcaaggcgctcttccctctggcttcctccaataagttcaccaacccgaggaaccaacaaatccatcgcggcaactgtcttcccatcatcattctgtcgcatatagaaagccttgatttccttcgggtaatctctaattataactgggcggccactgaaagctacttccgtgatgtatctctcatgctcactttgaagatccaacccccatttcacctaaacatagcagatcagaatgccagatatttattttgatatggttctcatgaaagaacattggtatgtggaattcagtagtagaaagcacaaagatgattcatacaaatcaaaacaaccagcatctattcacggtcaacacaaacactgaaaagtcatctaacactgaacagtgaagacatatcaacatttcaaacatgcagacatttttccttttgcagaagtatgtacttgaatctccattaagattgtaaatagaagtcaaattgcaagaaagcgcaacagataagttttattgtgacaaagatgggaaagttattcataaaaagctgttaggcatccattaccgggaactcaaatttcttcttggacccaagaagtagctcgacagcatcagtgtatgacaagtgaactaaag

SEQ ID NO: 40121 - DNA, 485 bp, Setaria italica
  Peptide Sequence Number=SeqID_106095
cgagtggccgcgggagggcggcgacgcgaggccgtgggcgatgggggcggaggacgcgacgcagctctccatctccatccccgcggcctccccctcggacctcgccgccgccgccgccgctcgataccacaacggggagtgatcggtgcctttcgaagctgcaatcctgccccaacaacggcgaggagtgatcgcttgatcggtgcatttcgtagcatggagggcatgctgtgcagcatggtctgaatctgaagtctgaaccaagtcgagtagtagactagtggtactaggaatctagctagccctatgttttgatcttccttgttctttcacgtgtttagttgtttgtatttgtattcttgtagtgtcaaatgctagtgcttgttgtatgtgtaacgttttcgttaaggaccaaagcaatctgagactgagagagctgaggtgacgtgggagaggctgctaacctaaaaaaaaaaaaaaaaaaa

SEQ ID NO: 40122 - DNA, 247 bp, Setaria italica
  Peptide Sequence Number=SeqID_106096
gccttgataaacatcaaggatggggcatacgcgcacctcgtcgcccttcactcggcagcctcttcatagcgggtggtagtatggattcctgcaatcgtctgcggaaacatatatgagcagagctggcacaacctgtgtagcaagtcaggtgctagcctcgctccctctagtgacgacatacataattgcttatacctaagcggtaaaattttatcttaagggccaactcgttgcatttacatttggt

SEQ ID NO: 40123 - DNA, 567 bp, Setaria italica
  misc_feature (301)..(301): n is a, c, g, or t
  Peptide Sequence Number=SeqID_106097
acatctggcctggtaggatatttgaagctaacatgccagatgttcagattttccgggacctctgcttgacaattcatgctggaaagactgttgcacttgtcggagagagtggtagcggcaaatcaacagcaatttcattgcttcagagattctatgacccagatgtaggccatatactacttgatggagtggacatacagaagtttcagctaaggtggctaaggcaacaaatgggcctggttagtcaggaaccagctttgtttaatgacacgataagggcaaacattgcctatggaaaagntggacaagcaacagaatctgagatcatagctgctgcagaattggcaaatgctcacaaatttatcagttcggcgctccaggttagttactttcatctgattttgtcaacaaatattatatgtggcttttgtatgcaatcaatcaagcaccaaaaactgttgctgacagaagtgtttgttacctgaaaaatgtaggggtatgacacaatggttggagagcgtggagctcagttgtcaggagggcagaaacagcgtgtggcgatcgccc

SEQ ID NO: 40124 - DNA, 377 bp, Setaria italica
  Peptide Sequence Number=SeqID_106098
gcagatttgatcgcggtcgtgaggaatggggtgatcattgagaagggaaagcacgatgccttgataaacatcaaggatggggcatacgcgtccctcgtcgcccttcactcggcagcctcttcatagcgggtggtagtatggattcctgcaatcgtctcagatgttcctgctcttgttttccgttgtatggcagcgctcttttagtcttcaagaaactaatgataggggcctgaagcataaggatgaacgcggcagggaatggctctgaacttctgaaagtgaaggcgttcctaatttcccttctgcagctcggtcctgtcgacggagggagggtggatcaaagccgcccgaagtcgattgccgccggtggaccaacg

SEQ ID NO: 40125 - DNA, 3842 bp, Setaria italica
  Peptide Sequence Number=SeqID_106099
cggcgcggatacggaacctgtacctcaagaccatcctgcgccaggagatcgccttcttcgacaagtacaccagcaccggcgaggtcgtgggccggatgtccggcgacacggtcctcatccaggacgccatgggcgagaaggtcggcaagttcatccagctggtggttaccttcttcggcggcttcatcgtcgccttcgcccagggctggctgctcacgctggtcatgatggcgaccatcccgccgctcgtcttggcgggagccgtcatgtccaacgtcgtcgccaagatggcgtccctgggccaggcggcctacgcggagtcgtcggtggtggtggagcagaccatcgggtccatcagaacggttgcgtctttcaccggcgagaaacgggcggtggagaagtacaacaagtccctgaagagtgcgtacaagtccggcgtccgggagggcctcgctgcggggctcgggatgggcacggtcatggtgctcctcttctgcggctactcgctagggatttggtacggtgccaagctgattctggagaagggttacaccggagccaaggtcatgaatgtgatctttgcagtcctcaccggttctttagctctaggtcaagcatcgccaagcatgaaagcatttgcaggtgggcaagccgctgcttacaaaatgtttgagacgataaacagaacaccggagatagacgcgtacagcaccacaggaaggaagctggaggatatccgaggagatatcgagtttagggatgtctatttctcctatccgacaaggcctgatgagcaaatattcaagggtttctccctcaccatacctagtggcatgacaattgcactggtaggccagagtgggagtggtaaatccacggtcatcagcctaattgaacggttttacgatcctcagcttggcgatgttctgatagatggtgtgaacctcaaggagttccagttaaggtggatcagaagcaaaattggccttgtcagccaggagccagtcctttttgctgccagcataaaggagaacatagcttatggcaaagacaatgcaacggatcaggaaattagagctgctgctgagcttgccaacgctgccaaattcatagataaaatgcctcagggttttgatacatcggttggtgagcatgggacacagctttctggtggacagaagcaaagaattgccattgcaagggctattctgaaagacccaagaatcctactattagatgaagctacaagcgctctggatgcggagtctgaaagggtcgtgcaggaagctcttgacaggatcatgacaaacaggacgactgtcatagttgcacaccgcctgagcactgttagaaatgctgataccattgctgtcattcatcaaggaacactggtcgaaaaaggaccacacaatgagcttctaagagatccagaaggagcttatagccagctgataaggctacaggaagcaaaccggcaggacaatcggaagggtgattccaatgctcgttcaggcaaacaaatgtcaataaataaatcagctagcaggaggtcatcccgtgataacagtagtcaccattcattctcggtaccatttggtatgcctcttgggattgacattcaggatggttcatctaacaaactatgtgacgagatgccacaagaagtgcctctcagccggcttgcatctcttaacaagccagagattccggtgctcatcctaggttccattgcctcggttatcagtggagttatcttcccaatcttttcgatactcttgtcgaatgtgatcaaagcattctacgagcctccgcatctcctaaggaaggattcacagttctggtcttccatgttcttggtgtttggtgcagtgtacttcttgtcactccctgtcagttcgtaccttttctctgtagccgggtgcaggttgattagaaggatccgactgatgacatttgagaaggtggtaaatatggagatcgaatggtttgatcacccagaaaactcaagtggagcaattggggcaaggctgtcagctgacgcagcgaaagttagaggactcgtgggagatgcgcttcaattggttgtgcaaaactcctcaacattagttgccggtttggtaattgcttttgtatcaaactgggagctatccctcatcatattagctttaataccactcattggcctaaatggatggatccagatgaagtttattcagggtttcagtgcagatgccaagatgatgtatgaggaggcgagccaagtggctaatgatgcagtaagcagcataagaacagtagcctcattttcagccgaagagaaggtcatggatttgtacaagaagaaatgcgaaggccccctaagaacaggaatcaggacagggattataagtggaatcggttttggtgtttcctttttcttgctatttggggtatatgctgctagcttttatgctggtgctcggcttgttgaagacaggaagacaacctttcctaaagttttcagggtttttctagctcttgcaatggcggcaattggagtgtcacaatcaagtacccttacatcggattcttccaaagcaaaatcagctgcatcttctatatttgcaattgtagaccgaaaatcaaggatagacccaagtgaggatgcaggagtgactgttgagacgctgcgaggaaatatagaattccagcatgttagcttcaaatatcctaccaggccagatgttcagattttccgggacctctgcttgacaattcatgctggaaagactgttgcacttgtcggagagagtggtagcggcaaatcaacagcaatttcattgcttcagagattctatgacccagatgtaggccatatactacttgatggagtggacatacagaagtttcagctaaggtggctaaggcaacaaatgggcctggttagtcaggaaccagctttgtttaatgacacgataagggcaaacattgcctatggaaaagatggacaagcaacagaatctgagatcatagctgctgcagaattggcaaatgctcacaaatttatcagttcggcgctccaggggtatgacacaatggttggagagcgtggagctcagttgtcaggagggcagaaacagcgtgtggcgatcgcccgcgcaatcgtgaaggaccctaggatcctgttgctggacgaagcaaccagcgcactggatgctgaatccgagcgggtcgtccaggacgctcttgatagggttatggtgaaccggacaacggtgatcgttgctcaccgtctatcaacaatacaaaacgcagatttgatcgcggtcgtgaggaatggggtgatcattgagaagggaaagcacgatgccttgataaacatcaaggatggggcatacgcgtccctcgtcgcccttcactcggcagcctcttcatagcgggtggtagtatggattcctgcaatcgtctgcggaaacatatatgagcagagctggcacaacctgtgtagcaagtcaggtgctagcctctgttcctctattgatgacatacataattgcttatacctaagcggtaaaatgttacaaacagcaaggaccaaatgtaaatgcaacgagttggcccttaagataaaattttaatttataaacatatgtatatgtagtctcgaacatagaagccaaatagatgatggttatgaaattacctcagatgttcctgctcttgttttccgttgtatggcagcgctcttttagtcttcaagaaactaatgataggggcctgctcaggacagaaagagcagttcaggaaaaggttcgatctcattatagaaaattttctttatcattactcataactaagaaatc

SEQ ID NO: 40126 - DNA, 567 bp, Setaria italica
  Peptide Sequence Number=SeqID_106100
cgccacactggctgttcctgttcgttcttgcaaggagaaacaaacatgagtaggcctcaggtgttgctcgtcgcactggctgttctcgccgtcctcgcaactctgccactctgcaaaggaagcgaggaggaggaaggaggcgcggcgttcgccatggacacaaacgcgagggcgtggccgtgctgcgacaagtgcggcctgtgcctcctgatgtacccgccgcagtgcaattgcatggacttctcggagcgcgggtgccacccggcgtgcaggaaatgcgtcaggtacactgccgacggcagcagcatcagccaggaaccgcccgtctaccggtgcgccgacttgctcaccaacttctgccagcgccgctgcacgcctgcgactgttgttgcataacttgggggtgtggtgatctgaatgccggcaaatgctgattatctagcttgccttctctttcggcttccagagaagaaatcagtgttgccgctcgatgcttttctcaccagttatcactgtgtttattatggaataaaggctatgctatgccaaagctagctccgtgatcag

SEQ ID NO: 40127 - DNA, 432 bp, Setaria italica
  Peptide Sequence Number=SeqID_106101
gaagacatcatcccatggacaacagaaaattttccggcaggattgtggtccatctacaacaaatgaactgttctctgttcttccatggacgatccaaaggcaaatgcagggaagatatgggtcgcatggaaaagaaatgccaacacgcatggtagtctcttcaaaggaaatggcagcaaactgtgtgcgaagggccctgaggcgtcgcgtcatggtttcaagcgtacgtcaagcggtatctgggctgctcgcctctggtggtgctgttgctgctcaatacctagggaagaagatggctaaggcctggcaatctagagcagcttaagctacagctaatgcctttgttatttgtggttcagtgtttcatgcaatgtacagtaatcaaattaatcaatgtggttcagtgttcatgcaatgtacagcaatcaaact

SEQ ID NO: 40128 - DNA, 755 bp, Setaria italica
  Peptide Sequence Number=SeqID_106102
agtaaatacaagtaccctagacaagaatagccgggacgaattaatctgatccggctgcagagccgggacacgtcggaggggcggacgggcttgaggaggaagtcctcggcgccctcctccaggcaccgggtgatccggttgggcacgttctccgacgacatgatcaccacagggatctccttgagcttggacgactccttgacgtgcttgaggagctcgtacccggtcatcccgggcatccagtagtccgtgatgatcatgttcacgtcgggcagcaagccgagcgcgagcagctccagcgccctcgtcgccgattcaacagtggtcactctgtatttggagctgcggaggatcttggcgatgacggcccggtcgacggagctgtcgtcgaccgccagcacgtgcttctccgccagttccaccacgtcggccgccgtcaccggcaccaccttcctgtcgccggccttgggcgatgcgaccttcgccgccggggcaggggacggggccggcgccagagacggagcagcggcagccattgcagcagaagagacaatcaaatctccaaccgaacacgaggcgaagcaacaaccgatcgaatctcctcttgctccgcaatgggattggagtgggatcgaagaatctctctgcgcctcgtgaatgaacaagaacaagtccggttgcggtgggaggcggaggcgccgcggcttgcgtatatatacaggtgtggaaagggaaggaggggggaggcgactcgg

SEQ ID NO: 40129 - DNA, 618 bp, Setaria italica
  Peptide Sequence Number=SeqID_106103
cagcagcgatcaatccacacgagggagacaagcaagcatatgctctgctcgttcccccattcctaacctaactaatcttccttggccccaaatgttagcttcttgtttgaggcagcggcggcggcggatctatgtccaaaaaatggggaaaagaaaaacaaaaaatggtttcttccctaagagtaatcagtccctgcagatgccgggcgattatctgatccggctgcagagccgggacacgtcggaggggcggacgggcttgaggaggaagtcctcggcgccctcctccaggcaccgggtgatccggttgggcacgttctccgacgacatgatcaccaccgggatctccttgagcttggacgactccttgacgtgcttgaggagctcgtacccggtcatcccgggcatccagtagtccgtgatgatcatgttcacgtcgggcagcaagccgagcgcgagcagctccagcgccctcgtcgccgattcaacagtggtcactgcaaagattcgagaacacacgatttagcctcccaattcataactgccgagtcgatcactcgtcgatcaagaaggaacagcacactttgatcgcacatcgatcgaaatttacctctgtat

SEQ ID NO: 40130 - DNA, 1326 bp, Setaria italica
  Peptide Sequence Number=SeqID_106104
ctactccctgtgtcgtccgtttggctagtctctcttttttaggtttttttttttttttagttagaacaaaatcaaccgagtgttatttagaaatttcatatcgaaaatgcgagcaacgcaattccacaacactccagcgaaaccttctctaaatgagataaatattcaatccagaagatatagcttttctatcttggtgtacggtttcatgaggtacatggtgctcccatggaagcagcaaggcagtaaaccataaacaaactatcccaactgttctctcctacaagcagcttggaccaaaatttttggaacaaccttagtcttagatcgccatgggctgctccaaagcaaggttctgcagcaacccaaaggtcccagtccccaccttcgcaggcttcccgaggcagatgctggccgaggggcactccagcgagtctgactccccatgtgtggccgcatccacgatgaacttggtcgccgtctcgaatgtcatcttgccaaatggtgatgtgctgaactggcccatccccagcctgttcatggggcggtaaccgccgtcgaatgtcatgaaatcggcgatcatgctcaggtgcctcgggtccactttgatgccatagacgccaaacacatggttcacttcctcgatgatggtggcccgcgcggcctccaccccatacgtcttcagcatcgcgtggatgtcgttcgtcgtgatcttgttgatgctgatgtatttcctgaggttccagaatacttcaaagttcacccctgacgtttttagaacagcagagctacctttctctttttttcctcaacttcacatttgtcaatgttcttgcaggcccttacaaaaatagacctagctgtcttctgggcaatctgagctagtaaaatgtgaggttcatcacaaaaggcatagtgaatctcaaaatctaaatcttttgactcaacatggacagtcctttttaactttttcttacgtttgtaagtcatttgatcctgtttacgctcatctgattttccctcagtatgagttctctcttggagcttagctgtctcatgcttatcttttgattttttcacctttttagcagaatatgacatgtcatccactgaagtcatgtcagacttcgaggttttgtgttcctcgtcagcctcttgcaaatcatcacctgactcagctggatcctcctcactctgatgtttaactttggtctcttcctcagattcactatccattccctcttcattttcagtatcatcatcatactccatctcatctctcttcagctaccaaattgatggtcttgttcagtccttttccctttc

SEQ ID NO: 40131 - DNA, 367 bp, Setaria italica
  Peptide Sequence Number=SeqID_106105
aaacagcacatgtaaacaaattaaccgtgcatgagattgttgttcattttaacaagccagttaattcacagcacagcatatgtcaggttattgttataccagataatggtcaaatactagcattatgctcatagtgaagccacaactttaataaaattagacaaaagacatactttattcactgagttgggagaaacaactcagtaacaaacttatgcttgacataattgtcataggaaacagtactggaatgagaacggccaaaaccaaaagtaaaatagtggtatttgataagtaatagtatagatcctcaatactctcttgggtaggaaaatctctcctcttgggtaggaaaatctgtcacaaa

SEQ ID NO: 40132 - DNA, 385 bp, Setaria italica
  Peptide Sequence Number=SeqID_106106
atgctactgatgatgaaactgaccttgagactgacactgatgacactattgatgctgatggtgatacagaagatgaactggagtcttcattgcctgaggatgttgagtggataaagcagcagccacttccttatccttcagatgcgctggagccatacataagcaaggagacagttgagcagcactgggtagttcatcagcagatgcatgtggataggctcaatggtattatcggtggcagcgagtgggaagacatgtccctggggcagatgatgctttcctctttcaacgagggcagggagcagccccatcctcccttcttccatgctgcccaggtatggaaccatgtatttttattggcgatttatgaaacctggcgggtggg

SEQ ID NO: 40133 - DNA, 348 bp, Setaria italica
  misc_feature (314)..(348): n is a, c, g, or t
  Peptide Sequence Number=SeqID_106107
cgagctacgcgcgcaacttcgacgacggcgcgtggaaggccgaggagggcgtgtcctgggcaggccccggcggcgcgttcccccgcgccagcgtcggcgaggccatgaacaccggtgattccgttccgagctctactagctgtctagctccctaactgataattgttagtagtattagcagcggatcggatgcgttgctcagagttgtaatcgtgttcatctggattcaaattttaccttctgcagatttgcaaatatcctgtacttgcttgccgaggtaaaacaaatgcaattcttttaaaaaaaaaaaaaannnnnnnnnnnnnnnnnnnnnnnnnnnnnnnnnnn

SEQ ID NO: 40134 - DNA, 505 bp, Setaria italica
  Peptide Sequence Number=SeqID_106108
tgtacgtaacgtaggtatgcgacgaggataagatcgccgcgttcttcaggaggctgatgggcgagtggagccaggagatggacgagatgcccgaggcggagcggcgtacggccaaagggaaggccgcggtggccacctgcaagcagtgcgcgcgatacctcgacccgctattcaagcagtgcaagaagaaggctctccctcctgacgtccgacaggcattgttggaggtggtcaagtgctgcatgagacgagactatttggctgcagtggacaattatatcaagctagcaatcggcaactcgccatggccaattggtgtgaccatggttggtattcatgagcgatcggcccgcgagaagatctacacgaacagcgtggctcacatcatgaatgatgagacaaccagaaagtacctgcagtccgtgaagagactcataacattctgccagaggaagtaccccactgatccatcaaggtcagtggagttcaacagccttggtctaaa

SEQ ID NO: 40135 - DNA, 637 bp, Setaria italica
  Peptide Sequence Number=SeqID_106109
cggcggcgaggacttcgaccagcgcgtcatggactacttcatcaagctcatcaagcgcaagcacggccgggacatcgccggtgacgcccgcgcgctgggaagctgcgccgtgagtgcgagcgtgccaagcgcacgctcagcaaccagcaccaggtgcgcgtcgagatcgaggcgctcttcgacggcgtcgacttctcggagcagctcaccagggcacgcttcgaggagctaaacaacgacctgttccggaagacgatggtgccggtaaagaaggccatggcggacgccggcctgcagaagggcgacatcgacgagatcgtgctcgtcggcggcagcaccaggatccccaaggtgcagcagctgctcaaggactacttcaacggcaaggagcccaacaagggggtcaaccccgacgaggccgtcgcgtacggcgctgccgtccagggcagtatcctcagcgggcacgtcgacgagaagacccaaggcatgatcctcctcgacgttgcgccgctgacactgggcatggagaccgtcggcggggtgatgacgaagctgatcacgaggaacacggtggtgccgacgaagaagacgcaggtgttcaccacgtaccaggacaggcagactactcacactgagt

SEQ ID NO: 40136 - DNA, 368 bp, Setaria italica
  Peptide Sequence Number=SeqID_106110
gtccatcttcttccccaagcccggccgctcgcgcgcgatccggccgcgctcccgcctcgcctcgccggcggcgaccaaccccacccgcttataccggcgatgtcctcctccgtctccgtcgcggcggagtgggacctcctctccgaccgcttctaccgccgcctcacgctctactcccctctcccctggtccgccccggcacccacctccacctcctcctcctccggcgtcggcggtcccgtgatcgggcgactcgacctctccacccacatcgtcgccgccgcgcccttcgggggcccgatcgccgccgtccgcgacgactctaagatcgtgcagctccactccgagccctcccgccgccgcctcct

SEQ ID NO: 40137 - DNA, 484 bp, Setaria italica
  Peptide Sequence Number=SeqID_106111
cctctttttgttgtcactctggatgtctgaatcgaagaaacagaaatttcctcatcgtgttgtcactcatcctgtcttatcctttttactagttttgtttttgtttgtgctgatggatcgtgtgtaatatatattgtacatatgtacacactaaacgtcagaaattttttccaataatcgttcagccctgaaatcagaaagacgagcacgcagcaagcacagatcaagatgaagcagaaattctgtgtcctcctcctcctttttctaagcatgcacggtttctttctcctcccattgaacaaaaatttggaaaaaagaaaacacgagcaataaatctggtaataacagcggtcgttgttgctgcaataatctgcagcagtcgattaatcgcaggagttcatctttttccatggggaaatttggtcgggttggtgatggtgacggatcgaatgcaagaaaccggacgatagataggctgcaggga

SEQ ID NO: 40138 - DNA, 494 bp, Setaria italica
  Peptide Sequence Number=SeqID_106112
aaggttcacatcgagagcgatcttgaggcattctgagcttctagcagcaccgaaccaatcctagcagcgcaggaatggctcctaaagcaatccttcgacctctgatctttgccttagcccttaccatgcttgtagcgctttctcatgggagctttcaagttgccaaaatccttgttttaaaaattgcatggatgtcataaaaaagcatccccgcaagacacgatcccaggtaaaaaatgcataaataccgtgctgaaaaataacctggttggcatctgtttggtcctcacccaagaagacgaggataaggtaagtgtggagaggcttgtcagtctcggacgaagatttggacaagtgttcacagccggcgccagatgcggaactacctacattattccagaacttccgggaccaccactgtgatagaaggcacacatccatgagcagctcttgggcagatatgtaggaggaagctgtaataatagaataaatgt

SEQ ID NO: 40139 - DNA, 233 bp, Setaria italica
  Peptide Sequence Number=SeqID_106113
cgctacttctgtttttgttgggctagaagaagaagatggcgccgtcagtaggaggagaagatggcgccgaaacggaagctcgaagacgctgctgctacagatgatccgccgccttcctcgtcagccattgtcgtcagagctcagaagatggcggcggaggtggaacggcaacacgcagacgctgctgctgctggacatggtgatctcggcagcagttcctgaagttgttgccg

SEQ ID NO: 40140 - DNA, 344 bp, Setaria italica
  Peptide Sequence Number=SeqID_106114
tttagttttgacgggacatagtcatggtcaaattgtaaggaaagttgccatcgttttggatgttacaaataatgatccagaagataataaataatctaaaaacatagaaacaaataactgcaacttaaagttagagcttgaaacatagaagagccaacaaaagaagcaaaatattaagaagagggagcaagagatgaaaaaaacctaaagatctagaatagttttcattgtatcgtgatacgaatttattgtattcagtacatagtagtatagtactaaattatacagaatcatatcttgagcaaaacacacaagcacatgtgcaatcctagtacttcaagtaa

SEQ ID NO: 40141 - DNA, 436 bp, Setaria italica
  Peptide Sequence Number=SeqID_106115
gttttaccatgcggtagaacggtgggttgttgaagccgttggtgcctgcgttgatgatggcagggatgagatctttcaaaagaaaaattcagggatgcggaggagaaaggggaatctttatcttttcacttgccatgcacagctctctttctgttaagactgttgcaacttaacaaatggagtcccaagaataagattccacaaaaaggcagtagtgtttggaaaaagcagcaatccatgttcctggctgtgatcctctgtcccctgtggtgagtggtgaatcactgcaactgcagaacctggtggcctctcgagggggaaaggtttagttgaggaatcattcgcaaaagcaaggtttagttgagcaacaatgcctgtgttatcaatcagtaggagtatcaaccgattattcggttggtggtggctggtaatacca

SEQ ID NO: 40142 - DNA, 614 bp, Setaria italica
  Peptide Sequence Number=SeqID_106116
gaaatgcacgcaaaagggagcgttgacagttctggctgccgcaacaaagcttgatatgaagtctgctacatctcatgatccgaaatcaaagatggtactagttcatatgtcctgctattcctgattattgatacatctaataaggatttctatcccaccctaaaactcatactgcttatcatttgcatttctatcaccaccaaatctcccatcgccaaatgccaagaaacctctctggtggtgagcaccctgatgagtttgtcaagaacttgtcgaagcactcgcacctgatccctcgcctgtagtggccagtgcctgcctcagtactggagtgtagaagcttgtataaggaacaacgtcgtagaagcggtggcccataaccttggtgcccttcctggacttgagatcaaaactgtagagcccatcagtggtctccaggaagacgacatccaccgcgtccgcaaaggcaaccacatcaggtgagttcctgagggcacgaggagggaggcgtgtgctaagctcaatgactctccttcttgcccatcctcctacatttccatcaggaccaagctccattgcccagagtgtgagagtattcagattgtccacctcgg

SEQ ID NO: 40143 - DNA, 610 bp, Setaria italica
  Peptide Sequence Number=SeqID_106117
gatcggcggcggggagtgagcggatggaagaggactgcacttactgctcttgactgatagcacgcggattttgtaccacagcacctcctgctagggatttggattttgggctcgattggggagttggatgattggatcgctgcagggacagaatcaggattggttcgagtatctggggtgtggtactgtggtgctctggttttgccgaaggcgccaccaactgggatatggtggatgagagggattttgggtacccgtctggagaactgcaggttcaactgctgtattggggattcagtcttgtggttgatctacgaggtgtggcacgatgtcgcggtgcttccgttccgctgccagggtcgaagcaaggccgaggagtgagcagcagcacaaggatctgctgaaaaggttcatacttcatactctgtgcccttcgaaaatcgcttgccaaactagaccacactctgatgattcacagaacttggggtgttgttttagactaactaggcagtgaccatgcttcaagacggaaaaaaggcttgtcgcagggggaaaaaatctgtctgagctgttcagaagttgaacttgtcatattgatgtcatcttttcg

SEQ ID NO: 40144 - DNA, 648 bp, Setaria italica
  Peptide Sequence Number=SeqID_106118
ggggcgactgcagacacacaccacgtgagccgcccctcacgctatgggctatggtttctcttttgctgtacaaaactacaaaggccatcccagtcatggctctgggcagctgagagcgtgactccctgaggcaacgttaagctaccccaggcagcaacaactcttttaacaggctgagacgacaaaacgatgtccgaccgccgcccatgacggtcatgcacccagtggtggcgcaccataatgtcaaataatgtatggcttcatcttgttagatgaaggaggtgagagctcccttgtgagtcctactgtccaaaacacctagaaaaacgcattgtgctggtggagaaatgctgagtctgaaccagtcattatcaaaagaaaaatcctgtatattatatttcttgattgacttgggtcagagctagcactgaatgttaccaatcatgttctctttgcaatccttagtagtgatgtaattcggcaaatcattgacctgacgctctattccacggtggtggtgtgctcccgcggttaaagagagcttgttaaatagttcagacaatggagacggattgcccttcctgcttgatgataagttgaattccttaggcactagactaactaagttcagtttaattttacttttta

SEQ ID NO: 40145 - DNA, 835 bp, Setaria italica
  Peptide Sequence Number=SeqID_106119
cccgccatttgctctgtaccgcataatctatgagtttctccacctccatcacctttctatcgtacggacttttctggaatacactggggagacttgagtgatcgtaaaaatggaatgaaagatattctcatcataatggcactcgagtgggccacgttccttttgttaacattctttttggatgaattcggtaccctcggaaatggaattagaaaaatggtatcagtttgtccctcaaacgtcgatgggagttctcaggcttctcagaagcagactattcaacttcaagaatttgaatattcggttgaaatggacaggactgatgttttgagagagagggagatagttgaacaactcttacaagaatcggatagtagttattcgatcatatgcgacaatcttaagaaagtgtaccatggacaagatggaaatgcagagaaaattgctgtcacagggttatcactttctatgcaacatgggcaatgtttcggaattcttggtccaaatggtgctgggaaaacttctctcatcagcatgttgactggatttactaaacctacatctggcacggcttatattaatggaatggacatacgatcggacatggacaggatttatacaggaattggtgtttgtccacaatttgacttgctatgggaaacactgacgggtcgagagcatttgttgttctatggcaggcttaagaatttgagatgtgcagcattagacagggctgtagaacaatctctgaaaagtgtacgcttatttgatggtggtgttgctgataagcgtgtggcagaatacagcggaggcatgaagcgccgtctcagcgtag

SEQ ID NO: 40146 - DNA, 575 bp, Setaria italica
  Peptide Sequence Number=SeqID_106120
taagaactaaccaaataaaaccaaattaaggactcagtgtgagtagttctgtccattttccattccatctctttctcaaattccatctgctgctcaatgcgctcatttgatgcctcaatgcttgtcttgaccagcttctccattttatcagaacttctcatggcgttcttccactgctcatcccagtacttttcactgtccccactattttcaacaacttcatctgcttctaaatcctcattggtatcgaccacatcctcatcctcataatcactgtatccaccatcgacaacatcatcagcctcatcatccttgatccaatcaactatgtctatttcatcgtcatcaccgacatcatcatcactctcatcaggcgcatcacatccaagctccatctcctctagtttcaccttccactccttggtataaggatgcaggagctccataggatggtttgtgagcaggaattccaggcatcgtgactggtcggcttcgctcagccttgagtaagcattcacaacatcatcaacgtaagccttcgggttggccttcactatcctgcagagaccaaccaa

SEQ ID NO: 40147 - DNA, 497 bp, Setaria italica
  Peptide Sequence Number=SeqID_106121
gatgctgagtttggctcatcgacggcaaccagagtgttgcatcatgcaccaagagtttgcagataatgttccatggtaggaaaggagttttttcgtttgcacaaaagttcatgccaacaaagttcccatcaaagtcaaaaaggggccctccaatccaggacatcatggtgattttacatgtggagatcataagctcatcaggggagggtctgttgtctcgtcagctgttatcccagtataggtcataaatttgcctgtcaaactgacgccctgcagctacaaccttgcaatgaggcccaatttgcaagagacgatcaatatgcgcttcttgaacagcagggaaagacttggtgttgacaacagcaatattgtaatgtaaatcatagtgatccaaccacccactggcatactcaaaagttggaagcagcacttcaatcatcaaccctggagcgatcttgctggcaccaacagatgctctaaccagacttgcttgaatt

SEQ ID NO: 40148 - DNA, 582 bp, Setaria italica
  Peptide Sequence Number=SeqID_106122
gttgacttaacaacaaaagttcagttgaaaaagtaactcccagggtcaagggccgcaaacgctcaggaatactgagcagactagcaagccttgcggattttaagactagtacaaaaattgatgcattgagagaggaggtacgaaacatgattgagcatgacggctctgccaaagggattgtattcagccagttcacatcattcttggatctgattcaattctccttggagaagtccggcatcaagtgtgtccagctgaatggggccatgaacattactgagaagggaagagccatagacaccttcaccaatgacccagactgcaggatcttcctgatgagcctgaaagctggaggagttgctctgaatctcactgttgcatctcatgttttcctgatggacccttggtggaatccagcggtcgagagccaagcccaggatcgcatccaccgaatcggacagttcaagccaatcaagagcacgaggttcgtgatcaaggacacggtcgaagagcgcatactgcagctgcaggagaagaagcagctagtgtttgaaggcaccgtgggcgacttcccccggtatt

SEQ ID NO: 40149 - DNA, 844 bp, Setaria italica
  Peptide Sequence Number=SeqID_106123
ccgaaaccctgtccaaacccttgcggcgatgggcaggaaaccctccgccgccgccgccgccaccgcggcaacggccgacgacgaatccctcgcggccaccatgcccgccgacctcctggccgctgccgactgcggcggcgtccacggtcacgccctcttcttcgacgccctcgtgcagctcattcctccgcgcttctacctcccgtccggcgatgaggaccgcccctggtaccagggcctctccaaggccgccaaggcggctatgaaggcccagtcccgcgccaacgtcaaggcggctcgccgcgcgcgcctcgacccctccgcgccgccggcctccaccctggacctcctcaagaagtccgttgccgaccaggcggcggaggaagaagatggcgacgatgaggaggggaagtcaggagaagagggcgaggaatctggggatgaggcaagctccgaggatgaagatggtgatgaggtagaggaggatgaggaagacggggatgagaaggatgagatgccgattgcgccggcggcagtggtgtccgaggatcggtcggtgacctacgaggagctgcgggagcggcttcatcgccgcatcgcggagctccgtggcaaccggtgcactaggcctgagttcttgaataagcccaagaaggagaagggcaagaaggcaaaggggaagaatgagaagaagggaaagggcgaaggcaagaagagaaagcgtgatgatggcacagaggatgcagaggacaaggatgggaaaaaggccaagaaggcggaggagaagccagatatcatgtatgcgaacgtggttgttgacccaaaggaaagacaaaggaaagga

SEQ ID NO: 40150 - DNA, 1160 bp, Setaria italica
  Peptide Sequence Number=SeqID_106124
tgcgcatgtggtgaagcaacgtgatgagataaaaggaaaacagagatctgtggtgctaatatgaagaggcagagttcttgaataagcccaagaaggagaagggcaagaaggcaaaggggaagaatgagaagaagggaaagggcgaaggcaagaagagaaagcgtgatgatggcacagaggatgcagaggacaaggatgggaaaaaggccaagaaggcggaggagaagccagatatcatgtatgcgaacgtggttgttgacccaaaggaagcaaggaggaggaagaagaggaggattaagaacaagaagaaggagctggagcaggctaagcggttgcaggaggcaaagcaggatcctgagaaggcgaacaagatcgcgtgggataccgcaagaagacgggctgctggggagaaggtgcatgatgaccccaagttgattaaggagagcttgaagaaggaggaaaagcggcagcagaaacatgctgctcagtggaaggagaggcagaaaactgtggacaatcagaggaaggagaagcagaagaaaagaacagagaacatccgggagcgggcacaccagaagaagatgcgcaagattgagaagcgtgagaaaaagcttatgcgccctggatttgaggggcgcaaggatggttatgtcaatgagtaacatctatgtccaaggttgtcctggaaatggtttaccatgttttccttcaaaacttcatttgctgatatgagcagttggtgcttgtaataggttaccaattcatggctgctaaagtgccttaactattgcatgaactttcaacatttagcagtcctacaggagagtttggagtacttattaatagctgtgttctctcttatcaagtcacgccttgctagttcttctagttctttctcgcatgttgatcaactggcaatgcttaattgtgcttatgtggatgcctgtttcgttctttgtatcatcatagtgatggatagtagtgcttctgagatggtcttggggaccagggtgagtcagaactgcaatagcgagcttgccatcttaatattaatggcctctcgtatgctgtaaacttttgtcgaatgctttgtttgtcaactgtttattgaattcagcacagtgagaatcacacatgtactttcttattttacattttta

SEQ ID NO: 40151 - DNA, 505 bp, Setaria italica
  misc_feature (1)..(29): n is a, c, g, or t
  Peptide Sequence Number=SeqID_106125
nnnnnnnnnnnnnnnnnnnnnnnnnnnnnttttacttaaaaattttctttattttattttttgtttttttttttttttagagttttatagtttactttaagtaggctgaggttcttacaaccattggattcttagatggagctccaactattagcgtgcacggatttaatatctatcataagaatcgccttattttgccgtttcatcgagttctgagttctgcgagcagtaagggtagaggcgtcgctggagtactggaggcggacttcatcaagcccactcatgacaaacaggactttgaaaagtcgcagctgtttcagaggctgatgaaccgcttgaaagacatgactaacgagtactgggatatttattgtcacaagattggatacgtgaaaacaccacgtgtgcgtgcagctcccgttcctcgtgctcctccagcagtgctgccaatagagaatggccctgctgaaccatcaggaggggagtgcacctgctcctgtggttt

SEQ ID NO: 40152 - DNA, 587 bp, Setaria italica
  Peptide Sequence Number=SeqID_106126
agaaagccaatatctgatacaaaatgtcaagccccgatgctttgacatctttctctgcttcccgccatcgatactataaagttgccatggactcgacaagttagttatcttatctagcagtgaacttgccaggtaaagtagtagatatatagccactatggaggacaaggcgctcctcgccgccgtgtccgtgttcgctcttctcatcgtcctgtccaagctcaagtccctgctcgtcacgaagccaaagcttaacctgccaccggggccatggacgctgccggtgatcggcagcctccaccacctcgtcaccagcccaaacttctaccgcgcgatgcgcaggctggcgcagaagcacgggccggtcatgatgctccggctcggcgagattccgatgctggtggtgtcgtcgccggaggccgcgatggaggtcatgaagacgcacgacatcatattcgccgacaggtacaggaaccccacgatcaacgcgctcgccttcgacggcgacgagatcacgttcgcgccctacggcgagcggtggcgccacctccgcaagatctgcgtgctggagatgctcagcgccgccc

SEQ ID NO: 40153 - DNA, 714 bp, Setaria italica
  Peptide Sequence Number=SeqID_106127
ctcgcagggtctatctcgacgcagtcgtcctcatcacggctaacatcaggctcttctccgacatctactatcttcaccatattttcctggcagaccttttcccgtgtccactttgatgggaaaacaaccacatatcatgcccgtttatatagcagagggcagcgaaactgatttatctctgcaataaaaacaggttgcagaattccaagtggcataccaggcaacgaggagtctcgcgtgggaaacaaagggacgcaaaggtactcataaatgcaagccactcaaaaaacaactatgggcactgcaaagtctcgacgaatttgcaggtcccaaggggttggagtagacgaactgaaattcgtgaccgttcatttagcccttcaaaatttatcccataaagaagtgtccataaaactttctgacaatccaacaaataccctcataatacttgctgtcccagttaacgaatcgatcatttagttagacttgctaaataaggaaggttaatagattcaacaagcgtgcatgcataattaattatactcaataatccatccgattaagaagagttattaggggtactttagacttctagcattggtactatcttatctaaatttttttaaataaactggtctttgtgggtacaaagagagcaggagatacatagatgctggaatttaatgttaacacaacactgatgacactccgaag

SEQ ID NO: 40154 - DNA, 352 bp, Setaria italica
  Peptide Sequence Number=SeqID_106128
gccgcccgctcagctcctcccaaccgacagcgtaacaaaccccggctatcctcgtcgctgtctgctccgatccttcacactagaagctctgccaagctgcagggatccatccatccatcccgcgggtgatcgaccgatgaggtccatggagagcacggactcgtcgtccggctcggcgccgccgcagcagcagaagcagacgagctcggcgccggacctcccgccggggttccggttccacccgacggacgaggagttggtcgtccactacctcaagaagaaggccgcctccgcgccgctccccgtcgccatcatcgccgtggtcgacctctacaagttcgacccgtgggag

SEQ ID NO: 40155 - DNA, 994 bp, Setaria italica
  Peptide Sequence Number=SeqID_106129
gatcgaatagaacttgcacaaagccaactcaaaactatttcatttccagtgagctgatttacaaacattggttccatgggaaagagttctactgatgagctgctggtacaaatttgagcaaattctacatgaacaaaaacaagtcatacaactcatatatcgaggaactaagcaaagaataaacaaatctgctaaatccactattgattacccctcgaaagcataaaagacaacatatgcttcaacagaaggagaaatcaccttcctctcatttgatggttggtggttgctatgttacatgtcatgctcaagtttgtccttccaagtggtcagcagaaatggtaaggcgctcactttcaagaaatgaaggatctaagaacttggcaacaaaagcccacatcttgtaaacatcttcaaaattagtaaggaagccaagtgaagcagtcacaacttcaactcttacagtcacttttttattgtctctgcggccattcttataaaacgaagcctcaggtatatcaagcgtgccatttaactgtttctggttcatatctaattttatatgactcagaaaaccaatgccaacagatataccatttttctcagcaatcttttgaacaacttcagcattaacaaatgttccatcactttgcttcacattaaaagcaacagctgctcccctttcatacttaatcttgggaccgtagatgtggacaagagggactccgtcaccaccttttgagtctggcaactttagctgcaaaagtgaagttactagccaattgatcaggtaccttaacctaagggtagttctgttgagccccatcatatcaacatgatcgatgtgcctgcaaattatctctggctccctcctgccccagtcctgagcatcatcatatccatcacttgcacaaccttcatcatcacggaacgtatatccagaagcttcagcagcatctgaggctcgattcaacctgtcagcaataatattagc

SEQ ID NO: 40156 - DNA, 272 bp, Setaria italica
  Peptide Sequence Number=SeqID_106130
cctggcgcgggcgtagttggcgacggcggcgaggaggtcgttgggcacggcgaccatcgtctcgatgcccgtcccggcgagcccctccatggtccgctcgtcggcgtcgaagatcttcaccttccggaacccgttgtccgccagcagccgcgccatcaccttgggcggcagccggcgcgtcgacatcgtgccccagttcacgccgagcgcgtccgccgccgccgccgccgccgccaccaccaccaaaaccgaagcgaggacgcagcgtaacg

SEQ ID NO: 40157 - DNA, 876 bp, Setaria italica
  Peptide Sequence Number=SeqID_106131
gcaagtaacatagcttttgtaatgtaaaatcatctattatgctgagatcctttgctttgttcagaacatcaacggaagatttagaatacacaacaaggtaagttcgagcggttctgtataaactgtttggattgtaaacatccttcaaggactatctgatcaatctcaggtactggaaatacctgctcctcataggaacacttgtaggaaatttcagcagaagatgactccatccagtcaacagaacaacaaacaagaacttttgtacctttagaccttggagcagcacaaaggtaacaaccagctacggtaagggcagccttgcagggaatggtacgaatgtaatccaggagcagtcgagcagatctaccacgaagtggcctgtgcctctgcgaaacaaactgcaagatatatgctaaatattgtgaaagacaaagatcatcaacatttgatggatcaagtttttctaggtcaataacaccatatccatactccaatattgacacacactgctttgcaatcatactccaggtataatcaacatgtgtccttgtcaaccggcatgcgcttatcagtttatgaactcctgagagaaaggtaccttcagtggataaatttcccaaagatgcccgaatccggtttctagcatacatcatactattatttgttggatcttccacccaggattgattactaccttgacatatcttatacatgtcatcttttgaaaaatcaagcatgggccgcacaagaagaatgccacaccgtcgaaagttctctccatcgtattttacattaggtgcaaaacaattgggagacaaaggctgtaccggcaaggccctaaaacccactgttgcgagatagtctgagaacaaa

SEQ ID NO: 40158 - DNA, 480 bp, Setaria italica
  Peptide Sequence Number=SeqID_106132
ggaatgtcttctaaggatatacttcatctcacgaattcaaagaaactcagcttaagagcaatctaaggatatcaaggtctaacttcatgaaactcaacttataagaatgataaagttttcaagtcaatttctcaatctacatgtaaggagttccattagctatgtttttatgaggcaaacaattttgaccaatatgattagccaggcatatcaatcttcaacttgtaaaatgccactgaaaattgtgcacttgtgaaaaatgccaccaattgtgaggctgaatggctgacatatgttcgcagcatgcttgatcctacatggagacatccagtggcatttccaaatcttaaaactgtgcagtccaatttaaaggttcatgcagcgattgtgagcacatgtttctttcacaggattcatttacaggccagctccatccaataacaaacctaccaactcaactttccatcggttccacaaaat

SEQ ID NO: 40159 - DNA, 764 bp, Setaria italica
  Peptide Sequence Number=SeqID_106133
agtagacccgacctaactaagggtttccacggtcacctgcatccatccgtatcaatatgtgcccggtccacccgttatcattgatcaatcagcggtgctcagctcagctgaatattgcaggcaggcatgggatcgaagaagccttggagctgcacatgtgaactatacggccctactgatgagtactgagtactgactgaataatcccgagtgattggctagcatgtgaactggtgcagcagcagtagcacactaccaccggatacttccttctactggagacaccgcgaaattacaaattagcatcatgcatatgggtccctaatagcttctgtgcatgtgcatcattatctatctctacatgtacatggcatggagtatatgcgagcgaagcgatgcgagtaccgtcgggtaggaggagttgtgtctcagcgcgtcctgcgcgcaggcgatctcctggttcagcctcaccaccttctgcttcagctccttgatgtacgccgacgcgtccatgattatggatgtgttgcttaactgcgcaaaggtatattattgtggccaaggtgaataaataaacatgtatcatttggtatttggaatgatccaaagagcaggcgatgcaagaacgagaaggttgcagagaggtgattgatcgatgcatttgacgttctgaattccgaagagcactggaaagaattgggaaaagaaacaagaggaaggtggagccaggattgagcgaggagagatcattacagcgtgggagt

SEQ ID NO: 40160 - DNA, 664 bp, Setaria italica
  Peptide Sequence Number=SeqID_106134
caggaggatcgggtgaccggccaggagtgtgcgcttacgcgctccgcctacccctcgtcatgctcgctgccgctctcggagcagctcctgatggcctgcagcacggcctgcttcacgacgtgctcgtccacgttctccgccacgttctctccacccacggcctcgaggcggaaggagtcggcgcaggacgcggtggcctggaggacgctgagccccagctcgtcgaaggcctcgagcacggagacgagcagccccgggcagctcttgtcggagaagacgttgatgaggaacccgccgtgcccgcctactagggtttccacggtcaccgtcgggtaggaggagttgtgtctcagcgcgtcctgcgcgcaggcgatctcctggttcagcctcaccaccttctgcttcagctccttgatgtacgccgacgcgtccatgattatggatgtgttgcttaaagcgtgggagtgagtgatggagcggaggatcttcagcttctcctgaagagcggccgccgcctgcttcttcttgcgttccctcgacagcatctctctatgcctcgcgcgcgcgcacgcacacaccacagagctaagctagccacgcggcctggcagcttgcccaatggaggcaagagagagacagggagaggagtgtaggtgtgtggagc

SEQ ID NO: 40161 - DNA, 324 bp, Setaria italica
  Peptide Sequence Number=SeqID_106135
atataacttgcatgaatattagtacatacggaagaagggcagttgaatgctagctctattcagctttgcttccaacctcccatcattcttacttgcatgatcgatcttattgtcatagacatatatataaatcatggcgctcccctagctaattaatactattacacaggaaatggaattcaccggatcatcagcactagggagcaactacccatgtcgccagcgatagaggatatagaagccaaaaatacaggaagagggaggaaatggagcagacaaagcgatctcggcttcctgagacgctcaaggacaggaggatcgggt

SEQ ID NO: 40162 - DNA, 821 bp, Setaria italica
  Peptide Sequence Number=SeqID_106136
ttaaaattatggtaaggtcttgatttatgacagagtgaagatggctaaaaagagtgctgacggcgtctaatttcataacttagctgctcataaagtggatgaggaactgaattgaattgttctctgaagataataatgtttctcttgtgcagccaaatccttacattggatcaacttgagtattcggttggcaatgttaccacctttttggatgagaggggttattcttgcaattgcctggatttagttcaaatctgaagtacttcctagagattgggatctgagaccctcctgtcgaagcaggcccttggtgttgcatttctaacccaggagaacaagagcaagagcctgaggtattgatcgactttaccaggacaatttgcaggctgaaaatatcgagattttgtcttgaatgaattgaagatttaccgattgggttgaggaaatggaattcaccggatcatcagcactagggagcaactacccatgtcgccagcgatagaggatatagaagccaaaaatacaggaagagggaggaaatggagcagacaaagcgatctcggcttcctgagacgctcaaggacaggaggatcgggtgaccggccaggagtgtgcgcttacgcgctccgcctacccctcgtcatgctcgctgccgctctcggagcagctcctgatggcctgcagcacggcctgcttcacgacgtgctcgtccacgttctccgccacgttctgcgcgcagcaccaccaaagagaattaacatgttataagccaagaagaaagagaggcgcaatcaatcaatcagttactgattttacctctc

SEQ ID NO: 40163 - DNA, 570 bp, Setaria italica
  Peptide Sequence Number=SeqID_106137
tcggtaggtcggcgttcgtgccggcgccgacgtcgccggggaccgtgccgcggtggggcaccaagtcgtacgtgcgggagcggttcttcgagccggagctgaccgcggaggaggccgccgcgcgcatccggcagacggcggaggggatgcgcacgctgcgcccgatgctggagaccatgtcgtggaagtacgtgctcttctacgtccggctcaagtccaagtacctcgacctcgacctcaccaccgccatggccggcgttcccgcggggcggcgcgccgactacgtccgcgtcgccaacgagctcgtcaacaacatgacagagttcgatcgcttcgtgcggactcccaaggtctacgagtcctacctcttctacgagaagacgctcaagtcgctggatgacgtggcagagttcctcgtttgatatggataaaggttttgaacacaaacttttgtagagaaaaaaacatatataacatatgctgtgagcctgtgactagtgatcagggttctaccaaaaaaaaaacaaaaaaaaacaaaaaaaaaaactagaagaactacgaaccgaaagg

SEQ ID NO: 40164 - DNA, 632 bp, Setaria italica
  Peptide Sequence Number=SeqID_106138
taggtacggtaagggggtaattagtcgtctacgtcttgcgcccgatgctggagaccatgtcgtggaagtacgtgctcttctacgtccggctcaagtccaagtacctcgacctcgacctcaccaccgccatggccggcgttcccgcggggcggcgcgccgactacgtccgcgtcgccaacgagctcgtcaacaacatgacagaggtgggtacctgtcaatttgtggagttgattgggttccatgtgacacctgaaaatgcggggtttttttcaatttaattttctcatcaaacaatttggcatcacattcggcgttgtccgtttgccgtgcagttcgatcgcttcgtgcggactcccaaggtctacgagtcctacctcttctacgagaagacgctcaagtcgctggatgacgtggcagagttcctcgtttgatatggataaaggttttgaacacaaacttttgtagagaaaaaaacatatataacatatgctgtgagcctgtgactagtgatcagggttctcaatttcgttctcgcccatttttcgatcctcaccaaaattcacgaaattttggctgaaatccacgaattaaaaaggtggctatgaacagttccgaaattaaaaaaaaaaaaa

SEQ ID NO: 40165 - DNA, 508 bp, Setaria italica
  Peptide Sequence Number=SeqID_106139
ccggcgtctatgatgctgcagcaaccgtggacccgaccgttccagcagtactggactccaaggatgatgccgtttcaacaatgtcactgtggtgccatctcacagatcatgcagcaacagcaactaccgtccatgttcaacccgatggctacagcgatcccgcctatgttcttccagcagccctttgctggtgttccattctagatagatgtcctcatgctgtaacaataataaagctgacatgccatcgcatgtgaatcataacgaataagaaaagtgtcgaatcaatggctttccattcattatctaatatactcatcatgtgccttttccttgagaggcatgaggccttaatgaattattgtattagatatatagataaatttaataggtagaaatgcctatacataagacaacagatataaagtaattaaactaaaacctaacttaagttaagttattttaagtttttacggggtttttacttttttaaaaggtttttttacta

SEQ ID NO: 40166 - DNA, 735 bp, Setaria italica
  Peptide Sequence Number=SeqID_106140
actctccgctttctgctggtaatccggaatcaaccactcttcttaaaagatcgaagatcacaacccttggaaggaaaggagttacatcacttccatcataaaagttcatgccaacaaaacttccatcaaaaccaataagagggccaccgatcccagccttcgtgatgtgacaagtggaacactgaagctctttgcaattaagtttgcaatcctcgttactacttttcacttcaccaattgtgcccatcaatagtccatgtatagtgtcacgccctatagccactaccttttcaggtgacacttccatttctttatcgagaatgtctgcaggtcgaatggcattgaaacgttccttgatactgacaatagcaatattatattgcaagttatacaattccaatgttccatcgcagcgttgattcggtgggaggaacacctcaatcctcaagtttttatcaatgttgtcttcattatcacggcttctaacaagactggcagaagtcaggacaacagtgcgtttgcgtttggctcttccctgccactttataagcaatcctgtgcaagcaaaagacctcgagtgatctctgttgaaagaagcaagtgaggaaaccactcgggatatatttgtcacaacttccttttcaagcaccccccagacacactccaaagtatcattgggtggatcaccaaaaggataccctttccaagcaagtaattcaccaaatcggtcttcaa

SEQ ID NO: 40167 - DNA, 436 bp, Setaria italica
  Peptide Sequence Number=SeqID_106141
gaggatgcccatgggattaggaagggcgggcgagcgggcagcggtagttggtgaggggcggcagccgccggccaggatggaggaggagagaacgggggtggggaggaagaagatgaagtagctggcttccgtgctccacataggagcccccctgccccgcgcccgcgccggagcttcgtccaccactccaccacaccactactgtgggcagccgcggcgggatgtcgagcatcttgcttgtgtgtaaaaactaataaaaattggagactagggtagtgtttggttagcttaaatgtaacgtaatctgattatgattactgaaggtaacgaatcatatgtgtaatctaattatgattactgaaggtaacgaatccattacatatgtttggttgcggtagtttgtaatcaattgatactgtaatcgaatcccttacct

SEQ ID NO: 40168 - DNA, 718 bp, Setaria italica
  misc_feature (676)..(676): n is a, c, g, or t
  Peptide Sequence Number=SeqID_106142
cccctctgctataattcacaggatgatgcaaacgttgttactttctactccaatggccatccgacaacacatttataaattcagatacctatgctttcaaggatgatgcaacattgctgttgtcctctacgaaatgggaactttgctattggaatggacttagcctgcatccgacaacacatttctccactgcataaatatttgcgtaatactttaaattttcatgagcagcggccttctgcatgcgacaacacattttgcatacgtatagatatttgcaaaataataacatgtgtaagggtgacgctggaaactcacctgccaatgtgatcgtgagccatgctaactgcaccaccataaaactactgaggcaggaaccaattgatgcacatgcatagcagttctcggagactctccagcagctacctaggtcatgcatgacctgctcgattgccactgtaaacactaataactaattttccaatctatgaagataagatatttaaacatctcttgacagttatagcattcatagaaggcttgaagattgtgtcacaatactattagcggatgcgattacctgagtaacaattcggaggtcaatgaaacattatcctcatactttctttagagcattttacaggagatcactagcttatcttgagcatttcatacngtcataaataataagattgcacatttcataacaaaaaaaatt

SEQ ID NO: 40169 - DNA, 448 bp, Setaria italica
  Peptide Sequence Number=SeqID_106143
tgtccgagcgtcgcgggcgtggcgcctccgatggggatgacgaactcggtcccattgcgaccgttcttcgacgccgcgtcgaggacgctcgagccgctgcggggctgcaatggtggcctgaaggacgtcgagaagctagcaatatcaagggcggccacgggttcgccggagcatcccaagaagcgcaagagaggcaccggtgggcggtgcgagggcgcaactgcgtcttcgacgaggaggagcgactggagggtggaggccgtcatgctggctctgcgccacgtgcgctccgaggaggtcgaccccgacgaccccggcgcgccgtactcgaaggacgcagaattaatagctgtctctatactcctatgcgtctagcttcgtaaagctgtatcttcagtgcgagatttgcggttgtttggaactttggatggaaattgaaatagaaaag

SEQ ID NO: 40170 - DNA, 370 bp, Setaria italica
  Peptide Sequence Number=SeqID_106144
gagggcctccgtgctggccaatatcgccgaggacgagtccaggaactccatttccatatccttcaccacggaaggcaggtgaagacgattagaggatgagcaggggaataggatggcgagatcagatgtgaacaagagtagtgttgtgaagagtggcttaattggtagctagtactaggttgatttgtagaatttcattcatattcagagagtggtaattagctgctttaccggttaaagtcttttttcgattaaacatattcctccgatccatacgctggaaagtgaacaaactccaccccagtcctccaaatacgtatgcattggagggactaatgtgtatgaaataaggctagctgggaaaccttac

SEQ ID NO: 40171 - DNA, 773 bp, Setaria italica
  Peptide Sequence Number=SeqID_106145
aacgacatttatccaacaaggatcgtcggagatggcctcgacgacgtcgacgacggtgatggtggcggtggttgtggcgtcgctggttggcggcgcggtgtgcggccctcccaaggtcccccccggcaagaacatctctgcgacgtgcgacggcaagtggctggacgccaaggcgacgtggtacggcaaggcgacgggcgccggccccgacgacaacggcggcgcgtgcgggtacaaggacgtgaacaaggcccccttcaacagcatgaacgcgtgcggcaactcccccatcttcaaggacggcctcggctgcggctcctgctacgagatcaagtgcgacaagcccgccgagtgctccggcgagcccgtcatcgtccacatcacggacatgaacgacgagcccatcgccgcctaccacttcgacctcgccggcaccgccttcggcgccatggccaagaagggcgaggaggagaagctgcgcaaggccggcatcatcgacatgcagttccgccgcgtcaagtgcaagtaccccgccgacaccaagatcgccttccacatcgagaagggctgcaaccccaactacttcgccctcctcgtcaagtacgccgccggcgacggcgacatcgtcgccgtcgacatcaaggagaagggctccgacgagttcgtgcccctcaagcactcctggggcgccatctggaggatcgacagccccaagcccatcaagggccccatcgccgtccgtctcaccagcgagggaggaaccaagcttcgta

SEQ ID NO: 40172 - DNA, 589 bp, Setaria italica
  Peptide Sequence Number=SeqID_106146
actacagggacacattatgcatatgccaagtcctcttttttttttcaatcaacacactcttgcctggtggaaaatcagactgacattcatgcatggatggatgtacagacttataattgtgattagaggaactatatgatccaccacagaggccaagccagcttcaacgaataagtgtgttaagatctccgttcttagtgcaagaacagccccatgaatatcagtttttagaacttaggcagagcttgtgctcaatttcaggagggccagtgccataaagcaagtgaattaggctaaaactagcttagcatgcgcaataaaactatgctctagcactataaaatgcctcctgtataactttgctacactaaccctagctacatccttggtctaacaaacatgcacccatccattaaaagaatggtcatcgaaaggtccattttaggttcagttctcatcaacttatttgtaatgcagatcatctgagcaagttgtcaccccacatctctggttcacttcaacaaaatctgagtgggatgtaaattagatccaagtgctgaaaatcttcataatttcaacagcaggtcag

SEQ ID NO: 40173 - DNA, 545 bp, Setaria italica
  Peptide Sequence Number=SeqID_106147
acaatagttagaaattaagtccaagcttaaaatgtgcaaatgaatctgaagtaatctaacctaagcatttcggaatatcaatcgctgaattacagtctactccatttgtaagggattttatcgaactgtaatcatatgactgcttcattaaagaacatcctaatttatggtgcagaccctgatactaagcaatggttagaagatcacaagcacctaatttatgactgctttgttttgtcgaacaaattttgtcagtcagttagtgatcaacccattcagtttcgtcagttaacttataaacagccactgtccgaactttgaagtccaattcaaatattcaaaccgactttgtcttgtccaagagctactgtaaattgttgattatgtatcatagatcccattttgcatggtgttgcccatcttttacatatagaattcttggaaaacttgagccaaagttgaccaattttcactgtctttagaggcgaaatagtcattgccattcagtttagacagtcaactctagacagtgcaacttccaaact

SEQ ID NO: 40174 - DNA, 374 bp, Setaria italica
  Peptide Sequence Number=SeqID_106148
tacggaaagacccggccgtggaggccaggatcctggaggagatcgagggcatcgtcgcggcgcggaaggcgccgggggaggtcgaggaggagttcgtgtttcagccggatgaggtgaagcggatggattacctccacgccgcgctctccgaggcgctccggctctacccctccgtccccgtcgaccacaaggaggtaacgcatacccaaacaaacacacgtttcgtattcattaattcgatatctactttattttttggatagacacatctactcgtcaacgaatacaggggctagaatgctacttcctccgttacaaattactattcgttttaactttttttacatagttttaaatatgcacctatatatata

SEQ ID NO: 40175 - DNA, 2984 bp, Setaria italica
  Peptide Sequence Number=SeqID_106149
ttcccacagctcaccaccaccacctttctctgccccaagcctcgctgccaacgccatgagcggcgccatggacacggccgtctcgcacaacgccacggacgccgccgccgcggcgaagcttggcggcggactggccagcttgctcccggaggtgcagacgctggagctgctcgtggccgtgtccatcttcgtggccatccactcgctgcggcagcggcgctcgcagggcctgcccacgtggccgctcgtcggcatgctgccgtccctgctcctcggcctccgcggcgacatgtacgagtggatcacgggcatcctcaaggcccgcggcggcaccttcacgttccgcgggccgtggttcaccaacctccactgcgtcgtgaccgcggacccgcgcaacctggagcacctcctcaagacccggttcgggagcttccccaagggcccctacttccgcgacaacgtgcgggacctcctcggcgatggcatcttcggcgccgacgacgaggtgtggcggaggcagcgcaaggcggccagcctagagttccactccgccgagttccgcgcgctcaccgccagctccctcgtcgagctcgtccaccgccgcctgctccccgtgctcgccgacgccgaggcgggcggcggcgccgtcgacctccaggacgtgctcctccgcctcacgttcgacaacgtctgcatgatcgccttcggcgtcgacccgggctgcatccgccccggactccccgagatcccattcgcgcgcgccttcgaggacgccaccgaggccaccatcgtgcgcttcctcacgcccaccgcggtgtggcgcgccatgcgcgccctcggcgtcgggaacgagcgcgtgctccagcgctccctcgctggcgtcgacgagttcgcctacgacgtgatccgcaagcgcaaggaggagctcgaggccggctacgacgccgggcgcaggtcggacctcctgactgtgttcaccaagatgcgcgacgaggacggccgcccggcctactcggacaagttcctccgcgacatctgcgtcaacttcatcctggccggccgcgacacctcctccgtggcgctcgcgtggttcttctggctgctcggaaagaaccccgccgtggaggccaggatcctggaggagatcgagggcatcgtcgcggcgcggaaggcgccgggggaggtcgaggaggagttcgtgtttcagccggatgaggtgaagcggatggattacctccacgccgcgctctccgaggcgctccggctctacccctccgtccccgtcgaccacaaggaggtcgtggaggacgaggtgttcccggacgggacggtgctgaggaagggcaccaaggtgatctacgccatgtacgcgatggggcggatggagagcatctggggcgacgactgccgggagtacaggccggagcgctggctccgggacggccgcttcacgagcgagtccgcctacaagttcaccgccttcaacggcgggccgcgcctctgcctcggcaaggacttcgcctactaccagatgaagttcgccgcggcgtccatcctcctccgctaccgcgtccacgtcgtcgagggccaccccgtcgcgcccaagattgcgctcaccatgtacatgaagcacgggctcaaggtgacgctggccaagagggacaaggccaccaggctctgagagcttactacaccattcggagtttgctttcggatgcacatgtggtctgcaagaatttgtgggtgagaggaagtggatgattctgtgtgaaatgatgttctctgttttcattctgtttcgtcttttatttgtagtcctacttctattaagtaattggttggttctgtttacatgtagtgtagacaagtacagggagtatagtacttctgtatatgtaaatgtcaatatgtgtgatggcaaaacactgaagcttcagatgatgtaaccggtatgttttagcagtattgtttcaatacaagagcagcaagatgccacggcatctctttgaataaatttgctccagatcaaaagactcaatactatttactaattactactctacatgccccattacagtgtaccatgcacttgggcacttggcagaccaacgccatctacggactccagaagtccaggcaggtgggttgactgcttattacagagccgtatcattgttcagcaactcttataggctttacacttttatttgcatgatttcaccagcagaagataggccaggtagacgaacagcatcatcagttgttgagatatggttggccaactgcccgctctcagcctctcacacagcatcaaaacctggttgttcaacttcaagccctgccactccactcttcatagaattcagcaacaaagtcctccatgaacttatgcctttactctgctctccctttttgccggcctctgtcttcatcatgtccttcaatttaaaaagcttctcatgaaaatgattaatcgatgtctgtttctcctccttggacatgtacttttcctttgacaagttatcacgtggcagtattctaggatcatgaagtgcgctgttcttgctcccaccatacgtaaagcatcttgcaataccaattgcaccaattgcatccaggcgatctgcatcttgtacaattgcaaactcaatagtgggctcaaaaatagacttctttgaaacttcatttttgaatcccatccccttaataattgacactatttcatccttctgccattcctccaatcctacctcttcaagaaacttctcgacgatgctcatatcctccacattgttcttatccaacttccattagtgcagtcaaattcacgtatccggaatcaatctccctcctcaacaacagtcaacagtatatcaagtaatgtatattctccacagcacaaggggtacactaactcaaactcaacttcctttcactcttaatgcaaggagcaaacaagtcaacaagacgatagaactcccccc

SEQ ID NO: 40176 - DNA, 499 bp, Setaria italica
  Peptide Sequence Number=SeqID_106150
ctaatgttactcaaatcatttaataacagtgtatgtacaactgttgaggagcaaaattacattgtacatttgctattatagcatcctatataatacgggtacatcaagaagtcctttcctccgagaatcagcatatggacaacaactatgacgagagatgttgtcaaatgaattgaaggggaagaagaattgtgtatccaagcagggaaactgttgtcccaccagtggacaaagtatgcccgtcatgctagatactatgcatcttcctgaagtagtttttctctggagactggccaccagaatcggcagttttcctgctcgatctgtgctctgcatagtttttaagctcactggtatctaaagtgaagattccggtaaccattgatcgatctatctacacgtcgatctcatggacggctacggcgacgatggcgtcgagccgtggaggaggaggcgttattgccggctgccgccatggacgcgacggccttgggcccac

SEQ ID NO: 40177 - DNA, 1147 bp, Setaria italica
  Peptide Sequence Number=SeqID_106151
cacgcagaacataagatctcaagtaacaggatcttcaaaatcttctgcaggccctaaagcaccgagtgtggttgttgaacctggtacacaacctggcagcactcagcatctagaacctctaagcactagcgcccataaatctggtccttcagttttgaccacacatgcaactgagcaaggtcatggtgcttcagaggttgccgtagttaatcctccagggccatctgatggggcacattcattggaaactaagaaagcattgagtaccacaccagttcctggttcatgcgacattgaggaaaaggaggatgactctacattttgtgttatcactatagatgacttgttccctgaagatgcaatgcagccagaaactgtagatctcaaggcaaagcagccagaaattgtcgatcagaaggcaaatcagcaagttgaaattgtcagtcagagggcaaagcagccggaaactgtggatcccaaggcaaagcagccagaaactgcggatcccaaggcaaagcagccagaaaatgcagatcccaaggcaaagcagccagatgcattaaatcctaaggttgagatggtagatcccaaggataaagacatgcttgagtttgatcaatttgttgcttctcaaggaggagtaaacacagatcatctggataaaagcaagactggaggaagtgcttcgcaggcccaaggccttgctggcagccagaagaagcaagtgaaactgatgcccacggtagggaaaggcaaccctgtatcagctgcagctccagcaaccgtaaagagaatcaaaactcctgtcccacatttagtgaacccggtcccagcaggcaccccacgtggcattgttggcacagtcaatgccaatgcgccgaataagacactagtaaggaaggcagctactcctgctcctgctggtgtccaagctcctcccctgaagaagcatgccgtgaacataaaaggcaaccaagcgatgcagcccagcactgctgtggctggctctggagtaccggcaagcaaccaggctagcgtggctgtgaatggtgctagcaaggcaaacccgccacccagcagcgcccaggctagcgcggtggtgaatattggtagcaaggcgaatccaccatccagcggccaggctagc

SEQ ID NO: 40178 - DNA, 369 bp, Setaria italica
  Peptide Sequence Number=SeqID_106152
tttgttttaacttttcgtttttgggggtttttaccggtttttctttttggggttttctttaggttataggactagtaggacgacaagaagatgaaccatgcagtgacggcggtagggtacggcacggacgagaatggagaccagtattggattctcaagaactcgtaccggctggtcaggatgggtacatgatgctccagagaggcaccggcgcctgtggtatctccaccatgtcctcctacccaattgcatgaacgcaaatctgcatagaaactactccctcccttccaaattataagatcgtttttaacttttctagatgcataaatattattatgcatctagacataggtatatctaagtacataa

SEQ ID NO: 40179 - DNA, 607 bp, Setaria italica
  misc_feature (1)..(42): n is a, c, g, or t
  misc_feature (543)..(543): n is a, c, g, or t
  Peptide Sequence Number=SeqID_106153
nnnnnnnnnnnnnnnnnnnnnnnnnnnnnnnnnnnnnnnnnnttttattttggtccatgcatcactgctccgcttatgcagagtttacattagctgtcaaaagaatgttaccaaaagttacattgatggaccaagccaagccaggccacgaatggcgtgcttatttcggcaaaggttacatttccatcgctaacacgagcagcctcaactagcaactagtactaggactaagacctaatgttctaaggttacagaggctgccaactaatcactaaacactacaccggcgaggtggacagcaggaacaccggcatctgcctctgcagcagaatgccgcagaaggggcaaagcgggacagcggctcctgacaaattgagcgatccttcgtcattgttggcgtccaaaggggatgcctgcatggtgaagaatgactccggcagcagcttgtcgaccatgcctccacagcatacgcagtgccacgccggctgcagaacggagcacaagagcatagacgccttgcaccttgtcaacgtgtgcctttcnctgcagatggctacatcagtcgactcgaaggggactggtgcagagcagtagaggcaggtttctt

SEQ ID NO: 40180 - DNA, 567 bp, Setaria italica
  Peptide Sequence Number=SeqID_106154
ctttttatgcatttttgagaaaagaaaggctcagccctatgaatcatttgcaaaaagacttggtgatatggtacatcttttctgattatgcataaacctaacaaagacctacaatcttcatgaatgtaaaattaaacattgtctatcctttatgttcttcatgacagtagttgttttatgtatgccctttaacttgtatgttcaacaggttttggtttagcttgtcatcttggcgtccttgcagaccttcctaccatcggagttgggaaaaatgtaggtcatttactgtagttgcaactcgcaagtacagctgttggttttctactgtgaagtcagtagtcactctcactgcatttctgtgcttcacacaattcaacttctcagtgttcccttcttccagagaagactaattccaatgtttccatcgcctagctgcatcatgtagatggacttaaccaatctgaagtcagaaggcagctcgagggaaaagaaaactgcgataaggagttcatttcattgactggacggtccgggacgacatggggcgtggcgatgcgttcctgccct

SEQ ID NO: 40181 - DNA, 487 bp, Setaria italica
  Peptide Sequence Number=SeqID_106155
gttgttgttcaactgcaagtgccgtatattcctggtttccttgcattcagagaggctccaattcttcttggactcttggagaaggtgaagaacaatgcacatgatttctaccctcaggttctcatggttgatggaaatggattactccatccgcgaggttttggtttagcttgtcatcttggcgtccttgcagaccttcctaccatcggagttgggaaaaatctgcatcatgtagatggacttaaccaatctgaagtcagaaggcagctcgagggaaaagaaactgcgataaggagttcatttcattgactggacggtccgggacgacatggggcgtggcgatgcgttcctgccctggttcattgaaaccagtctacatctcagttgggcatcgcatttcgcttgattcggcagccgcgatagtgaagctgtgctgcaaataccgtgttcctgagccaactcggcaggctgatataagatcgaagtg

SEQ ID NO: 40182 - DNA, 458 bp, Setaria italica
  Peptide Sequence Number=SeqID_106156
taactaattaaaaatagacttaatactaccaatccacactagtttgtatttgtatattaatatttatcatgccttttgatatcagaaaactgtaaagaagatactgtagaccctaacatacttttcttcaccatttttcctggttctttgtagtttgtagtatctacatagatgatagactacattggttgggttctactgattcttcactgtttttcatttcttgtcatgcatagacttacttaaagttccctctttccattttttcttacttgtgactgatgtaattgacaagtaccactctgatcacatgcctaaagacatacatacaaacataccattgtgaggcgtgtgcttaaaacactgaaccaagtcaccaacttatcaatttggagagaggtttagaacaattaattgctgagtggagatgtcttgtatgttttttagcccttattgat

SEQ ID NO: 40183 - DNA, 453 bp, Setaria italica
  misc_feature (410)..(410): n is a, c, g, or t
  Peptide Sequence Number=SeqID_106157
ttgtctagtacctacaccctttcgaggtccttttggatccgattggcttgttccccgctagggacaggctggacgcagactggcttgatagggtgaacaacatggaggtgttggtcacctcacacccgcagctcaccctctccaccacaacacgttgtatgaatgcgttgtaccgactggtcgagctccaggggagagctatggctgtcttggctcggatagctgtggacacccaggagcatctcaataccaccaagaaagatttggtggaacagtcgtaccagctcatccagaggggtatacggatctctgacatggagacccggatcaccgagctagaggaggaggtgacggatatggagcacgatatggtattgcttgcagaggagaagctagaggttgagatgganctagctgtgctaatgcgcacttggatgagcaccacgccgagct

SEQ ID NO: 40184 - DNA, 394 bp, Setaria italica
  Peptide Sequence Number=SeqID_106158
aatagatgataactcaatccagaactggagccaactgaagcaaggtcagctgataatgacaatggcaaatcccaatacactccctttttatcaacaaataatccaggccaagatgcttggaatgtaacattttgatgaggaagctgcaattggcaaagaggcatccatttaatccaaatgtttagaatactaacaacagaaattagttaagtaaagtaaatatccccaaaagggaaaaaaacagagagagaaaaacaggataacatttccacaaaccattatcgacaactaggtgttctaatcaacacactggaacagattttttttggtcagaaattgtagtggaagcaacgaagagtacccaacaaataactaactgtataccgaacagctt

SEQ ID NO: 40185 - DNA, 421 bp, Setaria italica
  Peptide Sequence Number=SeqID_106159
agagataagcttcgctgcattatgacaatctccacaaaccctgaggttcttgaagatcctcaaggtcatcccagggggactgctaatcaggccaaaagcgatagcgagcttctcgctgtgcctcatcagcatttgtgccttcagactctcctcaacatcatgcagtgcaaaatcaagatcaggaacgtaacccattgccttcatcagctcctccaaccggtccaacttgtcatgaatcaaatcaagctgaggatgcaatctgtcattcgatctgaactcatgcctcacaccctttatctcgatccagctatatccaggtgttttcactaccgcattatctttcatccatctccttactcttgagacgtcagcccacctatttgccatagcataaatatttgccaattgcacataggcacct

SEQ ID NO: 40186 - DNA, 457 bp, Setaria italica
  Peptide Sequence Number=SeqID_106160
cccatgaccgaatcatcaacaccctagcttgtgttattgccttggcatcgtggggcattcacgccgaaaaatgtgagaaaggcttgtcatttattcgggaaaacatgtggaggttggtcaaggaggatgaggactggatgctagtcggcttcgagattgcccttccttcgctactagaaatggccaaggatctggatcttgacatcccttatgatcaccctgccctacaagaaatatatgacagaagagacctaaagctcaacaagattccaaaggatgtactgcactctataccgacaacactgctacatagcatagaggggggtcccggtttagactggaagaggctgcttaacctccggttttcagatgggtctttcatgtcctcgccgctgccacagcgtatgccctgatggaaacggtgacaggaatgcctcgagttcttaggcaccatcgt

SEQ ID NO: 40187 - DNA, 665 bp, Setaria italica
  Peptide Sequence Number=SeqID_106161
ttagtacgtaactaacccttacttactagacgaacctaggctccggatccactgccggaggagctacccgaggctctcaggaacgtgatcatggagtaggtcgacgcggtgatgaagctggggctgcgcgtgtccgagctgctgtcggagtccctcggcctgagcagcggccacctgcgcgagatgggctgcatggagagcctccacgcggtgtgccagtactacccgccgtgcccggagccgcacctcaccttcggcatcaagagccacaccgacccggccttcttcaccgtcctcctgcaggacggcagcacgggcggcctgcaggtgctcgtcgatcgcggcggcgggcaccgccggacctgggtggacgtcccgcccctgcctggcgctctgaccgtgaacatcggcgaccttcttcagcttgtcagcaatgaccggttcaggagcgtggagcaccgggtcccggcgatcaagagcaaaggagggtctcggtggcgtccttcttcaacacggacctcaagagatcgacgaggctgtatggccccatcacggatggccgctgccccccgtcctacagtgtcacggcacaagagttctaagtcaaattagtaaccggtttactaaggtaagtacgtttaggtaaagtaaacttaaaacctaaa

SEQ ID NO: 40188 - DNA, 380 bp, Setaria italica
  Peptide Sequence Number=SeqID_106162
caaaatttgaaaggatgtgaacagattcatgctcactgccctgttgatttatgttaatcatctttggcggggcattagtgccagcattttgatcttgagcttctaactatttcgttagaaaattctcttggagaattcagttcttccttgttttgcaatttagtgattgactccaagaaattgccacaatccttttgcattctcttgaaaagtttgaagaattacttattgaaattggatgcttccaaaatcctactccagggtggaatcctcatcaatgaacacttattgcctatggaatcctgaatatgttcttccatatcttcaaagtttaatcccaataaagccccaaggcttacaaaagggtgtcccctgacccc

SEQ ID NO: 40189 - DNA, 317 bp, Setaria italica
  misc_feature (313)..(313): n is a, c, g, or t
  Peptide Sequence Number=SeqID_106163
tgaggaattgcatatgattgtcaagaaaaacttagcgatcagcacacagttgcaatgcagtacccagccaggggggggggggggggcgacttacctggtcgatcagaggatacttgctcttcgccactacctgcagatttgcatgttccttgtctggtataatatagtcccataacgaaatctgaagagcagaataatttgaacataagcatggatccatcaaccattcgaatacaaagcagagggcttcatcatatatattgaactaaatagcttcagatgcccaaaaataactaaatagcttcagaaaacncttg

SEQ ID NO: 40190 - DNA, 342 bp, Setaria italica
  misc_feature (290)..(290): n is a, c, g, or t
  Peptide Sequence Number=SeqID_106164
taacgctcactccaaaacaagaggaatcctccttttcaacaaaaaaaacaagaggaatcgccaaaaaaccttatccaaattgcaacgaaacgtgtagctagaaagcttgttactgcacaggaggtgaaaagtgaaactgatgtggatgcaattgcgttgatgcagcggcggtgggtgagagcaagggcaacatggagaccaacggcggcaagctcgggtgctgcaccaagtgcaacttcttctcggggctctacacctgcgacgacgtcgtcagcaagtgcgaccccgtntgcaaggtcgtcaagaagcacccgtcaagaagttccagtgcaccgacacctt

SEQ ID NO: 40191 - DNA, 532 bp, Setaria italica
  Peptide Sequence Number=SeqID_106165
gcagagggctgtgcgtaaaacgtcttacacacgacacgagtggcaaagatgaagagcagcacgttggtgatcctggttctccaggccgttctcgtcatgggaatctagctttgcggctgtggccaaggaaaacggtacgtgcattgtcttggccgctcactgctgtcactctgtaagtctatatgttcatcaatcaatctgtgttctgtgatagggcagtgctgtttggtccatgatacccgtatagtattttgtacaatgtagtcatgggaaacaagcaggatcaattgctcatataaatactggcatgcatgctccgtcatgggaaatagccagattagcaccgcaaaattactatcgaattacacgcgtgccatttctgaaaattggatccggcaaatgacttccactatatacaccataaataatcgagtaaccacggcacacacttcaatctcagtacttggctatttgatcaggaccttaattttctgacctgatgcattgactagagcgaaagggacgaagtcag

SEQ ID NO: 40192 - DNA, 1403 bp, Setaria italica
  Peptide Sequence Number=SeqID_106166
ttcgatcagagacatggtgaattggtgacatgccgtgcttccgtgtctcgtcgcctatataagagatgctctaccattctttggccagcaacaacaacacaaagcattctgtaagcagagggctgtgcgtaaaacgtcttacacacgacacgagtggcaaagatgaagagcagcacgttggtgatcctggttctccaggccgttctcgtcatgggaatctagctttgcggctgtggccaaggaaaacgcggcggtgggtgagagcaagggcaacatggagaccaacggcggcaagctcgggtgctgcaccaagtgcaacttcttctcggggctctacacctgcgacgacgtcgtcagcaagtgcgaccccgtctgcaaggtcgtcaagaagcacccgtcaagaagttccagtgcaccgacaccttcctcggcatcccatccgcagcccaccgtgcaattggctctgttcgcttcagcttatcagccaccgaacagcatttttctctcgcaacaaattagccgtttcagcttttcagtcagcttataagtccaaccgaacagacctgagctcagcacaggttgctgagcccacgaatttctatcctcctccacgttaaacgccatcaataaaccgcatttatgtacctatatatgtgtgtgtgcatccctgctcgatcgagcacgaatgaataaaacataagcgatatcctttgatccaatatgtccaaaatagttcaaacccaacagtcagcgcttactatgaatcagatatacgttcgtttggcagccaactgcggatgcagattaggaggatgttcattagaggattcttcccagatcagtgaccttttctttcaagaggtataggcgtcaggcagcttgaactccgagagcgccatccgatcttggatcatggcgccggcattgggcataacgtaccagtggagaacaaactggactttcttcccgcgcagactgcttccctggtcgatcagaggatacttgctcttcgccactacctgcagatttgcatgttccttgtctggtataatatagtcccataacgaaatctgattcagtgaatttttcgcgttttcatactcagctgtcagaaagacaaagacctgttttgtgttccaagtgaatactgactccaaatttgcagataaattgaaggtcagtgtcaccttgttgtttccattgatctgtttgtggaaccggttaatctttgtaacatgggcttgggcttggacggcggggacgtggaaggcgtcgagcgcggaggcggctgcgcagacggcggcgaggaggacgacggccgttgttgccgcggccagcaggcgctgcgtccaactgtgcatcgctttcgcccgagttcttttcccccctttttccgaattttt

SEQ ID NO: 40193 - DNA, 258 bp, Setaria italica
  misc_feature (144)..(144): n is a, c, g, or t
  Peptide Sequence Number=SeqID_106167
gatatcaaataaaatactttttctacttacaaacagagaacctcttttaaaaaatacagataaaactccttaccatacgtaaatatccttcaaccactacattgaatgtggcagctcgctctactactaccttaaaaaaaaagntggaaacttttctagaccaatcaaacgtagtgcaagataatacaccagaagaccattagcagagatcaaatgggcacagttgttgaatcaagatgcatcagacatcatcaatat

SEQ ID NO: 40194 - DNA, 517 bp, Setaria italica
  Peptide Sequence Number=SeqID_106168
aacagattatatgatatatatgaagaaacatgaatatttctattggttttgagtttagactagtaatcaagtttattgagaaatgttcttgattcaacttttaggatatttaatcttgaatgctatgttacacggatgctctgatacggatacagatacgccattttttaaaaaacaccgatacggatacagatacgtgaaccttcggaagtatccgtgcatcatagcctaaatgtttatgaatagccattgtcattctatgagatatttggagaaacatgcatattttgtataggaaacatgaataaattttgaatcggaaaaatatgcagctgtaattaaatattcacattatggaaataccactatgctcgttcagattataataattaaaagaggctatttggggcttatgctcaattttaaatcctgcacctatcagttgcacttggtcttttaatttattttttattccatctgcagcaattttgcgatctaagtcattattacttgtatc

SEQ ID NO: 40195 - DNA, 147 bp, Setaria italica
  Peptide Sequence Number=SeqID_106169
tgtgttgttcgagaaaaattgctaaggcttctgataccatttagaatcaacagactaacagtaaatgcagaaagcataaggattgtttctcaaaatgaaaacagtatgccctgaattatgttactgaagttccaaacttcaccaaaa

SEQ ID NO: 40196 - DNA, 2014 bp, Setaria italica
  Peptide Sequence Number=SeqID_106170
tttttttttcagaaacctgcagatttggcagttcaagtgtagtacatcaaaatatagactgctacgcaaagtattagcaaggtaacaagacacaggtgccataaccaaaatccttctcaaagtcttgagctattagcctatagcatgctgggcgtctaacagcctaacttacatgaaagatgaataacatatggagctaggattcacatgttcagacagctcatgatcgatgtacatggatactgaaccgactgaagttttgcagacacaagttagctatattacacctttgatttcttcctagtgggccttgaatgccagaacctgcaccagttggcagcgctctcatttcctcctgcttgttgaggaaccacatgatgcctttcatttcctcctgcttgttgaggaaccacatgatgccttcattcgggcatgtcgcccctctagccttgcttgcagtaattttgccttcagggtgttctccatgacacctactggctgttcaggtgagcattccactatctcagggtccaaagatgtggattggtatttcagctgccgtgttgggctgccgagattacctaaatcccctgaagtagtgccttcacaaaagagacttgtccgggagaaatgatcaaaagattcctgccccaggcaatcaacatgatgagcatcctggttgttcttcaatgacccattgtaagatcctcgagtaatttgggcgcttgtggttccattctgctcttctgtgggagtaatcctggcattgctttgtgagttgatttctggtattttatctttctgtgaataaactggcatactggacatgtgtgaaccttcagcagccataccatgaggatgctctgatcttctctttggtacgtctatgccgcctgtgtcacttctgcgaggccccgtatgttcatgcatgttcaattcaaagcaatgcaaatcactagcaacagaatcatcgtcatcttcagcaagctgaggagcactggtggctccattcaaatgaacagactctagggattgccgacgcagtctagtactatcattcatgtgtttttcattattcttagagttacctgctcttttggaaaggataaaagcctctatttcactgctgagcctctctgttattgtggttccatgagccaagtcctccttgacagcaatactccgcatttgcattcgctcatcaagccatgcttctgaaatatggagcactgatttatcaaagttgagctcatagttcttggcatttctttgctttaccaccctgagttcctcttcatagtttctaatgcccattgcgaactgatcacaaaggtcttctaagaggcgatttcctttcttctccttctcaaggtccttgactgccttgagaaatgctgattttatttgagataactccttgcctaacttcctgtggaggtcctcggaatgtctcctttgacgtctctcatcctctagttcaccttgcagagaatgcacaactgtgtcaatcttcccatggtccttgctttttctaacaagtttgttctcggatagttgcctcattagtgacgaaacttcgtgtcggtaccgccgtctctcttgcatgagttcttgaatatgcgtctgagcctgctgtaactccaatttcaatccattaaccactgacaaattagcagtgtgctgctcttccaggctccaaattcgatttagaaccttcaatagttctgtcgatgtttgaaggccataacctgccctcacagatctacccatgatatccagagaacgagttggactaatagtattatttacattggattccccaactgagctggtaaaacttgcaggagaaaagggttgtatcctgtggctcctttcttgatgcaacttatggtgtttcattgatggatctgcaaagcgcctaccaatgccacctgaactttgcggctgatccaattccgcgccgccgccgatgcccccgccctcccgaccggcggcgatgccccctccccgcccc

SEQ ID NO: 40197 - DNA, 588 bp, Setaria italica
  Peptide Sequence Number=SeqID_106171
tgtctattgggcatgggcatgtgtgctttagaaagaaaaaaccgggggacaaggggagcttcctgttctccttgttgattagtgccctgagtttatagaatctttattgactggtaatactatggttccttttcttggctttgaccgttatcttggttttccatgttcatcctcatgacaaatctagcatagtttttaactgacggcttaaatagcgtgctagtgctgtttcttttcgaagaggtagaatagctttggagtcatccaattcagtactagttgtacaaaatgcgttcatgcatttgggagaccacgtgtaaccaaatcatgctttcatctgttcacctttgatctgtgggtcactgatgttgagacttaaggctactcagttcatttatgttgggttgcaagcactttgtgcccttctctatgttggtttggatgtagcatcctaccgacaccagcacatttagaattcagtgtcttgtgtagacgtgcacgtcaatcgattattatattagcatttatggagatgtgatgctgagtattttgttgctgcgacctagccaaagcatgctgatctccccg

SEQ ID NO: 40198 - DNA, 486 bp, Setaria italica
  Peptide Sequence Number=SeqID_106172
gatgatgctgtcctctttcaacgagggcgagggaggcagccccactcctccccttcttccatgctgcgcaggtatggaaccatgatttttattggcgatccatgaaacctggcggtgggggcaaaccaccggaacggcttctgaagtttattaacagagacttcggctcctatgagcacatgatccaacaattcatggatgctgcactgactcagtttggttctggatgggtttggctttcttacaaagaaagcaagttgccttacgtgaagtcaagaagtccaatcccatctgacaattacggtaggctggtcatctcaaagactccaaatgccatcaaccctcttgtttggggccattctccactcctcgcgattgatgtttgggagcatgcatactacctggattacgaggatcgaagggctgattatgttgctgcggttctggagaagcttgtatcgtgggaagtggtgagtcgaggctcac

SEQ ID NO: 40199 - DNA, 458 bp, Setaria italica
  Peptide Sequence Number=SeqID_106173
attcaaacaaataatactcaaaaatcctatccaattcaaatgccagcataaccgtataaaattacatgcggtggggatgcactaacacgtcaacacagttacacagcgaacagttcgccgcgtgtccgctagctagaatattctacatccatagtccgaagcaatatccgcattaggaaatagtaaaaccttcgcatcacgaaaagaccacagtgccccaaatctaacgctaagtctgggcgcatcagatagacggaacaattcaaaagtattagtattctgtaaaagcaagtgaaagcgcgaacaatccagccgtcgagttcgtcactgaaaaagcatctggccagaatcaaatcgcactgacgcgacaacaaagaaaaacaggatcgaacaggtacgtccacgcaaatgcaaagcgaaaaaggacaagaggagacgcatctgaactcctaaaaagg

SEQ ID NO: 40200 - DNA, 703 bp, Setaria italica
  Peptide Sequence Number=SeqID_106174
cttcgcatttcgtttacagccttacatgtcacttttttttttttgaaataatcagccttacaggtcacatagaagaaaagcagactgccatcacgcacaataaaaagtactgaagccgcacctgcacatgtgtagcttggcgtcaattcagtacttcaacgccacgccgatggttggttacgctatcaaagataattccatcagaagttgatagcagaacattgccgatcaagaatgagtcccgtctcttttgtgcaacagccttgcatcgctactcaaatcattccacgatgcatgatagttggcgccaattgccggttcctccacagatgaacaaaatgctatttctgttgcacaggaggagattctctatttctgctgctgaggtttcccgacggagtgcagatacacagagacagaaaccaccgtcgatccgaggaagaacgcaagggatagatggaagctgaataagaagacggatacgattgctgtaagaagcattgcaactgaagtagaatacaccttgacaatattgtcagcatacttcatcaccattgatacagcaacccctcccacttagtgcatggttaagaatcatcgaaactgtaataaatgaatagccatgaaaaaagcctttatttatgacagcaccaaagtcctgaacacaaattgcaactaagttgaagaccatcccaaaaatgta

SEQ ID NO: 40201 - DNA, 534 bp, Setaria italica
  Peptide Sequence Number=SeqID_106175
tacgcaatagaatttgacaattcaaggtccaaaacataggaagttctaagcatcatttagaatgtacaagcaggcaaatacaatgatttacttagaatgccagctactatcatcgtgtaacaaaactctgcacctaaccaaatgtttccaccaaaggtcatattcaatgcaaactgtacagtagtattttcaggaccattccttgtataggtaagaacaaaatccatgagattgcaaagaaaactatagatatgaactcaacaacttgtgaagcgtagaaccaagtgcctggtagaaataaaggacacaacaaaagaatttaaatttgaaaaggaaaaactatcactgaagattgacaaatcataatttgtttttccctgcaagcaagaacatgctttcaaaccaagcacattgatcaatgcctattgattaacctatatacttaaaaatgaaacaatttttgcaagcattatccttgcaaaattcgttatcaactaagcaacatggaatttctaaactaaacaaacttaaact

SEQ ID NO: 40202 - DNA, 489 bp, Setaria italica
  Peptide Sequence Number=SeqID_106176
ggaagattcacccgggaaagattctatcttttcgtattataagcagatccaagtcggaaccggcctgtggtaatgcattacgtttctgatatttggtcattagttcctctcttgttatcaacacgacagtttgttgttctgttgcttttttaaataaaagaacctttggtgaactgcggcatctcttcctatggcgaagtttggaacatatttcttggtactttagagttgggatcagcatctgttggctacattcctcagatccgatgctgttcctcatgtcaatacgtcaaatctgaaccttggactgaacccgagcttaattttttgcacctcgttttgttggctcagtctttagtctcagttgctacctagccatatatatatgtcctctgcgagttgtgtatacattttttttgttttgttggtttggtgccgtgtcttacatgccaagttctctaattgtgcttcaagtggaatcagcaaggg

SEQ ID NO: 40203 - DNA, 627 bp, Setaria italica
  Peptide Sequence Number=SeqID_106177
gcttcgtttccaaggggtagcgcatggcacatcatttatatctgactgacatgtgcatgaagcaacacatgacgcaagagtcattagccctgctcggccaaatgaatcatgcttagcagcagatgccaggctccaaacaagatgaatacgatcacgtcttgtcaggttctgggcataagtgctgaaaaagctctctgcgccttttatggtttttgaatcatagataccaccaacgccgaaatccttgtggtgaactacatcattcaaaccacgtatcagagaaccgagcacaaaacctcttgggattatctgagcgcaaaccttgtagtgttcccatgaaatatccaaaaaggattgcataactaggcatctcacttgaggattatcgtgagtgaacccacgctcccacaaaactgtcatccagtgcaaaattccctcccaagattccatctgagcatgaaaggctccatgggaggtgtgatttaaatagtcagtctgtggtgtagactcaaacagaagcatcacctggtgcatccaggctgcttcaactaaatgtgtcccatactcttggagcatctcatagagtaacaagaagaccttccaccgaccttgaccatttgaacagcg

SEQ ID NO: 40204 - DNA, 1648 bp, Setaria italica
  misc_feature (1617)..(1617): n is a, c, g, or t
  Peptide Sequence Number=SeqID_106178
ccttgtgtctgttatctgtattcttgaaaggtaaatatgttcggtcatacaaacgatggcatcgatacactagcaaaaactgtgaatagagtttaggttgttacatgtgcacgtctcatttgtcaaggaaagactgcaaccttgcatatacaacccgcctatagaacttccttgttctgacgaacaacacgaatgcaacaacagacccaaacacgcacacacaggccatgatcataaaagacagtgcaaaacagtgcttaccgtggcagccatgctcatgaggtgtcgactccatgtcgtatatgtatcccacaacccgaaccgagaggatgtaagacccaacggggcttgcaacggccaccatgttgaagatggtgccaaaatggttcaacccgaagatctcagacgttatgcttggcataagagcccactggcacccatagcacaggccaacgagcaccgagccaatgtagagcgatgcaggaagaccggaggagatgatgccatgacccacactcatgatcaatagcgtggcacctatgaagaatggcctgccgactcctcgcaggcgaaggaaatgatcggagatgaagcctgcaccaaacctccctgagaagttccagatgctccaaagtgacactagtgtgctggtctccttgtttgtgtagccaagggagccgccgatctggctgatattgttcaccgtggctagacccgatcccatcccgcaagccattgctagaaagagcaaccagaagttgagttttcccatggcctgtagcacattcaggttttctttgcctgcagacaggtcttggttagaccccaaaagtgcagtacttgagctggcactttcagaaccctctgctacctcttcccggagtaatccaattctttgttctgaagaagttggttcttcatgttgtattgattctagcttctgggcctttacagcaacggctactggagataaggctagcagcaggagtatcacaaaacaaacagtctgcgcagctgaacttatcatgaacacttgatcacagattatgatgatcattaggtaaacggcaacagtaacggcgataagagagaaagcatctaggaacttcttgttgtaccgttcatgcgtgctgtggacgtcgacaaaagacatgagcatcaccgcgatggttgtgggcaaaattgccagcatcagtatgaacgcggtaggatcaatgtggagagtgcggtatatttggactagtatcgccccacttaggcctagaaaaccctgttgcgaaagtacaaaaattgaattcaggttagttgggggagagaatagtgctagcatcagtatggaagtgcttggatcaataagaattttctgtactggaacagagcagaatatgatgcacttgggtcaagtaatcaacaacattcggatttggtaacctatacatgctataaggtcacaacagtgaacctaagaaacaaaagctccataacagtgaacttctgtcaataaacgaactacctggtatacatgctacatggtcaaagtaaaattcactccatgtaatattgcccctttgtttccaatatatcctctgctgttggagtaagacaatcagtttttcngataagatggctttgaaattccattctggga

SEQ ID NO: 40205 - DNA, 509 bp, Setaria italica
  Peptide Sequence Number=SeqID_106179
gaagagacttatctggaaaatgttgcgcatgaagaggttcattggccttctgttccaaaggattcattggaaggacatgagaaatcagctttggggcataccgagagttctgaaatctctacagaatctgatcatgatgctcaaccaccaactgctcatagggaaatcaatccagaagctcaccccacaccatctatattctgtgaggagccaaaatctgttgaagctgatttgacagggccaatatcaaaagtttgtactgatgccatagtagaacaaagtaccgcagacaatatcaaagtggagagggcaactgagaagattgttcaagtagaaacagattttttcacacagaaggatactgatgtttcacatgatttggaatttgagaaatatcctggaggtaaggcaccttctttcacttctgatggtccaccttctcttacactgagcagggggaacactgatgctggtaatatcagtggtactgataccctctcaaaacagcc

SEQ ID NO: 40206 - DNA, 479 bp, Setaria italica
  Peptide Sequence Number=SeqID_106180
gttgacaaatagtgccaggttcccgatcgatgttcacactataaaagtttagatgtaagtagttaaagcagcaaatgtgatatgaatataaaccatcaaaagaacagagttaatctttaaccaacacatcacatgaccaacagcataaatgactaccagataatgtcccgataagacatcaaacgagtgaacatcacacaacattcagacaatcagatgtctaatgtagctgaatcacaaccaccacattgtattactacgaggacaacaccaatgacattggagtatgcctaagacaggtgttccgaaggcacggtagtataaactgggagaaatgcaccacaaattcctactgtagcatctcggcatcatatctgagtagtcaagtaaacaaatgcagacaaccatcatatccatctacctgaaggtagtacattctaagtcaatggaaatcaacatgtacaaaacagaaatcacac

SEQ ID NO: 40207 - DNA, 835 bp, Setaria italica
  misc_feature (1)..(21): n is a, c, g, or t
  Peptide Sequence Number=SeqID_106181
nnnnnnnnnnnnnnnnnnnnngtcagtgccccacagggcgaaacagattgattcaaattgctattacagaatattactgtacaccattctgtaactctaaaatgactattgaactcatacacaaaattcaaagatatacagtgatgaataaaagaatttatcactagtgatcccacaaatattatgttaaaaagagggccctggaaacatgacatcttacaatcaagacagatgaacaactcaaaaagatcaaaaggctgggattcaaaaaacccaggcgtcatgttcttttccacgttccaggtggtaatggctaaagacccaggtcatcatatattgatgtctgctcggcttggtctaccaccgcctgaatcaggaattgatgaagaggagaatctgtgatatctgtagttctctgatgaagatgacattggctgctgtggatagagtgtggggggtggagttaggtttcgctgtgcaggcagtggagcaaccccattgtatttgtagctctgactcccgtagctttttctttggaacaggtcatcatcattcacagtttctacaggaaggatggtatcctctctggaagtgagtgaccatgggctcggggcaggaagctcattcgaaaaataccttctccttatcaacatgcggaaaaacttgatcagagcttctttatcatatcttgcctcttttgcagccgtgagcagaccagaattgccaggcctacttccaccaagtgatgattcatcacttggtggaagtaggccttgtttttcaacccattgacgagcaacatcaacaagattcccactgctcactcttctaccat

SEQ ID NO: 40208 - DNA, 1211 bp, Setaria italica
  Peptide Sequence Number=SeqID_106182
aacaaattaagaacaaactaagaatagatgagatggaggaacagctagcatgagaagaaagtgacccagttgaaaccattgctggtgaatctctacttttgaccgacgaaggtccagaaacaggttgtgttggaactaatgtggctggttgtaagcatttttttatggctacctccgaaatgcctgtggaagtgttctgcgcagatccaaggatgccattagtgattttactctctttcagcattcttgaagatgttttatcactatccttgatatgtggaatgttcttgaaaacgaccagatccttgccagagtctttctgatactttatggagttagtcttactacggttgcctttcgttgcttttttgctacgctgaaccacagccctaggcaccgaaggagaattttcatcttgagtagaagaagcgtcttgatttttcgtagcggaattttgaactgaaactatataatttgccagaatattgctccacaccctttgggctgcttcagattgagatggctcaaattgtgcaggcgattctgtacctctactactaccacaaccacattcttctgatatctcatttacattctcacgagcttcgcataagttacactgtctaggagcatgcccttctgattgtccattcccataaccactcgtatgactaaaagctgcacgagtaatagagatatccaggtcgcacagcagaatgcaccacaatgcatctcccaaggtgaaaaatggacagcatgtcttaagcaaacttgatgcattgcaaagaaaaacaagcccaacatgtgcaaaactgtgtcaacattctcactgctggaataatcaacctgatgaccaccgctctgtagcaatgtgcgtgcatgctccgtaatcttatcgataggcccgtcatactggtaacagagtgcagagtctacgatggcatttacaacagcatcctcggtgtaaccttcagaggataacatctgaactgcggtcttgaagaacatgtgcaagctattcaatgcaacatcccttaggtcattgcagcctacatatctgaaaccatccagtccaacagcctccttgctccaatccatatcaagttcttttgaggtcatgtgctcagcaacaaaagcttgtacacttgacattgactgttcaagttttacgtgaaccaaagatagatcatcattgagagggttcacttgct

SEQ ID NO: 40209 - DNA, 589 bp, Setaria italica
  Peptide Sequence Number=SeqID_106183
aataattaccattccaatccaatcacgttcttttcatttccatagttaacaaacagtggcacagttctaattcctaaatatcaaggatcatacttaattcagtttattatgatcaaataaatagtacaaagctaccagcgcactgtgacagctgaactcttaacacctcgcatatgacatacctgcattctgctctcgtaggtgccttctgacatgtactcgtatacaagtgccatgcactgcccatccttgccatatacaacaacaacaaacattagtatgtctgctcattttcatttatcaagaatagttttggatatacgtagctgcacattttataaggctccttgaggaagagctaacaccagaacagatgcttaccaagcatcactgggattcatgtctagatgatgaatcacagaaaacaagggacgacgctgtttatccgaaggagctggggggcaaccaagtaggcaagcgcttataatactgagtctgaaacagattatttggcactacttgggtttcaggatcaagagattgagaatgtttgcctgctatacaccagaaatatttttgcgcttatcaa

SEQ ID NO: 40210 - DNA, 456 bp, Setaria italica
  Peptide Sequence Number=SeqID_106184
aagaatacagccaacactccaaatatcacatggaaaactccagcctaggcctgcaatagaaatattcaacatcatcagaattaacgattgaaataactgaagaagaaccattagcaactagcatgatagccagcataacaactatggaacaggataacaagtcttattcatattttgcacataagcatagagttcagtccaatcagtttcgtcaatacagtgacactcaatcatcaactgtaaaactaaatatgttcagaaaacattgaagaggaagaagcaccaactttttctgtcaatctgttatcaattgtgccattccaaagtaaatcagagtatgaattaggatgcaccaggactttgctatgattttgaatggcatgtgctttattctattgaagcatatttaagagcacagaaatattcactttgagtgccctcaaaaaaaaaattcaa

SEQ ID NO: 40211 - DNA, 362 bp, Setaria italica
  misc_feature (359)..(359): n is a, c, g, or t
  Peptide Sequence Number=SeqID_106185
tcaaaaattcatataatccactatgggtcttaaatgcagttttatgctcatctcctttcacaatccgaatctgatgatatccagatcgaaaatccaatttagaaaaccatctagcaccagccaattcgtccaacaattcatcaaccactggtaagggatgcttgttttttactgagatagcattaagatggcgataatcaacacaaaacctccatgaaccatccttttttttcgtgaccaataggacaggagaagcataagggctattactgggtcgaatgacaccattctgaagcatttcagttaactgtttttcaatctctgtatttttgagtcggtgcatagcgatagggcctaanttc

SEQ ID NO: 40212 - DNA, 1179 bp, Setaria italica
  misc_feature (1)..(26): n is a, c, g, or t
  Peptide Sequence Number=SeqID_106186
nnnnnnnnnnnnnnnnnnnnnnnnnnaggtttaacctggtgccagtaatgtaatgatgttctgcaccataggagtattcttcttatacacaaattaattaaactatcagatgatggctgttactgctatcttgagaatactaatcgcggggaaaatatgaaaaagaattacagcgccaggaaggatgatggcaaagggattcgtctccaagggcctacacactacacagactgttagattcagagcttcactcgtcgccgctgctgccactgatgttgtacttaggtttttctgctatgtacaaatcattccctcgggggctggtcggtgggcgtctctaccctgattagaactccatcttcatgtgccccgcttgtaattgaccgtgaaagctctgcgctgagacgccattctcctggctctgcccgttgtcgatgtggaaaacgctctgcagatcctcctcccagaagttcctttgctgcaagtttgtgctggcagttccatcctgaaacgcgtactgcgcgttggtcgcctgagacagagccaggtccagcgggttcaggccgcactggttctccaacccgttcggaacaaacgactggaagacgtctccttgatcgctgaatggaaaacctgagctggagctttccagggagaagactgaactcgctgaagggccacaggcttggaagatatctttttgcaggagggtaggcaggttactgaagtcaagtggattcacagttgcgagcttcatcgagaggaactcgacttgccgttgcagcgattgcacgtagtttatgatttcatcaagcatgagtgccttgccaatcaccttgttgcatcctggcaccaggtcctggagaaccttcatcctctggctgatcctctctcttctcaccctctctgcgaggctgtggctgtcggtcgcctgccctcgccgcgcccggacatggacgtagtccttgggcggctcgaccggcggcttggagctcttccccttgccctttttctgacctttgtcttcgaccgagccgtcgctcgccgtcgcctcctccaccttcggcttcaccgggctcccgccggcgcccaccctgcacttcttcccgtccggccccttggcctccccagcctgcaaaccaaaattcagaatgagaccaacgcatccgacaaactaga

SEQ ID NO: 40213 - DNA, 1250 bp, Setaria italica
  misc_feature (1)..(18): n is a, c, g, or t
  Peptide Sequence Number=SeqID_106187
nnnnnnnnnnnnnnnnnnttttttttttttttttttggttagcataataaactttttttttttccgaggagaaacatctcataggttgatttttcatcttaaataaaacgcgacagtacaaggtattcttctaataccagccagagttcttacatattagtagaggctttagaagatggcgcatgtaatatttgcaccatatctattacataatctactttaatcttgcgagatcatatgatccctatgagaagaatcaagttgccgtacatccagcataccatggaatgaatcagttcacaggcctaaactataatgacggtcagcttaggagagcttcatttgccacaggtcttgatactccctatatacaaaaacatcagccttggggatcaccagggactagaactcaatctttgtctgatcagcttgtaactgaccatcaaaatccggtgctgaaaccccattctcctggctttgctcactcacgataggcaaagtgttcggtaggccatcctcccagaagtccctttgctgcttttgaaaagcaaacgtttggttcgttgtgtggggtagagccgtgtctaacagacttagagagcactgatcctccatagcacccgagccaaaggactggaaaagatctgcttgctcgcaaaatggaaaagctgcaccagcactttccaatggaaagaccgaattcacggaagggccacatgattggtacatgtctttgtgcaggagtgtagacaggttgctgaagtcaagttgcggattaacagtagcgagtttcatggacaggaactcaacttgctgctgaagtgattgcacatagtttatgatctcatcaagcatcagtgccttgccaaccaccttgttgcatcctggcacgaggtcctgaagaaatttcatcctctggctaatcttctctcttctaaccctctctgcgaggctgtggctgtcggtcgcctgccctcgccgcgcccggacatggacgtagtccttgggcggctcgaccggcggcttggagctcttccccttccccggcttctgcccgccgccgtcctcaacggagctgtcgctcccggcctgctccggcttgggcttcacggggctctcatccttcccctcggcgccctccgtcttgcacctcttggcatccggatccttctgctccccagcctgggcagaggcctcctttgccctttgccttttggtccgtccgtcgggtcttggtctattccggtatt

SEQ ID NO: 40214 - DNA, 390 bp, Setaria italica
  Peptide Sequence Number=SeqID_106188
gagcgcgaggcgagcgagggagcccggcgagtcgtcgacgacggggatctcggcgcggagccgaggctggcgctgcctcttgagcttcttgagcgggaccgagttgttgagcggcctctgcagcgccgtggcgaggcaggaccgcgcctgcgcgacggcctcttccctcgacgacggcggcgagggcgcggcgtccgacggcggggacgacgacgcggacgagtggacgacacgccgcggctcgctgcggaggaaggtgagggagggacggagacggggtcgtcgcggtggcgcggggagcgacgggcgcgtcgggagtggcgggagcgagggtttgagcgcgcccttggagggaggaaggttcaggaggttgttcagagccattggcgc

SEQ ID NO: 40215 - DNA, 394 bp, Setaria italica
  Peptide Sequence Number=SeqID_106189
tattgtatgcaggatgctcatttcatcttgcaatttgctttaacatactagctgggctttttttgtcattctattgtttccttccacaatttcctttgcggattgttaggtcattttatcaataaattccgataacctattctgtgatatgattatatgcttattttacaattacaagaatatatgagaaactactattcaataatggaacttgtactattatgttctctttgctgttgacatttgcatatggcaagtttcttttttctaccctgtatatctgaaatatctgttgtagctgaatgattggtctatgtatgttatctttgctttctctgaagctgattgagtgaataatttggtcaatttagttgcattagctttttttaccgag

SEQ ID NO: 40216 - DNA, 580 bp, Setaria italica
  Peptide Sequence Number=SeqID_106190
tctgcatttatatggctttgaggaacattttttgggataactcctccagatgatagcactcgttcatttgatgaaccatctcctcgagaacgttttcgtacaatattgggacaaagtttatcaattttcattgcagcaccaccaaaggctctagatctttcccttgccttatttgagatatcattaagattactcctgatgcgtctgatctcttcaatggaatttgatagatttcttcctagagatggaattgatggcgaatcttctgtggtggttccaaaaatagaacttattgatttctttagatcaaaccgagatgtcttgtgatccgcagttacaggtcttaaatccacggcaagtgattgaagtagactgagagagtccactgctgctgaccttgatgagcttgatgctggaaaaatcgcataaccatcaccaccttcacgaaagctccctgacctttccaatgaagcagctgcatagggcccacgttgcgcattgaagtatccatgcccatcagggctaccggacaccaaatcagtattttgtaccagaagatgccattcgcccccaaatctgg

SEQ ID NO: 40217 - DNA, 424 bp, Setaria italica
  Peptide Sequence Number=SeqID_106191
ccaactacctaggccgaaaggacgcgcgtgctcgtccgccgccgtcccgtgctcctctctcccctctcggcaccgccgccgccccgtgctccgaagccgcgagacgtttgcggcggcaggacctacctctacctctggctgaagcggaggtgttaattatcctccatctagttgtcggcagcctcctttccggcaaatcaccgccgacgaggccgagctggttgcgggggtctcgatcccatcggacacgccgttgcggccagctgcctagggtacccgccctgccccgccgctgtcggaggccaccgtcctcgtcttcgcctggcaggcaggaccgccggagcagtcgctcggccgcggcgcctccgccctaagctccaaaccctagactagtgctacgaccgctgcggaaagggctccggca

SEQ ID NO: 40218 - DNA, 813 bp, Setaria italica
  Peptide Sequence Number=SeqID_106192
tctcgttcttctctctcccgttcccttcccctgctacagtccccaaaaggcgaaccggaggtgagcgctgttccggcaccaatcgctccggttcccctcttctccggtggccgcgtcggcgccggagagggaggggaaccgggggagtttggttgtccggctgtatatcaccttccctggtttacatctagttagggttgcttgcttgttcccatgtggatctcgcttggggattttgctgcgtccgctttcttttccggcgattcgtctgtcgttgacgattgcttggatgaagaaagcgtgagatgcctctttctcggcttcgttcccggcggtggctgtgcgttcaactccgccggtgagttcagccggagatcttttgtttttctgtttgtttgcgaaacggtgggaagcttagcatcccctctgggttgcttgtcttcgttgttggcggtggcgccggcgacggcagactccttttccagtcgctggttcttccgctggcgatggcggatctgtgcttctcttctgctttcaggcgtgcgggcggccgatgttctttcaacggaatcgaggcgtgctggtggaatccaggcgctggatcatgcggcacatccaagctttggagccttgcgtcttggcggaagatgaagatgttctggtcctggtgggcgtcgccggcgactgggacggaggaagacgacgacgcgaagcaggttatggtgtttggagttgcgttgtgtaattccaatttgtccaggggcttggctgtaaaaggtcggggatgtaatgtgctgatattgctgtttaata

SEQ ID NO: 40219 - DNA, 529 bp, Setaria italica
  misc_feature (16)..(16): n is a, c, g, or t
  Peptide Sequence Number=SeqID_106193
aaacaatctgtcctcnggcttggcatcctagcaatggcgacgtcagggaaagcgatggcctcaggcctcctcctctgcctgctcctcgtgcactccggcatggttgttcttggatcggacgactgctgggtgaacaacaacgcggactatcccatctgcttccaccagcccaagtgcctgggccactgccaggataagggcaaggtggacgggcgctgcaacagcaacttccccaaccttgtgcccatctgcgagtgcctgctccccaactgcaaccactgatcgagtactttgcatgacccgtgcagcaagtacgcagtataattacatgattacatctgttgttatatattatttggacggcctgcagcctgaaggttgccctgcgaagcaaggcgacgtctctcgtttgaaaactgtaactactagcatgggaatcctgtcgaattcctgtggaacccgtggccatttctgtaaaactcgcgcttcagaaatgaggcctgctaaatgtcattgctcattggaatcc

SEQ ID NO: 40220 - DNA, 434 bp, Setaria italica
  Peptide Sequence Number=SeqID_106194
tacaactacactgtttcactttttttttaagtatagtaaccaccaagtttttatgactgcacggatccaatgacgttctatattcagtgataaaggaaatgccttgtttctattcatgctgatcttttagctttatatggtggtgtgctgcacaaaatctggcatgcagtggagaaaaaaaagggtacgactaagggaagacaaaggaaagaaaaccctaactctagtttggctctgtacgaagttatgaatggtgcttgtcctgaacaatagccacaagggggcaatatataaatggtacaagagcagagaaataggaatacaaaaaggattctaatacccttaacaaaattcatgcttttggcataacattacggaaacagataggtgtaatcagataagacacttgccttttataagatttcaatgtaagt

SEQ ID NO: 40221 - DNA, 268 bp, Setaria italica
  Peptide Sequence Number=SeqID_106195
ttaacgacgccaaacctaccaaggccaacgtagagttctaattacttaacctcatccatatatgctagctactccaatatatatttccagttgatgggcacatgtcactgatcttgtatgcacgtttgtatgtatagtactgattgctcgaccgctattcagtggagctggggaggatttaaccctatatacatatgcatatgtgttcgttaattgtattgtaagttttatttgttaacattgattctagtacaaaaaaaaaaaaaaa

SEQ ID NO: 40222 - DNA, 458 bp, Setaria italica
  Peptide Sequence Number=SeqID_106196
taattgttctttcctacctactttctactttgcagttaccataccttcagcattctgctccttccaaggacaatcctcgagcactctatctacactagctggataaacctcctttacgcttccatcatgcacaaccactatactcacatcactcactgattcaggctcgacatcgacgccttctattggaacaacattttcaatctctgtaggcttcacaacacctatgtcttctacggtagcaacaatgttttcaatctctaaaggcttctcaacaccaaagtcttccaccgcttcacttgcacttaccagtccttcgacatcttgctctttccaaggactacccttgaccacattgtctctgctagctggatcaacctcctttacgcttccatcatgcacaatcactattcttggctcgctggctggctcaggcttgatatcgacgccttctacaa

SEQ ID NO: 40223 - DNA, 369 bp, Setaria italica
  Peptide Sequence Number=SeqID_106197
atttgcctgcctctcccctcccctccccccgaattcgagccggaggcagatctacggcggcggcgggcgaggatggcggtgaactgggagctgcggggctgctgcgaccgcgaccagaggatcttcatcgccgccgtcggcgtctccaccgtcgtcatcctcctcctgtggaggacgttcctgctcacgccgttcaagctcatcaccgtcttcctccacgagaccagccacgcgctcgcctgcaagctcacctgcggcgatgtcgaaggtatgcaggtccatgcaaatgagggtggcgttactcaaactcggggtggcatatattggataatcttgcccgctggatatctgggttcatcattttgggga

SEQ ID NO: 40224 - DNA, 440 bp, Setaria italica
  Peptide Sequence Number=SeqID_106198
ggccaatccacctttattctcttatttgatgctgctgttttgttttgaattgcagatctgggttcatcattttggggaatgatcttcatacttgcatccacaaatctcctcactacgagaattgcagcgggttgtttcatacttgcattggttattgttctttttgttgcagataatgtaagttcactaaaatatgtttcattgttgcaaattatgactttcttcatttgtcttgtcctacttgtccacacagtaatctcgatcatttaattaagcgctatcatctcattttttaattgtgcagtggtttcttcgctggctctgcattggtatgaatagtcatgatttcatctccgtttaagaccttactctgcagcatgctacttactatgttattatccaggattcgttgtattcatcgctgttgtttgggtcataca

SEQ ID NO: 40225 - DNA, 1624 bp, Setaria italica
  misc_feature (1513)..(1624): n is a, c, g, or t
  Peptide Sequence Number=SeqID_106199
tgcttctgaagtctgctattaggaaggcaaccacatgatcaaatgtgaaactattggggttgatctgtcattggtttattaaagattataaaggagcagcaaacaattgcttagatgtttatttcatatttagtatggttggtccatagttccttgtctttgtttttccttcattccatctttagtttatactttggttttaagataaattcagcctacctttcgaaagacagtcttttgatgtgcttcgagttggacatttagtgcttcccccgtgttaaacagttcaatttttggatacccctgattgtatctaaggacaatcctgtttgtaagaaatgttccagacatttcaaaacattttcttagttgcttatctcgctctatactttatgatatttttaccggatgtggtcctttgactaatttggagttggtcatttgtttcattgcttatacataatattttggccagcttctgccaactaccagatctagacattatatctactcagtgttgatgccagataagataatgcctcaaatgttcattaggttcatgttatatttcaatttgattcttgtgcgcatttgttcaaaaaatatttcaatttcattggcttcttcaggtcgaaggtatgcaggtccatgcaaatgagggtggcgttactcaaactcggggtggcatatattggataatcttgcccgctggatatctgggttcatcattttggggaatgatcttcatacttgcatccacaaatctcctcactacgagaattgcagcgggatgtttcatacttgcattggttattgttctttttgttgcagataattggtttcttcgctggctctgcattggattcgttgtattcatcgctgttgtttgggtcatacaagaatttacatctttccatattctgaaatatgtgatcttattcataggtgtgatgaacagcttattttcagtttatgatatttatgatgacttgatatcccgaagagttcattcaagtgatgctgagaagtttgctgaaatctgcccttgcccttgcaatggttttgcatggggtgttatatggggcttcatttcatttatttttctctgtgcgtcgatatatcttggactggtcatattgtcttgaggatttcaacctcttgccgttttgatctgacaaccaactcaggtgggctttttctgagctcccattgcaccagatattggttgaagcttacattgttctggtagttgtacagagttcttggagggtaaacctgtatatccattggaattaaattggtgaggattattcatgcaattcttccattttagcgattctatagatacattttgcttagcgtttgtatttatggctggtagccttttctatttaggcactgtatatcataatatcttgccttacttctcattcacccgattcaaaagcaatgcagcattgtgcatttcatctggcgcccattgccagaacgatccaaaaaaaaaaaaaaaaannnnnnnnnnnnnnnnnnnnnnnnnnnnnnnnnnnnnnnnnnnnnnnnnnnnnnnnnnnnnnnnnnnnnnnnnnnnnnnnnnnnnnnnnnnnnnnnnnnnnnnnnnnnnnnn

SEQ ID NO: 40226 - DNA, 455 bp, Setaria italica
  Peptide Sequence Number=SeqID_106200
agaaactgaggtaggggacacaggaactccctgtactttctgtaccatttttctataaactgaaaacttctttaaaaataattttttaaaaacctgaaaattaagggaaaaaaaaagcctacatttgttgagctcccacaaaagatacataggatatggctacagtcccaggggacagacgttcggctgccggaaggtgcagccctgcaatggaggacaggctgtctcccagggtggacggacagacacgtgaagtgtgaaggtgccagggcagatggccaagggaaatgtcctcggtgcagtggggattagggcctggagcaccgcctcgaaggggaactggtgaggtggatttggggttgaggtctaagaacaaagccctctcagggccagggtatgggagaggtggagggaggagggcccagggcagtacccgggaggcgtggaccctcccc

SEQ ID NO: 40227 - DNA, 351 bp, Setaria italica
  Peptide Sequence Number=SeqID_106201
ccgcacggtcacgggctctcgtgtgtcactcccttcccatcaggcgccatcacagtctcacgagtgagagacgcatcgaggacaatggccgctgcttgtagccgctgcctgcaggcggtgctgctctgggcggcgctctcgccgtggacgctcgccttagaggcggccgcggccgtgccggcaaagctcaaggccgcgccggcgcctgtggtggccgggccggtgtccaaggtggaggacgccaggatgtttcagatatactacggccagagcttcaaggtcatcaagaactccggcgacggcaagagctacctgctcatgcagtgcgcatgtgcagaacacgtccaagat

SEQ ID NO: 40228 - DNA, 536 bp, Setaria italica
  misc_feature (490)..(490): n is a, c, g, or t
  Peptide Sequence Number=SeqID_106202
gctgagaatagtttcacagggagtagtcagcggttgtggcttatgagttataatatttgagatttcttcataagaagacctactaaatggataaatctccagcaatttcgtattccttctgcaacgacctgtcagcggtaatccaatgcgccagcacccaatgtgaatggaaatgttagagagcctgcaatgcacagaatgcacttactgcatagaaataataagcatttaaatggggaagaagacaatacttgagcacctaccatcagcggagccattaagaaaattagtatgaccgtgaatgccttcggcgacaatattgtcaactgaactttgagttcggtcacaattagcaccaataaggtcaactatgtcagggggcctggtttgaataacttgctctacttgatccatcagtatgtttgattggttttccataaatgtgaatgattctgcagaggttgcagccctagccgctgctatctgaatntgcgacacagtaattgtaacgtttgctgagcagactcaggttcaaa

SEQ ID NO: 40229 - DNA, 501 bp, Setaria italica
  Peptide Sequence Number=SeqID_106203
aagctcagtaaaccaggccatgatcaacgtatctggttgcttaattccaactcatgaaaaacgacttcccagcaaagtatatacatgtattgctggctaaggggaaagaatgcttgactttcttcaggtgtagagctacagcggaaacaatattaggcctgcaatgtaaatggataaatctccagcaatttcgtattccttctgcaacgacctgtgcaagtagatgtgccattgttaattgcagctccataattaatgcgcagtcaccaacaaattagtagaaatccagttatgtcatcctgcctaaaaagacttggtctgtcagcggtaatccaatgcgccagcacccaatgtgaatggaaatgttagagagccatcagcggagccattaagaaaattagtatgaccgtgaatgccttcggcgacaatattgtcaactgaactttgagttcggtcacaattagcaccaaaataaaggtctatgctaatagtacaagggga

SEQ ID NO: 40230 - DNA, 1078 bp, Setaria italica
  Peptide Sequence Number=SeqID_106204
ctgcaatgtaaatggataaatctccagcaatttcgtattccttctgcaacgacctgtcagcggtaatccaatgcgccagcacccaatgtgaatggaaatgttagagagccatcagcggagccattaagaaaattagtatgaccgtgaatgccttcggcgacaatattgtcaactgaactttgagttcggtcacaattagcaccaataaggtcaactatgtcagggggcctggtttgaataacttgctctacttgatccatcagtatgtttgattggttttccataaatgtgaatgattctgcagaggttgcagccctagccgctgctatactgaatatgcgacacagtaaattgtaacgttttgtctgagcagactcaggttcaaatgagaaagcacaaccaccatttgaagaccctgatttggcatcctttgtccaccttttcacaatgtactgaacaggaaggtccttgatattccttgtgtcaagtaccttcagcatatggcgacatgggatgccaataaactcaaacgtcttacaagtacagttcatcatggaattgtgtgaatcgaatttaacaaaatgatcttttggattgtcttcaacacttatcctgtactcgaaaatagtgcccatctcaccacagttgtaaagcatgcaatccatgtataactcaaattccctctcaaacattttaaaggcagcaggtgtatatacattggcagcttgcctcaacattcgcataggtggcttctttgtgctttgattagcattcacatcagcttccagctctgcagatcgacgatcacataatagtctttcaaactgctcaaagaagttcaaaaggtcatattccaagcataaatgttttttcaactcacttgtcaagctttccttttgttggacacttttcatatcagcataaaatgcatcgcgaccatatggcaatgcccatttctccttaattgagtacaaatctgctagccattgattatcttctaggtcatatttttccaacatttccttccatgctgtcaaaaactcatcctcatcctcacaatcaaatagcatctcttgaa

SEQ ID NO: 40231 - DNA, 423 bp, Setaria italica
  Peptide Sequence Number=SeqID_106205
cagattcaaagtctactgtagattttgtccattttggtgatgtagtgtgttttgattcaggatatgcattgcaaggctatggtaggccacttgctctgtttacaggtttgaatcatcataagcaaacagttatctttggtgctgcattactttatgatgaaagtaatgaggctttcagatggttattagatactttcaagatggcaatgaatggaaatcctaagacattgttaactgatagatctgctgcaataagtgaagctgttgcagccacattacctgctacagcccatcgttattgtgtgtggcaaatttaccaaaatgctcttcagcagttgagtcaagctttccacggttcaaaaactctagaatgcaacttcaagagatgcttatttgattgtgaggatgaggatgaagtttttt

SEQ ID NO: 40232 - DNA, 724 bp, Setaria italica
  Peptide Sequence Number=SeqID_106206
ggctccggcgccggatcgcgcagctggctcatccatctcgaggggggaggctggtgcgacaccgtgcgcagctgcgccggccgcaccctgaccgacttcggttcatccaagttcatgcagagacagatcaacttcaccgggattcttagcaacgatccggtactgaaccccgatttctacagctggaacagagtgtttgttcgatactgcgacggggcatcgttcgctggggattcccaacacgaggatggaaacggcacgctcttcttcagaggccggcgcatctgggaggcggtccttgacgagctcatgcagaaagggctcgcccattccaaacaggccttgctgacggggtgctctgctggtggtctggctacgctgctgcactgcaacgatttccgtgcgcggtttcctcaggaggtttcggtgaagtgcctcccggatgccggattcttccttgacgcaaaggttttgtcagggcagcggcacatgcggtctgtgtacaatggagtcgttcaccttcagaatgttactaaagttctgcccaaggactgcctcctagcgaacaaggatccgacagagtgtttctttcctgcggagattatcaagagcatcagcacgcccacgtttatcgtaaactctgcttacgacacttggcaggtacagaatgttgttgcgacagacagctcctctcctgatgagtcatggcgccgctgcagagctg

SEQ ID NO: 40233 - DNA, 821 bp, Setaria italica
  Peptide Sequence Number=SeqID_106207
aggtttcggtgaagtgcctcccggatgccggattctccttgacgcgtgagtccatccatcaactctgcaattggattcgttagagaagggatcctcatcacttatgctttgtactgcggcgtgcttacggaaaggatttgtcagggcagcggcacatgcggtctgtgtacaatggagtcgttcaccttcagaatgttactaaagttctgcccaaggactgcctcctagcgaacaaggatccgacagagtgtttctttcctgcggagattatcaagagcatcagcacgcccacgtttatcgtaaactctgcttacgacacttggcaggtacagaatgttgttgcgacagacagctcctctcctgatgagtcatggcgccgctgcagagctgacattcgcagctgcaactcctcacagatacaagtgctcaatgaattcaggaaggaaatggtggatggcctcacggctgtcgaggacaacaccaactgcagctggttcatcgattcatgcttcacccactgccaggcatggttcgataactcaccatggaaccatccagtctccccaaggctaggaagcaagacactggtggaggctgttggggactggtactttggtaggagccaaaaccaggttgtgagagagattggctgcgagtatccttgcaatcccacatgcaacagcgacaagtttccaacttaatttatgatggagctgtgtactgcggcagtggcttagcgaatttaacttatggtattcattgtaaagttaaaaaaagagtaaatttccccggttggttgttttaacattaaaaaaaaaaaa

SEQ ID NO: 40234 - DNA, 462 bp, Setaria italica
  Peptide Sequence Number=SeqID_106208
gtacagcatggtgcaatacagcggtaggccagcagcagtgcagcaccagtttgggagcaatcaagcaagtgcctaagttttcaccagggactgggaatttgcagggcaagggagttttgattcttgcacaggaagcttactggatgcttccatcccaaattgatctcagatttccattttccttcgccggtttcaagcgatcatttgaacagtggggtcatggtctgatgtggaagccactcggattgtgattattttctcctcatgggtcaaaatcaggtcttggctcgacttgaaaagacaatgtagcgttgcctttgtttgaaaatgaaagtgcaggcttcatgtgagaggttggcacttgctccctaaggcctcatttagaagtctcaaactcctcaaggatcccagacctttcccggggaagggaggccacaggggcagaagccgcgggccagcaaa

SEQ ID NO: 40235 - DNA, 410 bp, Setaria italica
  Peptide Sequence Number=SeqID_106209
gacagtgcatttctgcatttcttcagtcggtccttctgagtgaccaacataagtttgaatagttgcagcatgagttaatacatccggttcttgcctgagagttctgttattcagaccagtttcaacctcgcaatcactgatcaccaagatgtcttcaggtgatggcaacatatcaactttagttgcagctccaataatggcttcattgcttccacaactcactgcaccctggacgacattgtggaacaagaaatcgccatattctggtctggtattattttcctcgttagaaataacaaggccttcctcttcagtttgctggagatatttgtttagtgccagtttggcagctgaaccacaggatgacccaccaaccatacgtaaagagccggtgaattcatcagataagg

SEQ ID NO: 40236 - DNA, 451 bp, Setaria italica
  Peptide Sequence Number=SeqID_106210
gtgcgatatcaattggattaaatttataccattctcatcacgctgtagtgggcagcaaatgaattgctttccttcctttgtgggtttgacttcggcgaagaagagctgataaacccaagacctcttttctctcttttctctgaggtaaatggaagactttttcttcatggtaaaattgtagtggtggtacgactttgaggaggagtcatgtataagacattgctggtcaagtttgacaaactcatacttgggaccctgaaacattgacatctattaattagaatgctcccgaattcatcgttagcttaggatcataaaacaattatgacttaaaagaatccatatgaccaaaccccttaggtgtaaatgaattgtgaaattgcacatacttgataaccacttgatgctttatagattttaaatgcttgaaaaacctcctttttcatccatt

SEQ ID NO: 40237 - DNA, 544 bp, Setaria italica
  misc_feature (498)..(544): n is a, c, g, or t
  Peptide Sequence Number=SeqID_106211
ttccagctatgtgtgctaccatataaaatcctgactcccttcaagtgtcatgtgattttatttgtttaatgatcatatatatgatgatttttgtgatcttaggatctcagggtatgcttactattttgtctggttcttttgcagctttaaaagagtctagtgtctcctgaggaaataattccatggtaagtaaaatttaaaatataaatcgcttgtagagtccatacaagtcatcactgttgatttgtctgaacttgtgatctgttttgtgttgtgcatgtctatgcttctccagtgtttttgtgctccaaagactgacatagtcttactgtttttattgttgtgtagtattttcttttgtaaacttttttttagaacaattaaccaaggcccctgcaactgcactattttattttataaaataaagagttttatgtacaagcactacagaagtagaatgtacgaaaggtaaaatctattacagactaccaaagaacnnnnnnnnnnnnnnnnnnnnnnnnnnnnnnnnnnnnnnnnnnnnnnn

SEQ ID NO: 40238 - DNA, 600 bp, Setaria italica
  misc_feature (554)..(554): n is a, c, g, or t
  misc_feature (563)..(563): n is a, c, g, or t
  misc_feature (567)..(567): n is a, c, g, or t
  misc_feature (583)..(583): n is a, c, g, or t
  Peptide Sequence Number=SeqID_106212
aggaatgaggtgttgggttatgactcgtgaaggaagtggaatggatacaataagctcattttgttattgcattttactattgccctgaaaaatcagtcctttcttaggtagagatagcattgcatttaggttgaaacatagcatcatgtttaattagtcattgtctgaaatataaattagcatggcaagtagctaggtgtgagatcgtaattttattgaaaccattgatattatttgattgtgtaggtaagaaaatgaattgctatttccttttagaataaaaaagttctaggtcttgtatgaaaactaaaataagtatataatctgttttgtgccatccaattaccaatatcggtagcatattgtaggttttactgaaggtatgtagtaatatgatgaggcctcgtatcctaacctgtgattttatattgacatcattttctttttcttgaaccattgcattattgactggttggatggatggtcagttggcagtgtgagggatggtggtagtgctgatggaatagttgatgctgggaatggcagcaaagggnggttgccgntagntgctagcagttgacgntgggaagtggcagcaaa

SEQ ID NO: 40239 - DNA, 1251 bp, Setaria italica
  misc_feature (1)..(19): n is a, c, g, or t
  Peptide Sequence Number=SeqID_106213
nnnnnnnnnnnnnnnnnnngcgtcagataatctgagagatgaagcaactgcaatgacacaatcacacaactgaatctgaagatgagacaaatggattcagctccagcggcaggttagcacttggcataatcttgcaatagctacgaaagaatacgcaacactagcacaaaaaaggtgatagtacagtcctctaatgtcactacaactgctccacaaacgaataaacagatactcgcaatgtacaaataggctaagacagaagctgctggatccctgacttttggtcagccgttagattagtcgggaacttgatctgaaacttgatccgcaagttccccttcttagacggctcccttgtgatcggcatgccttcgccttgcacaacttcttcataggtaggactgacaacggatttcacgggaatagtcaggtttcgtccatccagagttgtcaattggactgtgcagcccgttaatgcctccacaagagagatcttatgtgtgtaaataagatcgttaccatctctcttgaacttagggtgtgcccgttcttctattatgaatactagatctgatggtacaacattgcgcatctcgttgcctttctcaggaaaggtgatttttgtgcccttcttccatccaggcttgatatctatcgtcaggatctcctcaacatttgttggtttcccggcggcgtcaagtacatccctggagatcttcatcttcttagtggcgcccttgtacaggtcctctagactgcaagccagctgccgctcgatcggcggcgccttcctctgcaaccccgcgctagacgtctcccctggtccagcggcgctgccgaaccccgggaacccgtggggaacgcttccgccgggggttcggggacctgccccggggaacgcgccgccgaatatctcggagaagatctcctcggcgctccttgggttgaagcggaacccgtgggcgccggcgccgtgcgtggaggcggagggcgggggcgcgccggccttgaggccgtcctcgccgtactggtcgtagatggcgcgcttctgcgggtcgctgagcacgtcgtaggcctcggagacctgcttgaagagggagtcggcctgcggcgaggggttcttgtccgggtggtacttcatggcgagcctgcgataggccttcttgagctcgtcgtcggtggcgccgcggccgacgccgagcaccttgtagtagtccacccccatcggcggcggctgctgctgtcgccggc

SEQ ID NO: 40240 - DNA, 407 bp, Setaria italica
  Peptide Sequence Number=SeqID_106214
ttacttttccttctttcctgtcatcatcaactcgcaggactatacaaggaacaagctgaccaacatgaacgacttcagcacatatactgttctcgctatccttacgattttcatgcaaagcgatgtcacatacatcctctgagcgaacaaaccctctcattccaccaggtagacttaatacaatatctttttggttaacctcaattacaacaccccagagcttcatatttggtgaaacattcttcagtgtgatgcgattagcaaatcgtgggagcttcccggtggtggccccgccgaagagcgtccccaagtcatcatccgcaccgaaaccagacgactcgccggccttcctcttcctcttccccttcttcccctcctctcgaaatcctcctcggcctccgcgcggg

SEQ ID NO: 40241 - DNA, 697 bp, Setaria italica
  Peptide Sequence Number=SeqID_106215
gatgaagctcttagcagttttagaagcggagaaacacgcattctcctatcgacacaagtgattgagattggggtcgatgttcctgatgcttccatgatggttgtcatgaatgccgaaagatttggaatcgctcagctgcaccagctgcgaggaagagtagggcgcggcaaaaggaaatccagatgcatattcctggcttccacgccaagcacactgccaaggctcaaggtgcttgagaaatcagctgatgggttttacctagctaacgcagacctgctgctgcgtggccctgggaacctacttggcaaaaaaacagtctggccatcttccggaattcccaatagctagactggagattgatggcggtattcttcaagaggcacatcatgctgcattgaaagtgttggccgcaagcaacgatctaacattgtatccacgtctgaaggtggagctcagcatgaggcagccattgtgcattcttggagattgatctatgcagccgtgacaagtgattcaaagaggagatataggcagccttagtttgcatgtagatatagtagtactgctcgcattgttggcaaagccggcatgccatctggtgagcaaaggcgtgcactgtgtatggttggctattgctaacgacacaattagtatccatggtttacggctaggactactgggtctctgatcctatttg

SEQ ID NO: 40242 - DNA, 394 bp, Setaria italica
  Peptide Sequence Number=SeqID_106216
taaggttaaagtaaggtagattgggccaggccccttcttattccttcttccatctttcttttttcccttttcattttttcttccttgtccatcagctattttgcagtttcttagatttatatggcgtcaccttgcctggccttataagtgcctaggcatcacgtatgctattggaagggtggcttgccatgcttttccttaccactttaaaaaccatggaatatacagagaaataggggccaaaatacaagtgcacagtaaaaaagtgtttctgcagggccaaatagtgacacaaactttcagcagaaaagtttgcaaacatattagcaaatccaggatatgtacaacaacatattttacccaaagaacagtagctctttgagtcaacctaaag

SEQ ID NO: 40243 - DNA, 690 bp, Setaria italica
  Peptide Sequence Number=SeqID_106217
tttccaacctaaccaaacgaaacaaacccttgaacaacaacatgaactactaacttgtggctgctcctcactcttgcttcctccatttgtactgtatcccttgttactcctgtaagataagaggatcattgccaatttgaggaaggtgaggaatggcaaggtcaattgccgatccagtaaatgggaggaaaaacatcggatccgtggcctccatgtgcagtgtcatccagcggatctgctcacctaatgcgcatatccctgttgcctccaggcataccatgtttgtcaggccaggggctaagtaatggattgtggctatggaatgaattctacaatatgtgtaattatgtaagaagatagctttagctctgtggctttctgcattttactcttgttttgtttacttgagtaagtcaaatgacccttgcccatacttatttgtaaaactatcaaagatgctctgtttctgtatcaaattgcatacaatgaaattagctgcattctatgtttccttattgtgacaactaccaaatccactttaaaagcgtgtgtaatcactcacttttcaccaaaacactattcagttgggtgattcttcaaaaaactattcagttgggtgatagcttgcataggtgcatgctactttttatacattactaataaaagaacctcatttcaaaagcctgaact

SEQ ID NO: 40244 - DNA, 358 bp, Setaria italica
  Peptide Sequence Number=SeqID_106218
gggaaccatggctgcgccggccggttgagctgggagggcgggggcaccagggccatggccatggtcgcggccgcggcctcgcctcgcttccgccgcttcggcgagccgctcgtcgagcaggaggacgaggaggaggtggagaaggacgagtccgacgaggtcgcaggctcgggcgactgtctcttgtccccggcggctgcggcggcggtggcggccgcgatctccgagccgatgcggagcgggaagttgaggagcgcgcgggagccgcgcatgcggtaggcggcgcggtcgtaggcgagcgcggcgtcctcggcggtgtcgtaggtgccgagccacacgcgcgcgccgttctttgccg

SEQ ID NO: 40245 - DNA, 768 bp, Setaria italica
  Peptide Sequence Number=SeqID_106219
ccggctcgggtgacggccgcttctcccccacggcggtggcggtggccgcggccgcggccgcggcggcgatctcggagccgatgcggagcgggaagttgaggagcgcgcgggagccgcgcatgcggtaggcggcgcggtcgtaggcgagcgcggcgtcctcggcggtgtcgtaggtgccgagccacacgcgcgcgccgttctttgccgggtccctgatctccgccgcgaacttgccccacggccgctgccgcacgccccggtagtgcttgcccctcgccacgcccaccgcggcctccccctccctcctgggcgtcgccgcgtcgctgctcgcgctcggcgtcatgggctccggcggctccaggaggccgaagccgtcgtaggagtaggaggagtccggggacgggagcggctcgggcttgacctgcgcgaaggagccgtcggggagccagccggtggcgaaggcgtcccgcagcgcctcgaacacgaccatgtcgtcagcgtcgtcggtgcggaacgggagcgagccgctccactggtccgccaccaggcttccgaagctctcgctccggcggcacgccggcggctcctccaggaggtgctgccggatggtgtccagcaccagcgcctccgacggctcctccaagaggtgctcccggatggtgttcagcagcatctcttcgctctctgttccgggctggggctggtggcgagcgccctctctgtttagctgaggaaacccaagtgagctgtggtgtggagtgatcgagt

SEQ ID NO: 40246 - DNA, 794 bp, Setaria italica
  Peptide Sequence Number=SeqID_106220
tcaagtgtgagtagtcgcgatcacggactgtacttggacggagcagtcgtctcttgcgctctttgagatgccagagttgcgaaccctccgctactcaggtgcaatggcaaccaggcacataattgatggcgaagtttctttggacgaagtccttcttgccatcgagaagccacaggtcaagccccgggaggctactctcagagagcttattgctcttgttggcaatgtacggagccttttgctctcaccgtggtgcattgagcaatttgaggagtggtggaaggtgcggttagacagggtgaggcagttgtcatgcataattgagaggagggaagaaggtgctttatccattgcaccattgctctcaaattgcccaaatgtggaagagctccgtgtgtctgttgtgccatcacagggcaaacgtagacggtgtagtgatggagagtgccatggtgtgctatgtagcaagggggtggcggtgaagcatctcaagggagttaggatgaagtacattgatgagagcaaaagtggattagaactggtgaagctcctgctcaagaatgcaccccaattggagacgatgaacattgtgccttccatggatggccttgagcaggccaagtttaggcgcagggtgttgaagttcaggaagtcctctcggaatgccagcatccagttttgcacagctggatgatgtgtagtccattagcaatgctcaatgttgcagtccagaaagtaagaaattatttggcaacagttctaattaatcttcctgtcctcgtcccgttacttaa

SEQ ID NO: 40247 - DNA, 370 bp, Setaria italica
  Peptide Sequence Number=SeqID_106221
gtggagcggaggaggacgaggggcgggagccagagggtggggctctccatcaggaaccacgcgagcggggcccggagcgcggggccccagcccgggcgcgagagcttgccgtacggcgcggagacgtagcggagcgccagcacggtgagcgggctgatgaggtagagcgccagcaggcaccgcgcgaaaaccgcgtcgcccgcggccgccgccgccgcctggtcggccatcttctcccccgacggaggtttttagccctttaggggggttggggccgggtgcggcggtggcggtggcggtggcgagagtgcggggtgcggaggcgagcggatagcggcggcgctcgggcgttaattgcgaggggtttggg

SEQ ID NO: 40248 - DNA, 463 bp, Setaria italica
  Peptide Sequence Number=SeqID_106222
aacactgtaaactgagtattttagactacatgagaatcgagtagtgcagtagcatcctctatataatgtagaccataactccgaacatttcggggtaactcctatcaacaataaattttattggcaccttgtttcattgttcggtggaaaagcttcccggggtgtcaattttatggcagcattgtcccaaaagcgacttagcaagtattgattactccacaacattacacccaaagcagcggggacttgcatatcctaaaagcgagtagaaattctgatcctgcactgaggaatggcaggcaagcaaataacctaggcctggtgtctagccgtctggtgacactgtgacagtgactggttcattgctgaaaacatgtataacaccacatcactctgcgtgctcatgaaatgctcgcgcgtgagactgcaatcccgcgtagcttgcacactgttccatcccgcg

SEQ ID NO: 40249 - DNA, 379 bp, Setaria italica
  Peptide Sequence Number=SeqID_106223
tagaagggagggagggcgagctgcagttcgtgcagatgaagtacgccgacgaggcctgcaagctgacggtggtgcagaggcagctcaaggagctgacagaggagaacaagcagctgagcgatgctaactgtgaatcagagtcttgggcttctgctctgatttctgaactggagcagttcagggctgccaagcagaacggtgcatccatcatggcgtcatctgagatgaacttgctcgacgatttcgcagagatcgagaaaatggagatggcgtcaggtgatctgaagggcaatgtgccacgtgcatctctgaagaaggcggatatggcaccggttacgccagagaagagtggcaatgatcctgccgtgaatggtaccat

SEQ ID NO: 40250 - DNA, 261 bp, Setaria italica
  Peptide Sequence Number=SeqID_106224
tcgccctctggctcacgtccgtggttgtcggcgccatcaacgccgtgccgctgctccccaaaatcttggagctcgttgggctcggctacaccggctggttcgtctaccgctacctcctcttcaaggagagccaggaagacgaagccacagcagagagtgccaccagtggtcagagcacagatgataacaaagggaaggagagaccaaagtttatgagagatttcaagcctaactactcgttttgaggctggccaaaaaagg

SEQ ID NO: 40251 - DNA, 382 bp, Setaria italica
  Peptide Sequence Number=SeqID_106225
ctgtgaaaaaacatacggattttgtagtactaacatagcaggcttacttcttgacaatgtttctgcaattctacttggcgtccctagatagaaaattgtgtgactggatgtcccgaacgttggagagttcatccaccgcgcctccccgccgtcccacgcggctccgccctcctcccgcgccgcaccgcctgccagcttcgcctccaagatgcgccgaggctgtccctgctccgcgtgaaggccgcctccgaggacacatcggcctccggcgacgagctcatcgaggacctcaaagccaagtgggacgccgttgaggacaagcccaccgtcctcttggctttgaggtcctcgaagagctagcgcttattctgttccggcgttg

SEQ ID NO: 40252 - DNA, 407 bp, Setaria italica
  misc_feature (165)..(165): n is a, c, g, or t
  Peptide Sequence Number=SeqID_106226
tcctctccagtttaggatcaacgatctttgttggcactgggacaatctcatccttaaattttccagaagccgtggctgcagcagctctcctatgagactcagcctgataaaatatgaagctttgatttccatcttaatcgaaagaaagaatgataaaattaaacngtttgtgcctaaggaactcacagcagcctgatcttgctcttgcctggtgacaccatatcgatgagcaacattttcagaagtaattcccatgggcagaagacaatcctgtgctttctggaatgcacttatcctggggtttacttgtccttcccaaccaatggaatttatcgacatggattccagaccagcaccaatccctatgtcatagaaaccagcctttatagcagcggcgacatcagcta

SEQ ID NO: 40253 - DNA, 767 bp, Setaria italica
  Peptide Sequence Number=SeqID_106227
ttttttttttttttttgtaggaactcatttgtctcttcagatccgggaaataagccaataacagaacaagctcagaacattgagctttttggtcacaacacccttttctctctctctcgttttcatccaagggtggctacaacaggatactgtatgatgcccttttattctcgtatcgtagtgtctgtgaaaaaacatacggattttgtagtactaacatagcaggcttacttcttgacaatgtttctgcaattctacttggcgtccctagatagaaaattgtgtgactggatgtcccgaacgttggagagttcatccaccgtgtctccccgctcaaacacagctgctgcgcccatcccagatcctgcaatcgacacaaagcaatatggtcaaattacatttacgcgttacgcatccttttgcctttgcaaatgcaaatgcaagtatctaacaacgagcatgatggagataataaatctaaccgatgcacatggtgacgacaccaaatctgcagtctctgcctcggcgcttcatttcattcagaagagtagccacacaccgtgcacctgaacaacaaaaagaaaccactagcttatatgactttgctcagatgacctggtaacaggtaccacaatggcagcggtactctattttcctgacaatctcgcatacaagtataattcagttacctgttgcacccagagggtgtcccatggcaatcgcgcctccattcacatttacttggatcggtccaatcccagcttgtt

SEQ ID NO: 40254 - DNA, 1206 bp, Setaria italica
  Peptide Sequence Number=SeqID_106228
ttttttttttttttttttttttttgttttagaatatgagatgtcttcgcatcgaaatcaaatggatcactgcaccacggccaaataaaagtcacaaatacacacaaggcaacacactctcaattctccacaccacacgaccaccagctcggctctcactaaaccccatccactcctttatcatcgtctccctccctctcatctccttcccctccattctcagctcagtcctcctgccatcaatggcaaatgcttctctccagtccttacttcttccccaacaccattctttcgtcaacactggcggcagccatgagagctccccttctgctctgctcaagctctccacaaacaacagcggcagcatttccttcaggctctactcaaacacctccccctcggtgaccacaacctcgacggccaactcatcagctccgactccagtcaccccggcctgcggcggctgactcgccacccaccccctccatagacctcctcggccgccagctcgcagcaggggactaccgccaggccgatgagaccacccgtgcgctcctcatcgagctcgcaggggagtccgcacggcgccgagggtacgtcttcttctccgaggtccagttcatctctgctgaggacctccaggccattgacaagctctggaaggagcacagcaatggcaagttcgggtacagtgttcagcggcggctttgggagaagtcacggcgtgacttcacccgcttcttcatcaaggttggctggatgaagaagctagacaccgagatagagcagtacaactacagagcgttccctgatgagttcatgtgggagattaaggatgacacacctgagggtcacctgccgctcaccaatgccctcagggggacacagctcctggggaacatcctcacccacccggcctttgaggaggagagccaggaagacgaagccacagcagagagtgccaccagtggtcagagcacagatgataacaaagggaaggagagaccaaagtttatgagagatttcaagcctaactactcgttttgaggctggccaaaaaggcatgggtgtttgtgatgcagagatgctggcatggtgcaattgatttaaaagaacatgtatctgtagttctgtttgtcttactttgtcttgaacatgcatgaaaaaatgtgcaatatattatgagtataattggttacaaaaaaaa

SEQ ID NO: 40255 - DNA, 856 bp, Setaria italica
  misc_feature (845)..(845): n is a, c, g, or t
  Peptide Sequence Number=SeqID_106229
gcacacagcaagagagcagagcgcgagcgaaaaaaaggaagaggccgagaagcgcttcggctagccgtagcgataagggtagagtagtagctggtgccaccggcggcaatggcggccacggcgtactccgtggcgctcctcggcggcgcgcgcctccccgcccgtcccacgcggctccgccctcctcccgcgccgcaccgcctgccagcttcgcctccaagatgcgccgaggctgtccctgctccgcgtgaaggccgcctccgaggacacatcggcctccggcgacgagctcatcgaggacctcaaagccaagtgggacgccgttgaggacaagcccaccgtcctcttgtacggcggcggcgccgtcgtcgccctctggctcacgtccgtggttgtcggcgccatcaacgccgtgccgctgcctccccaaaatcttggagctcgttgggctcggctacaccggctggttcgtctaccgctacctcctcttcaaggagagccggaaagagttggctactgacattgagaccttgaagaagaagatcgccggaacagaataagcgctagctcttgggagagttttgggtggttctttcttcttgggggaaaaatatttaacgggagaaccgtctgcttgagtactactgcccatgtgtgctatatatctgtatacaaaggaagctttgttgtgttgtgcagtaacattgtagtttaaatgtatcgcaccaccagtttgtttaatctgtctcttcctctaccaaatttgtgagtacatgtacacacaaaatacataaaaccaagaaaaatagcatgcgtaatctatatccaacaaaaaaaaaaaaaanaaaacgtgaga

SEQ ID NO: 40256 - DNA, 435 bp, Setaria italica
  Peptide Sequence Number=SeqID_106230
gcgaaagaaagcgaggtgctatgttctgtgggtctatctccttatgaggagatagacccacagaacatagcacccaagcgaaagaaagcgaggttcatgataccaaagagcgcccaggtggacagcgaggtgcgccgtgagctgcaggagctcacggacgcaagggagacaggcatgtccttcattatggggcactcgtacatgaaggcgaagagcggatcatgattcgtcaagcggattgccataaacttcatctacgagttcctgacgaggaatagccgaggccctgcctacgcggctaacgtgcctcatgtttccacccttgaggtagggatggtttgccaagtctgatgatagtgactatcagcatgccaagttgtatatatacaggtatatgaagatgaactatttctagcaacctagctctatacaact

SEQ ID NO: 40257 - DNA, 432 bp, Setaria italica
  misc_feature (356)..(356): n is a, c, g, or t
  Peptide Sequence Number=SeqID_106231
ctacggcgtcctctctctcgtcttctggacgctcaccctcgtcaccctcctcaagtacgtgctcgtcgtgctgcgcgccgacgacgacggcgagggcgggaccttcgcgctctactccctcatatgccgccaggtcggcgcggggctcctccctggcggcgacggcgacgatgacctcaaggagcagcgcaacggcgcggcgccgccgcccgcgtcgagcgttcgcaaggcgctgcagcagcgcaggggggctgcagtggctgctcctgctgttcgccctgctcgggacgtccatggtcatcggcgacggcgtgctcacccctgctgtctctggtcggcggtcgcacctccccttntagcctgattgttaactagttacaatcgaatcctatcaagagtcatgagtctgacctgtgcttcttgctctctttt

SEQ ID NO: 40258 - DNA, 1085 bp, Setaria italica
  Peptide Sequence Number=SeqID_106232
tgtctaaagtaagttacgtagttttgtattgttggtattaactaaggttgttctaattaagtttggtcttctttgtaattcttaggtccctttctatttgggttattgttcgtgtcagaggcattggcctcatacatacagagcttatgtctggggattcctgctattttctcccactttgtcaccaaccttcctgcatttcatcaggttctggtcttcctatgcattaaatcagtgtctgtaccacatgtccaacccgaggagcgatttttggttggccgcattggcctgaaacaatacaggctatacagggtagtcgttcgatacgggtaccgggatgtgcaacaggacagcctagagtttgagaaggccctagtgagcagcattgcagagttcatccgctctggggattccgaccaaaatggttatctggatggttcagacagtccctacgagaggttgtctgtcatcagcaaaggcctaccatttcaggaggaggacggtgagcctgacggatcacccgaatcatccactcgtaaggaaacaaacctgaaactagtattatccaagtcgagaagggtgaggtttgtgctcccagaaaatgtgcagatcaacagcgaggtgcatagcgaactgcaggagctgactgaggcaagggagacaggcatgtccttcattatggggcgctcgtatatgaaggcaaagagtgggtctagcctgatcaagcggattgccataaacttcatctacgagttcctgacgaggaatagccgaggccctgcctacgcggctaacgtgcctcatgtttccacccttgaggtagggatggtttgccaagtctgatgatagtgactatcagcatgccaagttgtatagagctaggttgctagaaatagttcatcttcatatacctgtatatatacatcctaacaaaagtgatagatggttggtgaagcagggtattattgtggcctgcaggtgcagatcttggatacgtgaagtgtgcatagtttttacttcatattcttgtagagttcttccttgctctggtttttcaactgccgttgtcgttgttggttgtttag

SEQ ID NO: 40259 - DNA, 440 bp, Setaria italica
  Peptide Sequence Number=SeqID_106233
cgatttttggttggccgcattggcctgaaacaatacaggctatacagggtagtcgttcgatacgggtaccgggatgtgcaacaggacagcctagagtttgagaaggccctagtgagcagcattgcagagttcatccgctctggggattccgaccaaaatcgctcctcgggttggacatgtggtacagacactgatttaatgcataggaagaccagaacctgatgaaatgcaggaaggttggtgacaaagtgggagaaaatagcaggaatcccagacataagctctgtatgtatgaggccaatgcctctgacacgaacaatacccaatgaagggcctagattcaagagccaacttattgacaccttgttatccacatcaaactcgtacttctttgcagtgccataatgccatacgcacatgatcatcaagaaaatgaaggg

SEQ ID NO: 40260 - DNA, 559 bp, Setaria italica
  Peptide Sequence Number=SeqID_106234
cactttggcaagcaaattgagtgtaccactttaaccatgggatttgttttgtctcacttttttttctcttgttatgctatagcaaaaccaatctcaagaatattgagatagccagagtatgcttatatcattgtgatggtgaccagtggcaactgtcagtctcctctcagaaattggattcagattcacaaattcagcttcaatttattcagattctgattctgatacagtacagatgtacaattaattggtccccaattcaggtacacaaaattctctccttcctgcattgttctctgtcaccatagctaacaccaacaacgacaacggcagttgaaaaaaccagagcaaggaagaactctacaagaatatgaagaaaaaactatgcacacttcacgtatccaagatctgcacctgcaggccacaataataccctgcttcaccaaccatctatcacttttgttaggatgtatatatacaggtatatgaagatgaactatttctagcaacctagctctatacaacttggcatgctgatagtcactatcatcagacttgg

SEQ ID NO: 40261 - DNA, 3174 bp, Setaria italica
  misc_feature (3095)..(3174): n is a, c, g, or t
  Peptide Sequence Number=SeqID_106235
tagcgagttaagaggtgcggcctcggcgggcgtgggggcgtgggagcaagcgagcgagcttgggcgaggtggttcttgcgggaagctactagaaggaggggggcgaggaggaggagtgcgaagtgtgccttgccttgcttgacctggttggttggcctcccgctcgctacaggccaagccgacggacaaatctcggtctcgggcgcgccgccccggtgggattcggttcggcgcgcctattccttgttcccttgcggcgattcgacgaggtttgccgccatggaggcagcaggcgtgacgcattgaggcgcgcgtgcaggggccggggccggagccgggcacatggatctggaggccgcgggcggcgcggcggcggcgcacgggaagaggtggcgcggggagtcatggcgcgcgacgctgctgctcgcgtaccagagcctcggggtggtgtacggcgacgtggccacgtcgccgctctacgtctacaagagcgccttcgccggcaacgacatccagcactcggcgggcaacgaggagatctacggcgtcctctccttcgtcttctggacgctgaccctcatcacgctcctcaagtacgtgctcatcgtgctccgcgccgacgacggcggggagggcggcaccttcgcgctctactccctcatctgccgccacgtccgcgcgggcctcctgcccggcggcggcaccagagatgagctcatggaggaagagaaggccacggggcgccgcggcgagcggcccgtgtcgaggatcagggcagtcttggagaagtacagggtgctgcagaggctgttgctgctgttcgcgctgcttgggacgtgtatggtcatcggcgacggcgtgctcacccctgctgtctccgtgttttctgcggtatctgggctcgagttgtcgatggaaaaggagcagcacaaatatatagaacttcctgtggcttgtgccatacttatatgcttgtttgctctgcaacattatggtacacacaaagttgggtttctttttgcaccaatagtatgcatttggcttctctgcataagtgcgataggcctctacaatatcatccattgggaccaccatgtctatcgagccctctcaccatactacatgtatcaattcctcaagaagactcaaactggtggctggatgtcactgggtggaatccttctatgtgtaacaggctctgaagctatgtatgcagatcttggacacttctcgcaatcatcaattcagattgctttcatatctgtggtttatcctgctcttgtactggcatatatgggacaagctgcttacatttcacagcatcacagttttgagaagaaccatcatattggattttatgtatcagttcctgaatcactcagatggcctgttctggtgattgctatactagcagctgtagttgggagtcaagcaattattaccggaaccttttcaatcatcaaacagtgctcgtcattaagttgttttcctggagtgaagattgtacatacatcctctacagtgcacggtcagatatacataccagaaatcaattggatgctgatgatactgtgcctggctgttactattggcttcagagacacaaagcacttggcaaatgcacaaggtttggcagtaataactgttatgcttgtcaccacatgcttaatgtcactggttattgtgctttgctggaacaagagtatcttcattgccctttgtttcctgcttttctttggcacaatcgaagtgctctacttctcagcttctcttgtcaagtttcacgaaggtgcttgggtccctattactctttccttcatatttatggtagtcatgtgtgtctggcactatggcacaataaagaagtatgaatttgacgtgcaaaacaaggtttcagtaaactggctcttaaaccttggtccttcactgggcattgttcgtgttcgaggcattgggctaatacatacagaactaatgtctggaattcctgccattttctcgcacttcgtcaccaatctgcctgcgtttcaccaggtactggtctttctttgtgttaaatcagttccagtgccacatgtgcaacctgaagaacgatttttggtgggtcgcattggtccaaaagagtacaggctgtacagggttattgtcaaatatgggtatcgtgatgtgcagaaggatgacctagagtttgagaaggagcttgtcagcaacattgcagagttcatccgcagcagtggtgaatatgacaagaatggctttgtggaggacacagatatgccctctgagaagctctctcccgtcagcacgggaattccattgtgggaagaggatggggaccttgatgcatcagcatctcctcataaggagatagacccacagaacatagcacccaagcgaaagaaagcgaggttcatgataccaaagagcgcccaggtggacagcgaggtgcgccgtgagctgcaggagctcatggacgcaagggaggcaggcatgtccttcatcctggggcactcgtacatgaaggcgaagagcggatcaagtttcataaagcgaatcatgataaacttcttctacgagttcttgaggaagaacagccgcggccccgcgtacgctgcgaacatacctcatgcctccaccctggaggtaggaatggtctaccaggtctgatagcactagcagctgtataaaaggtagagatgagacagtgttcctccgccccgcctgtatatatcaccttgtcgctgatactgttaaaggcgttaacacagtgacagaagtagagaccctggagcacagcacgggctaacaacacggttgcagatctttggagagcccaaccgggatttttgtccgtataaagccttctgttgtgctgtcccttgttttgttttctgatgtgtttcctggtgttgttgactttggtaaggtacttgtgaagctgtaattgtaagtctgtaagagtgactagcacaatagcatttttgatgttcagcaacttgtgtagtcttctcacttgtctcattgtctgtactttcggagtgtgaaggcagcagcacttagcaaatccccaaaccaaaccaaaccaaaccaaaccnnnnnnnnnnnnnnnnnnnnnnnnnnnnnnnnnnnnnnnnnnnnnnnnnnnnnnnnnnnnnnnnnnnnnnnnnnnnnnnn

SEQ ID NO: 40262 - DNA, 600 bp, Setaria italica
  Peptide Sequence Number=SeqID_106236
gcaaaagaatcccaataagatgacagtgccaaagctgtcgacggaagccaggtaatcgttcctggggtcgaaagccagcccagtgatggagcccttgtggcccttgagcaccttggagatggtgttgtcgatggtcgcaatcagcttgatgccatcgtcgtcacctgagaccaagaccagggttcccttcttgttgaaggaaagtgaccggatcggaagggtgaatcgggcgacattgctctggaatgccccctctgggaaggtgtagaacttgacggagtgatcgatggatccggacgccagcgagcctccggggcccggcgcgactgcgagcgccgtgacgccgtccttgtggagccggaccgtggacaacggcgccgaaccagagctccggccaccagcgagcaaagcggcggcgtcgtggatcaggacggcggtgtcggcggcggacgcggtgacgacatgttgcccgccggggccccacacggcggagcagagagccggcgagcccgacttgtgcgcttcacggagcttcaccgcgcgccctttcatggcggccctactccttggaggctttcttggtggtgtcggggaatggag

SEQ ID NO: 40263 - DNA, 766 bp, Setaria italica
  Peptide Sequence Number=SeqID_106237
gaaatcaaggacacgaagctgtagacagagcactttctttcgtaaaagcttatagatatcaaacatggttcagaaacttccatctttaaaagagggcggtgcattctggtttactgatctgacgactcctgatgccctatacatctttccagctatggcatcactatccttcttgcttagattggagttcagtctacattatacaaagagagaaagatctcttgagacagatattgtgagaatattattagttttaactttcccgtttgcagcaagctttccaaaggcaatttgttgctacttcatcacttggagctttgcatctcttgcacaaatgatagtgctacaccagccagctgtgaagaaactactatttagcaagcccaataacccaacatgctcctgctctgatggaccaacaggcccaactgctgaagattctgcacatccagtcgatgagaatgaagaacctcttcccccggagggaagagaagcttctgattctagcgttgaccaggtcaaggataagtctgataaggaatccggaaaggacagttaaatgtggatgctatccttatcgctcagttccgtagagtaaccactaaacagcagcgcacctgcagcctgccaaagctgcaatgtagtattcaattcattattagaatgggcactatacaacatttacaacctcccccttttattaagtgactagtgaggggcttcgcagttaacatcggatcattgagatcttttgaccaatgatggc

SEQ ID NO: 40264 - DNA, 225 bp, Setaria italica
  Peptide Sequence Number=SeqID_106238
gaaaaattcccaaattggcaggaaataggtagccaggccattggtgacctccagtgaagcatgtgatggtattgcggtgttgtgctgaattccactacattgccttatctgtcttcaatgcgtgtattcgtgaggattttctataaagcatccaagaataggtttgacaatgatcctgagtttaaagagagggctcaacaaggagttgttcggctaacagggagg

SEQ ID NO: 40265 - DNA, 202 bp, Setaria italica
  Peptide Sequence Number=SeqID_106239
aaggcagaatggataatatatgtaacagatgttggccagcagcagcactttgaaatgtttttcaaagtaagcacagagtagcaccaaaagagaggttttccctttaccgtgcttttattgaatctttcgttgtcttctataggctgcaaggatggctggttggctcccagatccaaatgaaaagaagtttccaaaaacgagt

SEQ ID NO: 40266 - DNA, 551 bp, Setaria italica
  Peptide Sequence Number=SeqID_106240
gtgaaattcaccaagcttgatttgagaagcataggattgtacatatcaataacctgtaatatatcctaaaacctaggggttactttgaagagatcatcaacataacaattcataaaacctagagtacagtttttatatatttttagatgttataggtgtcaatttgaatgggtatataactatacatcagctattatgctggaactccacagtagttggtctgaactgttggatcgtgtgggacaagatgttcatccgtttcatgcttggaaattagcattgtcagtatggatgtatcttgtgggaagctagcagtgttaatatcccttgataaatgtgattgacattattattgtgccattgaccaaacagctattatatgtatccaggctccctccagtaggcggtagacgatataatcacggatctatttgtagtgtataggtcagtgatgtagttggactagaattaggttcagtgggtctcttgtgatgttgtctgatctaaatactcattgttaagaagattaatgatttcttttattcaggtga

SEQ ID NO: 40267 - DNA, 262 bp, Setaria italica
  Peptide Sequence Number=SeqID_106241
atcaccaccaaggccatgaccatgttagtcttggtgcaggtctcacaagcaaccttgctgtcggggtcctcagcaaggcaagcatcaagcacggcatctgagacctggtcgcagagcttgtcagggtgtgcatggccacttcacaaagcgccctgaggagatcggagctggtgaccagggacacatgtttgggtatgcaactgatgagacccctgagctgatgcccctcagccacgtccttgccaccaagcttggtgctcgt

SEQ ID NO: 40268 - DNA, 450 bp, Setaria italica
  Peptide Sequence Number=SeqID_106242
aagaccatgaccatgttggtcttagtgcaggtctcacaagcaaccttgctgtcagggtcctcagctaggcatgcatcaagcactgcatcagatatctggtcacagagcttatcagggtgtccctcattgacggactcggatgtgaaaaggaatgtgtcaagttcagccatcttctttgacctgcataacgtggtaacattcaccactcagaagtcagaaaaaatatgggcaccaagaaatgatccaggccgaataaggttccaaagattttgaatggacaaatttgatgattgacatatgcccaaattactttccaataaaactgattgaaattaataaaaagataagaaagcaattgaatacacaagcagatgagcttttctgaaaaatatagataaaagaacacaagagattatccagtactactagctacacgagaaccagaaaaaa

SEQ ID NO: 40269 - DNA, 237 bp, Setaria italica
  Peptide Sequence Number=SeqID_106243
aagtgctgggagaacaactaagtagacgtggtgaatcagtagccagtctccgtccaatattgcagaggatacttgctgatgttcatgagcggctagcattttgtgctcggactcatatccgtgaggagattgcaaatttccgccctactgatgaagatctggattattctccttccaaatgttgtgtgtgaatacttgtacaatctatccgaaatgttcaacaaaattctataccaa

SEQ ID NO: 40270 - DNA, 260 bp, Setaria italica
  Peptide Sequence Number=SeqID_106244
gtcagcgtcaagcccgacatctgccgacacgaaaccgatgttgcggcaagtgtccctgacaatcttctcatagtcaaagttggccttggtggtgatctcaccaaagaccatgaccatgttagtcttggtgcaggtctcgcaagcaaccttgctgtcggggtcctcagcaaggcaagcatcaagcacggcatctgagacctggtcgcagagcttgtcagggtgtccctcattcacggactccgaggtgaagaggaaggtgt

SEQ ID NO: 40271 - DNA, 399 bp, Setaria italica
  Peptide Sequence Number=SeqID_106245
tttttctgattaagcacctcctcattctaagggaacagattgctccatttgatattgagttctctgtcacgcacaaggagctggatttctcccatttgttggatcacctaagaaggattctcaggggtcaggtctcattgtttgattggtcaaggtcaacatcactagctaggaccttttctcctcgtgttttggagaatcaaattgatgccagaaaagagttggagaaaagccttaaagctacctgtgaagaagtttaataatagtccatcactaaattagtagtggacccaatgctctcttttgttactaaggtaactgccgtcaaagttgcattgtcctctggtagccagggtcagaagttggattctgttctagcaaaacccctgaagactcaag

SEQ ID NO: 40272 - DNA, 577 bp, Setaria italica
  Peptide Sequence Number=SeqID_106246
agctattatgctggaactccacagtagttggtctgaactgttggatcgtgtgggacaagatgttcatccgtttcatgcttggaaattagcattgtcagtatggatgtatcttgtgggaagctagcagtgttaatatcccttgataaatgtgattgacattattattgtgccattgaccaaacagctattatatgtatccagtctcccgtgtacagcataattgagggagcctcctacttgactagcaggctgagtgcttaactctatatctagtcaaccagtcatccaacttggcgtgctagtcatgtaggaggctccctccagtaggcggtagacgatataatcacggatctatttgtagtgtataggtcagtgatgtagttggactagaattaggttcatgggtctcttgtgatgttgtctgatctaaatactcattgttaagaagattaatgatttcttttattcaggtgcacatatttgtatgatactctgaggcctagactgatatatgaaggaaatattgattctctctgcgaacttgttgatattctgaaagttgaagtgctgggagaac

SEQ ID NO: 40273 - DNA, 863 bp, Setaria italica
  Peptide Sequence Number=SeqID_106247
ggcgcggcgagcaaggccattagcgacaatgctcttggcagcttgcctggcaatgtaggctccactgcggtcaaccttggttgggtccttgccggagaaagcgccaccaccgtgggctccccagccaccataggtgtcaatgatgatcttccggccagtgagaccagcatcaccatgaggtccaccgatgacaaagcgaccagatgggttaaggtggaagatggtcttctcgtcaaggtactgctcagggatgacaggcttgatgacatgctccttgaggtcagcggcaatctcatcgttggtgactgtctcgtcgtgctgggtagagatgaggacagtgtggacacggatggggaccatcgcaccaccctcattgcggtactcaacagtcacctgggtcttcccatcaggcctgagccgaggggcaggtcccattcttgcgcacctctgtgagacgagcaccaagcttggtggcaaggacgtggctgaggggcatcagctcaggggtctcatcagttgcatacccaaacatgtgtccctggtcaccagctccgatctcctcagggcgctttgtgaagtggccatgcacaccctgagcaatatcaggggactgctgctcaatgttcacgagcaccttgcagtggtcagcgtcaagcccgacatctgccgacacgaaaccgatgttgcggcaagtgtccctgacaatcttctcatagtcgacgttggccttggtggtgatctcaccaaagaccatgaccatgttagtcttggtgcaggtctcgcaagcaaccttgctgtcggggtcctcagcaaggcaagcatcaagcacggcatctgcgaccaggtctcagatgccgtgcttg

SEQ ID NO: 40274 - DNA, 1367 bp, Setaria italica
  Peptide Sequence Number=SeqID_106248
gcgaaccgcgcgggagcacaccgcccatggcgacgacgccggcgccggcatccgcgctgcccaagtcgggggcggtctccaagggctacaacttcgcctccacttgggagcagaatgcgccgctcacggagcagcagaaggccgcgatcgccgcgctctcccacgccgtcgccgagcggccgttcccggcgaacctggaaaagagttcagggaaggatggaggtgcggctgttccagagaaagagtctgctttagaagaggctggtgccatggatgcggtcttggtgaatacacatcagttttacaagtggtttgcagaactggagtctgctatgaaatctgagacagaggaaaagtatcgtctctatgagaatacattagaggagcgtgtcaacacatgtgacggtatccttaagcaagttgatgatacattgaacttatttgaagaactgcagtctttgcactcgagtgttgccacgaagacaaaaactttgcatgatgcttgtgaccaactgttggttgagaaacaaaggctgattgagtttgcagaggcacttcgaagtaggctcaactactttgatgaattggaaaatgtctcaagcagcttttattctcaaaatatgagcattggaaatgaacagtttctcccactgttgaagcgacttgatgattgtatctcatatgttgaaaacaacccacaatatgctgaatctgctgtttacttggtcaagtttcgccaacttcaatctcgtgcattgggtatgattcgctcacatgtgctgtcaatacttaaaggtgcttcatcccaggttcaagctgcaattcgaggcagcgattctggcaaaaacattgtcacagagggtattgaggcatctcttatctatgttcgcttcaaggcggctgctagtgagctaaaaccaatattaggtgaaattgaaagtagatcttctagaaaggagtacgcgcagattctttctgagtgtcacaatttgttttgcgagcagcggctgtacttggtacgaggcatggtgcagcaacgaatctcggagtttgcaagaaaagaggccttaccatctttaacaaggtctggttgtgcctatctgatggaggcatgccagtttgagcatcagctttttgctcacttcttcccatcatctgctgcagatgtttcaagtatggctcctttaatggagcccctgtaagttaatttgttcttcaccatgatttcttgttgtgttatttgtatatgctgctgtaagttaattgttctctgtcatgatttgttgttgctattatttgtatatgctgccatcgccgccggtacttactttagttgagcgtattagtttgtgaattcaccaagcttg

SEQ ID NO: 40275 - DNA, 1586 bp, Setaria italica
  Peptide Sequence Number=SeqID_106249
caatacaagctccttaaagagaaaacatcatgcataagatatccctcacacatctgctactagagcagtgagtagagaaactgggaaactttgtagtgatgggtatactatcagcagtaacatcacaacttgatggataaaaggttcagaaatggagctggctgcaagtctttggtcaggctgaaggcgtctcccacttgaggggcttcaccacctcccaggtgaagtccgggtcgtccctgccaaagtgcccgtacgccgccgtcttaaggtagcgtccatttccgcctctcttcaggtcaaggtggatgatgatcatccctggcctaaagtcaaaattctccagcacaattttcaggatctctttgtcgggtaccttgcctgtgccatatgtgtcaacaaacactgagagcggctcaggcacgccaatggcatatgagacctggacaatgcagcggcgggcaaggccgttagccacaatgctcttggccgcttgccttgcaatataggctccactgcggtcgaccttggttgggtccttgccagagaaagcgccaccaccatgggcaccccagccaccataagtgtcaataatgatcttcctgccagtgaggccggcatcaccatgaggtccaccaatgacaaagcgaccagatgggttgagatggaaaatggtcttctcatcaaggtactgctcagggatgacaggcttaatgacatgctccttcagatcagcagcaatttcatcattggtcacagtctcatcatgttgggtggagatgagcacagtgtggacacgaatagggaccatggccccattgtcgttgtggtactcaacagtcacctgggtcttcccatcaggcctcaaccacgggcaggtcccgttcttgcggacctcagtgagacgagcaccaagcttggttgcaagaacatggctgaggggcatcatttcaggggtctcatcagtagcatatccaaacatgtgcccttggtcaccagcaccaatatcctcggggcgcttggtgaagttgccatggacaccctgtgcaatgtcaggtgactgctgctcaatgttgacaagcaccttgcagtgatcagcatcgagccctacatcattggacacaaaaccgataccacggcaagtatctctgacaatcttctcatagtcaacattggctttggtagtgatctcaccaaagaccatgaccatgttggtcttagtgcaggtctcacaagcaaccttgctgtcagggtcctcagctaggcatgcatcaagcactgcatcagatatctggtcacagagcttatcagggtgtccctcattgacggactcggatgtgaaaaggaatgtgtcaagttcagccatcttctttgaccttccagaattcccccacaaggcaaacatccacaatttgatgatttgctcaatcacattatttggaattatcctttacatcgaaaatgtgaccagtgctgctcagaattgtaactattctgaagtggacaacctacagactttgctcgcggcagcggcggcgacgatgcgagggggtgagacagaaacgaaacggcgtagcagttagtct

SEQ ID NO: 40276 - DNA, 1783 bp, Setaria italica
  Peptide Sequence Number=SeqID_106250
ggttcaagctgcaattcgaggcagcgattctggcaaaaacattgtcacagagggtattgaggcatctcttatctatgttcgcttcaaggcggctgctagtgagctaaaaccaatattaggtgaaattgaaagtagatcttctagaaaggagtacgcgcagattctttctgagtgtcacaatttgttttgcgagcagcggctgtacttggtacgaggcatggtgcagcaacgaatctcggagtttgcaagaaaagaggccttaccatctttaacaaggtctggttgtgcctatctgatggaggcatgccagtttgagcatcagctttttgctcacttcttcccatcatctgctgcagatgtttcaagtatggctcctttaatggagcccctgtgcacatatttgtatgatactctgaggcctagactgatatatgaaggaaatattgattctctctgcgaacttgttgatattctgaaagttgaagtgctgggagaacaactaagtagacgtggtgaatcagtagccagtctccgtccaatattgcagaggatacttgctgatgttcatgagcggctagcattttgtgctcggactcatatccgtgaggagattgcaaatttccgccctactgatgaagatctggattatcctggaaagctcgagcgatctgtggatacgtcttcaagtgctactgttggtgacaactcagatgtgtacctgacatggtacaggccattggagaaaacagtttcatgcctatcaaagctatatcgctgcttagagccttctgtcttcactggattagcccaggacgctgtagaggtttgctcaacatctcttcagagtgcaagcaaggttatctcaaagaaagcaaccccaatggatggccagctttttctgattaagcacctcctcattctaagggaacagattgctccatttgatattgagttctctgtcacgcacaaggagctggatttctcccatttgttggatcacctaagaaggattctcaggggtcaggtctcattgtttgattggtcaaggtcaacatcactagctaggaccttttctcctcgtgttttggagaatcaaattgatgccagaaaagagttggagaaaagccttaaagctacctgtgaagagtttataatgtccatcactaaattagtagtggacccaatgctctcttttgttactaaggtaactgccgtcaaagttgcattgtcctctggtagccagggtcagaagttggattctgttctagcaaaacccctgaagactcaagcttttgcttctcctgataaagttgcagagttagttcaaaaggttgccaccgctattcaagaagatctgcccaaagtaatgaccaagatgaggttgtatttgcaaaatccatctactaggatgatcttattcaaacctatcaatacaaatatagtggaggctcatatacagctgcaatcccttctgaagtcggaatactcgactgaggaaatgcaatctatcagcatgttgccgatacctgatttgcagtctcagcttgacagccttttgtagcctgtacacagagtctcattaagcctgcctacaagaccctttggagattgcagtgcagttctttcaagtataaccaaagtaacagttgttgtcacacttacgaacctctaccgggttgctgttgtaaattttccttgttttatgttgaaatggaaatggaactgaacagacatgatattgctcatagtggacagcttttacgaagggcggttgtaccatcaa

SEQ ID NO: 40277 - DNA, 942 bp, Setaria italica
  Peptide Sequence Number=SeqID_106251
gccaccataggtgtcaatgatgatcttccggccagtgagaccagcatcaccatgaggtccaccgatgacaaagcgaccagatgggttaaggtggaagatggtcttctcgtcaaggtactgctcgagggatgacaggcttgatgacatgctccttgaggtcagcggcaatctcatcgttggtgactgtctcgtcgtgctgggtagagatgaggacagtgtggacacggatggggaccatcgcaccaccctcattgcggtactcaacagtcacctgggtcttcccatcaggcctgagccaggggcaggtcccattcttgcgcacctctgtgagacgagcaccaagcttggtggcaaggacgtggctgaggggcatcagctcaggggtctcatcagttgcatacccaaacatgtgtcccctggtcaccagctccgatctcctcagggcgctttgtgaagtggccatgcacacccctgagcaatatcaggggactgctgctcaatgttcacgagcaccttgcagtggtcagcgtcaagcccgacgatctgccgacacgaaaccgatgttgcggcaagtgtccctgacaatcttctcatagtcgacgttggccttggtggtgatctcaccaaagaccatgaccatgttagtcttggtgcaggtctcgcaagcaaccttgctgtcggggtccgtcaggcaaggcaagcatcaaggcacggcatctgagacctggtcgcagagcttgtcagggtgtccctcattcacggactccgaggtgaagaggaaggtgtcgactgcggccatcttttctgatctgcggcggcggcgcgggttggtcgggcggatccgatcagatccggcggagggggagacgggaggaggcggggtggatgaggatgagatggtaacaagttggggagtgctcgtctcagatccgacccggccgc

SEQ ID NO: 40278 - DNA, 466 bp, Setaria italica
  Peptide Sequence Number=SeqID_106252
ttaaacttcctgttaaaagggagtggatgagagtgggaaatttgctgggttggaatttagtgtagtgagtagaaatatcatctgaattggattcttaattcttattttattttgagttcttgctaggaaaatcacagtcatccatgatgacccctaaagcccaggacacatagggacttggctttacagaaattaggaaaccgattaagtgatttggctgacacatactagctggatttacgttttcagggaaactgattcactagatcagcttcatccccagacttgtctctttaaaattattaggaaattactggccatcctttccttggagtcaacttcttttttaaagtgtttgtaataaaactgtaaatgctaattcaaagactaatgttatttaatgtgattatttttgtatctttcttttcaggccataatcatttgatgaaaatgtagtaagattgtg

SEQ ID NO: 40279 - DNA, 464 bp, Setaria italica
  Peptide Sequence Number=SeqID_106253
attttctatttccatagtgaaattaccctagttatccttgttgccctgagatttttacaacaaattattgtaagctacaggctgcaacaacatgagtattggactactgaaaacagtggctcaagaacgacaatggcaactgctctctctcccgcctcatctgatatgaagtggctgtttctgatggcaattaagtggtgcagagggcaagtgaggtcaaccagtaggtccgacatgccgtacgccatagacatgcatgaaatgcactcaggatgtccagaattcataatctttccccatgataatacgagcatgaaacatgagtaagcagacacataaacgctaatcacttaccgggaccccaaatggcagaagtctgacgacacagaaaaaagttatttggatcatcaacatatttagagagcagctgtccaaacatggcttcactttgggagctaagtgcg

SEQ ID NO: 40280 - DNA, 461 bp, Setaria italica
  Peptide Sequence Number=SeqID_106254
gtactgtagccctgcatataaaccggaacctcttgcacatcatcttgactttactcctagcatccacattctgggttccatgttgcctctggcacctcacagaaggaacatctgatgagacattgaacttcaattcaagctttctttaataagcagctagtgccttcgagaagcaatcatcttgcaaaatggaagctgctatatcatccagtttgttgatgctacccattgtacatgcagaggcaaccttcatccgaatatgagctggacacttcacaatcaccttcttcttgagaccagaggagcccccagctgcggacaactccttgctctctgttaaggggcggtagtcagcagacttgttgagaggttgcgaccctgtgaccctcccacacccgggtgggaagcggcggatggcagagaccatcgtcggcttcggtagcaacctcatagctgacacc

SEQ ID NO: 40281 - DNA, 1293 bp, Setaria italica
  Peptide Sequence Number=SeqID_106255
actcagtcgcactagtcgttagaccatgcagggacagtgagaggtgatattcctgagaaacaaacatacccacgaggttcaaagatgtcaaatttcaagcggaaacgcaaagggaatgcatcaactcctccctcagaagttcaggaatacattaaacgtgcagtggatctgcaggccatgctccagaaggaccgtgagaagatgtcggaggtgcagctccgcctatcgaaagagaagcttgaggtagccaggttgaagcagcaagaagcaaaggacaggaaggaaacgacactctacgagaagtatacagaactgttgatggccaacactcagaggtttgatgagttccagaaggaagagcaccgaaaggcagtaaagcgcatgggggagatgctgtttgtcaacaatggcatgccactttcttctagtaaccttaagcacatgtagtggatgtctgaaatgttatatctgaactttgaagcatttgcacttggtttcattaaacacctgtagtgaaatgttatcttcttgggagcctgagtgtacagttgctaagtgccgctggccggggctcgaaccaaggtgacccttttcaaaaaggaaaaaagaagttatcttccctgagatgggcgtcatgtatgtatgaatattgtttctagtcggtgtggcacctgtttctcctggcaagaatcctgaaaaaatgttcacgaattgagtcatgggctggaggagcagatcagcagaccaaaaccaagtgcatgtgctccgtgtggtgcttgctccctgcatgatagcagctcagtcactaacatggttatccttgtttaatccgtcagttagaagcagatttccaggaggccaggagatcaacaatttgcagagataggggcgaaagaattagactcccatatgcatcagcagaaatggatcgataactcacagcttatcaggatttactactcaaagcatcatcacgtgcttcataacaagttgatctgaaatacttcatgccctgagccttggtacttgcatgccatgatgtgaacatggagattggagatgtttcatttcctcgttttttcagagatgggagcaggctcctagcaatggagatgaggataattatgagtcgtgtcatctctggattgactacctgttgctgctaagtgagctcccatgggcaacaatagatggtagttagtcaccattgtccattgtagagatggtatccttgacacaaacagagggcaacaaaggacgagcgtggagacacggaaatcaaaaggaacagtt

SEQ ID NO: 40282 - DNA, 1264 bp, Setaria italica
  Peptide Sequence Number=SeqID_106256
gaagaagtaaccctagttaacagtcgaagctacggagaccgagccatgccgatcgaggacgtgagcatcgagacgaccgaggcggcgggcccccaaaaggtgccgtactgggacccgccgccggcgccgctcctggaaacgagcgagctgatgaagtggtcgctgtaccgcgcgctcatcgccgagttcgtggccaccctcatcttcctctacgtgagcatcgccaccgtcatcgggtacaaggaccagtccaaggccctggcgtgcaacggcgtcggattcctcggcgtcgcctggtcctttggcgccaccatcttcatcctcgtctactgcatcggcggcatctcaggtgggcacatcaacccggccgtgacgttcgggctgttcgtggggcggaagctgtcgctgttgcgcaccgtgctgtacatcgtggcgcagtgcctgggcgccatctgcggcgtggccatcgtgaagggcatcacgggggatcagtacagcctcctcggcggcggcgcaaactcagtggccgacggcttctccgtcgtggccggcctcggcgccgagatcatgggcacgttcgtcctcgtttacaccgtcttctccgccaccgaccccaagcgcaccgcgcgagactcattcatcccggtgctggtgccgctgccgattgggttcgcggtgttcgtggtgcacctggcgaccatccccatcaccggcacgggcatcaacccggccaggagccttggcgccgccgtaatcttcggcgaggcatggaaaaaccactggatcttctgggttgggccgctgatcggggcaacggcggcggcgctgtaccacaagctcgtgctgcgcggggaggccgccaaggcgctcggctccttcaggagcaccagcgccacggtgtgagcacgcgtgcgaacggcgagagaagcttttggagattaggcagccctgcttcctgcaattgatttctctgctcatcggttattcgttgtcgtctcgtttaattaatatactacagcagctagcagatccttgcatgaactgcatgtacgtgtaagagtgtcgaggtgtgcgcttgcttgtctgtgccatttgtttttgggtttgggactgcaaggtcgtcgtgtccatgtataaacctttatatgttctgctttataagtactttgttaggaatagctcctactccctccattccaaattgtaagtcattccaagaatcttgaagagttaaagcacctcaagtttgatcaaaaaaaaaaaa

SEQ ID NO: 40283 - DNA, 681 bp, Setaria italica
  Peptide Sequence Number=SeqID_106257
gtgtgcgacccagagcaagcgcatagggagaagcagagagcgcgcggcgcggcggcgatggggagcgaggggaatggcggcgttacggaccggccggcggcggaggagaagaatgtcggggcgccgccgttcgagatgccggagatcaggttcaccaagctcttcatcaacggctgcttcgtcgacgccggctcaggccggacatttgagaccagggatccgcgcacaggggacgtcattgcgagcgtcgccgaaggtgacaaggaggacgtcgacctggcagtgaaggcggcaagggacgccttcgatcacggcgaatggccacgcatgtccggatccgaacgcggacggatcatgatgaggttcgccgacctggtggagcagcacgcgggcgagctggcggcgctggagagcctggacgccggcaagcacccggcagtcaccatggcggtggacatcggcaacgccgccggcagcctgcgatacttcgccggcgcggccgacaagatccacggcgagacgctcaagatgcggggccagttccaggggtacaccctgcgtgagccgctcggcgtcgccgggctcatcatcccctggaacttcccgaccaccatgttcggcatcaaggtggccccggcgctggccgccggctgcaccgtcgtcgtcaagccccgccgaaca

SEQ ID NO: 40284 - DNA, 263 bp, Setaria italica
  Peptide Sequence Number=SeqID_106258
ccaaaccaggccatagaatactagaataggcaaacaacttccactccactctcccaaagaagaattcacaaatcatagacgataacctatcagttaccacattatgtgtttatatcggttctgaatgtttctatattccgctacctaaggcatattatgattctattctttcttttttctgtgattgcagggttacttgcctgttgaggcttcagtgcttgatgttgaggtatggggacttggtggaggggcaacaagacggc

SEQ ID NO: 40285 - DNA, 1675 bp, Setaria italica
  Peptide Sequence Number=SeqID_106259
ccgccccacttccacgacctcctcgcgcggctcggccccgctatcgcctccctcttctccgccgacggagccgccgcgggggacgccgggtgggtcccgttcctcagggggttcaaccgctgctgcgcgcgcgtctcggcctcccgctcgctcgcgctgctcctacgcgtgtacgccgccgcctgcgacgccacgggggccccctgcggcgtgcagttccagccggacgagggcggcgacgaggatgggaaggtcgtcggggagctcgcgccggaggagatcgcggcgttcctctggatgtgctgggtcatgacgtggagcggttcggccccaaaggcttcgggtgacggaggggacaagtcggaggagcccgtcgtggtgctcctcccggacgtgacgcacctggtgctgtcggcgctcgtctccgcgggcgccgtcgcggatgacgacggcatttggggctggaagattcccagtggcggcaagggggtgaaggtccaggagttcacttcgtggatgctctccacggcttcggggcttgggaactgcctgtcgcggtatgtgcaggacaggttcaggtcgttggtggctgatccggcagaggaaagctctgtttcaaccgttaacacaacatttgatacttctgatgtgtatctactaacacgtggaagggcatgggctatcgctctcagcctaagaaacaaattgagcgaaaagttcttgtcagcttctgtaattggaatggacacagaagaccttctttataggtcagcaattcatggaaaaggactgagccggttttggtctggtgttgaggggtacaatggaccaatgctgattctgctttcagcattctctaaaggtggtgttgagaatgttgattctaatcgaagatgggtgattggtgtattaaccgaggaagggtttgagagcaaagacacattttatggtagctccgggttcctttgtgccgcacatccaatattccacatgcttccaccatctggtaaggagaagaacttcgtttacagccatctgcatcctcagataagggtttatgaggcacatccaaagcctgtcggcttagcatttggtggaacagttggaaatgagaggatatttctagatgaagacttctctaaagttgtagttcgccatcatgctgttgacaaaacttaccaacatggttctctcatccccaatcagggttacttgcctgttgaggcttcagtgcttgatgttgaggtatggggacttggtggaggggcaacaagacggcaacaggatatgtacaagaagagggagaatattttctcagagcagcgaagaaaggttgatctcaaaacctttggcaactgggaagactctccagagaaaatgatgatggatatgatggctgatccgaacagggttcgccgggaagatcgttgaattttgtttcgcggcaaagaaacatttgctaatgttcagcagctgcccgtacagatacggacatgagaacggatgatagtgaagctccatgccctacggaaatgtagagaggtcggtgcacatatttgctttgcctatttggatgggccacacgccacaggttgtgaattagaaagaggcttgtacagaacatcatttccataataaaaaatcgaggttctctgttttcgttaaaattcgatta

SEQ ID NO: 40286 - DNA, 539 bp, Setaria italica
  Peptide Sequence Number=SeqID_106260
tggctttgcgagttgtttgaatacgagttaaatgacatcttaatgcaacattaagttcagtttactaagaaccaatgatgtttgtctactctcctaaatttggctgattaactgaagaacctgagaagtctagctactgattttaataagtatcttcccacaaccaaagctgcactataatatttgtttgcaaaccagttgtcagttgataaacaccgcatttacctctactgtaatatttggttcacaaaccagttgataattctcccttttgttatgttacaacttgtattgcttcctttatttctattggtggaaatggtatgttatttttttagttttaacacctattttgaaactaaagctgtcagtcttatctgcgtggcattctgtaattaagagcaagcagttatcagttgtgttccttatggtgatgtcagattctggttattgtttcatattatcttcacattccatatcaggggcaacaattctgctatgtgctgcgccagtatttttgtagtttttttagtgtgttt

SEQ ID NO: 40287 - DNA, 792 bp, Setaria italica
  Peptide Sequence Number=SeqID_106261
acatcgagatcactcgattggttatactgtttggccaaaacaattaggctaatagattgaactttaaatatcacctttggtacaagacttgctgaacaaaagacaactgcatgtatgcccataggttcatcttttgagttatgtcgaacagactacagaacacacttccaatggaacaactgtagccaatccgtcagatcagctggagtaggccatcaagaaaaagttgtctgatgactgacgctaataatccctttcttgtttctttaagctgcacctggacccctcttcataagctatgcatgagtgttgattagaacagtggaactgtgtttgaaaaaaaaatgaaaggaacaaccgattccatgaactattggatggctcagctgaggctgcattggctaaaatttggtcaatttttctctaaaatttgtggcggagcaaaatcacactctatttgctggaataagcttgacaagctttgccagatcatatgacttgaaatcccttccaaaacataagcttagatccagtgcagtccttccatccttggttcttcttgtcctgtctgcaccgttgacaagcaagacctttgctatatctctatttctactttgtatggctaaatgcagtggagtccatccatcattatcagcaacattgacatcaaccttgtacttaatcagtaacttcacggtctgcagggcaccagcttgaacagcataatgcaatggtgtggctccatccctatctctaacatgggatttgccccttttcttaagagatgactaa

SEQ ID NO: 40288 - DNA, 412 bp, Setaria italica
  Peptide Sequence Number=SeqID_106262
tgccgtggacgcactgggtggtggccaacatcccgcccaccaccaaggggcctaccccgaggggttctccggcaaggaggccgcggcgggcgcgagtacggcggcgtccaggagggcgtcaacgactggaagcagcccgggtggcgcgggcccgtgccggagtcgcgcgggcaccgcatccagttcaagctctacgcgctcgacgacgaggtgcacctcggcaacaaggtgactaaggataagctcttggaagccatcgagggacacgtgcttggtgaggccgagctggtcgccctgttctaaggaggcaccgccacgtagtactgttatgggttctgggttcttgaatctttgttgggcggtgtgccttgtatatttgtggcaaccttgtaattttgatctaataaaagag

SEQ ID NO: 40289 - DNA, 523 bp, Setaria italica
  Peptide Sequence Number=SeqID_106263
ttatgaaattttgaattccagtttgttgcatgggtacaaatccatttttatttatttcctcattgtgaacaaatgcctctataattcataaaatgccatcgcaaaaggcccaacctaaaattatgctcatgtcctcaaaagagataagtttactgattttgacacgagagaagattcaatattttttgtttctacttcacgttgaatatgtttagttctcggaaaactaatcagtacaatttggatgatgttttggggtttattttggtaagaaatattctttaacattcccaaaagtaaggataattattctcagcattgggttcctccccactgatgtaatgcagacgcttttaggattggttgaccaataaaaattggacaatgtactacactgttctttgcgcatctgaaactgcacaggatatttttcgcgagtcttccctcagtcttgtgatctccgatccatcgaaaacatgaccctctcctactgaatcacaggccggatacaacattccatcga

SEQ ID NO: 40290 - DNA, 244 bp, Setaria italica
  Peptide Sequence Number=SeqID_106264
atgattgggttgcaggactccgttctggatttaggatattggcgcctaccatgtatatcttctttgcctctgcacttcctgtcattgccttcggagaacaactgagcacggcaacaaatggtatactcacaacagtagaaacattggcatctacggcgatatgtggcatcatacattcaattcttggagggcagcctttgttgattgttggagttgccgaaccaactattatcatgtacactta

SEQ ID NO: 40291 - DNA, 608 bp, Setaria italica
  Peptide Sequence Number=SeqID_106265
acccggtcggaccaattggtctggaccagaccggttggcgtggatagggaccatgactgcatgagatggctggaccggcagccacgtagatccgtggtctatgtgtcatttggcagcggtggcacccttacatggcagcagacggctgagctggcgcgtggactggagcttggtcagtgtaggttcatttgggctgtcaagagaccacatcaaagttcaacaattggagcattcttcgggactcaaaaaggtgaggacatttcattagattttttgcctgaggggtttatggagagaactagagggatggggttcgtaacccagtcttggaccccacaaacagctatactagggcatccatccgtcgggtgctttgtgacgcactgtgggtggaactcaatattggagagcgttacgaatggtgtgcccatgatagcgtggccactttatgcggagcaaaaatatgaatgcggcaatgttggaggtccaggtcggagtggcagtccgggccaaggttggagttgatcgatttacaagcaaagaggaggttgtgagtgcaattcaacgtgtgatagtagggaaggaagctgaaagaatgaggaagcggg

SEQ ID NO: 40292 - DNA, 327 bp, Setaria italica
  Peptide Sequence Number=SeqID_106266
ccctgattgattttgatgggaatttcattggcatgaacttccatggtaaggaagaaacacattatctaccaaggtctatgggttcgggactgagatgcgttaaggtcacatttcaatcgtacgtggcaccgacaagcgcccagggcagtggtaccctgctgggaagataggaccaacgtggctcaggcacaggccatctgtttggcttcttgtagctagcctcatcaacatcagacctatgaagagcacaaaaactaagtgagctgaagatcacaagtagaagcctggggccacttgaccggcttatgcattgtatttggctcttag

SEQ ID NO: 40293 - DNA, 2251 bp, Setaria italica
  misc_feature (1)..(56): n is a, c, g, or t
  Peptide Sequence Number=SeqID_106267
nnnnnnnnnnnnnnnnnnnnnnnnnnnnnnnnnnnnnnnnnnnnnnnnnnnnnnnntttttttttttggtttgctgtgcatacacctgagctgataaagttacatcaaattctcaaaatattctttaaatttaagtcataacatgcaaaccgatagggaaatctctactcacatggtgtgtttcgtggttcaaatttaacaggtttgctaccaagagtctacaaaactaagccaggtttgctattaggtaggggcatggagatcataaactaagaatccaatagctcaaattagataggttcttggcaaatttgggggttcgggactgagatgcgttaaggtcacatttcaatcgtacgtggcaccgacaagcgcccagggcagtggtaccctgctgggaagataggaccaacgtggctcaggcacaggccatctgtttggcttcttgtagctagcctcatcaacatcagacctttcacaaagcctcaacctttccagaaccatagaccttggtagataatgtgtttcttccttaccatggaagttcatgccaatgaaattcccatcaaaatcaatcaggggccctccaataccagcctttgtgactttacaagtggagatcataagctctttgcagtcgagattgccttctttgtcagccactttcccacttgtggccattaatttacctgattcaaagatacgtcctacagctactacctccatatggggttcaatttgcctctgattgttgaattctgcggttcgaagacaacggaaacccatgacactgaccacagcaatattataactcaaattgtaatgttgcaatgtcccttcagcaacttgcttatttggaaggtacactttaatctttaagttatcagcaatcttgtattcatcagcagaagttctaaccaaacttgctgaagtcaaaacccttgaggtggattcattgaagtctataaatataccagtgcaagcaaaaaacctttcttctcctttgaatgaagcaagtgagacaacacttcgggatacacctgaagcaaccttcttactgagtttgctccatgtatcttcaacaaattcctcttcaaaagtattaatcaagcgcatacccccctcaagcctaattggcataggataattacgggactttagatcatttctcacaagctccgtgaaatcatcaactggtaatggattaggataaagcaagggccagagttcctcttcttcaaaatcttctgaataacttgtagaggatatggaaagctcctgattcttgtccctctccccacttgagctaccttctacattgggcataagaaattcctgtatctcacatgggcttctttcaattgtgctatcacctccatgcttgatttcagcccagagtatcccagcatggaccaagcacttataaattttgtccattggtaggaatggagtcatcatcttcttagaataaaagttcatgccaacaaagctgccatccaaatcaacaaggggccctccagccattgtcatagtgattttacacgtggagatcataaggtgtttgcgtaagtctccactgggctcatcattcactgtcccatacagggccttcaatttgcctgtcttgaagcaacgccctaaagctactaccttacacccaaaatgtatgaggtgagcaaaatgtgcagctcgaaaaccagggtaatgactgatgttgacaacagcaacattgtaattgaagtcacagtgcaccaaccacccgtcggcacttcggttatttggaaggctcacttcaatcatcaagcctggaaaaatcttgcacccattatcaatatccaaagatctaaccagagttgctgaagttaggacacttgtaccacatccatcgtttttgacaactatgcctgtgcagacagcgtgaatccgatctccatcgaatgaagccagtgagacaacagtttcagataaatttgaaacaacttcttgactgagtttactcaaggtgccttgactagaattacttaagctgccaaattcctcttcaaaaacattgtacaaccacaggtttcttgtcttttttccacttttgcgagctttcttctttttatttgagcttgaggtgcgaagcattgagataggcatctgtccaacccttgctgcagatcttgcacagggacgagcaggggccatgcgacgaggacgagcaggggccatgcgacgaggacgagcagggggccgggcgacggagggg

SEQ ID NO: 40294 - DNA, 459 bp, Setaria italica
  Peptide Sequence Number=SeqID_106268
tgtagatgacgaattgccaagtgtcaatacctgccggcactttatcaagctccctccttactcgtccaaggagataatgaaaaagaaactcaaatatgcaattacagagggtttaggctccttccacttgtcatgataaaaggcataaaggtacaagatgatggaagaggagtgtacattatagactccaaggggtagatagtcattgattattggtgatttagaaagaatcgtgtaaaacagacttgatgtaaatagccactggatttatcagaattctgattgagcaattttctggttagggattagttgctagagatgcaactccaattttcctccctcccgaataatcgtgtcattttgttgtatgtacatagctactgcacccaaaaactcttgggtctgcattgcttctatttaatgattgtcaaagaatatgcaaacagtttcttctgaatc

SEQ ID NO: 40295 - DNA, 391 bp, Setaria italica
  Peptide Sequence Number=SeqID_106269
cgggggcaaggaatttcttagtaaaatcgaacgcaaaagtaatcaaagagcaaataaaaaaagaatgcgaggccagagagccggaattgataaaatatttagcggaggttaggagaatggaaaagcattttagggattttactattgaacatttaccaagaaaagggaatggtgaggttgatgatttagcgaagaaagcctccagaaatgagcaattaccactggatgtattctttgaagtaattacaactccatcgataaaacgagataattaaccaatgagtttagtaaatgcaatcagcagcatggattggagaacccaaatcattgcttacctttgcaacaattatgaactagtagaggagcacgaactcaagcacatgaagcaaag

SEQ ID NO: 40296 - DNA, 608 bp, Setaria italica
  Peptide Sequence Number=SeqID_106270
ttggtgcttccagattctgttgaactgaagagacgaagtcataaagtgtagaagtgagcatcctgcaagttacttctgccagtttctgaaacttgaggcttggaatgaattgtgtatagcctttaggtgcaatctgggactttgacatgcgagttaagagcttgtagaacttggcagtcaatttcagaaagtgttctgcttgagtatccttaaggctcatatgtgcaaaggacgagagggcgtgaactaccaatattgatcttgagtagagtgcttcctccaaagccaacctttgcattctttcatctgctggctgatcttcatcaacgttagcagaatcgtaacctaatgtaagaattgatttaagcttaccaagaccccagtccaattcagtaagagataactccaccatttgaagacagacagcagcaagtgagctctttgttttacagttaatggtatgaaatgtatcagaagaatctctagaattatcttctccagaggtcattaatttcttcaactcagcagctatctcacaaacaagaatcatgtcatctggagctggtgtaagatggatagcgaagttttaatacaacctactacgacga

SEQ ID NO: 40297 - DNA, 447 bp, Setaria italica
  Peptide Sequence Number=SeqID_106271
agcttgtggggaacaggtgggagcttatagcaggaagaattccaggaaggacagcagaagaagtagagatgttttggtctaaaaaacaccaggaaaaatgaagatgaggccattactttatattgatctaaaagctatctatgaatgtcacatggaaatatgtgctgataactaatgttaaacatgcaaaattgaacaaagcaatatagtattatgagcttactcgaggagtgatgtggactggtacttcaagttagcagagttgactgcgctgattttgtaatcgcatcttgttataacatgatgtcaatcttgcaatagcaaagtatttaatgtacaaaaacaccagcaaatgcgcatcatgctgtagaagatgtataacagtataatattctataaataaaaagatgaatacagttggctactttaaaaaaaaactaaaaaaaa

SEQ ID NO: 40298 - DNA, 367 bp, Setaria italica
  Peptide Sequence Number=SeqID_106272
ttaaaattacctaatagtctacctattatttacttagttttctaggtaagtctaaaaggtctaactacctattggtctagtcctaagtattgttttgcacttgtttgcacttcttgctctttgtgcaagcgccactactgctacctatgtcccattgggcgccatgaacccttgcatgcagtactgcatgatgcaacagccgtacgccgtgaacccatgcatgcagtactgcatgatgcaacaggcgcttgccatgggcagatttgcctcaccggcatccatgatgctgcagcaaccgtggacctcaccacttcagcagtactggactccaaggatgatgcctagcatgatgccgtttcaacaatct

SEQ ID NO: 40299 - DNA, 246 bp, Setaria italica
  Peptide Sequence Number=SeqID_106273
tcgcgcgatgctctcctgtcgttccggattagcacgcccacgaaatgccgcgtcggcacagcaagtccgcgagcacgtgagcacggaccggggaagacagcgactgggacgtatctggatgcctgcgtcttgaatatgatatgtgacgtagtggtggagcttcaagtgcactgttactctatgcaaatttcccaccggccttcgctatcctccgccatcgatgtgaccctcttttcgtgttttaaa

SEQ ID NO: 40300 - DNA, 890 bp, Setaria italica
  Peptide Sequence Number=SeqID_106274
ttactctgatcttcagagttgcatccacttgattttcctttgtattgtttgtcagtacattactgtgtttcaaatgtattacagaacggattaaacagaaagcatgataaaattcttgcacagagcttctttcaggcacaagagtgaagagtatgggccaaaagattttagtgagggggttgatcagtcttctctcctcacaaaacagaacagttatgagcgttgccttatgttgattagctcgatgtcgaagataagtgtaccaagggtggaaccctcaccatttgcgagacgtgttgggttgaatatagtagtaaatagcctctgctgatcaaagaagtttgggggaataggttcctgtgatgtgttttgatatccctgtgacggcggaatgataacacgacgaagaccaccaaccttcatggacttcactgctgcttcaataccaggtataacttttccagacccaatggtgaagacaaacggaatgggttcaccggtctcatccttatgatcataggtggaatcaaagcgccatccttgcttcgctgccaatctcccataatagtgaattgcaacctggtcgccctcggccgggacctcaccggaaccctcccggcggtccagggccttaacgccgccggagccagggatttccgcgaattcgggggccgcagcggagggggctgccgtgcggaaggtggaggcggtggcgaccgcgacgaggagctgccttctggtgagggtgggaagtggtgttgtggctacagttactgcttttcctttcggaggcggcggcgcggcgccggcgaccgccgtgacggccgtggtgaccatcggcggctgttattttgtaattcgcctctcctttttccttttctgtttctttc

SEQ ID NO: 40301 - DNA, 639 bp, Setaria italica
  Peptide Sequence Number=SeqID_106275
gctgtagttggacaccatggcatcctctgcttgctggttggggatcatcctgatcttcgcgtaccgtgatatcagcgagtaaagtgcaaacgtgccaccatctccattgtcgtttgcatacagcacgatgaagacgtatttgagcatgggaatgatgatgagggtgtagatgatgagcgacaagacgcccagcaggtcgtcgttgtacttgatgccgtcagggaaggtgctggagtagacatagagcggcgacgtcccgatgtcgccatagatgatgccgacgctctggaaggcaagatgcagcgtccgggcccagctcccctcggagccatggtacttgccatgagagaccttctccgcatcgccgaagagcgagtcatggcgcttgaggctgagccggttggccgactcaccgcccccagggttctcgacctcgagcgacatttcggatctccgaacacctcggaggccttctttaatgtgctggggtcttgggagtatcaagctctaaaccgcgccagttgatacctgcatcctccaattaccaagagttcaggtggtgatgtgaaaacgagtaacacttggtgtacattcacaagaagaggctgggtggtcaaccgaggtcgaagctttaaaggt

SEQ ID NO: 40302 - DNA, 684 bp, Setaria italica
  misc_feature (33)..(33): n is a, c, g, or t
  Peptide Sequence Number=SeqID_106276
gctagcacactagctctaagcttgtccatctcntaaaaatgatagctacgagataacttctccaatggtttgtctcatagcacattgctcaaagcatcttgggttatacatcctctctcacatccataaagtttggggtccactttctttctatgagctatctcttgaagaagagatagtacactctctctccttgccttctatctcttccatgtatgcaacatgataagttgaactcctatgaggtaggtgaggtggcattgttggaggtcttaatgacttgttacaccactagttttctacatgcattggatgcttggacctatttctgactcaatttattgtgggttgattaggatgatgagtttgtcaaaaagaaaaagtctgagctgaaaagacaaggaactgatgcttttaggaatgaggattatttaaaggcattagagttctacacacaggtatattcttagacatcattttcatttggaggtccattgattgcaggtctgtctttgtctcatagactccatgtatggtctctgttcatcttgattccctttcccttcatttatgtgatcttactattagttgacttcagtgatgcatgaacgttctatcattttaacaaatttaccccaagttaacctacttttaattaacttaaccctaaattagtttaactta

SEQ ID NO: 40303 - DNA, 1145 bp, Setaria italica
  Peptide Sequence Number=SeqID_106277
acctgaaatattcaaatttctgctttctagaggagctcgtgctgatgtggaatcaacttccccgttaacttccttcacgccactgttccttgctacttgtggaggacatgctagtattctggagattttattggagcaaaatgcagatccgaacgtgcgtatgggtgatcaagttacacctataagcttcgcattaagacactcttctgtgccttgtttgaagctattggttcaggctggagctgatgtgaatggttttggatcttataatcctttggcaaaagctgcaaagaaaggtttaactgaagctatcaagtgcttgttggaagctggtgcagatccaaatgttcctgactcatttggcagactgccaatagagttggccgctgaatatggtacatgggaagacgttgagcttctatttcctgtcacttccaaaattccaacagtggcagattggagtgttaatggaataattagtcatgtgtacctggaagtcatgcaactccaggatgatgagtttgtcaaaaagaaaaagtctgagctgaaaagacaaggaactgatgcttttaggaatgaggattatttaaaggcattagagttctacacacaggcattgaaggttgatcagttcgacgctacattgttctcaaacaggagcatttgctggcttcgcctgggtgatggaatgaaggctttgtatgatgcgattgaatgcaaaaacctgcgcccgaagtgggcaaaggcctactatcgcaaaggagctgctctgatgtttatgaaggattatgacagtgcttacgatgcgctgtcccgtggcttggaattggaccctgaaagtgaagagatggagacattgctttgggaggcgatggagctgaagtagttactgcttgcaagaagctgatgcaaaactggaagctcttcaattttgttctcgtagatggatcatggatatggacacaaatgctcttttggatggttccctctcttgtttcaagtctagcgacccagcttagttttgttaattaatgaacaagtagacttaacgaatagacgactagtacccgtaggacttaggaaattaggaaccctagaaaagtagaaagaagaataggaagaacaattagactttaggggggaca

SEQ ID NO: 40304 - DNA, 434 bp, Setaria italica
  Peptide Sequence Number=SeqID_106278
tccttatgtactgttatgacttattttcgtctatagattttcaaatactgttgatatgcgtttgtttttggtgtcatttgcaattataatgtagaggatttaagttggcagtaaattttcgatgtctactgatggtttgcaaggtttaagtgtctcgtatttgtaacactgtccggatggtccacttcactacaatttctgacttcaaaactattcctctctgcaggtgcctgttggcagggctacacttggacgcattatgaatgttattggtgagccgattgatgagaagggtgacataacgacaaaccacttccttcctatccatcgcgaagcccctgcttttgttgagcaagccactgagcagcaaatccttgttactggaatcaaggtcgtggatcttcttgcaccctaccaaaggggaggaaaggatt

SEQ ID NO: 40305 - DNA, 636 bp, Setaria italica
  Peptide Sequence Number=SeqID_106279
ctccgctgctccgcgacgagagcgggggggaaatcccaaccaccaggttgattgattcgcacacgaaaccaatcgcagacaagtatcgtcccaggaagagggcctcttcgggtcgtccaaaggtataggcatccgtggtccttgggagctccaactccaagtgatttcttcttggattgctgcgcctcttgctctctgtctgctcgagaagtcgccatgctgtctctgagctgcccgggggtgtccatgagcaagaaggcgttcgattcggggcagctggcctcctgccgctgcagctggccgggcgcgcgcgcggcgccgaggcggcagcgcacgccatgtgtttgcttcgttgcctcacccgccacacagcctggccttgctgcaattgatgtgcccccgcagacgattgtgacgacggcaagcgtccctgaacgcatttctgtttcttcgctgttggaggttgtctcgggcgacttgctcaacctcaacaacaatctcaaatcggtgagcttcgtctacaagccacatcgttaagggtccttttctttttccttttcagataactagtgtttaggctatgcacgcatgacagaccataaataaatagttgcgacatgacttatgagaaaggcc

SEQ ID NO: 40306 - DNA, 794 bp, Setaria italica
  Peptide Sequence Number=SeqID_106280
cggcaccactatatgtgagcagatgtatgaatacggcaggaatcttgggctctccttccaggtagtggatgacattcttgatttcacccagtcagccgagcagctcgggaaaccagcaggcagcgacctggccaagggaaacctgacagccccagtcatcttcgcgctgcaagacgagccacggttgcgggagataatcgattctgaattcagcgagcccggttcccttggcacagcgatagagctggttcaccggagcggcgggatcagaagggctcaggagctcgccaaggagaaaggcgacctggccatacagagcctgcagtgccttccgaggagcgagttcagaagcacccttgagaaggtggtgcactacaatctccagaggatcgagtaggtagcagctgcagcttcaactcggtttctttgaaagatccggtgccgtcgtactgggcttccatgtggatttggagtggctccccgcagaaatccatgttttttagcggtatcatgttggttccggggagatcattggtgcagcaaccatcacatgcgagtatgcaaccgacactgccgcgtacccaccaacctcgtgggagcatttgcctcggcattttgcttttgcagctcatgtatgtgtgtatgtatctgcaaggtaaataagaagggcagcatattgcatagttgatctttgcatttcttttggttctagcttgttgtagcagtttcattattgttgtaactaaattcagagaaacggttatggatgattatgaaaaaaaaacgtaaaagtt

SEQ ID NO: 40307 - DNA, 1773 bp, Setaria italica
  misc_feature (1688)..(1773): n is a, c, g, or t
  Peptide Sequence Number=SeqID_106281
ggcacggccacggccggcgccgcggccgtcgtcccgtcgtctcctctgcagccgcagccgcagctcctacggcacgcgtgctccgcccgccgcacgcagcgcgtccggtgcagctgggctggtggcagggcggcgtccaggcggcgcacgctaggtgtttgcttcgtggtctcacctagccagccagcaggtcttgctgcgatcgacgtgccggcggcgagcattcctaacacgacgaccatccccgagcgtatttcggtgtcctcgcttttggaggtcgtctcagacgatttgctcaagctcaataacaatctcaaatcgcttgttggtgcagagaatccagttttggtttctgcggctgaacaaatctttggtgccggtgggaagagattaagaccggcgttagtttttctggtgtctagagctactgctgaattagctgctttgtcggagctaactacagaacatcaacgcttggcagagattatagagatgattcacactgctagtttaatacatgatgatgtcatagatgacagtgggatgcgaagagggaaggaaactattcatcagctatatggtacacgggtggctgtacttgctggcgattttatgtttgcgcaatcttcttggtttcttgcaaacctagaaaacattgaagttataaagctgatcagtcaggtaatcaaggactttgcgagtggtgagataaaacaagcctccactctgtttgactgtgacatcacccttgacgattaccttctcaagagctactacaaaactgcatctctgatcgcagcaagcacaaggtcagccgccatattcagtggcgtcagcactgcaatttgtgaacaaatgtatgaatatggcaggaatcttgggctctccttccaggtagttgatgacatcctggacttcacccagtccgctgagcaacttgggaaaccagcaggcagcgacctggccaagggaaatctgacggctccggtcatcttcgctttgcaagatgaaccagagctgagggagatcatcgattccgagttcagtgagacggattcgttagctgctgcgatagaccttgttcatagaagtggtggaataaggagggcacatgagcttgcgagagagaagggtgacttggctatccaaaatctgcagtgccttccgagaagcgacttccgaagtacccttgagaagatggtgaaatataatcttgaaaggattgagtaaatggatttactttaatgctccatcagatacagatctcctttgcatgggtttgaagtagctcctatataaacccatcttttcaacccatttttggtggatatgattttgaaggaagtttggaggaaatgcgctgtatgtacttttttctgaggaacccttgtgaagaaggccattactactgttgattctgtgaggtgatttatacaggatcctctgaaaagcaaggacttcaccacataccccgacccccaacaccttgtgcctacattttatctgaatgtgagcttactttgcagctcttgtaaatataagaagcgtaaagtaacttagcattcttttattttgtcatttgcgcatgcttagaagcaacaaattatgcgctatacttgtacggtcacctgactggctgacatttgtataacagttgtgcactttgatacaaaaaaaaaaaaaaaaannnnnnnnnnnnnnnnnnnnnnnnnnnnnnnnnnnnnnnnnnnnnnnnnnnnnnnnnnnnnnnnnnnnnnnnnnnnnnnnnnnnnn

SEQ ID NO: 40308 - DNA, 1182 bp, Setaria italica
  Peptide Sequence Number=SeqID_106282
cagcatttctgtgccacctgtttccgccttccgctgctggggttttagacaaaatcactcttcccatttctcgcgtccccagaccacgagaccacgaccacgagcaaggctacccactccctccccccctcgatccgctgatttgtttcacccatcttcctgcctccacggatctgctcgtcctggaaggggaggaggacgctggaggcgtcttggcggcgaggatttgcgagctgttgtggtagtgggacatgaggatttgcgaattgggagacggtgatggggggctggcgggtcagcaggagcagcaggaggaggaggttggggcgagcggtggcggagaggtcgtaaggctgaaggcgaagcgcgcgctagtcggtgccggcgcgagggtgctgttctacccgacgctgctctacaacgtcctgcgcaaccgcttcgaggcggatttccggtggtgggatcgcgtcgaccagtttattttacttggcgctgttccatttccaagtgatgttccgcgtttgaagcaacttggagttcgaggagttgtgactttgaatgaaccttacgagactcttgttccgacatctttataccaggcccatgagattgagcacctgatgattccaacaagagattatctgtttgcaccttcggtcgaggatatttctcaagccatagatttcatccaccggaacgcatcacaaggtggtactacctatgttcactgtaaagctggaagaggacgtagcaccactattgtattgtgctacttgattaaatacagaagcatgacccctgaagcagctttggatcatgtccgatccattaggcctagagtacttttggcaccatcacagtggcaggttgttagcacatttgggactctcgtcactggacaacttccagtacgaagtacaaaactaggcagtttcctagaagccattgatgcttgccgcacagacacagaatatgatgattaccatgcgatggagtttgattacgaagatagcggcttgccactttctcaaattatgctacctaggccaaccagccccactggctgtatcgatgctgtccttataacagaggcagaccttgagggctatgatacttatgttaataccaggaaggatgccctggaagtagccactcacaggcccaccaattaagattgtcctg

SEQ ID NO: 40309 - DNA, 892 bp, Setaria italica
  Peptide Sequence Number=SeqID_106283
gcatgtacaattatgactggctacttttaacctacctaattctcaattctcggcaactcgtcaggaagaaaaacacagtttctgaccaatcctcatcagctaagacacctaaaactctcaggctacatgcaacgacgcattgtttgccggcggacatcttggccttcgacagcgtctggtggtccttccccacctggttatgcccagtgcatcggcgtccaagtcagcaggggcaagtggtggtaaccctggcggtgggctgacctcgacttcctccacctccatggcgacagccatgcttcttgcccggcgcctccccctcggctgctgcccgccccggcctcctcccttcattggggtcactggctttggccttccgagtgcacgaagatcctctgacacctcgtgcttcggcaacaacgcaaggcatggcaagatgtccctctgaaagtctttcctcttacggcgtcctcgccctttgcctctctgaggttttggggtcagcagtgaagctgcagagcaatggccattgtcgcagttatcctcctgggtggctcttggtgttgaatggtgctcggtgcttttggtttcttgcagcttcagtgtcaaagcctcaaagtcatcatcgctgtccttgtcaaacattgtgttctctttggatgcagctaggtcagcgaaccaatgcaaagtgtcaggttgaggggatcctggctgaacgacaacattacacattgctaccagactctctgctgcggttatagcaagagaatcccttaagggatcatcgctttcgtgaggaacaagttcacctgattcacaagcatttatctctggatcatccatgattggcaatggttcattcaggtcaatgagacttactaaaatctctgtc

SEQ ID NO: 40310 - DNA, 530 bp, Setaria italica
  Peptide Sequence Number=SeqID_106284
tccctccagaactgtttcttcttccatcattggttcctgttcagccaggacgtttgtggagtcacttcagaatggctttcattcccatatcctatttatatggcaagaaatttgttggacccataacaagattggttatgtcattaagggaagagttacatattcatccctatagaaagattgactggaagaaagcacgtaaattatgtgcaaaggaagatgtgtataatccacatacgtggctacaggagtgcctatctgactgcctttacagttttggtgaacctttcctcacacagtggccaatttcctacatgagaaagaaagccctccaacaaattgctgagttcttgaaatatgaagatgaaaactctcagtatatctgcattggtgctgcacagaaggcattatccatgttgtgctgttggattgaaaatcacaattcagacgcattcaagagccatttggctagggttgctgatttcctatgggttggagaagatggcatgaaagtgcggtcgtgtgcgtgg

SEQ ID NO: 40311 - DNA, 480 bp, Setaria italica
  Peptide Sequence Number=SeqID_106285
tcctgtgccgcttcaaccctttgtcatcatgcttgaagaaccagatgatcactggttagttaatttgaattgttagagaaagtaaggacttgttagggtgtcatgtcctatactgctttgatatctttatcttcgcttctttaagttctttattatgagaacacagcttttatatgcttggtgcacacgtgatctgtatttgccttcttgttaggctctggaataggtagagaaaaacatcccatccttgagaagttgagattgtaatactttatgcaagaccttacctgtgttcaaactatttacattgtaatttatgcaatgtttgaacttatatgtcgaatttaaggtattaggagaccttttatatataccagcgaacttttggttcttttatacttgtgtatactgaattatagaagaattttatagttgtatattggattatacagtattgcttattggagtttttgtagctag

SEQ ID NO: 40312 - DNA, 720 bp, Setaria italica
  Peptide Sequence Number=SeqID_106286
gcgcccgcggccgaccacgcggtcgagctcatcggccgcggcggccatggcgtcagggcggcgcagcagctccgacatagcccactctatcgtcaccgccgagctctccgtgccgccggcgatgatgtcctggatgaccttacaaccaccgtcgcgcgtgagcttggcctccgacgactcagacctgccttcctcggtgagctgcaacagcacgtcgacgaggtcgctggccacgaactcgccagctccggctcgccgccgccgctcctcgtgctcgtcgaggatctgctcgttgaaccggtcgtacatctcgctcagccgcttcatccgccggacgcatccctgcaagtcgagccagccaagccacgggacccactcgccgacgttgctcaccgcgccggccaccgagaacgcctcgtccagcgtgcgccggaacgcctggccttcggcactaccgtagcagccggaccacttctcccccaccgccatgcggaggatgttccgaagtgtggcgcaggtgacgtgctccctgacggcgacgacgccgccggcgcgccggaagaggccgcgcaccagcgcgcgcatctcctccgagcggacgcgctcgaacgacatcacgcggcgcgccgagaagagctcggtggtgcagagcttgcgcgtcatgcgccagtaggcgccgtacggggtgtggacgatgccccggtagccgtaggccaagat

SEQ ID NO: 40313 - DNA, 539 bp, Setaria italica
  Peptide Sequence Number=SeqID_106287
ctgcgagaggttccccatgtcagcacgccagattttgtcatgcggacagtcttttggtgaggcgagccctttccttctcgagtgtgtttcatcagctcctccccagcaagaacatgagcacgcgaaagatgacccagcaaccactcttctgttgctttgctcgatatactgctcctccttgctaacgataaggctgtctcatttctttcattcacaaggctgtaatctgcccctccgtgtgataccaatattttgcacgagtctaacctgccggaagcagctgcatgcatcagaggggtgaagccatcctcatccaatgaattgggatcatggcccattgttagaagttgcagtaaagatgacttgtcgccaattcgggcggcataatgcagaggtctgaataatgtttgtccagtgagtgtgttggtaagtgaagcttgaagcaagatctgttcaaagcaatctctaatctctgaagtatttttgttgaataatcgacatcagagatttcccttctctatttctgattgtgatatctg

SEQ ID NO: 40314 - DNA, 458 bp, Setaria italica
  Peptide Sequence Number=SeqID_106288
tttaatggtatatgtaaaacgcttgcgaatttcaccacgatgcgatgcatcgatcggtctctccatgcccacagtccacagagttatttttatctcgatcgcacgatacaaaaccatgcagcgtgcatatgatgctcgttgcacatttctactgagtattcgccgccggcggcggctcgtcggcgcacttgagacagacgcagtcgccgttgtccaagcaggcaccgccgcggaagtcatggccgacgtctcggcactcatcgccgcaggtctggacgccacggccgcctccacggcaggcgttgatgtccggcgctgggtattctaggcaccaagcatccacaccagcatcgtaagatatgaagactagtgccagtagcagggcggatgcaaccaaggctgtgaccttgcgagccatggctcaagcttggatcgactggcttgcttgactcaagtgt

SEQ ID NO: 40315 - DNA, 676 bp, Setaria italica
  Peptide Sequence Number=SeqID_106289
ggtggtggtggcggtggtggtggtggtggaggaggaggcaatggcgtcgatagtggatggggctgcggatggtgtcgcgtcgccagccggcgggtgccaacagtagggggcgagacgctttacagaactgctccaggtgacctgagcggcggcagcagaagcaacgcaccgggtagcagcacgatggtccggggccaggcaattgaagcaccgccttgcagtggctcgcatcggagtgggttgggcagtgcacgctgtgatgaatgccttctacggctcttggctggcgtccacccttgctgcgctaaagcctgtgcagcatgtcgtgtgggcgcctgacgcggcatccaggctcgccctatccttgatgccttgctggagtaaatgcgctgcgtcctcgtcacctcgtcggagtaaatgttgttccctcgggaggaggcgcgctgggcttcgttgcggtgacgctgtgccgcttgccggaggggggcattgaatcgcccccctcctgacgacctctgcgtagctagccctcagatccagcttggcaggggcggatcccgagcggcaggtcgcggatccgtcagttgggcccgcgaatccggggtctccggcacgcacttgtcgtccacggtggcaaggtggacatgttgaggtggtggaggtggggagtcggaga

SEQ ID NO: 40316 - DNA, 572 bp, Setaria italica
  Peptide Sequence Number=SeqID_106290
ccccatgagcgcgacagaatggtccttggttcatagctagtggtactatgacgttggtcgggcaaaattgtgaaggccggtagctttaaagtttgcttatactttgtcacggatcatgattattatgttgaattatacatgtccatgcttactgtgtgttttttccatgacgacacacggtcactgtgttattctgatcttatatatgctcaaaagatttggaacttcgacttattgatagctgaaaacaaaaggcacactgacaatttaattttgcttagtaattcagctgtgacagtatgtatgtacaaaatgtatgaaatatcagacatgcaaaagcgtggttagtggtgtgtgcgcttcaccttgtaattgcaagaaaaatatagtacaacagaaaattatctagcattgtaatattgtgattgtagataattattctggcaataaacattaaggaagatatatatagtttcatgcatagagcacttatgtcgtgtacaatcatcagaattagcaatattagtatattgtaaaccatgtgcagaaaattaagcgtttagaaaaaggtt

SEQ ID NO: 40317 - DNA, 366 bp, Setaria italica
  Peptide Sequence Number=SeqID_106291
aatcgaaccgatcggggcatggactagagtggttgaggtcacgctcatgcctgctaggcgaggccagttaattagctggggctccaacctgcgtctggtctccttccattcgtcttctcttgcttggaccagagctggagtagcaacctccccttgttgcgttggaggaggagaggagcagctcaggcgccgccgccatggacgcggagagaggagatgatcagtctcccctgctgcagcaccaccctcctaaccagactcaggtttccccagcgaatcagcactacaacaagccattcagctggaaggctcctgccgttattctggccttcgaattcttggagagcattgcttactctggcatag

SEQ ID NO: 40318 - DNA, 463 bp, Setaria italica
  Peptide Sequence Number=SeqID_106292
acaagggtgatacttctaagccatgcacgaccacagaacgccaggtctcggagggataccaccatccacctctagcagtagaacatgaactgctggactttttccttaattcgggggagttgcttcactgggacagattgatcatacgtccgtgacgtccctgtcgatgagccctgctcagaaatgtcgtcctctatgtagtggcgcgcacggaacgcacccaggtgcgcatagtacgctggaggaactatagagactgaacgagtgcaccgggcataggtgtagcacaggttgtaagttaaggtttgcaatgcatcagcagagaaaccattttcgtcgaaaagaacatgatagtgtgctgggcggcttgttccctgaataccagaatggctacagaggtaaaaatcaaactcgctgggatggcagattgttgtgtcaacaaccgtcccaggtaggatgttcc

SEQ ID NO: 40319 - DNA, 798 bp, Setaria italica
  Peptide Sequence Number=SeqID_106293
ggtggatcttctcccgacaaatgagtgattagatgctgcaactctgttcagcctattacctgaagacataaccagcattctatcattctgacatggaaatggcttgccacgctgtgctttcttctgttttttcctctgaaaaaggggattgaaagactgagcactccttggtggaaatgcttcggtcttggaccttttttcctctgatacaacttttatgtgttttcactaaccgagaaaacacacttgttcgcccttcactgtcagagtggagctttgaatttaaaacaggaggatagcatctatcttccttcctaacacaaacttggtggaaagttgtatggtcttcagagtcactgctacctttagattcagaagagtggctctcatcttttagtaacccaaatagatcatcaacaccttctaaattatcttcctcctgcggaagtggtatatagtcatcagtagattggtcatgcatcgcttcttggttgctaggtatcttgacagtggtcgtatctgctcttgtgtgcagtggagattgtgagctcttggacttgtccacatcagatatgtctgattgtagtccactgtgcactaatgacacagaatcaatcaatttgtcacccagagtggaggaggaacatgtttgacaggggcttctgaatgaaccacatgaactgctgtttggactggactgcgcatcagttactttaaccagagaagtttcaagcttccttggagatcatcttttaatcttggattcttgactaaaagtcttgtctaaccttgtttcta

SEQ ID NO: 40320 - DNA, 722 bp, Setaria italica
  Peptide Sequence Number=SeqID_106294
cgactcagtctatactatcccgaggggcggcgcggactgggccgcgctgcagcaggaccccgtcgagctgctgcgcaagctggacgagctgagggaccagatcacgcgctcatgccacgtcgtcggccagccgcgggagcaccgcagggtcagccgccgcgcggtctccatgctccctgaacaccttgagccgccacctcagccggggtaccaccgctcccgctatggtggccggtatgggcacggcttgccaccacccagcccatacgccccgcagcgccctgaacatggggagaggtatgtgaggcagtctagtgggcattaccgccagtaccctgggaggcagtgggagaacggtgggatggcgcctgggagctaccatcactatgggtgtgcttgtccgcactgtctgcacgggcagagggctgcgccgcaagaggagaacatcccaatggcgagatactttgctgggcagcatgaatcataccggtttgagaggtcaccatctgtttcgtctgattatgatcggaggtccgtggcgtcatcactttactctcatcggacggtattgaagaggagggcagagttcttcaggaagaaggcagaacatatctgtcgtccagtggatggcgctgcaccttttgccgtgtgcagttcatgttataagctactgcagatgcctgtggaaaaatgcatagggaggaagaagaatcggtttcaat

SEQ ID NO: 40321 - DNA, 1471 bp, Setaria italica
  Peptide Sequence Number=SeqID_106295
ttaaggttaaggttaaagtggtaggtaagtaagtaattcggtaagaaaattggttggtttgttggttttgttgtcagataatcagtttgaagcatgatgaaggaaaaggaattcccttgacaccatcatcatccttatatgtgcctgaaatggagcagagctcaaatgatcagatgatgaaagattccactcatcagcgccaagaagatttcaattccgtgttctacaatgcaaacgagcatagcagcatgcagttcaacatggattttgctgatgataattcactttcttctaccaccagtcatggcaggactgacaaagaatatgggtcaaacaggagcatccagtcaaaagcagagggtctctctttctctccaagcaggtctctggatgctggtagcccaaaggatatattgtgtgaaagagatgcaggctgtgaggcagagccttcagtagatggttcagttaccccacgatctccagttttagaggacaaacttgttgacccattgtgcacccaagaaaaaggtaacaatgaggatgcaatggcttacagatcagacataacttgcaaaggagaatatgatgttaatgatgactatgatgagagcgttagtacaagaagcaaacaaaagggcaatgatgatgacaaagatgctactgaagatgaaagctcacgcagcagttacgaacagaaagacaaggaagataactgttgcaaccttgaaggtggtaacaaaatgcacaagcagaatagtgtgaaagatgacagtagtagccttgaagatggaagtgaaaagtatgagtatacaaacattaaagatgacaatagcagccctggaggaagtgaggacagcagtaaatatgagccaaaggccaaaggagatgaaaaatgcgttcttggatctgaaaacattagcaacaactgtgatgaagacaacaaagacaatgccatcgaagctggaagcacaagtgagagacatgacgagctgaaaacggaagaagattatgggaaattgcagaggccatttactgaagatgccaattccccagcagagagtggctcatcagttaatgggcgcacaaattctgggttttctcggggttcatcagaggctgggttagatgaagatcagtcctcaactggtaagagtggggactcatcattttttgctggtttcttgaagaaaggcttcaaggacctgtctttattaaataagtccatggacagtgctaaggtttcaattaatggtcatccaatctctgaaagagcccttaagaaggcagaaaagaaagcaggtcctgttgaccctggttcgtattggtacgactaccgtgctggtttttggggtgtcatgggcagagaatgtattggcattatccctccatttattagagaattcaattatccgatggccagaaattgtgccggtggggatactggtgttttcgtcaatggcagggagcttca

SEQ ID NO: 40322 - DNA, 1104 bp, Setaria italica
  Peptide Sequence Number=SeqID_106296
ctttctacataagggtgttctacttctcttagaaaataaattctcacaaataacttaagtagactaaaggtttaacaaaattaaaataggtacaataaaatctctgaaagagcccttaagaaggcagaaaagaaagcaggtcctgttgaccctggttcgtattggtacgactaccgtgctggtttttggggtgtcatgggcagagaatgtattggcattatccctccatttattagagaattcaattatccgatggccagaaattgtgccggtggggatactggtgttttcgtcaatggcagggagcttcatcagagggatttagatttgcttgtgggaagaggactgccgcggatatctggaaagtcatattctattgaggtatctggagatataactgatgaagcaactggaaaaaagctacgcagtcttggaaaacttgctcccacgattgagaagttgaagcgtggttttggcatgcacgtccctgaagagtttagatagctggctcttgtacagcatcttggttttgctcataatgcactcttcaaagctgaccatgggtggccaaatctgtgatatcttgtgatattaaatctcagatttctccaagttgttggactggagctctacaagtagtacttaaatcctgggtttcctgaacatgatgctactcaagaagccaggatcatgtggttaagtgacttactaccaataatctccgtcctgctaattccattcctttgatggaaggaagtttgctagtgactcagtctatcaggcagctctaacttcactgctctgcctgtacatgctattctttatctgtgttatcattgtcggtacattgcccgcccgccccatcacaggcacagaagcgcatatttagatgtatgagcaattatcggcttgtaatatattggtagagctatgcttcccctaacatatatatgtatatattggctcttgattcttgagactccttgccgatatgatggcattcccctcccctggagctcccctggctcgttctgtatgtgcaactcatcttgcccatataatgtacagctggtgtacagttgtacctgagcaactgcggccatg

SEQ ID NO: 40323 - DNA, 403 bp, Setaria italica
  Peptide Sequence Number=SeqID_106297
ctttagtaggatgccttaaaaggggtgggattgcttcattatcagaattgctggaatgctttagtaggatgccttaaaaggggtgggattgcttcattatatgctggatggggtgctgttctttgcagaaatatcccacattccatagtaaagttttatgcctatgagagtctcaagcagtctattttcaggtgctgatctcaaaatggcaagctcagttctggcgaaacacttatatgcggaggttttgctgggtcaaccgctgctctgtttacaactccatttgatgttgtcaagacacgagtgcaattacaggcactcagccctgttagcaagtatgacggggttcttcatgcactgaaagaaatttttctcaagaaggcttgcgtggtctttacagggg

SEQ ID NO: 40324 - DNA, 433 bp, Setaria italica
  misc_feature (382)..(433): n is a, c, g, or t
  Peptide Sequence Number=SeqID_106298
tcgccgctcccgcccgtccgttcctggcctccctccggctcgcaagtccgacagcaagtctccgtgaccgcgtgcggcctttagctccggcctccgggttcgtgctcgtccccggacccctgctcacgagcagaacaagtttccatgttcagctgttcgtgtcacgtactgatacccgtgcttacacgcatgcagctccagctctcgtgtttgtagccagttttgtcttgtttgatgatgtagcaaaccacgcgtcagagtttgtgcctttggctttgtttctgaggtaatcagagcatgtagcacctaaaatccgagggcgttttgttgatgtccatcggtccatgcaccttaatcgatgtgtgttgttttatgttttctnnnnnnnnnnnnnnnnnnnnnnnnnnnnnnnnnnnnnnnnnnnnnnnnnnnn

SEQ ID NO: 40325 - DNA, 443 bp, Setaria italica
  Peptide Sequence Number=SeqID_106299
atcgctatccataacacagttactggacagggaacactacagcaacgatggcgaaggctctgaagctcgtcgttctcatgctggtggcggcgctcctgctgctaggcccatgcgacggcagggagctgaaggatagcgccgcggcgtcgcgcgctgctggtggtggtagcagcggcgaggggaaggctacggggttgccgctgatcccgcagctgccgccgatcccgcagctgccgcccgtgtccccggtactgccgctcccgcccgtcgttcctggcctccctccggctcgcaagtccgacagcaagtctccgtgaccgcgtgcggcctttagctccggcctccgggttcgtgctcgtccccggacccctgctcacgagctggtaacgaagttctcctattgtttcttagttctttgtttttcgttttgttttctttacttt

SEQ ID NO: 40326 - DNA, 302 bp, Setaria italica
  misc_feature (300)..(300): n is a, c, g, or t
  Peptide Sequence Number=SeqID_106300
agaaatcctttccatcacgcttgggcttctgtgaagtttactcttggataataatactcttggacttgacagcgtcttaaagattacactagggtaaagtttagaaccatccttcgagcaatatttgcatgttgctcgaaccgtttctctctccaatgtcttcaaatctatgttttcccttagattgagacagccaggacatatttgatttagaaagtgaacaacttcatcgataaagtatgggttgtgcaccgttgccgccagcttagtcacaccaaaatgcccatcacagtcacgtcnct

SEQ ID NO: 40327 - DNA, 557 bp, Setaria italica
  misc_feature (523)..(523): n is a, c, g, or t
  Peptide Sequence Number=SeqID_106301
tttttttttttttttttataacccatcaagaaagtttgcattatcagcagaaccgaatcataatacaatgtctcacacgtcactagccacaagtatctaatcttctacaggacacaacgcatgccttgtgtttactccactgcaaggaaagaaaagcagaaagccagaaggagagaaaaggattacatgctacaacagtattagtatgaaatggctcatgggaatgctccgcaatcaaacacgtcacaatcaaatctgtcatatcttaacggccaaaaatttcaactgcgtggtaatctgaaaaggaggcattacaagcagctcgattgtccaagaattttcaagcctcaccaagtgagtacactgtgacttcaaacactagggatgttttctcttcttggtctttgacctgctagaggcatattttcgcaatctataaagtattttcctctcgctcacccgcagcaccagagaatgatacagcttcctttcactgacaatgcagcacgcttgcagctttccncatcttcttccaaagtgtttgagccatacagact

SEQ ID NO: 40328 - DNA, 375 bp, Setaria italica
  Peptide Sequence Number=SeqID_106302
tgtgttttttagacgaggcatggccccatttccatttttattaaatgaaaattaccagaagaagaaagaaaggaaaaactacttaaacacgcaagctaaatctatcctgattcaagctagactcactaccaccagaacatgagaacagaggggcacttaatgatggcgaagaaacatgactaggttctaaattataagataaaataaccaccgctacacttctaaaaattcaagaatgactgatcagataagtacagatgcaaattctgtccaatttcaaagagctaacaaaaagatactctgattcactatgttggcatgaagaagtacagataattgaacacttgaaacctctcatagacagatacactagac

SEQ ID NO: 40329 - DNA, 748 bp, Setaria italica
  misc_feature (1)..(92): n is a, c, g, or t
  Peptide Sequence Number=SeqID_106303
nnnnnnnnnnnnnnnnnnnnnnnnnnnnnnnnnnnnnnnnnnnnnnnnnnnnnnnnnnnnnnnnnnnnnnnnnnnnnnnnnnnnnnnnnnnnctacaactgaatagcagtaagcagcacacacgaaacaaaagttcaacaacactttcaacactgagtcgcacaaggtttaccacagaaactttagacccagagttctaaccggaaacaacttcagaaattcaaaatacttcggtacatgcatcaagtacataagccaaacatagcagataatcgtcttgggtacatatcacaagctagagagtccaccaagcatgttaagcagatccattggaagcattgccgtaggtttctcttatcatctcctcgaaccaacacttgagctcacagcaagtcacaagcacaggcaaacgatacagattgagtgaagggataaaaggttttacctgccggaaacacaataccacaagttcgttctacctgcgtctaggggatggtgagctgctgcttcggctgtcactagagatgcttcttcctctaggaggcctcctagggctacgactccttgatacccttcttggcccctttcttggtggactaggcgatcgagaatatgatgagtctgaccttccacgcctcaatggaggccctcgaccccttcttggagaaatcgatctggagcgggagcgaaggggtcggcgaggaggagaacgacttattaacgtacgttggtaggttggttggtccta

SEQ ID NO: 40330 - DNA, 1587 bp, Setaria italica
  Peptide Sequence Number=SeqID_106304
tgtcgcacaaggtttaccacagaaactttagacccagagttctaaccggaaacaacttcagaaattcaaaatacttcggtacatgcatcaagtacataagccaaacatagcagataatcgtcttgggtacatatcacaagctagagagtccaccaagcatgttaagcagatccattggaagcattgccgtaggtttctcttatcatctcctcgaaccaacactcaagtctacctgcgtctaggggatggtgagctgctgcttcggctgtcactagagatgcttcttcctctaggaggcctcctagggctacgactccttgatacccttcttggcccctttcttggtggactaggcgatcgagaatatgatgagtctgaccttccacgcctcaatggaggccctcgaccccttcttggagaaatcgatctggagcgggagcgaaggggtcggcgaggaggagaacgactataacgacgtggaggtggtggccttcttggtgggctcctcaaccgccttggtggtggtgagcgccgcctaagaggtccaggggagcgcctgcgtggcgatgggctgccacgacccctcctaggtgaaggacgcatcggtgacctatgccttctgggtggagagggagaacgcctcctaaggggagacagtggtctcctgcgaggaggtgtgtcaccacgcctgacaggagaaggatctggtcggcgacggataggtggagaatcaggacgacgcctaggagatgggtcaggtgggcgcctgggtgactcaacccttcgatttgggggagatcgcttccgtggaggtgaagcaggcttcttccgtggagatgattccctaggacgctgctgagcatccttttcagcactgccagcacccttgtcagtctgaggagcatctctttttggaggagggggaggcaccttcataggtgatgcagccctttggcgtggttgaagagtgaatctcaacttaacaacattcccatcaatttgaccaccatccatgtaaagaagagccttctcagcatcagctctcttcttgaattcaacatatccatacccacgaggaagatttaccaatcggtccattgatagctccacattcaccacttcgccaaaatttccaaatatctctttcaagtgagcctcattaacattccttgataaatggtcaatgcagataacagtggactcagcaggaggagacgctttcctaggggatgaagcctttttaggtggtggtgatggcgaacggactttctttgagggtgaacctcttttaggagggtggtgaaggtgatcgacctttccgtgctccaggtgagctgcgcttagccgggggaggggagcggctccgggactgggaggacgacgacgagaaggagcgggagcgcgaccgggagcgagacgagacggagcccgaggagacggagcgggacggcgagcgggaggaggagcccgaggaggagcgcgacgcggagcggccgcgccgaggcttcgccatcgtccccggcggcggccgggcgagcgggggcggcttggtggtgttgggctagggtttagagcgggtagggagga

SEQ ID NO: 40331 - DNA, 723 bp, Setaria italica
  Peptide Sequence Number=SeqID_106305
tacaaagaagaacaccggaatgcttcctgtgagacaatttttgtccagttcgaggatattcaactcttgacattgactcaaagtgtcaggaatttcaccaaagattttgttggatgaaagaagtagtgcagtgagttgtgtaagatgaccaacttctgaaggcattggaccctctaatttgttgtacgacagcacgaatgtggtcaatgttgggatgctaaaaaccactgaaggtaggttaccttctaatttattgtaggagaaattcaaatatttgagctgttgaaggtatgccaggctggtaggtatagtaccagtgaattcattatgtcctagatctaggacccccaaccgcgtaagattgccaatggaggatgggatgggcccattgaggctgttctcactaagatctagatattgtagtttttttagcatcccaatccattctccaattgtaccagtaagtttgttgttatctagatccaagcaaatcaagccagtcaggtttcctatgcttgagggcactaaccctgataggtggttgtcgtccaaatatagttttgcaagtccagtgggcaacttgccaatataatctggaatagctccagttagccgatttcctgctagtgagagcacattcaaatgattacagtttctcaaggcatataagaattcccagcttttggtgtctggtgcttcaagcatgttatcctctagaattag

SEQ ID NO: 40332 - DNA, 308 bp, Setaria italica
  misc_feature (296)..(296): n is a, c, g, or t
  Peptide Sequence Number=SeqID_106306
aggtgaccatgatccatacggtgacgatgtggccattttggatgcccttttatactggcctggagactagacgtaataataatgctctggactactcacttcctcaaattaaaattttaaacaacatgctcccaacctggagcgtggttattatgtcagatgatttgtagctaatggtttgatttaccacttacgtgccattttggtgcaagaacaaggccaagagccgtgtagattagtagaaactagagagttctggtttaccatatatgcttcataatgcttcgtacaaaccntttgtaaacacg

SEQ ID NO: 40333 - DNA, 405 bp, Setaria italica
  Peptide Sequence Number=SeqID_106307
caatacacaatatttggacaataattcataaatacaaacaaaacgctacagttgcacatttatagcaaaatgtcaattttgctactttcaaattgaaaactaacaagacctgtatcagcagcagcacgtggaccatgcggcgaagcgccgcacccacaccgatgtcaccgactcaccgtgcgtccgcagccgcatgggtctgtggccgagcgtgcagcacgcacccagttcggttcggcgttgacggtcagaaccacggctgctggtgatcaggcatggtgtgagctgcgagttcgggggcgtgcgatggcgccggggcgataggcgcgacgcccgcggtgccttgtgagttgtgacgactgacgacgtgaacaggagggagggatgggtaagcgttggggggcc

SEQ ID NO: 40334 - DNA, 576 bp, Setaria italica
  Peptide Sequence Number=SeqID_106308
tacccttggatgtcatggaaaccatgttgtcacttgcataaacttgactcctcgggttaatgtcctctgaaccgcatacagtatcccaagactccgcagcattagcagtttcagaatgcttctgcgcattgcgagtattcttgaatagctccgaacagcaagaacacaaccttcttgacctcgatctggagctagagttaacctcctcgctggcacctaccgctgtgcatgcaaggaggcatgttttgcagagaccatcagagcgtgcaagctgttcatggctcttgcagtaagccaaagatgagacctccaagccatgcgcgaagcaaactaaatccgcagagaaccatgccttgccatggagggcatggtcaagccttgtgcagaagatgccatggcgccttgagcccgcagatgcgcgccagccttgtcgctgcatgtgatgccaaagccgccacgtatagcagtatgattacacaaagctcgccacaagcgtaggacagcatggggcagaaccggtgccagaagtcctgtgatcctgagccggttttcacagccatttctgatcaaagtttt

SEQ ID NO: 40335 - DNA, 536 bp, Setaria italica
  Peptide Sequence Number=SeqID_106309
cggcacggaggtccagctcggctcctccgccctgtgagccgcggccctactagcgggagcgtgcgggacccacccggccgctttgatatgataggccatcatcattagctggttacgagctagcgtcaatttagctttgcttttgtactattgatttggtttgcttttgggttagtagtttaattcatcccggggtggtggctgcggctgtggggtgtcggtgaagacgccgaagctaccgatcagcacggcgcgtgggtaacataaataatgctggcggtagcgtgatgtgtggtgtggtgtgttcaggcttcggagttcagaccttgctatatattcctgcatcaggatttcaggatttgtgctgttcagatgttggcgcgtttaggagtactagctgacgggctccggaacgcctgaactctgtagcctgtaccttcttgtagttgcagcgttaaattcatgcgaacctaccctgtaaatccttctgaaactctgaattcatacgtcccagaaagaaaaaaaaaaaaaaaaac

SEQ ID NO: 40336 - DNA, 390 bp, Setaria italica
  Peptide Sequence Number=SeqID_106310
tgtcaagggaaacttctctcaataatgtgcatagattattttttcgtacttgtgcatttgcttctttttgcagaattattcgaactatatgtgtgcataatcttttaggctgcattatggatgttcttatgcacgtaaatcttgtttctcttgagcacaagttgttcagctgatgagagggtctcattttgtttaataacaaaacactgtatttaccttgtatacttatgccaaccttggtcatctccagatgtgcgcttagctggtgtgcctatcagtttgtaacaatgtgacattccttcttgataacttgtatgaaataatggcctattgtttattcatagaatatcagttttttattggtctaaattctaatctgttactgacaaa

SEQ ID NO: 40337 - DNA, 516 bp, Setaria italica
  misc_feature (496)..(496): n is a, c, g, or t
  Peptide Sequence Number=SeqID_106311
aatgcccaatgaaaccaaccgctgaggtttggggagctcttcttagcgcctgcaagatacacgggaacaacgagctcgctgaacttgctgcaaaacacttgtttgagctggactcacccgattctgggagctacatgcttatggccaagatctatgctgatgccgggaaatcagatgattctgcgcaagtgaggaagctgatgagggacaaggggatcaagaaaaacccgggctacagctggatggaggttggcaacaaggttcacacttttaaagcagatgatgtgagccatccacaggtgattgcgatcaggaacaagctggatgagctcatggggaagattgcatccctgggtacgtgaggactgagtctccgcgctccgagattcaccacagcgagaagttatgtgtggcattcgggctcatgaccttgcctgactggatgccgatccacattatgaagaacctgcggatttgcagcgactgccacacggtnatcaaattgatatcatcagt

SEQ ID NO: 40338 - DNA, 517 bp, Setaria italica
  Peptide Sequence Number=SeqID_106312
ttgaggatgcttcacagaatcaccattcttccatgggtgttggtcagagttatgtgatgccagcagaaacattatcatgtagcgaaaataaagagatgaccgatgcgctagaaacaggatcaggatatgcttgtgttgcagttcatgacattgatatcaacgagttgcctgctactgagccatcaccatttgcagaaaactcttctcctccagctgatatagaggtgcattccggtgaatttgcattaagcggttgtaaccaaggtgaacaaaacgaaggatttgttcgtgcacaaacttcagtgaagaaagataaacagcaagatggtcaaggtgataggcaagctagcacagggcagaatactgctgaagtcatatcaagtggcataatgcttcatgaacatcctcatctcagtcaaaatcttcatcaaactgataaatctgaaggcctgcaaagtgaaatcttcgaatcaggtggcgttctgcacttgctgctgcttgcagcaagttctgcatc

SEQ ID NO: 40339 - DNA, 433 bp, Setaria italica
  Peptide Sequence Number=SeqID_106313
tagggtaactaattagtgggcatgtgccgcccggctggctcgcggtggtggcggaggccgctgactttgggttcgacatgatgatgctggcgggggcgcgacagcgaggcgcggctcgcggcggcgttggagctcgattcgaccatgctggaggttgattctactgtggcgaagctcaatgtggacatgaatcggtccatcacccaactttggggtgcttgatagcttcgctccaccaggagcatgcccggagggaagccccagaggcggagctcatcgtacgcggtggtggtggtggcggcggaagggaggaggagttcgggcgggcgagcgggagcaggagcgacaccgcgaggagggcggtgatgcggcagcgcaccggtcggggttggggattggggacccaggagggtcatcttatcaccttgtgcag

SEQ ID NO: 40340 - DNA, 467 bp, Setaria italica
  Peptide Sequence Number=SeqID_106314
ttgtgtggatctcctcttcagtcatgctttcctccaccatattttcttcatcccatgttcggactaaaagggtgggtctgtttggaaggagatcagctgtgttcctgatagcttcctccaatgccttcacttcatgaaccgtcgcgccgctgcaaatgatctcgataataatatgcttgagggaagagaggtgctctatgccaaaattgagaccgctgcatgcattgaatggaactcgcagcttctcgagtcttggcatggctcccgcttcaaacatcagcccaaccctgttcctccagcaggtgaattggaactccttcagacatatgaacatgctactgctcacaacaagcctttctttggggtctgctgcctttgatgttatccagaggcacatcaacgaaggtaagtttccaaggatctccagtgtctcctcctgtactggatcaacattgatgtctaggtag

SEQ ID NO: 40341 - DNA, 490 bp, Setaria italica
  Peptide Sequence Number=SeqID_106315
ttgagtttcagtttagatatcccagtttagctttgccccttaacagcaggttatcaaatcggaattttaacttgtgcttgttgcatagtgctgtaaatgtttttgtttcaccaatgaactgccaattgcataaagatggcatactgtaggtgtccttaggtggaatatgtggtacctgctatttgatgatcaaacactatgtatgttgtggcactttgacaattttagtgctgcgagtcttatgcctgaacttattgttgacatgcagagggtgctaagacaagatggtggccaacggtgatgcacccgctagagggagtgcagcagcagctgcaagcctgcgcaggcgtagaacaacaagcggtgctgctggtggtggaggtggtgccagctcgatgctccagttctacaccgatgaggctgctggcgccaagatgtccccgaacactgttctgatcatgagcattgggttcattgctgtcgtggctat

SEQ ID NO: 40342 - DNA, 597 bp, Setaria italica
  misc_feature (574)..(597): n is a, c, g, or t
  Peptide Sequence Number=SeqID_106316
tttttagttttttacttttttagtttactaaagtaccttagtaacgaactaacgggaacaaatcaaagaacttacaagatctcgctcgggcatcagacttcagactctgaaaggaaggacgagaagagaagaaaccgcggattcatctcagtcagagggtgctaagacaagatggtggccaacggtgatgcacccgctagagggagtgcagcagcagctgcaagcctgcgcaggcgtagaacaacaagcggtgctgctggtggtggaggtggtgccagctcgatgctccagttctacaccgatgaggctgctggcgccaagatgtccccgaacactgttctgatcatgagcattgggttcattgctgtcgtggctatgctgcatgttttcgggaagctgtaccgcactgctaattaggttgctgtttaccaagccgaagaaagcttagtctatcaagagagagaaaccttgtagagcgatttaaatggatatcaagtgactatcagattctgaaaagaatatgctgttgcagaagtttatgcagcttgcaatgctgagctgtcatggttaaaannnnnnnnnnnnnnnnnnnnnnnn

SEQ ID NO: 40343 - DNA, 327 bp, Setaria italica
  Peptide Sequence Number=SeqID_106317
cccacctccctgcgtagccacaacgcgatacggcgacgaccggcggtctcggatcttccccttccgccttgcggatccggcccggcggcggcgagagctcaagtttacgatgtctgggatggcatctgatgatgtaactgcccaagtgagggttgaaggagatgtttcagatcagaaggttgaagacgttcagggccagaatgaaatggatgggatgccctcgcgacaagaggaggaggcagcaattaagaaaaagtatggaggaatattgcccagaatgaaatggatgggatgccctcgcgacaagaggaggaggcagcaattaag

SEQ ID NO: 40344 - DNA, 253 bp, Setaria italica
  Peptide Sequence Number=SeqID_106318
cccgtcgaacttcttatgcatctgcggacagcgatgagactctgaacttgtctgctgaggatctgggccagcaaggagaacctgtcgaggacaagaacaaggaatgagtacgccggttggcagtgcgccttttatacagaagatgccatttgctgtcctcatgcttgccttgtgataataataagtaacgcggatctgtatactacatacaccacattcgcacatccatttcgactgcacatctcaacctcac

SEQ ID NO: 40345 - DNA, 1052 bp, Setaria italica
  misc_feature (1037)..(1052): n is a, c, g, or t
  Peptide Sequence Number=SeqID_106319
cgtccccacctccctgcgtagccacaacgcgatacggcgacgaccggcggtgagtcgacggcaaccggagacgggctgacgttgagctcctcttctttctgtctcaccagatctccacctcccgattccttgttgattctttcccctcccgtgaaccgtacgtgttggtgctgcaccaggtctcggatcttccccttccgccttgcggatccggcccggcggcggcgagagctcaagtttacgatgtctgggatggcatctgatgatgtaactgcccaagtgagggttgaaggagatgtttcagatcagaaggttgaagacgttcagggccagaatgaaatggatgggatgccctcgcgacaagaggaggaggcagcaattaagaaaaagtatggaggaatattgcccagaaagactccacttatatctaaggaccatgagcgtgcttactttgattccgctgattgggctctaggaaagcaaggtggtgttcccaacaagcctaaaggtcctcttgaagcacttcgaccaaagcttcagcctactcaacaaaatgcccgtgcccgtcgaacttcttatgcatctgcggacagcgatgagactctgaacttgtctgctgaggatctgggccagcaaggagaacctgtcgaggacaagaacaaggaatgagtacgccggttggcagtgcgccttttatacagaagatgccatttgctgtcctcatgcttgccttgtgataataataagtaacgcggatctgtataataatactggtgaggttgagatgtgcagtcgaaatggatgtgcgaatgtggtgtatgtagtatacgcggctacattcagcatttcagctgttcggcctttcggatgcctggaacagctaggaatgagcttgtggtgatgatggtgagtcctggacgtgtatgcaaaacacatgcgaattggatggttgatactctctctgaactggagtcactacttataataaagtcaccgaggtccttcgttttaaaaaaattttaagtttaaaaaaaaannnnnnnnnnnnnnnn

SEQ ID NO: 40346 - DNA, 351 bp, Setaria italica
  Peptide Sequence Number=SeqID_106320
agtaggtgtccctcagtggattgatcatattcctatcttattggttggaccaatagctgctttacctgattcattcatagggtataaagattgtgccggactgccggcagcagtatcgtggaatgcaatggcacagataaacttactttattcgcaaaacagaagatggacaggaaataaggtctactaagctacctgcaaaaatcaagttgcagtgcaccagaggtcaattcttgttgaagctgtgggtagcgggcgagggcagatgcgtccgcggcggtgacttgtgcaagctgcattgcgtccggttccgatccgaatgatggtggaggaccgctgcgtgcgtggtgt

SEQ ID NO: 40347 - DNA, 217 bp, Setaria italica
  Peptide Sequence Number=SeqID_106321
gcttggggctgcagaacttgctccatttctaatgtttttaatccttttttctgcaatgatcatgaaccagtcactctttctctaaatttcaggcagagaaggatgagcttcgtgatgagaagcagaagctgaaattagagaaggagagtttagagcaccagatgaaacttatgacctcagctccagcctacatgcctcatccgaccctgatgccagc

SEQ ID NO: 40348 - DNA, 445 bp, Setaria italica
  Peptide Sequence Number=SeqID_106322
ctcgcctttgctcggcggcgatgtctctccctccggctccggccgaaggcggcggcggcggcggttccgcaggcgacgactggttcctcgactgcggcatcctggacgacctaccggcggcggcctgcggggccttcccgtgggacgcgtccccgtcgtcctccaaccccagtgtggaagtgggcagctatgtgaacaccaacgatgtcttcaaggagcctggcagtaataaacggttaggctgttatttcaccccacaacttagatgcatattacctcattgaatccagtcatcagttctgtaattgtcaatctgttgcaagttgcagtttaaggtcgggatcttctggtaggccaacatctaaagcttctagggaaaaacagagaagggacaagctcaatgacaggtttcttgaattgggctctactttggaaccagggaaac

SEQ ID NO: 40349 - DNA, 1252 bp, Setaria italica
  Peptide Sequence Number=SeqID_106323
acaacgaaaattaacgaattggaaaagagaaaacaaggggacaggaaaaaagactctcgcctttgctcggcggcgatgtctctccctccggctccggcggaaggcggcggcggcggcggttccgcaggcgacgactggttcctcgactgcggcatcctggacgacctaccggcggcggcctgcggggccttcccgtgggacgcgtccccgtcgtcctccaaccccagtgtggaagtgggcagctatgtgaacaccaacgatgtcttcaaggagcctggcagtaataaacgtttaaggtcgggatcttctggtaggccaacatctaaagcttctagggaaaaacagagaagggacaagctcaatgacaggtttcttgaattgggctctactttggaaccagggaaacccataaaagctgacaaagctgccattctaagtgatgctactcgcatggttattcaacttcgctctgaagcacaacagctgaaggacactaatggtagtcttgaagaaaagattaaagaactaaaggcagagaaggatgagcttcgtgatgagaagcagaagctgaaattagagaaggagagtttagagcaccagatgaaacttatgacctcagctccagcctacatgcctcatccgaccctgatgccagcgcccttcccgcaggcgccgttagcaccgttccatccccaggggcaagctgcaggacagaagctgatgatgccctttgttagctacccgggatacccaatgtggcagttcatgccaccttctgaagtcgacacctccaaggacagcgaagcgtgccctcctgtcgcataatcgcttcgagcgactggtcgtgctatgtgaattaatctcaactgaagccccctagctgtcgatccattgattgggtataactattgttcttgtatgtggtagttcgtcggtgactgagtaagctgacatttgtgccgccctatagaggctactactacccccttcaatggctgtacaattttttgcggagaagagaagaatgttcgttctcgttctccatagcaacaatgtcaaattaattatgtgtcacatatatatatttgacagtcgtaaattcagtcattttgtaaaacaaaaaaaatatgtggcatgaatctttggaatagacattatatgttcaacggtgctgtggttattgctgatctgttgcagcatgaatgatcgaaacaatcagctagatctagggatgaaaatggattggattcgg

SEQ ID NO: 40350 - DNA, 689 bp, Setaria italica
  Peptide Sequence Number=SeqID_106324
tggatgaatgcccatttctaaagccatggctggtggtatgtggtgacatgcttctgattgttggttaccacttccactacatcagcctcttgtctggagcacttgccagctgcaaagcctaccgcctagacatgtcaactgaacctgcaacttgggtggaggcagcgaaactggagaatcacgcgctctttactggtggcgatgtgaggagcccggcattttcagcacaagccctggacgatggagcggtaggaccaactgcttgtactatgcccatgacactcaaccttggagcttgcatgggctgggcaatgatgcagatgccgtgtgggctgattccactgaccctgaccttgtgttcatgaggacctggtacagacagctgcagccgttctgggtgtaccccagcatgctctactcagatggccagtgattgatatgctctactgaaatttcaccttcaattcttcagaaatagactttttgctttcgcatagatgatgtcattaaggtagttagcaccttgaagctgaaacaagttattcagcgtttgcaggcttgttgtcagtttcaccgtgattaagtagctgtactccctgctacattgtgctggttgtgaacttgtttggttgagcctttttccctgtctgaattagcagttgaaaacttttttacatgcaaaaaaaaaa

SEQ ID NO: 40351 - DNA, 487 bp, Setaria italica
  misc_feature (67)..(67): n is a, c, g, or t
  Peptide Sequence Number=SeqID_106325
atctgtagtcatgcctcatgtcgccacaaatcatgggtggttgtgattcattatatctcatagatgngttttggcatgagtgattgaattgatttcggcaacttattggtcagcgatcctctagcagggtcatctatatgcctctttatttctttccccaatgtcctattcatcatctcttgatgcagcaaaagctgcagctttcttgttcctggtaattttgcttgctgggaagtgaagtcttgcgtacagtggtcttggtgctcttgatgtcctatcaaagcccctcacacagacaaagcctctccaaaagcaatgttgtatgtcttcagttgatagacctgaaacataagtacgtaaagcataagtaaccagacgagaacagatcagatgttccgtggacgcaccggatgcaccactgtcagcgagatgcttttgcatttcagcccctgcgctttcattaaattacgactgcagttacaaacaa

SEQ ID NO: 40352 - DNA, 2857 bp, Setaria italica
  Peptide Sequence Number=SeqID_106326
tgtctctagtttttttttttttttttttttttttttttttttttttttgaaacaatcaaataatcaacgattaatctgatatgttcccatgaatgacctaacaacattaatggtcactttaatggctgagctcctcatgtacaacaacgagaacaaaaatgagtcaattcacatgaaagtacagctacaatggcctgacaataggctctctattccccatcaggtctgttgaattactggtgcagcaaacatgctgccatataagaaccagttggttggtaaaacccaggcatagaatctgtagtcatgcctcatgtcgccacaaatcatgggtggttgtgattcattatatctcatagatgtgtttggcatgagtgattgaattgatttcggcaacttattggtcagcgatcctctagcagggtcatctatatgcctctttatttctttccccaatgtcctattcatcatctcttgatgcagcaaaagctgcagctttcttgttcctggtaattttgcttgctgggaagtgaagtcttgcgtacagtggtcttggtgctcttgatgtcctatcaaagcccctcacacagacaaagcctctccaaaagcaatgttgtatgtcttcagttgatagacctttaaatattgtaggaactgaagttccaaagtacactgttctcctagggaggttccatattgagctccttggaatgtctattgggtttcgacttgagtcatgatcagcgaatacctcatttacttgaaagtatgtcccgttaagtgggaagcttcccctcatggctgttcgacatggtattaaaattgttcctctcactttctgagcctgtgcttctcgtatactgttgcaactaaagcatgttgcactttcacagagtttaccgctctcttgggagttgcaaaatgtctgaggtgcatcagttgactgagctgtttcacctggagtccatatagaaagtagataaggacaaggatcatcaggctctctttggtcaagtccctcgagaagtggatgtgagtctggcagttcatagacttggtgctctgtcctcaagcgactgatattcttgagcttgggagttgggatagaagcagcttcaggagttatggcaaccagggcctttgacatatcagcatcttcaatctcaatgttatttgcttgcatgtagttctttaggttctgagtaaactctgtgaaattaagcttgatagtaggaatttcttcaggatcatcaataaaagcatcttcaatatcctcttttatctctgcagcctcaggttctagttctgggcttgctggctcctcaatgattggacggcatttctccacaacatcgccatgggtatgcgaattccattcaagttgacttacgggcccagaacttatatttgtctggttgcagctttcattttgacttacagttctaaaatttgtatatgcatggttgctaccctctgcagcggttggagtaccagatgtaaccaaactcttctctgcaggtccaggaagagcgagccttgcactagcaaacgcacttgcaaagtgtttgcactcagctcgcattgggcatgcattgcaatttggcttactttttgtacagaacacctttccaaatgtaatcatttggtagtgaagctcatacagtgtccgttgatcaagcttgcatagtcgaggccataggtacttctgtatgttctccagcattggatacagctccaatagatgcaactgaagagactcaggtagaggttgaaggggcacccatccaagcctcacacatatcctaccaacattggtgtccacagggaaagccatgtgatggagcgtcaaaagacgcacacactctacacttttgagtccaagacctctaatgcttaagaggtagtcctttgctttgtctggatcaacatagcgcaaccattcaagatcaatgctcccatggtctctcaccaatcgatttagaaattcttttattcgttctgccaacatgttattcattccccgctctctaattgtttcagatatttccttgacatctgcttgccttattgtttcccaatcaattgagtccttcgcattgtggcctctttctttttttccaatattgcaaagcacttctttcttaaaatatcccaatcataagttcttttcttaccagtcccgacttttgacttctttgcttttgatccatcaataggaacttcagaggaaacttttttagcatctctggaattatctgccatgtatgaagcaactccctctgagatttcgaaatttgccttcttgttttgacataagtttgaagaatatccatctcgaaccttcactgtctgaatttcaaccttatcagtcggttctttgaattctgattgaaaattttgatgtccaattggctttgtgccgatagtaatttcatcttgcagatttggattcctgtgttccgaacttgatggatgaaaatatatatcaactaatggtgacaggtcagctccttctgtaggcttagaaggtaaaggactcttatcctgacttaatgaaccattcttaccatataacagggcacccaaagagtcaaccgttgtgggtttgattgtactgggaaaaccatgatcagatgaaggatactggaaagtagtttcagcttgtgtgccattagaatagtccacagtgttaagggcagtgtatgatgaggatcttcccaaatcgctgccagaggctataccaccaaaatgaacttggccattctgttgataagtatcagaagtgtaaagatgattgattgttttttttctgaggttcttgttaacttcgtttgtaggggttggtcccctttctttt

SEQ ID NO: 40353 - DNA, 423 bp, Setaria italica
  Peptide Sequence Number=SeqID_106327
ttttttgcagagttagcaatattacaactgacctatgcaatggacaaacttagctcaagttagcagtcttgctttcaacagcatacacattacaataattcatcattacgatgattccagtctagattttagcttgacgagggattgtgaaaactaaatcccgaaagaataacacaagtgtatacgcgtacagttgtgcgagtacaatgggtaggaatgtccttgagaacaaacttgaaaggagagcctcatacaaaaaattcacaaggaatgtaataaattcacacacggcagtgcaagaaccattctccttcaaataaaataaaaggagtgcattttcttccctgcgtggaagcatgacggttgatcatctaccggtggagacaccactaaatacttcagcatcaccaccaagtgagttgt

SEQ ID NO: 40354 - DNA, 395 bp, Setaria italica
  Peptide Sequence Number=SeqID_106328
aaactaaactcactggcactgcttccccagcttcgatcgatgatcccctcagcctcaggcgaccttgacctcgatggtcttgggcttcttgggctccggcggcggcagcttctccacggtcacagtcagtacgccgtccttgcacacggcagagatcttgtccatgtcggcattatccgggagcacgaacttgcgcatgaacttgcccatccggcgctccatgcgcaggtacttggcgtcctcgcgctcctcccgccgccgctcgccgctgatcaccagcacccgctcgtcctccacctgcaccttgatgtcgcccgtgcccagccccggcatgtccaccacgaacgcatacgagctgggcagctccttcacgtcggcagggtcccgccatggcg

SEQ ID NO: 40355 - DNA, 445 bp, Setaria italica
  Peptide Sequence Number=SeqID_106329
gagcaaattgatagatcctgagctagctagaactcttaatctttggcattaagtaaatgttgtttctccccagatgcatgctgggcctgttcaatgtatgaggttgcagtgaacattttatcctaaactatatgctcttttttaatctaattgcatgtctgttcattccattccagttaacaatatgaaaagtttgccatgtgttttttggcatgtcaatcatacaagcaagtcttgcatctcttcaactaatcctatgtttgtctctctaccttttggtgctttgttgctttatttggcgattggcgtgtccttcctactctcatcaatgaattgagttaagctgttgaatgaacaaacattcaatatgtgtgtccttccacggtctgatttaaatgtgaactgtggtgtggatgcatggtgatatttgttttgagcgcagttc

SEQ ID NO: 40356 - DNA, 1812 bp, Setaria italica
  Peptide Sequence Number=SeqID_106330
tgttgttgcgtgcgtctcgcttccttccacactccttccctttgcgccgcccgtccacccatcaactccatccgatttttccaacggtggtgcacgcacccgcggcggctagggagcttcgtcgtccaaggacaggagaagcatggcgccggagggtcttcttggcgtccaccgccgcctgttggacgaggccccggcgccggtgagtgacgtgacggggcacggctccggctccggctcgagctcggaagcgatgcggataatggtgggcgtgctggtgacggtcatcgtctgcacgctgctctactgcgtctactgctggaggtggcggaagcgcaacgccatccgtagatccctgctggacagcctgtggccgcggtcgagctcggacctgccgctcatggacctcgcctccatcctcgccgccaccgacaacttctcagaggccaacaagctcggcgaaggcggcttcggccctgtctacagaggcgtgctgagcggcgggtcggagatcgcggtgaagcggctgtcggcgcggtcgcggcaggggtcggcggagttccggaacgaggtggagcttatcgccaagctgcagcaccgcaacctggtgcgcctcctgggctggtgcgccgagcgcgacgagaagctgctcgtctacgagtacctccccaaccgcagcctcgacgccttcgtcttcgatccgagcaagagcgcgcagctggggtggagcacccgtcacgacgtcatcctcggcatcgcccgcggcctgctctacctccacgaggactcgctgctcaaggtcgtgcaccgggacctaaaggccagcaacgtgctcctcgaccacaagatgagccccaagatctccgacttcggcatggccaagatcttcgaggacgattccgacgccatcaacacgggccgcatcgtcggaacatacgggtacatggcgccggagttcgcgttggagggcgtcttctcggtaaagtcagacgtgttcagcttcggtgtcctcctcctcgagatcttgagcggacagcggaacggcgcattgtacctggaggagcaccagcaatctctcatccaagatgcatggaagctgtggacccaagatctcgcggccgagttcatggacccgtcgctcgggcgctcctactccaaggacgaggcctggcgatgctaccacgtcggccttctctgcgtgcaggagaaccccgacgtccggccgaccatgtccaacgtcctgctcatgctcatcagcgaccacatgaagctccctgacccggccatgccgccactgttcacgcgactgaggaagatccccttgtcagcgatgccactcacgaccaagacggagtcaacgacgtctccccagtcgatcaacgatgtgtccatcaccataatcgaaccgcgatgaggtcgttggagaaggtaactttggcgcgctgcatatctagttgttctatgtaattactgcttagtggttgatggattttttgtaggtctgaaaatggagtgataatgagatcccctgatgggaagttgagacagagccgtgcttgaagtgtaaataagagtgcaactattttagaatgagtaacatgtaactctaaaatatgcaagttctaattgtgtgctatgcagcatgcacaagtcacaagtgcaagattcacttttaattttccagatgacaccagggaatgcaggttttcaattttgacaagtttcagaaatttggacagcagactagcaagtggcaaggaggaagaagaaagattccccttttggggtatgtcaaggcacacaggggatagg

SEQ ID NO: 40357 - DNA, 473 bp, Setaria italica
  Peptide Sequence Number=SeqID_106331
ggcggcggcggcagcactagccaacgtcggcattgccgcagcttgtcggtggacagcatcatgggaaacctcaactttggagccctggggcaggtgtcgccgacactgccgccgccgtctccggtgtcaggccccggcggcagcggctcccacactggaagcggaccctctggaagtgccgctgcagtcgctacttctgagcttgctaatggagaattcaccgagtctgagatgaagaagatcatggccaacgatcgcctcgctgagatcgcgctagctgatcctaagagggtcaagaggattcttgctaatcggatctctgctgcaaagtcgaaggagcgcaaggtgaagtacatgggtgagcttgagcgtagggttcatgtgctgcagatggagaccagtacattattttcaaaagcaaatttctcgcagagggaatgtgaagtacttaaaactcagaacaacgagattga

SEQ ID NO: 40358 - DNA, 491 bp, Setaria italica
  Peptide Sequence Number=SeqID_106332
ggatgcacatgcctgatcagtggtcactgatgcacccaacttgcattcttagatatggagaaatcatggtcctcctcccccaactcatttctgttcccaggtaagacgccacagtggtcagaatgccaacagacgacgatagcagcatgcttctcgagctagatcttgtgccttgtctgcacatatgttgctttctatcatgacagatcttggcatgctagtccttctctttctgtgctcttacttatcatccactgtacacggtttgtggcctgatgtgcatgcgtggtgctgttccagaaaggttcaactgatcttcttgcccccaggaacatgtccaacagcatcctacaagcagccatggaatcagctgtgaactgtgaagacatgtgttgtgctaggtgtttttcatcacacttgcttccataagtgggggaaacagcgtggccctttaatgactccactctgtctttcgctttgccaattactgt

SEQ ID NO: 40359 - DNA, 431 bp, Setaria italica
  Peptide Sequence Number=SeqID_106333
tcagtgtgagtagtcatgcagagtatgatgaacagcttctgctatggcgtgtgagttctcaaacttctggcgcaatgggagaggaggtccagtatgtatcccggtggcttattattgcaactggtgagaacgctgaagctgtgcagccagatattgatggcctacaagagttcccgggaacagttttgcacaccagtgcatataaaaagtggcagtgcattcacaggaaagcgcgttcttgtccttggatgtggaaactcaggaatggaggtgtgcttagacctctgcaatcacaatgcagagccccatattgtagtaagagatgctaactattaggattgagtaacgttagtcctgggtagttgtcacttaggaaagggagagattcctgagatggaaggcttctgtggctactgttcatccttgagtac

SEQ ID NO: 40360 - DNA, 903 bp, Setaria italica
  Peptide Sequence Number=SeqID_106334
ctttgcctagcggttaagtagatacgtaggtcccctcccctggcccccgcaaccaagagtcactcgtcgaaagctgaccaggaagacaatactttcccacccacacagtataggtcttttagcaaatggaagcttgctgagtagtagcaacaacctcagccaaatatggccttggagcacaacttgtgccccactacttcaagttggtgttgtaggatcagttgtaattgtggtgcatcaaaccagtgtgtctggaggccatgtgaagactgagttgaggtcacatgacaccatggagttattgccggacaagtgtcaagtcaacgtatcaaatcggttgatctcagcatgtttgttctgctcaattagcccaagactgataaagcttgaaaggatcttgaagagttggtttagcaaaagaaacatggagaatagctcaatgcatttcattgaagctaaagtgacatcgatacctttggtgaaattccgtttggagcttgaaagggacatcactgaagaggatcccatctggaaagatgttccagaatggaaaacactacctattgtccagcgagtcacccttgacattgtagctagggtggaagatgacgataggctgaaggctatttcagtgaagaaggttagacaaccgttccctatagtggacactacttcttggggcagcctgacttcaaatgtttcgttcacacagtttatgtcatttgtattaccaccagaaccgctgtcgctggatgtaaaatggtgatagcttttgctctggtctgcttctcatagggatgataggaaattgcacatatacctcgattccgtgtatacttgagtaggctggaagtgtacctgagaaatggtcatgctgtaacatcttgttaaaattttgtattg

SEQ ID NO: 40361 - DNA, 1095 bp, Setaria italica
  Peptide Sequence Number=SeqID_106335
attatcatgtgtaacatgtggattttagtttttcatgtgtggctgtgatcaaaccaagggagtgtgcagcaaaatggttgatgtctgctgattctagtttgatcaataaacaacttgctggttctggagaaagtcatctgatagatgcattacaaggatctgattttgaaatgaatcgcaatagaataatttctgatgctgcatccctggataggaattctgctcttgatcttttggcatctgcatatggagatgcatcagattctgatgaggatgttctgaacaaaaaattcaggcctctaatgtctccaatgaattaataagtcacacgatcgaatcaccacccaattcttcaagtaatggtggttgtgatgggacaaacatgtcgtcaagtagtaaagagcgccaacaaggaccatcttcccagagctcacagtgtattggtaacacaaacaatggaccaaaaggtgttcgtacaagaaataagtatcaacttaagatggtgctttctgaagggtttctaccaaaagatatttattcagaaatgcaaaagaaggtccaatgtgaaccatcaaggtcaaacatgacttcaacggagccaattcatggcacagattgtcaagctagccgtaacagtgctacagtctgtatggatggtaacagaagtactacgactacggtggacaacttagctacatcgattgtgaaacctgataaggattcatcaagaatgcatgtattttgtcttgaacatgctattgaggttgagaagcaacttcgaactattggtggtgcccatattttcttttatgtcgtccagaatatcccaaaatagaagtagaagcaaaattgctggctgaagaaatggaagtcaagtatgattggaaggatattgttttcaaagaggccagtatcgaggataggaagaagatccaggaagttgtgcaggatgaggaaacaataccgacacatagtgattgggctgtaaaactgggcattaatctttactacagtgctaatcttgctaagtctcctttatacaacaagcaattgccatataatagagttatctataaggcatttggctgcagttct

SEQ ID NO: 40362 - DNA, 1688 bp, Setaria italica
  misc_feature (1628)..(1688): n is a, c, g, or t
  Peptide Sequence Number=SeqID_106336
aacaaagagggcactgtagcgtgaaaggcggaggagagcagtcgtgacttggcacactccaaccgcgcccgcccgcccgccctctccactcggtcgccttcccctcgcgagctcactcgctcgctcgctctccgctccggcgctccccctcggccggccgcggtgccaagggatggatgcgctccgcctccggccgtccctcctctccgcgcggcccggcgccgcccgcccgagagatcattttctaccaccattttgttctatccaacgaaatggtgaagcgcgagtttgtttttccagccaaaggacccaaggcccttccttgtatcaaagtcagaaattcttcgactggaaatcctcttattgtaggatatcacgtcagtcaataagtacttctattaatgcttcgggacagcagctgcaatctgaacctgaagcacatgattctgcaagcatctggaaagcaatatcatcttctctagatgcattttacagattttcccggccacatactgtcataggaacagccttaagtatagtctcagtttcccttctagctgtccagagcttgtctgatatatctcctttgttcctcacgggtttgctggaggcagtggtagcggctcttttcatgaacatttatattgttggactgaatcagttattcgacattgagatagacaaggttaacaagccaactcttccactggcatctggggaatatacccctgcaactggggtcgcaatagtatcagtctttgctgctatgagctttggcgttggatgggctgttggatcacaacctctgttttgggctcttttcataagtttcgttcttggaactgcctactcaatcaatctgccgtacttcaggtggaagagatttgctgttgttgcagcactgtgcatattagcagttcgtgcagtgattgttcagctggccttttttctccatattcagacctttgttttcagaagaccagcagtctttacgaggccattgctatttgcaactggatttatgacattcttctcagttgtaatagcgctgtttaaggatatacctgatattgaaggggaccgcatatttgggattcgatctttcagcgttcgattaggtcaaaagaaggtattctggatctgtgttggtctgcttgagatggcctacagcgttgcgatactgatgggagctacttctacctctctgtggagcaaaactgcaaccattgctggccattccatcctcgctgcgatcctatggagctgcgcgcggtcagttgacctgacgagcaaagccgcgataacatccttctacatgttcatctggaagctgttctacgcggaatacctgctcatccctctggtgcggtgatcaggcgaggcgattggatcggccggtggcggggcggggaaacaactccacggaagaagtttgagtgccggagtaaacgcccgtttgaaactggaagcacatgcatagtatgcacgagggagaggatggctagttggctacggccgccggccggcgcccaataaaattcccccccctgtgcttccgcagtactgcaacgctacttgatgatatcccatatgtccggctgaccggacctgaagtcctgataaggttnnnnnnnnnnnnnnnnnnnnnnnnnnnnnnnnnnnnnnnnnnnnnnnnnnnnnnnnnnnnn

SEQ ID NO: 40363 - DNA, 604 bp, Setaria italica
  Peptide Sequence Number=SeqID_106337
tcggatagggctcgcagggttagaggcaatcagctagataatggttcaagaggttcacaaagaaatgtaagaggaaactgggatagaagaagtgattttaatggcaggcactcaggtttttaaatagaacatatgaatcacataatgtgagtagcaatacaagtatcagaagggggaccagtgagcagcaagttcctttggttgaaaaaactgaacgggaattggatttggaggtcctggctgatatgggttctttaggaaagttaagacttgctagtcatttctccagttttgctaacacttgcagcattatatcacatggccatatatgtctgttgaaatcatgttgtttcactgattttctgagccagcaataaagttcagtttgtcatgtgaaatatacaatatgatgacccactgtatttcatttttgggttttgattcagtggaattggggtttatgctttagagcagtatctaaacgatggattcatgtgtatgcttacatctgttcagtttttgagtctgggtattgcaattttgacaggtccatccacttcaggatggactaaaccaaaaaaaaaaaaaaaaaaaaaaactaacg

SEQ ID NO: 40364 - DNA, 634 bp, Setaria italica
  Peptide Sequence Number=SeqID_106338
cggacagcgacttgtgcaggtaaaaaacagcagcaaacgcgtcaggaaaaaggaggagcaagacaagaatctcaattctcaactcaacagcatcgagcagacgggaaggaatcaatcatggcccgggcggcgaggtggccatgtcggcgctgccgccgtcatcatcggcggcggaggccagcggctggagcgcgcggatcttgatgtcgtagcgcggggacctggcgtcgccggcgcggtcgtcgtaggcgaacccgaggctggcgccgcacttgcggcagagcagtcgggtgcggcgcacgaagagcctgcgcgcgcgcacgtcgacgcagcggaactcgtcggcgtggccgaagcgcgcgtcgtcgatggcgtcgaagggcaccaccccgcgccgcgccgcgcggccgtacccgccgcccacgatccccgccgtgttccggtccgacgaccgcagccgcaggtcgtacccgcacgcgccgcagcagtaggtgacggcggagaggctcctctggagggccgacgcgtccttcttctccatgtccgtcggttgctccatcggcgagcttgcctcgtgttcttggcaggcagttaactgtcgctggattggttgggatcttgcgttgccttgtcg

SEQ ID NO: 40365 - DNA, 1673 bp, Setaria italica
  misc_feature (1648)..(1673): n is a, c, g, or t
  Peptide Sequence Number=SeqID_106339
cctttcctccacctcccctgcctcaccggctcctccccccaaatccgcctcccccgatttcctccccgcctcgcggtttctcgcgcctcaccggctgctgcatcactgccggcgacgtacgggcccagcaccgagccagacccacaggcctgattccctcgtcgtgaggcgtcgccgttccccgcccgccctctgctggtggcgctgggctggcgcggtccggaggggagaaccggagatccgtccgtgtctgcttggattggcttcttctttgtctgaggatatgagcaatgtactcgcccaaaccagaagctagttttggctcaactcataccaactcagttgcaaatcagcagcaaatggaattagctggaaacaatatgggtcctagtaacggagcaaataacaataacaacctagctgcaaggcaacgcctacggtggacaaatgaacttcatgaaagatttgttgaagctgttacccaacttggtggtcctgatagagcaaccccaaaaggagttttgagaattatgggtgtaccaggattaacaatatatcatgtgaaaagtcacttgcagaaatataggctagcaaagtacattcctgatgcttcaactgatggcaacaaggctgataacaaggaccctggggatttgcttgcgggacttgagggatcttctgggttgccaatatctgaagccctcaagctgcagatggaggtccagaaacggctgcatgaacagttagaagtacaaaggcagctgcagttgcgaattgaggctcaggggaagtacctccagaagatcattgaagagcaacagcgcttaactggtgtgaaatctgaaactcctgcagcaggtgcttctgtcacagtatcaagtgatcaattccctgactctgaacggaccgagccctcgactcctgcaccgacatctgagtctccaactcaagttggtgcttcgaatagagacactggagaacgagctgaagcaaccaagagcacctgtcatggtgattctctctcccgtcacgagccactgacccctgattccaactgccagaatggttctcctcctgcgagtccaaaccacgagagggcagcaaagaggcaacggggcagtggtaacgaattcgtagatgtggagactgatttttcccatccgcgccacatctttgagtcgagcttgggcccagagtttgagcagtattcaatgtcctactcaggccattagattctgatgcccccatcatcgctagcttgttgagcagggtgcgcatgatctgatccatgtctgtaggtcctgggtagaatgatgttgtctgaaggtgtgtattgttggtagacagagttgcaggcgtccagtgattgtatacatgacagcttataagttcctaggtttgtaacatgtatgacctgtctgccgttcagaggagatgttgggaggaagattctgttgctgtgtgttacttgtaccatgttggtaatcagtgtcgacaactgcttaacatgaaatcagtttgatttagttctctaatctgtaacgtctgacttcgatcagaagctgaagttaattacaattgtggaaggcaggaacagtgttgtgctggtccaaatggatgcttctatcagggactgccaaggcacacnnnnnnnnnnnnnnnnnnnnnnnnnn

SEQ ID NO: 40366 - DNA, 275 bp, Setaria italica
  misc_feature (208)..(275): n is a, c, g, or t
  Peptide Sequence Number=SeqID_106340
ttttgtttctagctcacctctgatgtactaaacatctgaagaatttggtcaaaaacggatcgagcttacctgcgtttatgctctttgttcagagctgcgttcacctgtgatgtactaatcatctgaatgtggtcaagaaatggtgatttgttagttgttggatcagttataatgttctgacgaaattcagtggattcttggaactttnnnnnnnnnnnnnnnnnnnnnnnnnnnnnnnnnnnnnnnnnnnnnnnnnnnnnnnnnnnnnnnnnnnn

SEQ ID NO: 40367 - DNA, 1549 bp, Setaria italica
  Peptide Sequence Number=SeqID_106341
gatgtacatgggcacgccgcgggactacgagttctacgtcgccgtgcgggtcatgatgcgctccctcacccgggtacgcgccgacgccgaccgcgtcctcatcgcctcctccgacgtgccccgcgactgggtccgcgcaatgacagaggaggatggtatgagggtggtgatagtggagaacctcaggaatccttatgagagcaacctaggagggatcaacaggaggttcaagctgacactgaacaagctttacgcatggactctggtcgactatgagcgtgtcgtcatgattgattccgacaacatcttcctccagaacaccgatgagctattccaatgtgggcagttctgcgctgttttcatcaacccatgctacttccacactggcctttttgtgctccagccttctatggatgtgttcaagggcatgcttcatgaccttgaggtaggccgtgaaaactctgatggtgccgaccaaggctttctggttggatgctacccagacttgctcgacaaaccaatgtttcaccctcctgagaacggcacaaagctcaacgggacctatcgccttcctctcggctatcaaatggatgcatcttactactatctcaagctgcattggcatgtcccgtgtgggccaaacagtgtgatcacattccccagcgccccttggttcaaaccttggtactggtggtcctggccaatcttgccactgggcctttcctggcacaagcagcgctgggatgatcttgggtatgctgctgaaatgccagtgattctgatggaggttttaatgtacatagtgatcatagcagtcactagattggcaaggccagggatgacaaaactgtgctataaccggcggcctgagaagcaaaatgccctggtgcagtggctgatcaagatggctgcgattgtggctatggtggctgcatattccattcctttctttgtgatcccacgcacagttcacccgatcatgggctggtccatctacctatttggcgcactcgccctttcagtggtcgtgatcaatgcttttctgctgccgccacttgacgttcttacgacctggctcgcgattgttggcatgctcttcgttatggcattcccatggtatcacgatggtattgtgagggttctggcaatctttgggtacgcgttctgctctgcgccattcttgtgggcatccctggtgaggatgatggactcagtgcagacgatgctcgagagggatccattattcccccggcttggtgaaccagcacaggagattgaattcagcaagctttactgattcttttatgcacagatttcagatgcttcatcaccacatggacagctgattcagatcggttaattcttgattcattctgacagttttcgctcaggcattctaatgtgttgatagtaatgtatagacattgcctgcagcaaccatgattgatgcagattcaggaaagataggtcagctgtactgaattagaaaaaaaaatagcatatttgctgcatggaatgggtgtggggattgttgcgaaagtaaaaaaaa

SEQ ID NO: 40368 - DNA, 521 bp, Setaria italica
  Peptide Sequence Number=SeqID_106342
tagggttactagaattttacgtaccaatacaaagactacaataaaagttacaaccaatacaaacaacaaggaagaaacaataacaaaatagttcattcacatcaacattggcgtcagtgtcgccagcagttgcagcaacagaatgagcatcctccatctcatcatcctcctcaagaaaggcagcacgctggactggatccatatcagctgttttcttatagaacttctcaaaataggacccctcaactagcttgatttgagatgtggcattccctattgcatgaataacaccaactgttccacatgcattaccaacagtctgctttgtaaagtataccttcttgctcagatccttgccctctgcagtcgatgcgctagaagcgcctggttcttccttctcctcgtccagggaggtgagcgggtagaggaagaggacggcgagcacgggatggggcaccatggcgagcagctcgtcgtcgaggccgtagacgtcgcagaactgcacactcccccgtaccggg

SEQ ID NO: 40369 - DNA, 525 bp, Setaria italica
  Peptide Sequence Number=SeqID_106343
tacagcgctctattccaagaaaagcatctgcaaagagcaaggccaggaatggttgggcctaggattgccaggatgagaacagacaagagaacaacggtatctgatcccactatatcgtagagttggtgtcatactagtatcagcctaaactgcagaaggggatttgttctatcgtgttcgaactgtaagcttctggggggttaaagttgcagaggaaacagaaaccgcaggctgaaattcaatcctgatggtttggaaagaggcaagaactttgttggtgctccaggaagtgatggtgacacggtgcctgcatgctcgaaagaaacaatgactgctagaaacaagcacagcaatctgaccgtggaggaaaacctaccttctgactttctgagcaaagaggtaaacagggcagcctcagatgaagagtttccaaggaaggcagcacttttcaatatttggaggaaagtggtattgtagaacttcacattcttccgtacctgacaaaatgacctttttttccccgtg

SEQ ID NO: 40370 - DNA, 493 bp, Setaria italica
  Peptide Sequence Number=SeqID_106344
aatggaagcttgatttacttacagcacaagctaccaccattacccagggaaagaagtaccgctcatctgctaaaactagagctaacggacagcttactggcttagatgagaaattcgctaagagaagtctagagatgaatgcagttcttggaaaactggctgcaaccacccaggagttgtcttattaccattcagaagctgatattggagtctacctgtcatactgtgacttccagtcttatgtgagaagtaacctggcttgcacgaagggactaagcagatggttctctaagaaatttaagaagggaccactccagcttgttgccaaagatgacaaaccaagaggagattttgtgaactctcaccattctgttgtcgaactgaaccgaattaactccatattcgctaaaaagtaagagacggtacataagaagcacaaagtagaatatgcaaaaagaggaatgctatagtatcaatgctgagaattcaattg

SEQ ID NO: 40371 - DNA, 257 bp, Setaria italica
  Peptide Sequence Number=SeqID_106345
gggggtgggtcgctttacttttgcctatgtacaattcgagccaaggcgcctccggttctcctgtctccgctgtgcctccgcctccgctgctgcacttcctccttccgctgaggaagcggcgagcgattcagccgttggcagggccgtgcattccgcagggccggtcgcttccgggttgggcgggggcggctgggatcaccggcctcggcggctaccagtgatcagcagctcgtgcggccgcagcagcgtcggggagg

SEQ ID NO: 40372 - DNA, 485 bp, Setaria italica
  Peptide Sequence Number=SeqID_106346
gaaataatctatacaatgaacccacatgacaaaagtttacctatataacaaacctgtacctgtatcttgaacttaaagttaaattttgaaaaattataagaagtatgaaagttaagtgattctgaataaagtaataccagttaaaatgcttatatagtagcccaaatatgaaattcatttgaaatggggattattttaactcttaaatttcattatataactttttatgcataatatatatgttgtctatccattgagactaagttttaacacaaggatagtatatatcttttttatcttcattatgtcaagcacaatgtatttaggcagtattatgtaagtactagttggaaagaaaaagaaggaaagagaaaggatcacacaaaagtagtattgcagaaaagagtttcaagaaggacgttgctgactttctcaaaaataacacaaagtatttggttggaactgaaaagaggtgcctagatctt

SEQ ID NO: 40373 - DNA, 576 bp, Setaria italica
  Peptide Sequence Number=SeqID_106347
catcagttttaattcatgccattcagcgacaccggtcaacaaagctttgagcatcaggtttcaggtgtcattgagcatcaggtttcaggtgtcattttcaagttacagtaaactgaatacatgagccaacaattgtgcgtgcatttgcatgtgttgcaactgcaagtcttcagctgagcacttctattggtgtttttgatggaagtttatcagtgcatgtacaagccaccagtgatgtgcaaatggctcgtgatcacgagggggaggtgcatgcgtgaggggcatgtggtcagcccaactaatgggctcaattatgatgatgtggtttgttttaaatattgagggctagttattagcgatctgctgtgggttgatatgttttgaaggaaaaaattttttagaagaacccccaatacatagttttgggaaagaactaggtactattggagttgctcaaggaggaaggaagaaatcaatctgttggagttgctcttacgggtgtgctaaacaaaaaaaaaaaaaaaaaaaaaaaaaactaaaagagaactagaccaaaggacaacaacgggggatagg

SEQ ID NO: 40374 - DNA, 906 bp, Setaria italica
  Peptide Sequence Number=SeqID_106348
aaaagttgtttgccggactaagcgtattggtggtggatttggtggaaaagaaaccagatcggcattatttgctgcagcagcatctgtaccctcttattatctaagaagaccagtaaagattgttttggacagagatattgacatgacaatcaccggacagaggcacagtttcctggggaaatataaggtgggatttaccaatgacgggaagatgctggctttagaccttgaaatttataacaacggtggaaatacacttgaccagtctcttgcagtcttgcagcgtgctatgcttcattcagataatgtctatgatatattaaacatcagggtcagtggtcaagtatgccttacaaacatcccaagtaacaccgctttccgaggctttggtgctccacaaggaatgctgattgcagagaattggattcaccacatggctatggaactccaacgaagtcctgaggaaataaaagaacttaattttcacaatgatggaatcgagctgcattatggccagttgctccagaattgtacaataagttcagtgtggaacaaactaaagtcatcttgtaactttgtggaagctcgcaaagcagtaagcaattttaacactaataatcgttggaggaagcggggaatttctatggttcccacaaaacttggcatatcctttggtgcaaaattcatgaatcaggctggcgctcttgtgcaagtttacaccgatgggactgtcttggtaacacatggcgggttgagatgggacagggtttgcacacaaaggtggcccaagttgcggctttaccgttcaacatcccccttggctctgtatttatattcagagacgagcactgataaggttcctaatgcatcagcgacagcatcctctgctagttcagatatttatgg

SEQ ID NO: 40375 - DNA, 1840 bp, Setaria italica
  Peptide Sequence Number=SeqID_106349
aactccagtcagttacttctctcacaagtttaaaatgattttggaggcaacagggtgcaactgaaatctaaaacacagcaacataaactctactagtgctaatcatttcactaagtagatgatctagtccaaaccggaccaaaaaggaatcaaccacggcaagatcaagcgcaagtagggcaaatgttgcaacccggcaattagcctgaatagctccagtttacagtaacgataatgtcgataaaaatggcttggaatcagctgaacatgtccctacggctatgaaatagcactgcagaaggaaaatggtgcactccaaaactttcgaaactgcctcagtttctcatggaccttcatgctatcttggtcctcaaacttcatttcacgttcactagctccacatcaaagatgagagttgagttctgcggtatcggccccactctctggctcccgtaacccattgaaggtggaacggtgagtctccttttgtcaccaacccgcataccattgacgccgacgtcccatcctttgataacctgcccaacacctagtctgaactcaaatggtcttccgctaacattggagtcaaaaatcgtgccattctttagcttgccaatatatctcatagcaaccttctttccattggtggcttttttaccatcaggcttgcccagctccatctcctgaattatcataccattggcaaaagtccgtgtttgtagtggctccttgctatctgactctacaagtccagttggtgactgattttcacttctgtttgtgtcctgtgctttctttttcttgttctttttattagcctcctgagcagttacagcctcaccatctttgtgaatattgtttttcttagcagattgctcatcggtaccagcctcagaagcacttgtgttcttgtttttcttcttatgttttgcactgacaggttcagctgaagcatcttgttgcttaacctcctttacatcattgttcacctttccgttgtccatagcagtgcttttgtccttggtctttttcttcttctttgatgccccatcattttcagcctttacatcccctgaagagtcaccacgatctgtaatggctccacttttccttttccggtcttcattgctagcctccttgtcttttccccctttttctttgaaacactctcggaactcttctttgattcagaaaatgatacaggaaagccatcttcatcttcactttccaaggattcagtagcaggatccctcacaacaagctggagttgagacttatcaccattttcactgctccgcttcttgtttgatcccttctgtacttcacccgcagaaggcttgtcatcctcttgaatttcctcaataacaactgaacttttgcccctacgttgatcgtatgccatctcttcatcatcagactctgaatcatagtctgaatcatcttcactgtctgaatatcccataaccatgttattgtcatcatcatctaccaagaaaccatcctcgtcggagccttgaagagagtcactctcagcatcactgtcactcatatcttcctcgtacgcatcagcgatgtagtatccaacaagatggacactcctctgcccaatcactgaaaaagtgacttccacctcatcaaactccagctccaggtggcatgtttccgactgctctggcaccaaggcacaaaggtaaacgggatccttgctctcgacgctgcactggagcacacacttcttccggccgccacccttctcccccttaccggcctcatcccccagcgttgcctgggtgaggcgcaggcggccgccacagtcgctgtgggtgagcgtgtagggctt

SEQ ID NO: 40376 - DNA, 590 bp, Setaria italica
  Peptide Sequence Number=SeqID_106350
aaaacagcgatacgggcagcattaagttttcttctcatctacaaggcgattacctctaaaaactgataagtgcaaattctctgaaatttgtccatgctgtgactgcggaggctcattagcttcgaactgacttcaaagaattcagcaacttatcacgaaaaatagaacaagccagctagactacactctgtacttaccatacatataagggttccatatctggattctgacagttcatgcacgcagactgttggattgatacagctcttaggatagtggagaaataaggcgcatatacttttatcctcgttaagctgtcagcttcgctatccaaatccaacaaccaacaagctcaggagatgatctttgcccaacacatggtgttcatagtctcgtagctgtagccccctgaattttagggacaaattcaaacgccatttacaacatttctggctctagcctgcagcctttgctgccatggacatactaagcatccgccggctacctctgtcgttagtttgaggtaatagtcaggttcttctaatctagtttgatagatactccctccatcccaaaatattcattttagc

SEQ ID NO: 40377 - DNA, 475 bp, Setaria italica
  Peptide Sequence Number=SeqID_106351
caggtgatgagcaggatgatattggaatgacacagtccctgatccacttggcactctcaaagtcataacctctggaaacaggttctgaagtagaaacagaactgcaatccagatcagcacaaaaaccagaaccaccagttacactcacagagactcgaggtctccattctggaatgtcagcctggtgctcaggtccaattggcacacactttctagggaggtactcatgaacaggtgaatcaatgtccccaacctggttatatccagcaactgttccccaatcttcaaaataactagggaaagaagtcacccaatcaggcaattgtaagttctctactccaactgattgttcgtggttagggcaagggatgcctgaactaacgctgcaggttgtggcaccattacttccaggaatgtgatctggttgtttggtctcaactaattcatcagctaaagcttgtaaactaaaaaatta

SEQ ID NO: 40378 - DNA, 886 bp, Setaria italica
  Peptide Sequence Number=SeqID_106352
gatttggtagatgtctacactcgcttgtgcactcatggaaagaaggtcctgtgatatgttctcctccatattctttatggtcaccctctatggggcagagaattgtcgatgaaatgttcatgtttaggggactccactgctgaatcctcttcctcatggcaagctactgaagactcaccatgcaattcatcatcatcactgtccacatgcaacaggtctgacctgttctgctgagctctcttccggagcatgaagacattaaaatagtagctaacaagatccttgctagttttatcaggaaatgcaagtgggaggtggtcccaaaagtttttgcccagggagccagaatttgagaaaacaactctttgaaatcgcttctcctcctcatcagtccacctttgagcaatatcctctcccatttcacaaagacctaactcacaaaacttgtcatgtcccaagctcattttgagactttcccttgcttcaataatatgctgtcttgcacacctaacagaaccttcatcactgcattcacaatctgctttgttgtctccaacccaatcaacaggtgatgagcaggatgatattggaatgacacagtccctgatccacttggcactctcaaagtcataacctctggaaacaggttctgaagtagaaacagaactgcaatccagatcagcacaaaaaccagaaccaccagttacactcacagagactcgaggtctccattctggaatgtcagcctggtgctcaggtccaattggcacacactttctagggaggtactcatgaacaggtgaatcaatgtccccaacctggttatatccagcaaacttagtttacccctaaatacttacaaaaattaaacttaagggtaaaagta

SEQ ID NO: 40379 - DNA, 813 bp, Setaria italica
  Peptide Sequence Number=SeqID_106353
gggcgttccaataatgttttactattcctacattgtaagaatcacgcgttccaaatgccctaagagggtctttcatatgaacacaataaaatagattgtacatcaacgaacaagggggatattaaaaaaccccgcgcaagctcaatttagctccacaagcactttacaaaatgccgcaaaaaggctccgagaagctaaagaatgtacagctccatgatgcttccataatccatcatctagagatgtggccatatgtttgagctccatgagcccccagcacattacagcatctcacagcagaattgagttcaagcaccagtctgaactagatgtcatattcaaacttctgcctacgtcttggctatgcattactagattgctgtccatagtttttttttcataacttgcttgacaagcaatgtaaactccaatgtaatatctctattggagaaaacagtacttcagattcttgggcatatcttctctgtacaactcctacacagatgtgccttgattcccgaggtttcttggagcatcattcaagagaactcagcacactgaactcctttaggagtatgagctccattgtgttggccctcaaatgatgctcgcagctcatcttggtcgtagacattttgtgcgatattctctgcatttgagtacaaatgcatctgatttggtagatgtctacactcgcttgtgcactcatggaaagaaggtcctgtgatatgttctcctccatattctttatggtcaccctctatgggcagagaattgcatggtgagtcttcagtagcttgccatgaggaagag

SEQ ID NO: 40380 - DNA, 484 bp, Setaria italica
  Peptide Sequence Number=SeqID_106354
catttgtcaatgcggcatcagaaattgcgtttaactgcacagtagatccaggaattgaggcactaccagtatctagtttttcagcatccatcttttcaggggaagatttgattaacaaacagacattaggttgtttagctggactcaagtcatgaattgatccattttcggttgactttatagtggcctgacaattatcttcttgtgatggtgcgtcacatgtgaattcaagcactgatggatcagcattatcctcccctataagacttttctctggctttaacataaggtaagctttgtcagtaaaactaggatcatcttgtgcagtctcagtggagttgcattccaaaggtatatcagaatcaggggcatccacgaactcgccccacgacataatttctggaagattttctgtatacttcaaatcatgcaccactctttcctgaatgacatcagtcttcccatttgctagacactctaaatt

SEQ ID NO: 40381 - DNA, 259 bp, Setaria italica
  Peptide Sequence Number=SeqID_106355
ccgcggctccgcctgcccggcccccaagcccgtggttttccgcccccggctccggccgccgctccccggccattgggctgccaccatggacgccgcagggtacccgcacatgcaggggaccgggtccgccgcctcctcctcgtcatgccgcgccgccgactactccgccgcgtgggacgccgcgcagcagcagaagcgccagcgctgccaggattcttcttctaatgatcaagttggatctagcacagagaacaaatct

SEQ ID NO: 40382 - DNA, 2230 bp, Setaria italica
  Peptide Sequence Number=SeqID_106356
tcgtccgtccgtcttgtccaatgcgtccgtcttgtacgaccaccgctccctcgtcatcaacggccgccgccgcatcctcatctccggctccatccactaccccaggagcacgcccgagatgtggcccgggctgatccagaaggccaaggacggcggcctcgacgtcatccagacctacgtcttctggaacggccacgagccggtgcaggggcagtaccacttcgccgaccgctacgacctcgtccgcttcatcaagctcgtcaagcaggccggcctctacgtccacctccgcatcggcccctacgtctgcgcggaatggaacttcggtggttttcctgtttggctcaagtatgtgcctggtatcaggttcaggacggacaatggcccccttcaaggccgcaatgcagaagttcgtcgagaagatagtgtcgatgatgaagtccgaggggctattcgagtggcagggaggcccaatcatcatggctcaggtggaaaatgagttcgggccgatggagtccgttgttggcagcggcgccaagccttatgcaaattgggcagcccagatggcggttgggaccaacaccggcgtgccttgggtaatgtgcaagcaggatgatgctcctgaccctgtgatcaatacttgcaatggcttctattgtgactacttcaccccgaacaagaagtacaagcctaccatgtggaccgaggcgtggactggatggtttaccaagtttggaggtgctgtgcctcaccggccggtggaggaccttgcctttgccgtggcacggttcattcagaagggagggtcgttcgtgaactattacatgtaccatggaggaacaaactttgggcgcacagccggtggcccttttatcgcaaacagctatgactatgatgccccgatcgacgaatttggcctgcttaggcaaccgaaatggggtcacctgagggacctgcacagggccatcaagcaggccgaacctgtgttggtttctggtgatccgacaatccaatcacttggaaactatgagaaggcacatgtcttcaagtcaaagaatggagcctgtgccgcattcttgtcaaactaccacatgaattctgctgtgaaagtcaggttcaatggacgtcactatgacctccctgcttggtccatcagcattctgcctgactgcaaaactgcggtcttcaacactgcgacagtgaaggagccaactctgctgccgaagatgactcccgtgttacagttcgcatggcagtcctacagcgaggacacaaactctctggatgacagcgctttcacaaaggatggcttagttgagcagctcagcttgacatgggacaagtcggattatctgtggtacaccacccaggtcaacattggtgcgaacgagcagttcctgaagtctggccagtggcctcagctcactgtctactctgctggacactccatgcaagtgtttgtcaatgggagatcatacggatccgtttatggcagctacgagaacccgaaactaacgttcaatgggcatgtgaagatgtggcagggcagcaacaagatctccatcctaagctcagcagttggccttcctaacaccgggaaccatttcgagtcgtggaacgtcggcgtcctgggaccggtgaccgtctccgggctgaacgaggggaagagggacctcagccatcagaaatggacatatcaggtcggcctgaaaggcgagtcgctcggcctccacaccgttaccgggagctccgccgtcgagtgggccggtcccggcggcaagcagccgctgacatggcacaaggccttgttcaacgcgccggcggggagctcgccggtggcgctggacatgggtagcatgggcaagggccaggtgtgggtgaacgggcaccacgccgggcggtactggtcgtaccgggccgccgccggcggctgtgggcggtgcagctacgccgggacgtaccgcgagggccggtgcctctccggctgcggcgacccctcccagaggtggtaccacgtgccgcggtcgtggctgaagcccagcggcaacctcctggtggtgctggaggagtacggcggcgacctcgccggcgtcgccctcgccacgcggaccacatgaacgtccaagaacaaggcgcgttctaccatcagactcgtacatactcgtaccacaccgtacactcggaaccacagcaacggtatactactacaagaggatggatgagcatttag

SEQ ID NO: 40383 - DNA, 557 bp, Setaria italica
  Peptide Sequence Number=SeqID_106357
aataccaaacctcctcatcggcgacgacggcacgctccggatcgccgacttcggcctcgccaccttcttcgaccccgggaagacgcagcccatgaccagccgcgtcgtcacgctctggtaccgaccgccggagctccttctcggcgccaccgagtacggcgtcgccgtcgacctctggagcaccggctgcatcctcgccgagctgctcgccgggaagcccatcatgcccggccagaccgagatcgagcagctgcacaagatcttcaagctctgcgggtcgccgtcggaggactactgggccaaggcgaagcttcccgacgtgacgctcttcaagccgcagcggccgtaccggcgcaagatcgccgagacgttcaaggacttccctcccacggcactggcgctcctcgacacgctgctcgccatcgagccgtcggcccggggcacggcggtctcagctctcgacagcgagttcttccggacgaagccgctggcgtgtgatccggcgagcctgcccaagtacccgcccagcaaggagtacgatgccaagctccgaagga

SEQ ID NO: 40384 - DNA, 853 bp, Setaria italica
  Peptide Sequence Number=SeqID_106358
tattaattaagcttagggggaattgaaaatattaagtaagttgtaaccagtacaagaaaagaaagaaaggctgaaaactgtttgagcttatacaaggttctactcaaataagaggaaaggtaacaattttttgtgcttattcatttattgcattttaatgtttcttacaatgcatatcagcatcccatcaagcttaggcacgtgttggtgggaagggacactcgtgccccccactacccccacctccacaatttttttgtaaccttgatgcttcttgtcagatgattcgtagctttaaagatgaccaacatatacctgcaggtaattaaagtttctgatatgtactatgttgtggatactccttttttgtttgccatggcaagacagggatgtagtctttcaggctctcatgtttgaactttttcatttttcggccacgagtgtcttgtgtgcttattaaataaggtcactgctatagcatttgcacgttccttggtttacgaagccatggtatttgtgttctaaatagcatatcttaatatggaggccaactgatgatatccaatttccagggaaaaaaacttctttggtccaagttgggcattttgagctaatgtaaagacaagatcctgcttagttactgcatttacctatctttgaagagtacattttctgtgatgtgttcaagaaataggaatcagattctgctgctatttttgatgctgatgatgacatgaaccggaaacctgcatcacttgcactcttcctcactgagcacgggtccaacaccagagtcagttgagcttggaatggagaacgaggacgaatttgatgaagagcatgatgatgatag

SEQ ID NO: 40385 - DNA, 925 bp, Setaria italica
  misc_feature (1)..(47): n is a, c, g, or t
  Peptide Sequence Number=SeqID_106359
nnnnnnnnnnnnnnnnnnnnnnnnnnnnnnnnnnnnnnnnnnnnnnncacacagaatacttgatcctggttcaatgtatgtacacacattggtgatggcctgatggcgagcgaattgaagcttggtaagttgttgtatgtttaggaccctgtgtcccagtcaacaaatagagtacactcaagttatccaggatttaatcactacagtgtctctggatttgttaaaaaaaaagctacattttagagttaagtaaagatcagttggttaattttacttacacctaaattagtttttgcaggattactaaagataacgtttcagaattcagaggcacaacagcagtgtcatcagtccctccccatcagcatgttggtgactccatccacaatcttgctccgcagtgaagatgagagatcatgctcctcaccaaagtgcaccctgtagacttcccactccctatcttccacaacgtgcctgccaatctcagccaagaagattcgtttctgaagattcttgagagcaagggtgatgtcatagaacaccaacggcctacccttgccagagacctcaacggggtttgctaccagcagctctgtgtcaggaccccggtccaccaatgccacacgcagtggtcggaggagttccatccttaggcgacaacacagggatccctgcctttgcagatcaaggatcttctttccatctgattgcactacgaacaaatccacatcacaccttcgattttggctagcatagaatcggccataggagatctgaatgttgcagtccttgactgtcctcatgatgtcatataggaggcccttacgatcaccacactgaatctgaataagagtgtgcacagagcttagagagttgtccattgtcacggagatggtatcaccacctcttgtgctgattgactgct

SEQ ID NO: 40386 - DNA, 477 bp, Setaria italica
  Peptide Sequence Number=SeqID_106360
tttggagccaacagtggttcgcataggtttgctcttgagaaccaagctgttaatgaagctacttttcgttgcccagatgagctaggatggaaaccgcaggttgctatccttgtacctttgtttccattctttatttcattatatcttcgtaacttgtttacgttcaatcattcatttgttctacattccagagggtgcctatattgtcatgtgatggaagcatcttacactcaagacagactacactaccagtgaaggaaataagcgagtctcttcaacaaatgggatatgatgtggcgccttcagatgatgctggtcgatttgtgtgcaactatgtctattatcactctcttaggtttgcagagaaacatggtatcaggtctctcttcgttcatttccccctcttcttggcaattgatgagaaggttcagatgcaatttgttgcttcccttcttgaagtcctcgcttccttgaact

SEQ ID NO: 40387 - DNA, 531 bp, Setaria italica
  Peptide Sequence Number=SeqID_106361
cacttggcacattgcataaagttttagaatctgctattgcagacagagagaacgggtcatcgacgcagggacaaataatctggatccactttggggtcaacagcggcgcaacaaggtttgctcttgagaaccaagctgttaatgaagccaccttccgttgtccagatgagctaggatggaaacctcaggttgctttgttggccaatattcttattattcttatctacacttacatataaatcttgctattgcattttatcagcttcattgttccaatgcagagggttccgattgtgccagctgatggaagcatctcacggacgagagagactaccctgccagtaaacgaattaaccaagtcactccggaagataggctacgacgtggtgccttctgatgacgctggccgatttgtgtgcaactacgtgtactaccactctcttcggtttgcagagcaacacgggatcaaatcgctgtttgtgcatgtgcccctcttcttgacgatcgacgaggaggtccagatgcacttcg

SEQ ID NO: 40388 - DNA, 1240 bp, Setaria italica
  misc_feature (1163)..(1240): n is a, c, g, or t
  Peptide Sequence Number=SeqID_106362
tacgttcttgtctttctttcccccacacccacacggccacaccacaccccgtccgtccccgagacaggccgagaagcaagagcaaatcgttgcaccgcactcaacccagcagctgcaggaggaggaggaggagctccttcgtcgcccccgccccgctctctgtcccgagtaccttacatatacaagccggcctctatccaggttctccggcagagccaaggtttcactgctcaagctgcataacaagatagatgggttccgaggggccttctccgatcaccgttcacgtgaccggattcaagaggttccatggagtcgccgagaacccgaccgagagaatcgtgcacaatctcctgtcgttcatggagaagagagggctgcccaagggccttgtgctcgggagctgcactgttcttgaagcggccgggcagggtgcgctgcgtccgttgtatgaattgttcgagtcaactgtcctggaccgggaaaatggatcaccgaatcaggggcaagtaattctgctccattttggagccaacagtggttcgcataggtttgctcttgagaaccaagctgttaatgaagctacttttcgttgcccagatgagctaggatggaaaccgcagagggtgcctatattgtcatgtgatggaagcatcttacactcaagacagactacactaccagtgaaggaaataagcgagtctcttcaacaaatgggatatgatgtggcgccttcagatgatgctggtcgatttgtgtgcaactatgtctattatcactctcttaggtttgcagagaaacatggtatcaggtctctcttcgttcatttccccctcttcttggcaattgatgagaaggttcagatgcaatttgttgcttcccttcttgaagtcctcgcttccttgaacttacagtaatataatggtaggtctatgagtctatcactaccagttgtgtattgttcccaatttatttagaagggtaagttgttcccaatttacaagtggagtgaataagaatgagaaatcattcatgtcattatgtgtgctccaaaatgtgtataaattttttttcttcttagagtgcatctccatgtgccccagatgtacaaaatattcaaaagcggtcatataatggtgcatgttgttctgagaagaaacttnnnnnnnnnnnnnnnnnnnnnnnnnnnnnnnnnnnnnnnnnnnnnnnnnnnnnnnnnnnnnnnnnnnnnnnnnnnnnn

SEQ ID NO: 40389 - DNA, 700 bp, Setaria italica
  Peptide Sequence Number=SeqID_106363
cacacggccacaccacaccccgtccgtccccgagacaggccgagaagcaagagcaaatcgttgcaccgcactcaacccagcagctgcaggaggaggaggaggagctccttcgtcgcccccgccccgctctctgtcccgaggttctccggcagagccaaggtttcactgctcaagctgcataacaagatagatgggttccgaggggccttctccgatcaccgttcacgtgaccggattcaagaggttccatggagtcgccgagaacccgaccgagagaatcgtgcacaatctcctgtcgttcatggagaagagagggctgcccaagggccttgtgctcgggagctgcactgttcttgaagcggccgggcagggtgcgctgcgtccgttgtatgaattgttcgagtcaactgtcctggaccgggaaaatggatcaccgaatcaggggcaagtaattctggtaagacctcaccttcgcccgatcctatatcagcactgaatgtaaattgtctgacgaagtatgaaactgtgagctagtttggagtagcggttttattagttcctgtgataaattcccaagttttagagataacagcactttgttaaattttttaatttacacaccacctagcatctttcatcatgagattagcattaaattttaaatcaatgccatctatgaactattttttctgcaggcaaa

SEQ ID NO: 40390 - DNA, 1536 bp, Setaria italica
  misc_feature (1)..(10): n is a, c, g, or t
  Peptide Sequence Number=SeqID_106364
nnnnnnnnnntatttctaaagtctactttttacgtaaattttacttgtacttttgttgtacctactaagtaggtccctactgttataagtagcaaatttaacaaaaatactaccttacattcagtgagccgcaaaacagaacacgcgctaccatcccacggatgattacagagtgtttatatgtttataaaaacagaaaatgtatatggtaaaagaaagcaagctgaggataatttcgacaagcctagcccaatgcaagagtagggttacaggactacaggacgcagcacgatatacccctgactggccatgttgtccatgaagttccattggatgaacaattcaaagcacaattacatgactgttttgtgaccacaaaggcctttcatgaattctgaaatgaaactcagaaaggcgcttcgcagtcataaagatgacaactcaaaaaagttttattgtgagtccaaaacgaacaaggggatatcaaactcagaagcatttcaaaactttttgcccatttaccgcacgggctgctggttgtaatgactcttctctttcttcttagctgctgcgagccttgcactccttgctgcggcctcagaagcagcaattttcgcagcggtgtccatctctttgctcgatttcttcttcttcatagaagccatcttctttaggcgctccttcacgtctacagctgtgtcttcatcaggttctgcacttgcagtctcctctgacccatcagctgcttcttgtgtttcttttgcctccttggaactcttgtctttctttttcttcttcttggaggtcttgctctcagaaggggcaggagcatcttcctttttctctccatcaccagtttggtttgcgcctttcttctcagcatcctgtgcagcattgcttgaattcccagagagtcccagctcagccaatactgcatcaagttctgctaattccttctttttcaactcctttttagatagctgcctttctgtatctttggggggtgcagttgggggtgcaactgtcttcataggaggttcgactgcggcttcttccgcttcatgctcaggttcatcctcagcaccatcatcaacctcatcatcaaggtcctcatcatcactctcaatgtcctcctgaagggcggcgcgaacagcatcctcgacgtcctcctcgtccttccccgcctcgtcgcggtgtccagcggtgccccagacggggcgcgggggcgcggtggtggcgaagtagtcgtcgtcgtcgtcgtcctcgacatcggcccaggacttggtggtgagcggcgcgggcgcccagaagacctccttctgcggcggctcctgctgctgcgccgccccgtcgccgtgcttcttcctggaggaggacgacgacccggccgccttgcccttgtcgcccttcttcttcttcttgagggactcgagcgccgcgaacacgttgccggtgttgagcttcacctcgtccgccgctccaccccgcctccccccgcccaccatgctcccctaccgcacgcggtgttgggacccc

SEQ ID NO: 40391 - DNA, 209 bp, Setaria italica
  Peptide Sequence Number=SeqID_106365
cagctactgcgcatcaacccacttgctgcgatgaaccccaccgccttagatcaatcaacactttccttcttccttatttattatagaagtacaattcataattgatctagaaaagaccagaaccaatgattggttgctgcaagaaagcggcagggttcatcgtagcaagtgggttgatacgcagtagctgttgttgttgccataaggcg

SEQ ID NO: 40392 - DNA, 683 bp, Setaria italica
  Peptide Sequence Number=SeqID_106366
tacaccatcaaaatgttaaataaaaactctactagggatttacatgtgggagcttcaggtttgataagctaattcatgcatggtttgttctgatgctatgtacaatgtgaattttcttcaagggcattaatcttctttttgctagttgtcttttgttaagtgattgaattattgaaatgaggaacttttgctaagatctgttgcttgaggtggtaaaggcatcctccaagatttagagttttacagtcattgctgatatcttgtgctgctactatgttacaacctcctagcctgatttaatttcctactgtttaggggcatggataaaatcttctatacatctctgtcccttacattttctgaaaatacgtgtatgagatactacaatgatagatgaatacttttgacgatgaatctgttatgccatttcaaatgttaaagtgccaaatctgaatacttaaatgtgcgatatcagttgtcgaagttttacaagttttgttgcatgcatgatgacatgtacttagtaccagacatggtactgaatatgctcattattgagttctaacttctaatcttgactatagagtggtgtcattttttttcttttaactattaatacgtatcttttgttcgaaaaaccttcattattttgagagtttctatcaacaaatgagaattacccc

SEQ ID NO: 40393 - DNA, 384 bp, Setaria italica
  Peptide Sequence Number=SeqID_106367
ctcgagcgcttcaagtcgtcaacgttgcgttcaaccatccttttttctctttctccgctccactccgtcgtccctctccctcggcctttctttcctggcggcgaccacacggcgagcggcaccgcccttggccaggtcttcgtcgggcgcttcttcggcgacgagcgagtaactggtggtttcagacagacagcaatcatgagtcttgcttgccttgtatgccatggcatgaacagcccctcgcactctcttagaagctactcagtgtcaagttcagaggaggagagccgctgtggtgctgctgtggcctgcttagctcgaagagtaactccagctggaacttcgactagtgtcgggacatcaaaggtgaccccatttccaccc

SEQ ID NO: 40394 - DNA, 1114 bp, Setaria italica
  Peptide Sequence Number=SeqID_106368
cgaaacaatgagcagggcaacataaacggtacatctatacacttgaatctccggaactttacaaccctcagcctaagagagcaaaatgacagattaaaacttgggtaagacaacgaattaaagaatgatgcgatacattcaacacctacatgatgttgctataagctgttcggggttactacatcagaggggactaatttacacagcttctgatatacatctgtacataccattgtggggtataaaaggtttggtcaagcaccaagtgcttccctgatccaacttcgctctgtcgagaaatatgcatttgccaatcaggcaaccagctgtgtttcagcttcaggacctcaccgcagagcaaaggaagctggttcaaaaatgttacgactctttctggagtagtatgtctctcaaggagacggcctcttgggtcagttcagagttggtatgtgaatgaggcttgctccttgcggcccttctcgtggatgtcgtcaattagttgacgaagctctgggaagattgttacgatcgcctgttctaacatcgcgtacgatagttgcttaacacagacgttggattggaggaagtagtacatgtcccttgcactacgtcggtactgcttgtacccaattatgctgactaaggtagatggagttccatctaaaagaagtttcttaacttcactggcatttctagatgcctcaagttgaaactcaaacgagtttgcacagctctttttcgaagtcccagtcccagatgactgcttgtcaaattgacgtattacgggaattccgtttatatccattccaacttggtgaagaatataccattaggccaaagggtatcttgaatccaacgtattacttgaacaatgacatcatctcttcggagccaattgatttgtcttataatccattcatcgattgcatcttccatgaccaacgtatccaaccgcgtcgctttagctggaataccttttcaaccaggttcaataaaggtacgctaacatttgttggcatccactcaggaggaattcctgttggatcctcgaatgtattaagagatgacatgtttgaagaatcagaatatgccctcacaggtttttgtatctgtc

SEQ ID NO: 40395 - DNA, 2977 bp, Setaria italica
  Peptide Sequence Number=SeqID_106369
catggcataatgaaaatagcaaatttcaaactgaaattaaaaagagaaccaagataaatctagtgaaggaaaaatgatagcctccttacatcttgaatccaacgtattacttgaacaatgacatcatctcttcggagccaattgatttgtcttataatccattcatcgattgcatcttccatgaccaactgcaaaatttgttttgatatccaaagaacttgtctccgtatccaaccgcgtcgctttagctggaataccttttcaaccaggttcaataaaggtacgctaacatttgttggcatccactcaggaggaattcctgttggatcctcgaatgtattaagagatgacatgtttgaagaatcagaatatgccctcacaggtttttgtatctgtccgctgacttgtgtatccaaaccagagtatgtttcaatgtgcttagtatcatttgaagtatgccctttattgttcacctcattgtctgagtggcatccgctatttgcagatgaggtgagatcttcatagttactatcaccatcagaaaggctacgagccctttcaaagtttctatgatgcaaattttggttatctgtctcctcgtggttccaagatagagacattctattatctgtgaattgtgcagtggcactagaaggtggcgtgccaaccgcccgttttaaaccatctgaaactcctttaaattgtcgaacaatgtcatccatcgcatcatcaacattaacagccaaagttttcataacagaggtggactttccagcagagtaattctttgatgatgcacttagaaaatcccaaacttcatgctgctctgcaatattcgctatagacaagagatcttgaagatatttgtccaggagaatgcatcgttggtgcacaaggtaatcatcaacactagatgaaagaaaactctttggaggcagatgtaatgaataattaggaatctccttcagttgtcgatgaagacgctcaaaatttcggtatcttcttttcacaaaccaggtcttgttatctgcatcagtcacagcaatagaataaactgcaaaagattttgaacctaatttctcgaaatatgcaccaacaacccggcatcttatcttcggagcatgcaatactacctcaccatgagaggcaagaccaacgactttctcatcctgatttttccttgcatttccactttcactggaaaccatgggttggttacttttgaccaaatatcttttttcaatatcaggagtactactagaccgctttagttcagcttttgcactgttgcttgcttcatgtgttttttccttgctgctgtaattaacttgattcatctcttttggtttcatttcattcttattttgtaaagcaaggggatgactgcctgtgacaaaagcggattgaacattcctattggtactttgcatcaagttgaccatgtatttatcatcaacagatgcaattctctcattgaagtttgaagagatctctttacccactgcccctgcacttggactgttatcacctccagaacctttcaatcttgatgaattgtctgttttattcattttcttctggtaatttcttcctattgcccacatgttctcaagattctcaggggcaagaacctgtgatcttcttttagtagctgcatccaataccaccgcccagtctggttggcgaggctggatggcactgtcatggtcatcctctgacacttttgactttccaccttcagatgtaacaagtgtcctcatgctggaattatttcctggaactaaaccacttggttctacagtcaaattccttgattccttttgagaaccttgtgaaccgcctttgtacgacgaacgatcatgcactaccatcacagttccagtattagacatgtttgtattgcctcctacattgctcgtatcattgttgtttagaaggtagacaattaactcgttcatatagattggactagcgaagttcatcactggctgcaagactaggcaggtcatgagttccctggagaaacagcgaactagtggactctgagcatcttgtggtctcaaaactagagccataatgccccccacaatttcttgaagaaccttgtactcatgctctgaagataatagtgctggatgaagttcctgtgaaactattaggtgctgcttcagtctctcatctctttcctcggaagacaacgtcctcataacatcagcaccaatcagagcttgatttttccggaaaacatctaaatggtttccaatcaaatcaaccatatcccttgttagcaagtcaactagattcatctctttcaccctgcctgatacttcaccaagagcatggagtattaagccccgtatcagttccggggcctccctgtcgggagtaatatctgaatagaacaagtccaaaacaaagtccctcaaaatattctcagtgaaactttcaaaagcagcctcaaccgaaggtgagccaactttccgtctccatcttgaaactggtggcacagttgacagtcgatgatcattagaagacaactgcctctttgacacttgagacaaatatgtctgcttacgtgcagactgttccctccaacggaactccactttgaaggagagatatcggagaaatgcaagtataaggattgacatgggcacatttgtccacattgatttacttgtatgcgtgaggaagtaggagatggcgaagatgcagagcgcccaccagacggtgcgcaccttggcctcctcgatcagatcgtccacgctctccatcctcttcggcatctcggcctgcacgcaggggcgcggcctgggggaggcggcgggggctcaggagggatcgacccgggtaacggatcccccagagggctccgccgccgcgtgcgccgtcgctggagaagaaggccgggccgggcggggtggcggctcggcgactcgcctcgacggcgtattttttttagattttcttttttttc

SEQ ID NO: 40396 - DNA, 661 bp, Setaria italica
  misc_feature (4)..(4): n is a, c, g, or t
  misc_feature (9)..(9): n is a, c, g, or t
  Peptide Sequence Number=SeqID_106370
tttnttttntttaaggtttagtttacggtttccttttctttttgggttttctttagttttcttagttaggttggtatgtgaatgaggcttgctccttgcggcccttctcgtggatgtcgtcaattagttgacgaagctctgggaagattgttacgatcgcctgttctaacatcgcgtacgatagttgcttaacacagacgttggattggaggaagtagtacatgtcccttgcactacgtcggtactgcttgtacccaattatgctgactaaggtagatggagttccatctaaaagaagtttcttaacttcactggcatttctagatgcctcaagttgaaactcaaacgagtttgcacagctctttttcgaagtcccagtcccagatgactgcttgtcaaattgacttatgccggaattccctttatatccatccaacttggtgaagaatataccattaggccaaagggtatcttgaatccaacgtattacttgaacaatgacatcatctcttcggagccaattgatttgtcttataatccattcatcgattgcatcttccatgaccaactgcgtcatttgttttgatatcgtattattccttctgtaaatccaaccgcgtcgtcttttagtcttggttaatttaccttttttcttaacctt

SEQ ID NO: 40397 - DNA, 354 bp, Setaria italica
  Peptide Sequence Number=SeqID_106371
tttaaggaacaaggtatgttaatcgctttccatatttttatttactatgaattactccattcggtcataaatatacataatcagtttaggtttaagatatcgacatggtctataaggagagactttgactattgatttctataaaaatatttatttcaaatgtaaaatgtcatatatattataattttactttatgttaaaaactatttgaagttttagccatttgtgaccggagggtgtactaatttatcagtgatctgttgaaatgtggtgacaaaaaacaattagatataattcatgtcaaataagcaacatcactaaatgtataatcattcactattatgtaacttttta

SEQ ID NO: 40398 - DNA, 703 bp, Setaria italica
  Peptide Sequence Number=SeqID_106372
cgcggtcgcggaggagctcttcctccgcttcgcgggcgagggcgccaccgtccaggtgttcaacgccatgatgggcgtgtacgcgcgctctggccggttcgacgacgcacggcagctgcttgacacaatgcacgagcgggggatcgagcctgaccttgtcagcttcaacactctcatcaatgccagggccaagtccgggtgcttggctgccggcgtcgccctcgacctcctgtttgaagtccggcaggctgggctgaggccggatgttatcacttacaacacgctcatcagtgcttgctcacagagttctaatctggaagatgctgtgacagtgtttgaggagatgatggcttcggagtgccggccggatttgtggacgtacaatgcgatggtgtcggtgcatggccggtgtgggaaggctgaggaggctgagcggctgtttggggagctggtggagaagggttttatgcctgatgcagttacctacaattctcttctatatgcttttgcaaaggagggatgtcgacaaagtggagcgcacctgtgaggatttggttaaggctgggttcaggaagaacgagataacttataacaccatgattcatatgtatgggaagatgggcaggcttgatttattagttggtctgtatgatgagatgaggtctatgggctgtactccagattctgtgacgtacactgtctt

SEQ ID NO: 40399 - DNA, 322 bp, Setaria italica
  misc_feature (273)..(273): n is a, c, g, or t
  Peptide Sequence Number=SeqID_106373
cgatcttcttgcatcgaagtgaggccggagacctggtctgggagcgtgagatgggggagcaggagaacaacaacgccggcggcggcaacaacgccatggcggtggtggacgaggcgccggcggcggccaacggagaaggcgggccgtgccgccggggacccacgcctccagggcaggcccgacgccatccgcgtcgtcccccattccccaagccagggatcatgttcaacgacatcacgccgctgctgctgcggccggccgtgttcaaggacnccgtggacatgttcgtcgagcgctaccgcggcatggacatcgccgccgt

SEQ ID NO: 40400 - DNA, 414 bp, Setaria italica
  Peptide Sequence Number=SeqID_106374
tcgtttaggtactgagttctccgttatatcatgagttttgagaactctccctctaaataaagaagttagagaaagaaaatggcttttcactaacctttccatgccttctcaaactatttgcatttccagaacgcgcgggagctgacgtggttgagtgtgcatgcctcattgggcttcccaagtttaaggtacctatatgtatattctttttttgtcatggtccacaaatatactctttacacgcgcagtttgttgaaggaactgaggattccgaaatattccacctttaactcagtctgaagaagcaaagcctcttagaacatgaccagaagttaaaaaaaaaaaaaaagaactaagtctaacatgtgactacagaataattttactttaaaagaatagaaacaagatcagcta

SEQ ID NO: 40401 - DNA, 1163 bp, Setaria italica
  Peptide Sequence Number=SeqID_106375
gaacgtagaagatcaggcaagtactgctcttaagctcttttattcttgaaacttctcctggtacccaacccttctaagttttagttatttttcaacatatcattgcaagtacaaagctaggcaggtttgcgaattcgcgacttaactttgctagaaagatcactccctaaatcaaattcgattttttggtgaacagcagcagcagcagtaatagcacttgtgtacaaccctataaattatggttactaataccggctttctcttgtgacattttcagaaaagctttccagcttaaccaaacgaacctaaccaagggacaatttaccgaacgaccaataccgcgtcgtcccccacttccccaagccagggatcatgttcaacgacatcacgccgctgctgctgcggccggccgtgttcaaggacgccgtggacatgttcgtcgagcgctaccgcggcatggacatcgccgccgtcgcaggtattgaagccagaggcttcatctttgggccagccattgcgctggccattggagcaaagttcataccgctgcgtaaacctaagaagcttccaggtgatgcattttctgaaagttatgtacttgagtatgggacggattgtttggagatgcatgttggagctattgaaccgggggagcgcgcagtggttgttgatgatctggttgcaactggtggaactctttctgctgcaataagacttcttgaacgcgcgggagctgacgtggttgagtgtgcatgcctcattgggcttcccaagtttaaggatttttacaagctcaacggaaaaccagtttacattctggtggagtcccgcaaataggaacgtagaagatcagaaaagctttccagcttttccaccaaaaaggctcacagcttcattcgttcgcaagcgcaaggatgaatggccgcagaccgccgagtgagagcagtgtaaaccgtgtggaggccaagcggctatgtatctgcatggagagggtgagatggattgggtgaaacgttagtccttgtagcacgtcccgtctagtgttttttaagtagccgtgactggggagagtttgtagctattcccgccgggaacatcagtgttagccagagaatcgaaggaaaaagaaccatgctgatgttgctcggtttttaaaaaaaaaa

SEQ ID NO: 40402 - DNA, 910 bp, Setaria italica
  Peptide Sequence Number=SeqID_106376
aaccaaccagagtatacaagacagttttacttcagaactgaagcaaatttggcaattataactgaagctagcaaccccctttgctaaggttggaagttggaacaatcacgataccgtaaatttaaaggctgacatcccttaggctgaattaggcatggaaccaatatgacacatcttaaagagcattttcaggaattttagtaattgcactgagcttgattgaccacaagtatagaaagacaatggcatcagcccataacaatctaaaatacaggaccaatgaaaacagtagcatgctgcagtgtgtgttgcatatagcatgggttgctagagcttgttgagcaggaggatccaatgaaagcatctgttgataaaaggcacataaattattatgttgctggactgtcatgaaaggcttctgatgcccagaggctactgcgcagtggcagcggcaccctcagccgcggctgctgccggcttcggagtcggagccggcgggtggtgggagatgacaagcggcggcctgggcgcgcgccgctcctcctccgcctgcctccgcgcgttgtacatctcctccgtctcgacgacgacgaggcgcttgacctgcgtgagcatcccgaggagcgacggcgtggtgcggtgctcgacggtgcggtggcagcggcggaggcgcatggcctcaagcgtgcggcggtggaggcgccgcgtcccggggagcccccgcaccagcgtgatgtacagccgcgggctccacgccaccggcacccgcgacttgaacgcgttgaacgcgctcccgctcatctccgcggctcccttccggcgatccccctttcgctcgctgcgtggaggctgcggcggccggaagcctaaaccctaggcggcgacgattgccggaggctttggggggggg

SEQ ID NO: 40403 - DNA, 839 bp, Setaria italica
  Peptide Sequence Number=SeqID_106377
ttttttttttttcctccaggtcaaacactcagttcctccgtggtattcaaagttggagcacattgtcaggagcacaaacgaccactgcgatgtttccaagtcaaaacactcttcgtgctttgtatatggcagagcattatttcatacacgggcaaaaatttgaatagtttggtgtctaaggatatattctgatgtcaaaattatagtttccttctactcctcgattcttgatggttctccaactgcatcttccatgcgctggtaccactcaccgatttgagtattctcaaccatatcctttcctgctctcaagtaccgaataggtctcagaacaccgaagacagcaaggtctgccaagttaggcttggaaccacccaggaaatctcttccattcagggcttcaacccatgtgttggcagcatcatacaatgaagcacgctcatcagttatattgtatttcttctttagcttctttgacaccatgtacatggcagcagcaccagcatacttcacagcaaacctctccgtaaaactgaaattaccatgctttgcaatgtagtcaaaagattctagagcttctgaagttgtccgatatatgttaggagacaagacatgcacaaggtgctcatcaacccaccttcgccattttgcttcatcttcattagtgagttcatcatcaggtctgatcctgccctgtagtatattaattatatctgatgaatccacaagctgttcaccatctactgtcaatatcgggactttcttgtaatcagaccacttgttatccagttgactcaatggattaacttccacaaccttgtatggtatatcatgatagt

SEQ ID NO: 40404 - DNA, 294 bp, Setaria italica
  misc_feature (232)..(294): n is a, c, g, or t
  Peptide Sequence Number=SeqID_106378
tggtgtgttagcggtgagaggctgagattttggacttcttgccaagattatttgcagatcctgtgtgttagcggtgagaggctgagatgcagtgtgatattcggtctcatgttaattaggtgacctccgtagtctgtaccatgctcatgcttgtaacgggagccagtgctgataagttagccatggtgttcattgtgctgatgaacatgaggtctgatattcaacttaaacnnnnnnnnnnnnnnnnnnnnnnnnnnnnnnnnnnnnnnnnnnnnnnnnnnnnnnnnnnnnnnn

SEQ ID NO: 40405 - DNA, 317 bp, Setaria italica
  Peptide Sequence Number=SeqID_106379
tagttcttggttcaaaattatgaggataaagaggaatctaatgcgaacagaaacttggagaggctagagatggcacacatcaggctggaggctgctcttgaggtgtcaggaaaatggcagatcactgatgcatccttgttgcgttggcgcaggaagctgaagcgtgctgcccaagagtgcgatgacacgctgcacaaatgcaaacagaggatcctggaagatgtagagacagaaaaagagggtgagggaattcctcatttcctgtgcgtatggcacatactactaagtcatttgtcttctccgtcatcagccccaac

SEQ ID NO: 40406 - DNA, 409 bp, Setaria italica
  Peptide Sequence Number=SeqID_106380
atttggaagaaactgaaacattgtgagataggtataggatgggatgaaagcaaacagaatattgaaatgactgaggcttggtggaggaagacagcaaaagtgagtgtcatctatgtttcaattgtggctccattttggtgctgttccatccacaatgagcatttcgttgcatctctagtttttaccaagagacctgaaagagaaatgtttatgactttggacactcctgaggaaagatttgattggtttaagagaaagcatgagtggatgactagaaatgatgtgcctaagtagacattgcatttcattcatgttaattaccttccaatttggcttggagcatgaacctgtgtccctgtatcagtatgttgtgtgagttttctttagttctgtatgaataatgtgtgtg

SEQ ID NO: 40407 - DNA, 424 bp, Setaria italica
  Peptide Sequence Number=SeqID_106381
aagaaaaacgacaaaaactacgagtaacaagttggactgagttgatgctctaatcaattttaaggtaaaaacaaagatcaataagatagcgtttcaacataaatccatgaggtctgcagctattaactaccaaatagttaaaacttgtttcgtttggtctgaggaatgagattatccatcactacctcctcacatccaaatctccttgaggaatgcaaaactttaatgcagcatcacttcattcctcacatacacataattagtataaacattagtaatgaagtcattccatcacaattcataagatgaactcataatgagcaagacaatgtagaatgggttcatctatcaaaccaaacaccccaaaaaaattagcatgtaggaatctacaaggatcacatccttgttagcatacaatataaat

SEQ ID NO: 40408 - DNA, 477 bp, Setaria italica
  Peptide Sequence Number=SeqID_106382
ataacagatgtgctaataggataataggaatagatggcctaacttcccatggcctcgcctcctaacagtggtgaatctgaaacttgggattgataacagttgtgctaataggagtaataggaatagatggcctacgcttcccatggctccttcaaacacttgagccaagcatgcgcgaaggccacaggattatcaatggtttgaaatgacaacagccacgctccccaaccaactgatatctcaagctaggaagagcagcaggaaatcttggatcatcgataacattgctaaaaatccaccactcctcctcacatccaaatctccttgaggaatgcaaaactttaatgcagcatcacttcattccagaatccgccctcgtcctccgtagaaggaagcttgacagatgggagcggccgaagtccttcaccgccatggaaagccagggccggttccggctcctccggcaagtaagaatta

SEQ ID NO: 40409 - DNA, 288 bp, Setaria italica
  Peptide Sequence Number=SeqID_106383
acccactgtccctctactacgtcgccagttctggactaactatgagctagcacatggattatacatactagctgctagagttttgcaaaaaataatgggtgtacatctggtacacccatgtccctctactaacgtccgccagttctggactaactatgagctaggaagagcagcaggaaatcttggatcatcgataacattgctaaaaatccaccactcctgtaagcatggtcattgcagagttagttgaggttaaaaacgatattaaacttcaatgagctgatcaaa

SEQ ID NO: 40410 - DNA, 330 bp, Setaria italica
  Peptide Sequence Number=SeqID_106384
tactcacagtaatatatcgaaattacacatggggttgaaacctggctggcgaccagctcgttgcccgcaggcacggcgaaatcttgtgtcaattcttgatcatacgaaagcctgttataccatcataaattgtccaacatattcaagaatttgctcatatagtcatgttaaccttcatgaattatcaacaccacaggatgtcccatcaatcaaagctttgtccgtgcaatttcagtttctcttcttcaatatcagtatcagtagctatatgaaaaggaatttcagtttcttctatacttcccgcagccagccgccggagccttctgtgac

SEQ ID NO: 40411 - DNA, 2494 bp, Setaria italica
  misc_feature (30)..(30): n is a, c, g, or t
  Peptide Sequence Number=SeqID_106385
tttttttttttttttgttgtcaattctacncttttttttatttttgcattccataaaattttatggatttactacatgagtcttaaacatccttttttgcttgtggttccaataagtaggcttctgaagtgcatagctaacagtggtgaatctgaaacttggaattgataacagttgtgctaataggaataataggaatagatggcccacgcttcccatggcctagcctcctgaaaattaagagcatgtcagaattggaataaaagttactcatgagatgtaaaaatttgaaagtagcaagtaccaaatggggtaagcaaggaaagaaatttagggacccagtttcccaataatcttgcctagcctggcatagcaagcggcggcaaggcttccagcagcgatctgctgccgtggcggcacatttgaccaagcatctactttgcacggcaaggaccttgagattccagagcacttaggtattagtagtaacatcaggcatctctagcaactgctacgggaccaatatgcctgccaaaaacatttttgttctggtgcggatagggtcgacacgtcagatttcacctaacctcaactcagtgggcctcaaaacacatcaagggctaacgaaaaggacaaaactggcccatacagcccaacaacaatcctaactcaactcacgcaccaacctagctcacaccctgtccgctcccatcgcagcagccggccctcactgcagccgccgcccctcaccgtcaccaccgcagccgccgcccctcacccaacgacaacgacgatgggcaaggccgggaagaaggccacgaagaaggcggcacccatcaagcctgggggcacggtgtaccaatgcaagatttgcaagctggagttcaaggaaaccctgctggagttaagcctgcaccacggcacctgcctcgccaagagggagctggaggcccagaaagcccgatcccagcgcgcgcagcagatccgaggtgagcgaccctactaccgatcctactcacagtaatataccaaaattacacatggggttgaaacctggctggcgaccagctcgttgcccgcaggcacgacgaaatctggtgtcaattctactctttttttatttgcattccataaaatttatggatttactacatcatgagtcttaaacatcctttttgcttgtggttccaataagtaggcttctgaagtgcatagctaacagtggtgaatctgaaacttggaattgataacagttgtgctaataggaataataggaatagatggcccacgcttcccatggcctagcctccttcaaacacttgagccaagcatgcgcgaaggccacaggattatcaatggtttgaaatgacaacagccacgctccccaaccaactgatatctcaagctaggaagagcagcaggaaatcttggatcatcgataacattgctaaaaatccaccactcctcctcacatccaaatctccttgaggaatgcaaaactttaatgcagcatcacttcattcctcacatacacataattagtataaacattagtaatgaagtcattccatcacaattcataagatgaactcataatgagcaagacaatgtagaatgggttcatctatcaaaccaaacaccccaaaaaaattgcatgtaggaatctacaaggatcacatccttgttagcatacaatataaatcatacaaatacttaaaagcctctgtttattgtactttttgagcatccaccatatttacaaactccttgttaagttgtagtataacttcttttattctctagtgtcaataacataagaatgtttggcaaaaatgtactgcattttctcgacacaaaaaaatttgtaaagtgctacctctcatccgcattatgcagcaacttaagtgaaactgaaattaaatagaggaacagaagcagacttctaaccagaatccgccctcgtcctccgtagaaggaagctgtgccaaacattgttgtagtgtcacaacatatattaaaaggaacagacagatttatattattaaaagttaagtaaataaaggcatgcaagtcttgtcaccaaacttctcagttgtacagatgtagcagtagatctacagggaaaagccatgacagatgggagcagcaccgagagaggaaccgatagacaacggacggcccctgcatagcagaccgtcggcagatgaactaaccttgacagatgggagcggccgaagtccttcaccgccatggaaagccagggccggttccggctcctccggcaagatgcacgcctgccctatgcagatcgacgacccttgacggcggatccatggaaaaccagggaaagtgggggtgcgctcctccggatacgcgctgcgaagggatcccgtccgtctgaacgcgccatggcggctgcgaccacggtggggattgcgacgtggctatggcggcggcgtgcctagggttccagaggatgcgtaggctatccgca

SEQ ID NO: 40412 - DNA, 371 bp, Setaria italica
  Peptide Sequence Number=SeqID_106386
tcttactctacagaaacttagaagtaactctatgaaatttcaaaagttcaagtttgtaaggcttgtcagtattattgcaaaaatattggtaagtttaaaaaatttgaaggaatatgttgttgctgaaaggttaggaattgtgtaacaatctctgtttcaggtggagtctgtttgctgaagtgtcttgtatattcccctatatcacttccggtaacaaatttttaagttgtactatgtcaatcttggtgcagtacttttggtagaacattgactactgggtccataccctttcaaggcaagaaagttgattttttgagtcaatgagatgccacttttacaactgaattttataatcatatattcagaaaaat

SEQ ID NO: 40413 - DNA, 808 bp, Setaria italica
  misc_feature (1)..(36): n is a, c, g, or t
  Peptide Sequence Number=SeqID_106387
nnnnnnnnnnnnnnnnnnnnnnnnnnnnnnnnnnnntttttttttattgaaatttgaagaaatcatcaaccgttaatttctcaactttcacaattacagatgatgtactcgtgtagcaaacagagccgagcagtacagaagaagactctgaaacccaacggccggatcatgaccagcctcgctcgtcgccctcagcaaagccccctcctcactgggtgacgagggagccctcggcggcggccatggagcggcagtagtcggcgacctcgcggaacctgggcacgctcctgaggtcgaccttggtgccgtccctgagcgtgatgatgatgtccccccactcgccgatgaaccgcggcacgaccaccacggacgtcacggaggagtaggggaagtcggtgcggtcggcgccggagagcccggacacgacggtcacgcggcgggaggtgaagcggtagcgcaggatgaaggcgcgggacacggccgccagcgtcagcggcagccacagcagggtcaggcccaggagcaggttcgccgcgaggtcgccgtagtgggcgccgccgtcgaagaacaccgtctccgctccctcgccgcgcgccgcccccgacgagtcggcacgcgcgaggacgagtcgggaagaagcggcgccagctgctgcgcgcctgatctgtgggaggggaatggtgcggaaggagaaatccggaggtggcgtcgggcggagaatggaggagacggcggtggacggcggcggcggcatggcgtgccggtggattatcgctggactctggttggtggtggagctggagggatt

SEQ ID NO: 40414 - DNA, 314 bp, Setaria italica
  Peptide Sequence Number=SeqID_106388
ccaaagcagattttttcaatttgcttaatgtttggtcgaagttcttcttaatatgtcatattccctccatgatataacattatgccaaagttcttgcagttctcttaaatatgtgtggaagttcttcttttaataatgttcattattccctccattgatataacattatgccaaagttcttgcagttctcttaaatatgtgtggaagtgctttttttaacaaaatgtttttcttgttttgtttacaacttctttaaatacaacatccaagaagtatgggacacagctctgattgatcatgaggaactaatggcc

SEQ ID NO: 40415 - DNA, 475 bp, Setaria italica
  Peptide Sequence Number=SeqID_106389
ttttaacgaacaaattaaacttaacaataccaacaaagtaacaaattaagaagtacctgatcttgttagataggattctaccagattcaaccgctcctattgggattcagtacatatgaaccaacagtaactcaatgctgtgctaatgcatatacctgttccatacttccaccttactgaattcaaggaatcacaaagaaagctgttaacacaagcaaagcagattttttcaatttgcttaatgtttggtcgaagttcttcttaatatgtcatattccctccatgatataacattatgccaaagttcttgcagttctcttaaatatgtgtggaagtgctttttttttcaaaaatgtttttcttgttttgtttacaacttctttaaatacaacatccaagaagtatggccatttgttcctcatgatcaatcagagctgtgtccatttactttttatcacagttatctggaaagaca

SEQ ID NO: 40416 - DNA, 459 bp, Setaria italica
  Peptide Sequence Number=SeqID_106390
aacttaacacaattctcaaatatatgtacctttgtattatatctggtactgcatttatttaatacagatggcactgcattttcagtttttgttttcaaagtgcgtattcactctgaaaatactcagcccttactatttgctatatacaatatatgttagatgtttagaataccagatacatgggcctggtcatcaagattgcttatagtataaaaggaaattgggcatgtaatgaaatgttacagcagccataagaggaagaagaataaattattgtaggaatatagagattagtgtcatctataatatttggaaaaacttatgattttctgaattttcattaacaatttcatattaaaccatataagctaaaattctatgaagataggtgcagagtatattctaaaatttaggaaaacactaatacgtaaattagaaaattttaaacatgaaaatatt

SEQ ID NO: 40417 - DNA, 623 bp, Setaria italica
  misc_feature (32)..(32): n is a, c, g, or t
  Peptide Sequence Number=SeqID_106391
ccttggtctagttcttcttagttttttttttnttttttttttttttttttacctttttatttaaactacttggactgcttacattcaatagtaacagtggtgtccatacaaatcgattgaagctttaaattattcagctgtagctccatagttgatagtacatatttagagtggctgaacttttggatgacgtgtcatcaggttgacaagcagcttcagaacaggaaatgaaggcggaggatctgctacatttttgagaaagcttgtctgttgctgccggttactgggtgcttgctcgtggatgatcttgaagagatgtctcccaaaataatcttttggatcttgttgagcggcggcaccgtggaggcggcctcctttgtagctgacatttgtcttgctggctggctgttgtggtgtatcactgcagcgtcagcctgtgtgagcatgagacctcctcctcccagcgacagcgacaggcctagctccatcaggtggacccacggcagcctccggcggaactgatggcgtgcctctggcgtaagcggcgtgggggccaccatcaccctcctaagcgaggagagcttgctgctggcatccagtggcatgggaccgccggcgagagc

SEQ ID NO: 40418 - DNA, 2014 bp, Setaria italica
  Peptide Sequence Number=SeqID_106392
ccattcccaagctagccaaggaatcccgcgtcgggatcggccgaggaagcttccaccccccacggggttcgggatcgctcaattcgacggcggcctcgatttggtctcgttcgctgcagattcatccgaggtggggaatgggggaggggatcaacggcgacgcccgctttgctgcggcgccgtacgaccactgggttctgctcgaccccgccggggggtcgccgcgcccgtccgcgcgctataagcatgctgcgcaagtggttcaagataaactgtatgtggtgggaggaagtcgcaacggccgctctctatcagatgtccaggttttcgattttaggacattcacgtggtcagctttaaatcttaccagggactcaaatcagctgaatcatgaaaataatgccacaggtgggtcgttcccagcattagctggccacagtttggtcaagtggaaaaacaatctagtggttgtagctgggaacacgaggtcatcgtcatcatcaaataaggtttcagtatggcttattgatgtggaaaccaatagctggtctgcttttgatacttatggaaaagtcccaacagctcgaggtggtcaatctgtatccctactgggttctcgattactaatgtttggtggagaggataacaagagaaggctactgaatgattttcatatacttgacttggagacaatgatgtgggaagaagtgaaaacagagaaaggtggtccggctcctaggtatgatcactcagctgctgtttatgctgaccagtatcttctgatctttggtggctcttctcactctacttgcttcaatgatctttacctacttgacttgcaaactctggagtggtctcaacctgacacccaaggtgcacatatagctcctagaagtggccatgctggtactatgattgatgaaaactggtacattgttggtggtggagataatgcaagtggttccactgatacaattgtaatgaatgcttccaagtttgtctggtcagtggtcaccagcatctcagctcgagatccactagcttgcgagggtctcaccctttgctcaaccacagttgatggcgaaaaatttctaatttcctttggcggttacaatgggaaatatagcaacgagatctttattttgagactcaaagctagaaatttagttcaacctcgtcttctccagtcaccagctgcagccgccgccgccgcttctgtgacagctgcctatgctgtaattaccgctacagatgagaaaactagagatattgttgctacagatgactttgacatcaagaaagctctacctgcaaattattccaaaaagtttgttgttgaaattgatgcggttaatggagagaaagataaactagagtctagactggcagaagttcgtgatgagaactcaaaactaaaggataaactagacctggcaaacttgtcatatggtgaattagcaaaggaacttgaatcagttcaaaatcaactagcagcagagggttcaagatgtcagaaactcgagtcccaaattgctgctgcacgtaagagattggaatcagctggttctttggagaatgagctggaagtactgcggcaacaaatatctcaggtggaacaaaccatgacaactactcagagacaaaaatctgggggtgtttggaagtgggtggcaggaagtgcagaggcctccgacgatgaatagttgacaagcagcttcagaacaggaaatgaaggcggaggatctgctacatttttgagaaagcttgtctgttgctgccggttactgggtgcttgctcgtggatgatcttgaagagatgtctcccaaaataatcttttggatcttgttgagcggcggcacctggtagaaaattttcggtaaggcaggcaggctgattagacattctgacggtaagagcaaagattgggattgcatcacattagataattgttttttgagaggctgacggttattacaaatgaaacgatacaaaggtgttcattggttgtgacgt

SEQ ID NO: 40419 - DNA, 1255 bp, Setaria italica
  Peptide Sequence Number=SeqID_106393
tttttttttttaccacagaacagattgatattatttctataaactgtaatatcatccccttgtacagcacaggcgtcatgtcaggaaaattaaaattttcacccgactctccgtaggcatgctgtaaacctctaaaagaatgtgaatttacatcgggagaaatcaagggttctgatcaagtacctcaacagggtagaaggttgagagatgatcaattgattcatcggtcctacgagagggcatatacacactatagaggcatcagtctcttgtacttgaagaaccataggaacgagctgaaaatgaaagcgccgaccactccagtaatgatgagggtccacgagaatgcgttatgtattttgaaaacagtggtctcaaagttcatcccgaatatccccgcgaccactccaaaaatggccaccacaaatgtggcagtcgttagcagcagctcaaactggatgagctggttccgtacattgtccagctgaatgttgataaagtcttcagtgtcatcaatgtactctttaagcgatgtcagcttgttgagagtactgtcgatgacaacgaaataagcttccagtaacatctccagctcctgaatgtgttctgtcgttgtgttatctgagctcttcacactatcgtgcctacttctacacaagctgaaagctttctccagctttcgtgattctgtgggtgatgagactggagatacaggagctgaaactgacgtcccagcagcacctgttgaattgtagcccaacaaagtctgatcaccaaagacagatgattccatcctcatctttttctcggtgagatacatctccgccatatcaccatcatcatccattagttgttctatttcatctctaaccttctggactcttcgggtcaaagcaactaatctactttttaatcgccgaacacgttccaaatttagagtactgatttttgacgtcagctcatccaacaatggatatgcttcgatttccaattctgctgcctgtgcatcgaggaaggagcaagcggcctcgagggcgagctcgagcgcgcggaactcgaagggcagctcgtcgccctctgcgcgctggagcaggcgccgctggagctcggcggcgtactggaggacgtaactgtcgagtgagttgagcaggagcacctcgtcggcggtgatgacgcagcggatctgctcgagattgacgacgatggcgcgctcgcggcccaggaccgtggacgggtagacgaagagcggtccagc

SEQ ID NO: 40420 - DNA, 537 bp, Setaria italica
  misc_feature (451)..(537): n is a, c, g, or t
  Peptide Sequence Number=SeqID_106394
gatgtttaatttattgcattcatctcttcgtaatgtcattaaaaggtattttggagtcttaaagcagaagtggagtattttgaagggcatgccaagtttctcacctcgtactcagaagcatatcattatggcttgtcttgcatttcataatttaatccatgacagcaatttgtgtgataaggagttcaagagatgtgatgatgatgaggagtacttggtacaacatacaagtggcacgagacaaacacaaggagatgagagtgatgatgtggagaatgaggataccatgaataccattcgtactaggatagctgatgctttggttcgtgcgagaggaggagagtaatgttgagggatggcatccttgtatagaacttttgatggatatagttctatttatgtggaccaattactttaatggatgaaaaacatataatttttttcttaaccnnnnnnnnnnnnnnnnnnnnnnnnnnnnnnnnnnnnnnnnnnnnnnnnnnnnnnnnnnnnnnnnnnnnnnnnnnnnnnnnnnnnnnn

SEQ ID NO: 40421 - DNA, 655 bp, Setaria italica
  Peptide Sequence Number=SeqID_106395
tagtaccgtaccgtaattggtaaattgttgttgtcggggatttaaaggccgcggaagaggaaatccatgtggcctggacgcgagctcgccgagcgtgtcaggcatttcccggtcggcacttggcttgcaaggaacaggcactccagctgataaacaaatcgggggagcttgcggttgcttgcacgagaaacggccgaacgggggctctgcctgtgtggctgtgtgtttcgcggctgaattcggccttggcttgctttcggtcgcgctccagccacgccagcttgagcgcgcacgcttgaggccacgccgtgcttgcgttgcgacttgcgaggccggccagcgcgttcctttcgcgatgagctatggacgcctcgtgcagatcgggcaagagcgttgatgggagatgatgcagggaagatttctgaatggtactcctaaccgacgatcgacagcgttacgtcccgaatgatctggcgacagtctgtttttagttctgtataaaaatgtggtgttctaggctgacaagagttttattccacttggcagaatgagagtggatggagtagagtgtgacttgaacgcataagcaagaaaggcacgttgcttgcagccgcagggaagcccaccaaggcctcagtgctccccctgaaactag

SEQ ID NO: 40422 - DNA, 368 bp, Setaria italica
  Peptide Sequence Number=SeqID_106396
ctcagcagcagcagcccagcgccacgcgaatcctcttgctgccgacagaggtgctccacggccgaaccctaggccgcgcgcattccttgcttgctgctcttggtggctgctgggccgctgtatcggcaatccgccgcggagggttgtttaacgcctcaatacaattgaatatgctgctcatttaatttgcccatttggagatcatcagatggattacctcaatctaaggagctctttccatattctcctctcgatacagttgctgctatcactgttcaacgccttggttgtcgcagacttagcctccgagaagcaagccctgctggacttcatctctgcagtctctcatggcaacaagctcaactggg

SEQ ID NO: 40423 - DNA, 2338 bp, Setaria italica
  misc_feature (2317)..(2338): n is a, c, g, or t
  Peptide Sequence Number=SeqID_106397
gctccacggccgaaccctaggccgcgcgcattccttgcttgctgctcttggtggctgctgggccgctgtatcggcaatccgccgcggagtttcgatttgacgaggtttccaacaaggaaagggttgtttaacgcctcaatacaattgaatatgctgctcatttaatttgcccatttggagatcatcagatggattacctcaatctaaggagctctttccatattctcctctcgatacagttgctgctatcactgttcaacgccttggttgtcgcagacttagcctccgagaagcaagccctgctggacttcatctctgcagtctctcatggcaacaagctcaactgggataaaaatacatcatcttgttcatggcatggcataaaatgctcggcagatcagtcacacatttttgaattgagggtaccagctgctggtctcatcggagcaattccaccaaacactcttggaaagctcgattctctccaagtattgagcctgcgatcgaaccgtttgactggaagtcttccatctgatgtggcctcacttccttctttacgttccatatacctacagcacaatgaattttcagaacagttgccttcttccttcagtcctagccttggtgttatagacctctcctacaattccttcacaggagaagttcctgcaagtttacaaaagctaactcagttaactgtgctaaatttacaagataattctttctttggatccatccctgatctcaagcttccaagtctgaaactattaaatctgagcaacaacgagctgaaaggcccaattcctcgttcgctgcaaacatttccaaatggttcgttctcagggaatcctggactgtgtggactacctctagctgaatgcgtagttccttcaccaacaccctcacctgagtcatcttcattgccacaatctccacctttgccacatcataagaagaaactaggcacagggttcataattgcagttgctgttggtggattcgcattgctgatgctagttgtggttgtgttggttgtgtgctttttgaagaggaaacacaaggatgagagtgatgtggaatccaaaggtaagggtacagtcaccaggagtgagaagccgaagcaagaattcagtagtggtgtccaaattgctgagaagaacaagttagttttcttggagggctgcacctatagctttgacttggaggatctactgagagcttctgcagaagtccttggcaaggggagttatggaactgcttacaaagctatacttgaggatggtactgtcgtggttgtcaagagattaaaagatgttgtggcagggaaaagagagtttgagcagcagatggagctcattgggaggttgggcaaacatgccaacctagttccacttcgtgcgtactactattccaaagacgagaagcttatcgtctacgattatattgacactggcagcgtttcagccatgttgcatggtatcaggggtgttactgagaagacaccattagactggaactccagagtgaagatcatccttgaaacagcttatggaattgcgcacatacatgcagaaggtggcacgaagctcacccacggcaatgtgaagtcaactaatgtcctcgtagacaaaaatcacaatccttcagtttcagactatggcctcagtgctctgatgagtgtgccagtgaacgcatctcgcgttgtagtcggttaccgtgctccggagacagtcgagaaccgcaagatcacccagaagtccgatgtctacagcttcggcgtcctcctcatggaaatgctgacagggaaagccccacttcagacccaagggaacgatgatgtcgtcgacctcccgagatgggtgcactctgtggtccgggaggagtggaccgccgaggtgttcgatgtcgagctgatgaaggagcagaacatcgaagaggagctggtccagatgctccagatagcgatggcatgcacagcaaggtcgcccgaccggcgcccgaccatggaggaactgatcaggatgatcgaggggctccggcagtccgccacggagagccgagcatcctctgacgaaaaacccaaggagtccaacccaccatcagtgtaatcctgcgcagtgcagttcccttcgtctgcctcacaagttgcttccagttgaagctcattcgatttgtttatctaatttgtgattgagttcatgtaaaccatggttgacatcaggagcattcagcctcagtaaaaaaagctgggctttctcatcgaaagattgcaaactttgtatcttggtgtgtgtagcatttttccgctaggaaaacnnnnnnnnnnnnnnnnnnnnnn

SEQ ID NO: 40424 - DNA, 1249 bp, Setaria italica
  misc_feature (1203)..(1203): n is a, c, g, or t
  misc_feature (1209)..(1209): n is a, c, g, or t
  misc_feature (1238)..(1249): n is a, c, g, or t
  Peptide Sequence Number=SeqID_106398
acggcaagtacgacggctttggtgtcgagacctgggctaggggaagccgatacaggggccagtaccggcaggggctcaggcatggctacggcgtgtacaggttctacactggggatgtgtatgccggggagtggtccaatggccagagccatgggtatggcgtgcacacctgtgaggacggcagccgatacatcggagagttcaagaggggcgtcaagcatggccttggccactaccatttcaggaatggtgacacctatgctggagagtactttgctgataggatgcatggatttggagtctacagttttgccaatggacatagatatgagggagcatggcatgaaggcagaagacagggattaggcatgtatagtttcaggaatggagagacgcaagctgggcactggcaaaatggagttcttgatactttaagcacccagaactttatccctggatctcctattgctgtgaaccattccaaggtcctcaacgcagtgcaggaagcgagaagagctgcagagaaggcctatgacatcccgagagtagatgataaggtgaatagggctgttgcagcagctaataaagcagccaatgcagccagggtggctgccgtgaaggctgcacaaaagcgcatccccaataatggcgacgatctaccactgtcagtagtgtgagaatgaagccaacataaggttggcatggagctgcttcgcgatgccatcgcttcaccaatggcctgacaaaaccttcggcttcccagtaggggaagccactgctccgccatcgggccatggcgacacctgagtgactgcccgctgcgatcaagctttgggagcaggccaagtttgccgccaccccttacatacatctttgtggtgtcttttgcgacgtagcagaactcctgctcggagaactttccattgtcgaaggcaactggttgaggtcagtagtaggttcctcctgcttttttcttcagtgtaatactcatcctatgttagagctatgatgtacaccccaaaatcaggagacaaaacatgtttcttgtctctcttcaagcatgtacagaacctacatgtttcgcggttgctggccgtgctggttggggaaacctcacgtgccgcccgccactgtttgtacgttgtaccagaacgcttaaagatatcatgatcatgagtgccttctgtaacgtattaaaaaaanaaaaanaaaaactaaaaaaagaagaactagacaannnnnnnnnnnn

SEQ ID NO: 40425 - DNA, 732 bp, Setaria italica
  misc_feature (14)..(14): n is a, c, g, or t
  Peptide Sequence Number=SeqID_106399
cccgcgcgccactncggggtcttctgcacgccgcagtggctgcagcggcggtcgcccggcgccggctgcgacgcgaccgcgccggcggcggaggggttgggagggaggtgcttcggcttgcgcccgcgcttcttgggcttgtgcttgctgcccttgccgccgccgtgcttggacttcttcgacgctggcgccggcaggaagtggttgtaatagccctcggccagctccagcccgctgctgaacggggccgagtccaggaacaggaacggcgagaacgaacctgacgaggagcacgaggaggtggtcgtggtcgacgaggacgaggccgagtcggacaagaacgaggcgcccgagagcgaccaccccggtgcccgcgaccgcttgctgcgcttcgccttgaccggcaccagcgcctccgttgacagcgcgcagatagtcggggtccgcagcgggccgggcgccggcggcagcgcacggtacgcgccgtcgtgcacatgcggctgcggcacccgccgctgctgcgccattgccgttcatcccctcgatggcgtcgcgcatcgcctgctcgctcgcgaacgtgacgaagccgaagccgcgggacctctgggtgtcgcgatcgaggatgatcttggactccaggacctcgccgaaggggctgaaggcgttgtggagcgagttgtcgtcggtaggacccaaggacgaaggaccgaccgaacgaaagacaagacggta

SEQ ID NO: 40426 - DNA, 641 bp, Setaria italica
  Peptide Sequence Number=SeqID_106400
tcctttaagtagtaaagtcggtttcgtacaacttaccgatcagaaatggctcggtcactgttctgcctctgcccgctgggatgggccccatggagtcctcggcttgtggaatcagtccttctcggctgcatacccgtcataattgctgataacatacggcttccgttcccttctgtccttcggtggccagagatctcattgcaggtcgccgagaaggacatagccagtcttgagatggtgctcgaccatgttgtggcgaccaatttgaccacaatacagaagaacttgtgggatccagtgaagcggaaggcactggttttcaaccatccaatggaagtgggagatgctacatggcaagtgttgagggagcttgaggttttgctagaccagtctcagaggaggtatgttggatcctggaggtgaagaccagagaggatccgtttgtctaatctgttgcagctgtgcaactattgtacatgaccacatgccacccaactggcaacatcgacagccagtcgagacttgagcctgagatctacttctgacatagatttttctcgccagaaattcagaatacgaatctcaaaccagaggtccacttctgatagtttttttttacttcgtcctagtaaattttctaa

SEQ ID NO: 40427 - DNA, 663 bp, Setaria italica
  Peptide Sequence Number=SeqID_106401
tattagtaactaactttttgggattctctacagctggtttcttgcaaaggttgctagccaacttgaggttttacctggagctgagtttcgggtggcatttgaggaagcaatgagttatggtggaaaagtaatcctaggagatcgccctgtccagatcacgttaaggaggacctggggaaagatgtcactctggctaacggcaacttttctgtactacattatttccaatcaatttttttaccaagcccggaggaacttaacaaaatggtatgctgttttaatggttcattccatccatgtcaccagttgaaggacatggatgatgttgacatgctaacacttgttattcaagagatgagcaaggcatttcctagtttaatggagacgcttctacatgaacgtgatatgtatatgtcttcgaaattgttgaaggtggcgagggaacattcttcagtagttgcagttgtgggaaaggggcatgtttctggaataaagaaaattggcaacagccaattcaggtaaaaaagtttattagaactaccagtggctaacgaaggtgcttcaaagctgaaaattttagcttccattggagcattgagcggtgtaataatagcatccggaatatacatatggggtagaaaataacaactgtgcacacaatgt

SEQ ID NO: 40428 - DNA, 1187 bp, Setaria italica
  misc_feature (1154)..(1154): n is a, c, g, or t
  Peptide Sequence Number=SeqID_106402
acgaaggaacgcggaaggctgccggcgacgacgcggggcccggggcgacgacggcgggcggtggtgaggaggtgagggagctgcccgaggagctcgccaagggggtcgtgtgcctcgagtgcgtgacgtcggccgaggcggcggctgccggggttggcgggacctgccgcgtctacgtcgtcggcactgctcatgtgtcgcaggaatcatgcgatcaagtgaaggctgtcatcaactacctgaaacctcaggctgttttcttggagctctgtgccagcaggattgcaattttgacaccacaaaaccttcaggttcctactatgaatgaaatgattgacatgtggaagaaaaagaagatgaacacttttgggattctctacagctggtttcttgcaaaggttgctagccaacttgaggttttacctggagctgagtttcgggtggcatttgaggaagcaatgagttatggtggaaaagtaatcctaggagatcgccctgtccagatcacgttaaggaggacctggggaaagatgtcactctggcacagggcaaaatttctgtactacattattttccaatcaatttttttaccaagcccggaggaacttaacaaaatgttgaaggacatggatgatgttgacatgctaacacttgttattcaagagatgagcaaggcatttcctagtttaatggagacgcttctacatgaacgtgatatgtatatgtcttcgaaattgttgaaggtggcgagggaacattcttcagtagttgcagttgtgggaaaggggcatgtttctggaataaagaaaattggcaacagccaattcaggtaaaaagtttattagaactaccagtggctaacgaaggtgcttcaaagctgaaaattttagcttccattggagcattgagcggtgtaataatagcatccggaatatacatatggggtagaaaataacaactgtgcacacaatgtaattcagtgtgccttagtctctaaaaaatgtatttagtttatttacttatatgatttgtttcatttgttttaaatagatgtaacttctaaaattaaagttgaacaaatgaaagaacaggacaacaggtgctccagataatgaaacgtggttcgtttcgtcgaaccaaaaaaaaaaaaaaanaaaaaaaaactaaaaagagaactagaccaagga

SEQ ID NO: 40429 - DNA, 1054 bp, Setaria italica
  misc_feature (1045)..(1045): n is a, c, g, or t
  Peptide Sequence Number=SeqID_106403
acagtccacaaaggaacaatgagaggcaatcgtcagcatgtagttgtcgctgttaaggttctcaacctcatgcaacgcggcgcaaggcaaagttttattgcagaatgcgagactttaagatgtgttcgacatcgaaaccttgtgaagatcttaaaggtctgctccagtattgattttcagggctgtgacttcaaggctcttgtatatgagtttctaccaaatgggaatttggaccaacggctgcacaaacaaagcatggaagatggcgaacaaaaggcattagatctcattgcaaggctaagtattgcaatcgatgtggcagcctcactggattatctacacgaatataagccaacaccaattattcactgtgatcttaagtcaagcaatgttctcctggacaatgatatggttgctcatgttggagattttgggcttgcgaggtttctgcatcgagacactgagaaatcaagtgggtgggcatcaatgagaggatcaattggctatgcagctccagattatgggctgggcaacgaagtcaccacccatggcgatgtgtatagctatggaattttgtgctggagatgttcacaggaaaaaggccaactgatagtgagtttggagaagccagacagactgagtactagtgcggacaaaaggctactaacagaaacaaaagatggcgaagcaacaggcagcttgaactccagcagcagtagagatatgagaattgctagcgtcacttgcattcttgatgttgggatttgctgttcagaggagatgccaacagatcgtctgccaattggagaagctctgaaaaatttgcaaacaattaaggaacaatttctccagcacctctgcagtgaaggagcatcataaggccgctgaagttgcttacgggtaaaaaaaatacaaaaagctgccgaagcgttcccaaaattttgaagtgcatgttgtcttcataaaagcaaacacaactggtcttgtgccaagcaagttcaaacttcatagcagtattcagggcttcaggcgctggtactggttncaagcttgc

SEQ ID NO: 40430 - DNA, 547 bp, Setaria italica
  Peptide Sequence Number=SeqID_106404
agtttacaaacgaacaaagcaggagttctggtatgtgtcgaaagatgcagacgaatcggagaagggcaatatgccgaggcaggatgacaaatggtggctcccaactgttagggtccctcctaatggtctgtcagatgcatacaggaaatggcttcagcaccagaaggatcttgttgcacaagtgctgaaggcagcaatggccatcaatgctaatattcttatggaaatggaggttccagaatcatacatggagtccctaccaaagaatgggaagtccacccttggagattcaatgtacaaacttataactgacgattattttgaccctgaagaacttttaagttctgtagacttgtctgatgaacacaatattgttgatctgaagaaccgagttgaagcctcagtagtcatctggcagaagaaaatgacccacaaggacagcaaattgtcgtggggacatggggtcagtcacgagaagaggggaatgtttgaagggagggcagagaacgtttttctccttatcaagcaccgatttcctggcattgct

SEQ ID NO: 40431 - DNA, 549 bp, Setaria italica
  Peptide Sequence Number=SeqID_106405
tttatatgtgcttatagattcacttacaccattattaatatatgaaaaacaaagtcaacatataataagaacttcaatatttttcaataacacatttacaactaaatacatgccaaatagcagaaaaacctgagtatgatgaaagggaaactatgaaagggaatggaaaagcatatatataataattggtaattgaagtctatcacaactagaaaaagatcacatagtatttatatgtacattattgtgttagaaaataaacaaagggagagatcaaatataagtaattctgattaatcatgggccctaaatttatccacaaacttctaataattatgtctcgtaaaattgctagcccatatagtagcacaagttaagggaatgtacatttagatgaaaaaatatgcactaatttaaaggaatatcccaagaggtagaacttcatgttagaatcaatggaatactgtggaacgagtcattccatgtgaatcttaactagaggccaatttcctgatcaaaataaaataagaaatttctttaaaagctttt

SEQ ID NO: 40432 - DNA, 276 bp, Setaria italica
  Peptide Sequence Number=SeqID_106406
agaaaaatagcccatgaaatgcaagttagataaattgagctgacctagttccccgtcatgtcctatatatgttcgacatctgttgggcaaattcatgcaacaagatcgcaaaacaattctatgcggcgcatgtaatggataagggaaaagatcatgtgtgttgttggaagcctgtattaagtatggatcttaagtcatatctcaaaactgaattcctgcacttctgtgttatattcaagccttattggggagctgctaaatcctgtatatggatca

SEQ ID NO: 40433 - DNA, 968 bp, Setaria italica
  Peptide Sequence Number=SeqID_106407
agcatcgatctagaatctacactcctctaatcccctgaaataacagggggggcatcagcaacgttctgcgtcaaccaaccaccggcacagtcgtgcgggtgcttactgagcatttgagccacaagagcaagaattcagtaagcaactgtaactactcctgggcattgggcttcttctaattctagcatgtcacatctcggaagaattcggtaggaattgatgttggacactgcttctttgcaacaaatttgtacttatgttgactgtacttttctctgatcgcaggaaggttgctcgcaggaccaacactgaataggtggtgcaatgcctttacacagtcacacaattgcgatggcttgtattgtgtgtagtgagcaagagtagaattccaaggatactttgttggctgcagtacaaattttgccaagaaaatagctgaggcagctattagtgatggagggtacgagagtaggttgtactccagaagcgatagctcagcgatgtaactggccaggaactcaagatgcaaagctggatcctcatcacacgcttgtgcagcacgagcaaatctcctcaaaaagcatttggctgtaggtgcagtcatttcaaacttcaagtaattcagtacagaagcttccatctctaaaacctcatctctgaagtaagtgttgtcagttatgtagcagaattcttctacttgtggtgcacatatctcctcgtattttgcagctataagcatgcaagcaacaccaagtaattgcagcctttggcggttgatttcgttgccagaaagataacggtcaatgtagttaactgtcaggtacaaagtatcaggaacaagacggtattcttcagcaacttctacaagccagtctattaaaatagccctcatgcttggattgacatccttttgaatcgtttccatgaaatcagtagatggtcttttctttgtctcagcctctcgcaga

SEQ ID NO: 40434 - DNA, 699 bp, Setaria italica
  Peptide Sequence Number=SeqID_106408
catatcatcagaattacaaatggctttgtatcaatttcatctgtaaacttatgcagcctcaaagcataaatccttctatcgctgagtatagattggtcatgcaccaatcttcttcctttcagaagtgacaaatcagcaagacatttttggttcatggaacccagatcagcatgaagcttcctcttaactggcagaataaaacgttcagcttcagcaactgtgtcactgcacaaagcagatcgaggaatgttgccattgttcttttgatgatacccatcacgatgataatgtaccatcttagcattgtggattcttttgttatcgatacatatgtttcttgagttttgaaaagggaagccagcagcaggccagtccctctcagaattctttcggctaggatacaactcaagatggttagcatgtctgaaatgctcatcattgcttttggcaaatcttcctttgtctctgtatctgcctctgacctcaggactctgccgttcgcaaaatccgtagtcagtgtaatggggaaattcgccatccacgctatggtcgtgcctggctcttctcttttcctgacaatacctttctctgtacatctgtccatcatcagcatcagacatatcagcatttagcattgattggtatgcatggtcatgatgttgctgccactccttggctgaagagaagctacttcttcaa

SEQ ID NO: 40435 - DNA, 416 bp, Setaria italica
  Peptide Sequence Number=SeqID_106409
tgtgctagctagaactagtaggtactagtgttaggacgcacagaagaaggcagctgcagcaacagcaatggggtcggagacgttcctggagatcctgctggccatcctgctgccgccgctcggcgtcttcctccgctacggcatcggggtggagttctggatctgcctcctgctcaccatcctgggatacatcccgggcatcatctacgccgtctacgtcctcgtcgcatgatgattggatgatgatgatgatgagcagggtcgtccggctggcgaccgcgccatcgccggttcggcgctctgtccatccagaattaatgtattgttacatctgaaattatgtgaatagaaagaacaattaataattggttgttttcagaatttaattaaatggtgactgtgtgtccatcttgatg

SEQ ID NO: 40436 - DNA, 434 bp, Setaria italica
  Peptide Sequence Number=SeqID_106410
tttttttttttttttgtattttggaggtagaaccatgccatattcaaatctctccattagcaaattgttttcggcaatctcaaactcctaattctgcttgcgcataatcagtcaaaaaatgttggtggcatggaatccgcccttcggaaggcagaggatattgttggttctatgctagccaaaggatttgttcttggcatggatgctgttgataaagcaaaggcttttgatgaaaagcatcaactcacatcgactgcaactgccaaagtcgcttcccttgacaaaacaatgggtctaagccagaagttcaacaccagtaccttagttgtaaatgagaaaatgaaagtgatggatgagaaataccaggttgcagagaagacaaagtcagcattagccgctgctgaacagaccgtctctactgccggttctgctat

SEQ ID NO: 40437 - DNA, 444 bp, Setaria italica
  Peptide Sequence Number=SeqID_106411
cgtgtctcagcttgcgcgccaggcccagcgactccatcgccgccaccgcctcgccctcgagctcgtcgaatgtgttgaagatcacggccgacgcccccgccgagcgccccgtctccttgaggacgtagtgcaccatgaactcgtccgggtccgtcgtgcggatgaagctcgggaagtcccggaacctcatgttccggagccccggcacgtcctccaccggcgtgtcaaggaatccgttcgtcagctgctcgacatctttgagcggggcgaggccacgggtcatgaggaggcgatagtgctggtagccgaggaagctgatggtgctggcggtccagagctggacgtaggggaggccgagctccttggcggcgtcgatggagaagcccatgacgacgtcggagacgacgcaggtgacgggcgggtggcccgtggcggggtcgttgg

SEQ ID NO: 40438 - DNA, 574 bp, Setaria italica
  Peptide Sequence Number=SeqID_106412
gggcagtccgtgcatcgagcagcccattctaccgactgaggttgttcttggaagtagccggatgcacaaggtatcacagatgtcctctaaccactcttgctcagagacgagcttgccgacggcgaggatcagcgtatcgagtacagggcgccatcctggataactttccctagtgtgacctcatcacagaggaggaaatcatctgcatcggaagctgacatcaccgtccgaacgaccacagaaggtaggaatgccgggagcagcataggtgatggactgcggtcactggaggaagagatcagcccggcttcaccgcaggaaaacctgtacttgcagcacaacttctgaagaaatgtcaggagccgcaagaattcaacgcagtagcgttctgccattgctgagcagcattcaacgcagtagcgttctgccattgctgagcagcattctaaattcaactttgtgctctgttgctatattgaaatgcattacagtttttatacatcctatatagtagcaggccatttaaaacagagagctaattagtagagtactggatgctaaattcttcttccag

SEQ ID NO: 40439 - DNA, 596 bp, Setaria italica
  Peptide Sequence Number=SeqID_106413
atcatctgcatcggaagctgatttcctcctctgtgatgaggtcacactagggaaagttatccaggatggcgccctgtactcgatacgctgatcctggataactttccctagtgtgacctcatcaacagaggaggaaatcatctgcatcggaagctgacatcaccgtccgaacgaccacagaaggtaggaatgccgggagcagcataggtgatggactgcggtcactggaggaagagatcagcccggcttcaccgcaggaaaacctgtacttgcagcacaacttctgaagaaatgtcaggagccgcaagaattcaacgcagtagcgttctgccattgctgagcagcattctaaattcaactttgtgctctgttgctatattgaaatgcattacagtttttatacatcctatatagtagcaggccatttaaaaacaagagagctaattagtagagtactggaagaagaatttagcatccaggggcatttctgtgtagattcatatggccttttcttttcttttcctgatgctctttgtctgtgggtggctacagttgatggattgtcttgtctcctcttacaatttatttaatttact

SEQ ID NO: 40440 - DNA, 1893 bp, Setaria italica
  Peptide Sequence Number=SeqID_106414
actaggaaatctggaatttgtgtacctactgtatgcagccatgggtactatgaatatgtgaaccacggtgaagttggccttagcaaggtgtgtaagcctgcgaattctagactctgcttgccctgtagtacaggttgcccagaagactcgtatgagtcatctccttgcaatgcgacagctgaccgtgtttgccagttcgattgcttgaggtgtgtcgcacaagagtgcttgtcattctgcttatcacagaagcagaccaagagccggaagttgatggcctttcagatgcgtgtctttgtagcagagattgtatttgccatcatcttggtactcagcgtatcagtaatcacttgcctgtatgtccggcacaaacttcgacattgccaatgttcaaatagcgagctgagactggcaaagagcacagcgtactctttccggaaggataacatgaggatccagcctgacgtggaggatttgaaggtcaggagagctcaggaattctcctatgaagagttagagcaagcaactggtggcttttcagaggattcacaagtcggcaaaggcagcttttcatgtgtattcaagggcatattgagagatgggacagtggtcgctgtgaagcgtgcaataaaagcatcagatgtgaagaagagctcaaaggagttccacaatgaacttgacctcctctccaggctcaaccatgcacatttgctcaacctgcttggttactgcgaagatggcagtgagaggctcttggtttatgagttcatggctcatggatccctgtaccagcatctgcatggtaacgatccaaacttaaaaaggcaactgaattgggccaggcgggtcaccattgctgttcaggctgctagaggaatcgagtacttgcatggctatgcttgccctcccgtaattcaccgggacatcaagtcgtcaaacatattgattgatgaggatcacaatgcgcgtgtcgctgacttcggtctatctataatgggtcctgcagatagcggtaccccgctatctgagctgccagcagggacactaggctaccttgaccctgagtactaccgtctccattacttgactacaaagtccgatgtctacagcttcggagttgttctcttggagatactaagtggcaggaaagcgattgacatgcagttcgaggaaggaaacattgttgaatgggcagtaccactgatcaaagcaggggacatctttgcaatccttgatccagtcttatctcctccctcagaccttgaagccctcaagaagattgcttccgtggcatgtaagtgtgtcagaatgcgagggaaagatcggccttccatggacaaggtgacaaccgctctagagcatgcccttgcactgctgatgggcagtccgtgtgtcgagcagcccatcctgccgactgaggttgttctcggaagcagtcggatgcacaaggtatcacagatgtcctcaaaccactcttgctcagagaacgaacttgccgatggggaggaccagaggatcgagtacagagcgccatcttggataacttttcccagcgtgacctcatctcagaggaggaaatcatctgcctcggaagctgatatcgctggccgaacaaccactgaaggtaggaatgttgggagcagcataggtgatggattgcggtcacttgaagaagagatcggcccagcctcaccgcaggagaaactgtacttgcagcacaacttctgaagaaatgttgtggcttcctgctatttatgagcaccagtccaagttcacacctggtaacctgtcgctacatggaaagcatcccagtgtttatgcatcctacagtggcaagtcatttaaaaatgatagctagtttgtagctcgaacaaaattagcatgcagtctagt

SEQ ID NO: 40441 - DNA, 607 bp, Setaria italica
  Peptide Sequence Number=SeqID_106415
acctccgggtgccgcgtcctcgccctcctcagcaccacgaccatgaccagcgcaatcagtaatgcgccaccgacgacggcgccggcaatcgcgaggatcatcccgatctcgccgcccttccccctcccctgccctccgcctccgctcccttgcggcggcggcagcacggcggccagcgcgccggggctgcagtacgtgctggcccgctgctgcttagcgtcggcgaagcagttgccggcgacgagcaccgtgcgcgccgaggagttgccccgcatgcacgccgggcgcgccccggtgagcaggttcgccgagacgtccacgaacgccagcgcctccgcgcacgccgttgttgccgggagctggccggcgaaccggtttcgggagaggttgatgtagcgcagcgccgggagcgcgaagatggaggaggggatccacccctgcagtcggttcccggacacgtcgaggtactggagctggcccagcgcgctcacccccgccggaatcttcccagtgaagttgttgccggccaggaccagccgcaccaccgccttccccacctccgggaacgccgggccgagccggttgtgcgacacgtccagctcctcgg

SEQ ID NO: 40442 - DNA, 799 bp, Setaria italica
  Peptide Sequence Number=SeqID_106416
gcaccacgtttacatacccaaaatgattccgggaagcatcataatcaacgacatcccatattctgctgcatacagttattacaatatttcatgggcacatttagatagtcaaaatgtaaaacatataactacgtttccattccatataaacatctagaaagcttacatatcacattatcactacattcagcatcatatagatggcatcgcacttctcctgtatcatacaaagagtcaatagtcagaaacaagagaatcaactgtttcaaaccacttacagtaattctcctgtattttgaccgcacataaatttaccgaactttttccaacacaaaacagagtacttgactacagtgtcacaccatatcacttcttctaatcttccatggactcctactaccctgcgtctcgaatcaccaaccagccagcacactgtactgtacataagttagatctaaatactgaaaaaatctcaagttagatctaaatacagaaaaatctcaatttcaaaagctggagatgtatgataacacttgtaataataaaaccattcacagcctcatttgctcacaacccaaaaaagaaatcacaaaaaactgaagtccaacacattgcagctaggaaaacaagacagcaattggcataacaggaccataaaaaaacagtaaacacaggggcattcttgcatcagtcaagccttcataattcttgcatctacatgcacattccacggagctcacttggccagcttggttgatggagaatcacacacacccacagacaggcaggccaggaagag

SEQ ID NO: 40443 - DNA, 407 bp, Setaria italica
  Peptide Sequence Number=SeqID_106417
tcaatctcgccgtcgtcctcgcagcagccaatgagcgacacgaggtgcttgtgccggagcttggagagcatctcgatctcggtctggaattccaggacgccctgctcggacgacgggttgctccgcttgatagccaccttggtgtcgccgtcgacgacaccacggtacaccttgccgaacccgcccacgccaatcaccagagactcgtcgaagttcttggtcgccgccttgatctccggaaacgagaagtgccggcacatggcggtgatgttcgggttgagcgccgcgctcttgccgccagacgatttgctggcgttggtgtgcgagtttccgccgtacaccggcagccatcccgaggaatgcgagacgctagtgcccagcgcccgcctcttcttcgactggtacga

SEQ ID NO: 40444 - DNA, 654 bp, Setaria italica
  Peptide Sequence Number=SeqID_106418
ggcccgttggggatgctgacgacggtgcgccacttggcgaatcgggcgccctgctggtagtaggcggccccgcgggcggcgaggccgtcgaggccctggcaccaggactcgtcgttggagccggcgagcgggacgaggcccttgtcgaccttgatcccgggcacgatgccctgctcggtgaggatgtcgacgatccggcggccgtcgacggcggactggtagagcgtctcctcgaaaaggatggcgccggagatgtagttgcccagccccggcgcggtgaccagcagcgtcctgtacgcctgccggttggcctccgtgttctccagcccgatggacgccagccgcttcccgcacgtcgcgttcgactcgtccatggccaggatgccgcgcccaggcgacgcgatcgttttcgctgtcttgacgagctcatcggcgtaggcgctggcgcggacgaccacggagacggtgaccggccggggcgcggtgagctgcctggcggcgccccattccgacttcttgggaaggaaggaggacttgagcagggtagcagaggccatcttcttcctcgatgctcttgctgtcttctgaagttcagctcagctcaggctggcagtggcctcaggttcacaccagtgaacaacgaatggagtgtct

SEQ ID NO: 40445 - DNA, 1084 bp, Setaria italica
  Peptide Sequence Number=SeqID_106419
agaaacaaaattacttaggaaaggggtctaaagggacaaaagacagaagtatcaaaattcaacacctcaggtggaagatggctatgcccacattcttgatttgatccgagtacaaatggagatttcagaatctatggatgcattgactaaacgagctttaaggcatattaatttgaagatggtgaaaggacagcttgatgtgcctcgtatatcattacagctcttaagttctgttggcaaacttgattttccaaccgaaagattgcgtgtacagtggcagaaaagacaggcaactgttcttgaagaattacttctgtcctcagcatctcttgagtatgatatgagtgaaacattgcagatagttctctctaagctaaaagatacagaggactgggttgtgagtgttcctgagggccgcgtcgaggtcttgactatcattgaaagatataactcaaaactttctgcactgaccaagaagttcaaccttaaagaggagacctaccattggacccataactatcatgtcaactttaggttatatgagaagttgctttgcagtgtatttgatattctcgaagatggacaacttgtagaggaggctgatgaaatactggaaacagcaaagctaacctggcctatactgggcattactgagaagttgcatggcatcttctatgcttgggtccttttccagaagttcgctcaaactggggaaactcttctactgaaacatgcaagcctccagatacagaaacttctattgcatcacgacattgaagaactagaggtgtatacaaacagctttatttgttctgccgatgcctgtgggggtacgtggggacgatggatggctgacagtgcccttcttaaataaattcctggtgccgcagacaactagagaattatcatgcacactttagtaagaaaaactactcgatctttgaggccacactgaacttggcattacttttggtgaaaaccccacctgaggatgattgtgaagaagtcctgctcattgagagcccagttgggagtacaccagaatcaaaattggttcatttactcattgtcagatccattcacg

SEQ ID NO: 40446 - DNA, 378 bp, Setaria italica
  Peptide Sequence Number=SeqID_106420
gacgcacccacgaaagcgagaacgcgaagcgaagcaaaccccagacgccggcgagccgcgcccaccctgacggcggcggggtaggagagggggtcgcctgcggcggccgcgatggggaataagatcgcgcggacgacgcaggcgtcggcgacggagtactacctccacgacctgccgtccacctacaacctcgtgctcctcgatgtcgtcagccgcgaccgcttcctcaagtccgtccgctgcaagcacgacgaggggctgctcctcgtcaaggtctacttcaagcgcgccggcgagcccatcgacctcaaggagcacgagcggaggctggagcggattaggaacacgttcaaggggatcgagggttcccacgtatgg

SEQ ID NO: 40447 - DNA, 427 bp, Setaria italica
  Peptide Sequence Number=SeqID_106421
tttacataacaactgtgaagtagtacttatattattaagcagacacaaaaattcgtgcaacataaacgcaatgcaccaagcaagaggctcctgcaggaaacaacacatccaagagcacgagaaggacgcggcgactacaaactgggcagaaagatagcagcagaagtgtgtgggcgcatagccattgcctccttgctccaaggttccctggcccgcccccggacagatcgaacacgtcgtgaagtgaaatcgacatctgatgtacctagatacaaatcaagcgccactgcccgccgctacagtcgccgtcctcgccggattccatagccggactaaccccaatcgcaagaacgaactctcattggacagagacggggagaggagcggcgcccacggccggtggggtacgacgaaatgtcgcggccgg

SEQ ID NO: 40448 - DNA, 351 bp, Setaria italica
  Peptide Sequence Number=SeqID_106422
gggtcgaaaggccttttccggcgatgcggcggggtcgggcgccgcggccgccgggccgaggagcgcgacgaggacgctgcggatgagcggcgccttgggggagacgtcgacgccgagctgcgccccgagctgccgcaccacggagtccgcggatatcccggtgccgccctgcgcggcggtctggcggacgatggactccacgtagtgggccagctcctggtcggacaacatcggggctaggggagggggtggcgaggatcaggagggggcggggcctctcctatcctctgtctctctctctctcttcggcggcggcggaggcggtggtgcggcgcctccacgcgcttttag

SEQ ID NO: 40449 - DNA, 431 bp, Setaria italica
  Peptide Sequence Number=SeqID_106423
tgtgttcatgaggtacatgaaataggcgggtgcattggtgagtccaaaggacatgaccaggtactcgtatagtccataccttgtggagaaggctgtcttgggtatgtcgcagggtcggatcttgatttggtgataacccgaacgaagatcgatcttggagaacacttttgctccagctaactgatcaaacaagacatcaatgcgtggaagtgggtacttgttcttgacggtcaccgcattgaggggtcggtagtccacacacatgcggagactgccatccttcttcttcacaaacagggcggggcaaccccaaggtgatgtgctgggtcggatgaagcctttttctaacagatcatgcaactgggtcttcaactcagccaactcagcaggtggcatccgatagggtctcttggatatcggtgcggtgccgg

SEQ ID NO: 40450 - DNA, 240 bp, Setaria italica
  Peptide Sequence Number=SeqID_106424
gttgcttctggcgcttcttctctgacttcatggcagaccacatgtcgcccagatagatattgaagtagatcagagctgaaatcggaaggaccacaaagataacaaggatccatcgaaacttcaccaaatagtccaccaaaaccttcttcctcttgcggcgcaccaatggttcatgcaggtccgccatggtcttgtgcacctgcagccagggcctcgcgcgcctgggccagagaggtggag

SEQ ID NO: 40451 - DNA, 516 bp, Setaria italica
  Peptide Sequence Number=SeqID_106425
gcgggggcgtagtacacgcccacgtccgtgaacatctgcgcgtagctcgtgtcaccctgcctgtgctggtgctcgaatccaggctcagggtacaccatcgtcttcacgggcaacttgtacagacggtgagggcacagccacagcggatacacctccatctcgcggtggacaaactcaagggcatctccaaccttgtacagcggcaccagcatgtcctggatcacgtggttgtcatggtagtagttcctgatagcctcaccctgggttgccttcagcagagacacctttggcggcatcagccaacccagcaggaacctgaaccagaactggtcaccgaacggcaagatcagtttcccctcccagtacaggcacctggtgtggcggtggtagtactcccttgtcgggatgtactccacaaactcacccctcttcagcgccgtctgagcgtgctggtagaaccaaggcttaaaccaaccaacccgaacgacaagttagaatacttagttagtaccctta

SEQ ID NO: 40452 - DNA, 1741 bp, Setaria italica
  misc_feature (1701)..(1701): n is a, c, g, or t
  Peptide Sequence Number=SeqID_106426
gacacaaaagagctagccatgcaaatcccgaattaagttcagcaattccataacaaatgataaacatccactcactgcatagtaccaatggcggcaacgactgaccaacagagtgagacacactacacaatcaacaagttactctaagcaagcagaacggagaccaacatctcgttccaaatcccatcatcaggtaacaaaacaaacgctgctgctgctgctgccgacatctaaatcacaaacgctacttcatcaacagctaggcctaatcacaaacgctacttcatcaacagctaggactaggcctcatctgcataggccggctccaggatggccgcctccgcctcctgcacctccttctctgtcttccgccccttcttcgacttgtagtacacgctcatgaacgtccccaccgctccatacttgcgccggcagtgctcgtagtgggacgcgtcgaacatcctccagaagtccttctcgttcagctcagacacagcgtactgaggctggtagctgtggttctcgatcagccactgctccagccggtgcactgcctccgcgccgttgaactcctcaccccttagcacagcagcgggggcgtagtacacgcccacgtccgtgaacatctgcgcgtagctcgtgtcaccctgcctgtgctggtgctcgaatccaggctcagggtacaccatcgtcttcacgggcaacttgtacagacggtgagggcacagccacagcggatacacctccatctcgcggtggacaaactcaagggcatctccaaccttgtacagcggcaccagcatgtcctggatcacgtggttgtcatggtagtagttcctgatagcctcaccctgggttgccttcagcagagacacctttggcggcatcagccaacccagcaggaacctgaaccagaactggtcaccgaacggcaagatcagtttcccctcccagtacaggcacctggtgtggcggtggtagtactcccttgtcgggatgtactccacaaactcacccctcttcagcgccgtctgagcgtgctggtagaaccaaggcttaaaccaccacccgacgcagttgatcttgttgcccttctttgcctcttcttttgaagcataaacaccagtcatcatcacaccctcgctctcattgtacaccattccttcaacaaagtcagggacctttgcagggtcaccgtctcttggcgcgaaagaatcagcgtaggcctgcgcgatttccttcagattccctttgactggaatgtacgtgagcttcatgtattccttgatgggaatgagcttgatctcagcagagacaaggaacccaagtgttccctgggaccagggaatgccatagaaaaggtcagagtactcattatccttggtggctctaacaacacggccatctgcaaggacaacctccattgcaacaactgtgtcagagaaaagcccatagaggtgagagctaccctcaataccataaccattgatcagcccaccaacagtgaggtcgtcaagctctgcgacgactgcaagggcaaggttcatggggcaggtagctctggtaatctgacccatgttcacaaggggctcaaccttggcaaccatcctctctttgtcaatctcaaggatattcctgaaggcagaaaggtcaacctcaaaatgcctggcacgcttgtagtccacattgcgcatgccaacngcaatccagggcttcctggctgtgcaaacaggccatcctt

SEQ ID NO: 40453 - DNA, 378 bp, Setaria italica
  Peptide Sequence Number=SeqID_106427
cccttctgaagatttcttctcgatgcgctctgttcttgtgagattttctcgtcctgatgcgaatcgtctcgtggccgagcaggtggcgatcgcgcacacgtatcgggcacgtcgcggcgacggtgagcatggccaaggtggccgtgtcgttcacgcacatcatcaagagcggcgagccggcgttcagcgtgctcgtctccaggttcttcctcggcgagcacttcccggcgccggtctacttctccctcctcccgatcatcggcggatgcgccctcgccgccgtcacggagctcaatttcaacatggttggtgagtgacttgcgaatccccatttcctaaatctcggagatacttatgtcagatacatgagaaatatca

SEQ ID NO: 40454 - DNA, 547 bp, Setaria italica
  Peptide Sequence Number=SeqID_106428
ggttttcggcggagaccgcccggcgcgccaagatcggggtctacttcgctacgtggtgggcgctgaacgtgatcttcaacatctacaacaagaaggtgctcaacgcgttcccctacccgtggctcacgtcgacgctctccctcgccgccggctccgccatcatgctcgcgtcctgggcaaccaggatcgccgaggcgccccagacggacctcgatttctggaaggcgctctctccggtggcgatcgcgcacacgatcgggcacgtcgcggcgacggtgagcatggccaaggtggccgtgtcgttcacgcacatcatcaagagcggcgagccggcgttcagcgtgctcgtctccaggttcttcctcggcgagcacttcccggcgccggtctacttctccctcctcccgatcatcggcggatgcgccctcgccgccgtcacggagctcaatttcaacatggttggattcatgggggcaatgatctccaacctcgcattcgtcgtccggaccatcttctccaagaaggggatgaaggcaagtcagtcagc

SEQ ID NO: 40455 - DNA, 1229 bp, Setaria italica
  Peptide Sequence Number=SeqID_106429
gagaaatatcataacaaggattgtatcttcagatttccgtagatagttttgacttttaagacattttggcaccaatcaaggaaaaagagattttgtggtggattttcacctgatagtcgctattgcaaaaattgtcagacattcacattctgaagtctgaacagggtcatttgaagaagaagaaaatactgaatctgtcttgttcgggaaggcgctctctccggtggcgatcgcgcacacgatcgggcacgtcgcggcgacggtgagcatggccaaggtggccgtgtcgttcacgcacatcatcaagagcggcgagccggcgttcagcgtgctcgtctccaggttcttcctcggcgagcacttcccggcgccggtctacttctccctcctcccgatcatcggcggatgcgccctcgccgccgtcacggagctcaatttcaacatggttggattcatgggggcaatgatctccaacctcgcattcgtcgtccggaccatcttctccaagaaggggatgaagggcaagtcagtcagcgggatgaactactacgcctgcctctccattatgtccctggtgatcctcctccctttcgccatcgccatggaggggcctaaggtgtgggcagctggctggcagaaagcagtcgccgagatcggtcccaacttcgtctggtgggtggcggcgcagagcgtgttctaccacctgtacaaccaagtatcctacatgtcgttggatgagatttcgccgctgacattcagcatcggcaacaccatgaagaggatttctgtcattgtcgcgtccatcattatcttccaaacgcccgttcaacccatcaacgcgctaggagccgccatcgccattcttggaaccttcatctactctcaggcaaagcagtaaatgccttggaatctagatggcctcagttcaccgcggatcgactcggtgctcgaatataacaacttataacttatgagcggatctaaggaccccttgtataatattattagatcctcttttttgtattttattttctaggactagctaccagttttcctgagctgctcatttctttgtgttttcaccatgactatgatgatgtagagaaagatgtatccatctaaataaaactaccagtatttttttttaaaaaaaaaaaagttgcctcctagttctgcggtccaaaataattcgtggttcagaatgcatcgggctaccattgcatttgtca

SEQ ID NO: 40456 - DNA, 602 bp, Setaria italica
  Peptide Sequence Number=SeqID_106430
accaggagatcatgccggacaccagcgcggagacggcggaggaggtgctgcaccggtggctgatgaagaaggacgtggacaaggcgctggacagcctgagcccgcgggagaagcaggtgctccggtaccggttcggcatcgagggcgggcggccgaggaccctgcacgacatcggccagctcatgggggtgagccgggagcggatccggcagatcgagctgggcgcgttccggaagctgcgggccaagaagaaggtgcagtcgctgcagcactacctgcagccggccgagagctggtagccgtgttcccgtgccaggtacacggcacggcctgcatcgcaaacgtacaccgtctttttgaaggatttaacgtatacgcgtctgatccattcgtgtatagtacgtgtataaagaggctggaacattttttgtatgcaacaatacaagaactgcattcctcccataagtaaagaacacggtaaaagcatagagacgataaaaacatcagtttctgtcatgtacacagcacgcacacgcctaccccgatgaacagcctgatctgtactgtacagcacactctgaaaatttcttccaagtcacggc

SEQ ID NO: 40457 - DNA, 623 bp, Setaria italica
  Peptide Sequence Number=SeqID_106431
gagttgtacacgtcggcgttcagcgggacggtggcctttatgctctcgccgaggccggcgtcgtcgagcgcgcgctggatgttctgcagggcgggcaacgtcacgttcaggaacgtgccgttgaaagccgacaggaagggctcattcccaacggctacgtatctgcaggcaaaatttgaccgcattatttatctctccaaatccaaaaacatctagctgagtaattttacaacttggccagacagtgagaatgctagtgtggcatgcagtaactgaaatcaaaataatcggcatcgactaatctatgtcatctgccatcaggtttttttttttcagacaagctacagtgccatgaggtgttgtaaaagctccttatctgaagatcttccaagggatgaactttacgtgcaaaactaaagcatctatctgaaaactttaaagagatctcatgtcctatagcctatagggtagtgcatgtccagtaggcgcccagtggccactgcaattagataagtgtcctactttaagagaactaatccccaagaatttagggggaatattcttgtgctttcagaagggcatgtaacttatcttcagacatctcagcccccacaaggcctagc

SEQ ID NO: 40458 - DNA, 1692 bp, Setaria italica
  Peptide Sequence Number=SeqID_106432
aatatgttaacacaggattatttacaagaccaaacaaaaatctttacaggagagacccctcctcctctaattgttaacatcacaattcacaccagtacgtcacagaacaacctgcaggacagcccgaagaaccaagaggagcggcagagcggccgccaccggggcgcgccgccgtctccccgcggccgacggctcgatctgtatggtgaagttgcaggcatccgtggacgggttctgtgccgtcgtcacggcgagcccctggaagtcgcagctgccctccgcctggttctgcacctggaagtacatgttgaacgcgtacgacgcgttgccggcggcgtccaagccgttgcacgacgagccgtagccgagcgcggtgcagtcggagaggctgcacgcgtaggcgacgccgtcgctgatcctgctcgtgtccggcgcgttggggttcgccacgcaccactgccgaggcaggtactggaccccgcgcgccgccacgagcgccgccggcgccgcgttcccgccctgcccgccggacaggtccatcgggtacttcggctggccgtcgtaccgcacgatgccccagtggcgctcgaagttgcccggggccacgctcttggcgtcctcgtcgatgaggctgaacaggtacacctcgatgtactggctcggccgcagcggcgtgccggcgttcgccgccagcttccgcagcaggcccgcgtagaacttctgcgcgtacgcggcggtggcgtgcgtgtccccgtcggtcggccagccgacctcgccgacgacgacggggagaccgccggctcccgccgcggctagcgcggacacgagcgtgtcgaagttggcgtcgaacacgttggtgtacgtgatgccgctgccggcgtccacgacggggctgctcgtgccatcgaagaaggcgtagtcgagcgggaagccgtcgctgccgtagaggctcaggaacgggtagatgttgacggtgaagggcgcgccgctctggttgaggaactgcacgatctccgtcatgaggtcggcgatgtccgaccggaaccggccggcggacgggacggggttgctcaccggggagttgtacacgtcggcgttcagcgggacggtggcctttatgctctcgccgaggccggcgtcgtcgagcgcgcgctggatgttctgcagggcgggcaacgtcacgttcaggaacgtgccgttgaaagccgacaggaagggctcattcccaacggctacgtatttgatggtcacgccgccgtcgaagttgtagcggctgacgttctcgtgcacccagtccctggccgtgccgtagtcggtcatcatgtccagcatgttgttggggatgcccaccatcacctcgatgccgctgccggcgagcgcgtccatcggcccggggtcggcgtcgaacagcttcaccttcctgatgccgttgtcctgcagcatccgcaccacggtgcccgacggcagcctgtgcgtcgccatcgtgccccagttcaccccgagcgctcccgccgccggcagcccggcgaccaacgccaccaccagagcggccatgacggccagccaatgatggctcgccgccgccatggaagacgacgctagctagctgtcgctatcagccgcgaacatgcacgaacgcgcgcgcaggtgtgaattggttctcttgggtggtaggaggaggaggaagccgac

SEQ ID NO: 40459 - DNA, 462 bp, Setaria italica
  Peptide Sequence Number=SeqID_106433
gccccctaatctttatagactcaaatgtaggaaaggatctataataaaacccagtagctggcataaccaaaataaaggtgaaaaaacattcggaatgcagatatggcattggatattttaaaaaaaataaaatgttgaattggagagttatcccttcagtcaaattcacttcctaaaaaagtgctcaaaaaacagcaaggtgcattacttaaaatacagatattagcttattactttttttgtgaaaggctagcagaagaaaacaaaaatggttctaggaggatgtgctatgataaatatattacctagggaaacaaaaaaacataaaatggttccatggtgtagtggttatcactccagactttgaatctggcaacctgggttcgaatcccggtgggacctgccctttttacataaaaagagaatttgtgacatgccattcaaaagatccaaacttttggg

SEQ ID NO: 40460 - DNA, 415 bp, Setaria italica
  Peptide Sequence Number=SeqID_106434
cggtttcgtacgagtggacgggcaagtgccggagctgccaggggacgggggcgtggtcagctacttcaggaagaagggcaaggagaccatctgcaagtgcgtgccatgcgctggcattggtgagatgggatttctcggactcgatttccttacatggcacaatattgttgttgttaggagtaaaacatctaaagagacaagagagcaaggccaagggtagccagatctgcttgctggtggatttaccattgctattgcacagcaggttatgtaaggaaaattacacttcgtgaagaaattcaaaagatggatgagctagacaatggcaagccaccataatttgaagggttccaaattatttgactgctgtaatttgaaaactgctgccgaatagcttgtgctcgcaaccttcaac

SEQ ID NO: 40461 - DNA, 648 bp, Setaria italica
  Peptide Sequence Number=SeqID_106435
atcacactcgtagaccttacttgaaataatttttggagtgaaagatcaacagttgatccatttgcttgtttggtggggatttcctacccgcaggacccgtttagtgattttcttttttaacttctacagaacatgtggtaccatggaacataaacgtcctgcaggggacatgagaaataagggaatgaaatgtagtaccgaagcacaaagttgttagtactgctaccttacctgatagattagatcccagatgagattggtagtccattagatgtgcagttgtaagtggttacaatatgattgtaatttgtctagtgggtcgttcggcaccaagatgttggatcaattagattgtcttgtagagctttagggcttatattatgacaaaatgttggaccaattagattgtcttgtagagctttagggcttatattatgacaaaatgttgggttttccttttactggcttgctgctcttaactagtacaatttgttttgcaggttatgtaaggaaaattacacttcgtgaagaaattcaaaagatggatgagctagacaatggcaagccaccataatttgaaggttccaaattatttgactgctgtaatttgaaactgctgccgaatagcttgtgctcgcaaccttcaac

SEQ ID NO: 40462 - DNA, 743 bp, Setaria italica
  Peptide Sequence Number=SeqID_106436
atgcttgtccttctcatttacaagcgctgaacgaattccactgggtctttcaacctttctggatctgtcactaactgcttccctgtttccctcaagtaagaagtcatcacatctctgatcgttgatagaccatcaggaacccttcggaacaaggcatacatacaacccaaatcttcgtacttgtcatctactaacatgttaacaagccctgaattttccatgtgaaccaatctgtgcatgtgattggcaatcatttctttctccactacactagttatctttgcctcactgccagcatccaggtagtgtgagacacgctccatttcctcatttagacgcctctcagccttcttaaggtagttcccacagtcacagcattcaatgaactcttgagactccccactgtagaagctggctgaaacttccagaaatggtttctcaaaatcatcttgatacacagcagggccaagatccatcagcatctttgttatgctccgcatcaggcctctgttaatcacttcacccattctttccctgtctataagatccagaagggtgtcaagcagccgactatggatcgagggggagtggataatatgatccctccacaaattcagaccaagttcgtggacaggtgtcctatgagctgtcgggacatatgtcctatccatgtacattagaatatctcgtatcatctgtaacgccttgttgtgatccatccactttgcattcagctcctccag

SEQ ID NO: 40463 - DNA, 1636 bp, Setaria italica
  Peptide Sequence Number=SeqID_106437
ttacttaaatttacacaaatacgttaacgaacagttgtcgcgatccaccaataaccaatgtttgataccatctataaccccaatggccaatgcaactgataaaacagaacttaagcataacaaaaactgttttacaagagcagaaggatgccaaccgctcatgaattatcacatgatggctttctatgcaaggtaacgatataattttctatctactttgtctctttccaagaattcacgttcaattagagattcgatgcgtttctttattgacaacggggttcggcaagaaccgggcctgcaattgcttggtaacctcagctacaatgctattatgatccagcaccctccgggatttcatgatcctgacaatggctgcctcaatctgaggtttcctgtcctcctcaaccctttggcgggtctcctgtttctctggctcagattccttttgtgccaccactgtcccaatcttcactttaacaagcttgcttgtgaacttatcattaaagtagaatgcatcatcctctgatatatccttgctcatgggctccttacggagaacattcttccccttgacacaagcaagagattgtagacatctctttaggtctgaggcaggtatctcagtatcccgttcaatgtctttgtaggtcaatccatcagcattgttaaacagcatgagaacacacatctgataagtggatacattcaactcatgcttctggccttttccaaatgtggcttttatgtcagctgtacccatgtttgtttgccatgtcaatctccgaccattgtgagttccaagataatatgaccggaacttctcacaaactgcaaggatttcagttggaaggttgcaaggaggactgggttgcgtcggccaagaaccagttgtcaaaatgtggacatcaagcgtagggccatccccaagttcctcagacttcttggcatagaaatcttgcatggtgtcctgagatgttttcatatccgtaaacatgccctctagtttggaagtgaactggtatccacattctgtcttgagtttgactatcatacttctctcagcatcatcagaaacagttttaccagataggagccttttcgccaaatgctgcttatagtacttctcaaacacatccttctcttggaggtaccggaacagcatcatgactttgtccagtataacctccacatcttcttctgtagccccttttagtccttttctgagtttgtcatcaacaaacaatgatatgaattcaggtgatctgttgtttaagttgatgaaatactcaaaggacgaattcagagcattctggaaggttttgtcattgccaaaagcaacactgatgatcttatcatgcttgtccttctcatttaacaagcgctgaacgaattccactgggtctttcaacctttctggatctgtcactaactgcttccctgtttccctcaagtaagaagtcatcacatctctgatcgttgatagaccatcaggaacccttcggaacaaggcatacatacaacccaaatcttcgtacttgtcatctactaacatgttaacaagccctgaattttccatgtgaaaccaaatactagtagacaatagtagaaattaaggaacaaaataacaaattaa

SEQ ID NO: 40464 - DNA, 333 bp, Setaria italica
  Peptide Sequence Number=SeqID_106438
ctcgcgcgaagggaaacaccatgtccaaactaggggcaacttcactccatggatgaagaggttgggccagcaccaaagccgctgccgccgccacggccaaagccaggtctgccaccagaaccctgcagagtttgtgggatggaaataaacattagcattcatgaaacagatggtgcatgatagtttgcaacctaatagtccattcaacatccctagaatatagggaaaaagcaaggaactcttccataaagcaactcccgccaacagtgcaaattcctgaccaactcatgtttcacattgctaatttgtctgacaagttacacaatagaaagg

SEQ ID NO: 40465 - DNA, 905 bp, Setaria italica
  misc_feature (1)..(22): n is a, c, g, or t
  Peptide Sequence Number=SeqID_106439
nnnnnnnnnnnnnnnnnnnnnntttttttttatttttttttttgtactgaatgatagcttgcttataacatgctaaaacatggtctaccaacagcctccatttcaagaatttcatctaacagaaacgaaaatcacaaaaccatgtctcagagaaccacggctacaactggtaaacaaaatctcattgtcctcataattcaaagatcaacagagaagacgcctgtttgcacgccacctcccaatgtgccagctaactgatgcatcactccatggaagatcccccagcaccaaaagcgccaccaacaccacggccaaagccaggtctgctacccctaaaagatggctggaagtctgcaggagcaccacccttctcaccaccaaaatcacctggagcaccacgtggacctcctctgtaaccatccctgtctccgaaccttggtctgtcaccctcaaaacgagggggacccctggggcggtcacccggtgggccagagccgaagggacgggacgggggcttggaggacttcttgagggtattaggcacaacctctgatggcaggttgaggaaggtgcggaggtactcaatgccatcgttggtcaggtaccagtagtagtattgccaggagaaggtctccctgacatactcctttgacttgaagctctgcatgagcttaatgacctccaagttgggcacgtcaagctttgggtgcttagccaggttgtagtccttcttggcatacaagaccccctcgtggaagaggtacttgcagatctcgcggcggttcttcttggagatgatcatggttgaggacgagggccggagacggcagcggaggagggagggagacgacggcggcgccggatggggggtggtgattggggcacgagaaagaggtggcgcgctg

SEQ ID NO: 40466 - DNA, 725 bp, Setaria italica
  misc_feature (1)..(44): n is a, c, g, or t
  Peptide Sequence Number=SeqID_106440
nnnnnnnnnnnnnnnnnnnnnnnnnnnnnnnnnnnnnnnnnnnngggcacattaaacctatccctgtgtgccttggcagtctcttctaggatatagttcatatcatcacactagtagcagatccatataaccaatttaacagatttggtccgatctatagaagatacacccgccaatacgaagttattatactcaacatagcataagcctcttaaagtcctcgacctcacagaagcatcacgaacttaccctccctcatagactagatccagcacatgcgaaaacaaaccaccatctatgaactactacgaaagcgtacggaccgaccgcatccgggccccgcccggggggagatccgatcagacgggggagaggagctgggagatggagggcttggggtcggagttcatgccgatgacgatgacgagcgggatgaagccgtagtgcgccgccaccttcgccgtcttcatcgtccacgtggtccactccttgacgagccgcacggcggtcgccgaagcggtggcgccctccccggccgggtcggcggccgctcccctcgccccgcccttgcccttgggcttcgccctcagcgacggacgcgacgccatggcgattctccccgcggactccgactcgatccgagtcgccgccgagcaaaaaccctagggaggagaggctgcggcgtttgggggattcttctttgggttattttctttttgttattt

SEQ ID NO: 40467 - DNA, 667 bp, Setaria italica
  Peptide Sequence Number=SeqID_106441
ggcggagtggaaggtgaccaggccacctccgggttgcacaccaggcccgacgacatgagcagcgccgcgaaggcgcgcgcgctgacgcccctggcgcggtgcgcggccaggtcgaggccgctggaggcaaggagctggaccgagtccggggcgtggcggtgcacgcgcgggtcgaactcgcggaggttgacctcgaaggcgagggcgggcggggaggtcggggaggcggcgaaggtgaggccgacctggatgaggtggagcgcgtcgacgttggacttgatgagggcgtagcgctcggcgggggtcatggcggcggggtgcttggaggggcggtggatgacgcccgggaactccgtgtccatggacacgtaggggaagtgctcgatggccgcgcggatcagcttgaactcgcggtccacgttgtccgcccacacctggcggatctctagctgctgatgctggtgctggtgatgctgcttctccctccacccgccggcggccaactcctcggaaggcatcttcttaattcttcttcttttccgatcggtcgatcaaattctcaattgaggcgaattgaattttgacggatcccttcgtcttcgccaagctcttcggaggggagatgagaagagaatttgaggcttgggatggttggggtgggcttgct

SEQ ID NO: 40468 - DNA, 354 bp, Setaria italica
  Peptide Sequence Number=SeqID_106442
ttcatcaggtgcatcctgtggacctggtaatgcaggctgttccacgtgttcttctgtggcaccatgggttccattttaaagcagatcatcaagacccagcaatgtacctacttggtagttcccacccttccacttgttcaaacataaaaacagtgtccagcatcaacaaatccattcaagttaactcaacctttttctctcttttttttaaaaaataaagaaaacaaatgaaacccaattggtcagataaagatctagcaaacaccactgagttgtggcaaaaaggagaagcaactctgcatgtccagatttgtgagattggcgctaaggttagtgaggagtggttcctgttat

SEQ ID NO: 40469 - DNA, 394 bp, Setaria italica
  Peptide Sequence Number=SeqID_106443
ctcttgtgctctagtggtcctacggtggccaagtgaaatggaaatttaagggcgccttctacctcgtgacgcattattggtattgacagtctattggaagatagttgttcatgcagcagtttaccagaccatgaaccaatgttttgtaggttacattcatcttcgtagatacatacttgtgaagctttgtacaatttgagcaacgtcttcgtatcatttatgtgtccgtgcagtgattcctggaatctagactcatcagcaaagtgagacattgcatcagaggagatgtcatatccgtgcatgcgcagtaatcgaaatgccattgcacatgtctccatatccatgattatctcctcatcatattgaagccaagacctgtatgtcatgtccaata

SEQ ID NO: 40470 - DNA, 446 bp, Setaria italica
  Peptide Sequence Number=SeqID_106444
gccgacaagccccacaagatcgtcgagttccaggccatcctgctcgattactactacatgagcatcgacattgccggtgtggtcgaccgcctgcaggtcgtgttccaagggtaccccaacctcgtgcgtgctttcaacactctcctgctgatgggttacgctctcaagcaggatgaccagcaggggaggaggaggagcaggtgatgcctagacatggctgtgtgcttcctgttacttgcattggtggatctctgtactgccagggctgcccattccgcacttccagtagtggtcgtgtggaatagactgccaaataatatcagactatacctgtgttgtaccgtgtttcctattaaatggtggatctgtgtagttccggtgcgccggttctcttcacttccactaggtgtgtggaatagcttgccgaataatatcggactaagtgt

SEQ ID NO: 40471 - DNA, 276 bp, Setaria italica
  Peptide Sequence Number=SeqID_106445
atccatgggcatcgtgcgagccgacgagtggttgctagaggggggaacaggtcagcctttaccgcctccaaagaaagtaactccaggtcgcgatcacgatcgtgtctgaattggtttcttgtattcgcgcgcagtctgtgggcatgcgtaggtgagctgtggcactgtcactacattcctgcctgggtgcttcatcacgtgcctgaaccgagcaggcatcagaaacttgtctcgacaccgtagtgccatatctgctctacctcatacaattttgcg

SEQ ID NO: 40472 - DNA, 353 bp, Setaria italica
  Peptide Sequence Number=SeqID_106446
tctccgactcagtgtgagtagttgttgctttgtgcattaaattgcatccggactgcatttcaggttatgtggtcagagattatcaatatctagctacaccgctacactgacatagtaaagaacaagatatcagctaattttcgttggtggaacaaggcgctgagaaacaaggagggttgagatctgaagaaactcaaatcagtttggactttggaatgaatactgaggctggagatgggaccgaccaacatcagcatgctatcttcagtattgatatgtttctagaggctgacattggacctggttaccgcatgatggcgccctgtcaaatttagacgcgacaatggttatcg

SEQ ID NO: 40473 - DNA, 301 bp, Setaria italica
  Peptide Sequence Number=SeqID_106447
gtcggggtcgtcgggcgcgaagccagactccgggtcgtcgtcggggaagccaacgtagccgccgagcgggatggcgcggagcgcgtactcgacggggccgaggcggaagcgggcgagcgccgggccgaaaccgatggagaactgggagacgtggatgccccgcgacgccgcagcgaggaagtggcccgactcgtggaccagcacgatggcggcaaggacggaggccgcggaggccacggactcgacgctggcaagaaggtccggcgcggcggcggcggtggaggcgggcttggcgaggtgg

SEQ ID NO: 40474 - DNA, 644 bp, Setaria italica
  Peptide Sequence Number=SeqID_106448
ctgcaaatgcccaacaggtttcaagggtgatggagtgaacagttgcgaaggtactactcttagaaaggaaaataaaagagttgcctggcaaccctgtgcatgttgacataatatgttcatttgtatctatagcttggcataatttatattgcaagactagtgcgtttccttttttaaaaaaagaataatatcttgaaactcactagactggtaggtggcagtgtgctcgtgcttatgaccattgctatagaaattcctccatcaaagcactatatatcaaacacaatgatggctccaagtttgcaacaactcgagcttcttgactctatgtggaatatctttatttccgcttgcatttgcagatgtcgacgaatgcaaagagaacctttactgcaagtgcaaaaattgcgcctgtgagaatatatggggaagctacgagtgcagctgtggcggcagcaatatgctgtacatcagagaacatgatacgtgtatcagcaaacattctacctcgacaattggctggggcttcctatggttattttcttggcctggccttggctggagcaggagcatatgccgtgtacaaatataggctacggagctacatggattcagagattcgcgcgatcatggctcagtacatg

SEQ ID NO: 40475 - DNA, 497 bp, Setaria italica
  misc_feature (440)..(440): n is a, c, g, or t
  Peptide Sequence Number=SeqID_106449
gttcatgacacacgtgggatggactcttgtcaagaccagatcaagagaattcttgttcttgctgcaactaaccggcctttcgatcttgatgaggctatcattcgtaggttcgagaggagaatcatggtgggtctgccatcaatggaaagtcgggaactgattatgaggcggcttttgtcaaaggagaaagttgatgaagggctggactttaaggagctagcaactatgacagaaggatatagtggcagtgatcttaagaatctatgcaccacggcagcgtatcgccctgtgagggagctgatacagaaggaaagaaagaaggagctggtaatgagatcactacacacttaagcttcttaattcaagaggaattgtgtgaatacactatgtaacctttttgtctcaacatcttcaggagaagctgaagcgtagaaaaaggnggagctccgtcggattctacaaagaagaaagaaaaggaggagccaatcattctaagg

SEQ ID NO: 40476 - DNA, 634 bp, Setaria italica
  Peptide Sequence Number=SeqID_106450
aataggtagtacgggaataaaaaccaaggattttatcccgacaccatcttgtgcatcaaatgacatgactggtaatattccagaaattacaaatgaccattttatctttgtttgcgcaccccaagatacagaaacaatgaagtcagcaccggtttttcatgaaaatggtcaagtcaatgggtttgtcattgaagactgcagtctaccctttgctcgtggtgataaacctggtgacaaattcattgacagggaagccaaaatatgtgtgaaaccaagacatttagaagcatggttgcggcaagtaagtggtgataatgattggagggcaggcctagagaaaatgaaagggtgattttggtacatgaaatgcaatacctctcagacgtgttctcatgatggtgtatgataaacaatgcagctcctctcagatgtgctagcagctggacttttgttgagaaaattttagtacaagcactgtacaaggttctgcattcagtctctaaaaagtatccaattgtactctacataagagatgttgagaagttttttcacaagtccccaaaaatgtatcttctgtttgaaaaattactaaacaagcttgaagggccagtgcttgtcctcggatcaaggattg

SEQ ID NO: 40477 - DNA, 2548 bp, Setaria italica
  Peptide Sequence Number=SeqID_106451
aaagaatcaatatctgagacgacgtttgaacgtgtgactggattgcttggatctactttccatcctttccacaaaaggagcaaccaaaagaaactatacgtagacaaagcagcatgacagatgtgaaactaaggagttctgaaagtatgagcaacttaccaaagctcagaagaaatgcatctacttcatccgatatgagtagcctggcatcgcaaggtccttcaactaatacagctcctctcagacgtgctagcagctggacttttgatgagaaaattttagtacaagcactgtacaaggttctgcattcagtctctaaaaagtatccaattgtactctacataagagatgttgagaagtttcttcacaagtccccaaaaatgtatcttctgtttgaaaaattactaaacaagcttgaagggccagtgcttgtccttggatcaaggattgtagagatggacgttgatgaggagttggacgacaggcttactgttttattcccatataatattgaaatcaagccacctgaaaacgaaaatcaccttgtaagttggaactctcaattagaagaagacatgaagatgattcagtttcaagataaccggaatcatattttggaagtccttgcagaaaatgacctcgagtgtgatgacttaggctcgatatgcctatctgatacaataggccttagtaagtatatagaggagattgtggtatctgcagtttcatatcacttgatgaataacagagagccggagtaccgaaatggaaaattagttatatctgcaaagagcttgtctcatgcattggaaatttttcaagagaacaagatgagtgataaggacagcttgaagctggaagtgactgctgatgccttgaaggctgctgaaaaaggactgctccaactgctgcaaaatcagaaacaaaacctgcaactttgctgccaccagtacgccctcctgctgccgcttctgctgcccctgctgctgctgctgctgctgctgctcctgcagttgagagcaaaccagcaccagagaagaaggatagtccacctccagctgcaaaagcaccggaagtgccaccagataatgagtttgaaaagcgtattagaccggaagttatacctgctaatgaaattggagtctcatttgatgatatcggtgccttggatgatatcaaagaatcccttcatgaacttgtcatgctgcctcttcgacggcctgacctcttcaaaggaggtcttcttaagccttgcagaggtatattacttttcggccctccgggaactggaaagacaatgctggccaaggctatagcaaatgaagctcaagcaagttttataaatgtctcgatgtcaactatcacgtcaaagtggtttggggaagatgaaaagaatgtccgcgcattgttcacattagctgccaaagtatcgccaactatcatttttgttgacgaagttgatagcatgcttgggcagcggaacagagctggggagcatgaagcaatgaggaagatcaagaatgagttcatgacacactgggatggactcttgtcaagaccagatcagagaattcttgttcttgctgcaactaaccggcctttcgatcttgatgaggctatcattcgtaggttcgagaggagaatcatggtgggtctgccatcaatggaaagtcgggaactgattatgaggcggcttttgtcaaaggagaaagttgatgaagggctggactttaaggagctagcaactatgacagaaggatatagtggcagtgatcttaagaatctatgcaccacggcagcgtatcgccctgtgagggagctgatacagaaggaaagaaagaaggagctggagaagctgaagcgtgaaaaaggaggagctccgtcggattctacaaagaagaaagaaaaggaggagccaatcattctaaggccactaaacatgacagatttgaaggaagcaaagaaccaggtggctgcaagtttcgctgccgagggcgccataatgggtgagctgaggcaatggaacgagctgtacggcgaaggcggttccagaaagaagcagcaattgacatacttcctttgagcaatctgaatgccacacgcagaatgtatggacataatttgaaagagtagtagagtagagacacaaaacagccgtgacgaaataggccgaacatgtataacaacatgaggagaaatgggggagtgttaggggacacaagaaatcaggctgtaaaagccggtttctgttgtagaacaaggaaggaagaacagttctatctccaccttaaattcctgtttgcttgtgctgtttgttgtattacaccaaataatgtaatctgcggcgcagattgttcctcctttttttctttctttgtatttgcctggtcacataacgattttacataggttgtggtcagcctcgaaatggttttggtcttttctgtgtgtgcgtggggatctttgtagaggtagctcaggcaagtactaagaagactaagaaagaaaccgaaaataaaacccaaaaactaaaattaaaaccttaaaa

SEQ ID NO: 40478 - DNA, 886 bp, Setaria italica
  Peptide Sequence Number=SeqID_106452
tttttagaatagaacaagaaagacaagaggcactgcatatgctattaggaaacacatgttcctcgcgacattataaacttagttccgaggttatagcctagatagtttatggatgcaatgatgggcactaattagttaacttagcaacatcagtcctcactcctcaaactggttgcaacgagagatgacgaccagccggatgtcatcaagttgaggccacgcattcccctctcagctctccccggtcttcattccatggatacaaaagcgtcgacccattcgtccagtcccgcttccgcggccacgcggcacaggaccctctgagcgatgtagtcgtcgtcgacctcgacgtatcccttctcctccaactccgcgcgcatccaggcctgaagcttctcgagcctggcgaaggtgcgcttgctcgactcggcctggtcccggtagacctcgtaggtcttttcgatgaactcctgggggtagatcttgccggggtggttgaccatccgggcgtattcctcgtccgggtccacgaagaactcctgcttcagtgacaggatgcacttgacgtactcctccgaaagccgcagccgcccttccttgcggcttgtgtcgtcggcttccgccgctgccgccggtgccacgtcagcagcgtgcttctccccatcgtccacgcctcccgccacctcggccgcagaaacagcagccgccgccgccgccgccgccgtcgccttccccgcctcggatgagacgatcgccccgatgagcttgttggagagcttcctcaccggacgacccttggccgccttgctcccgatcgccaccgcatcctccggccacgcacccgtcgacggaccagatccgcgccgccaactccgcgtccatggcg

SEQ ID NO: 40479 - DNA, 671 bp, Setaria italica
  Peptide Sequence Number=SeqID_106453
ttctatcgagatgttagaatctctgttgaaagatacggctgcaaagattttccaagctggtgggaatttatagtcctgtggtcactaagcgccgttctaggatgtgtgttggtgtgaaagcttcacacaagcatttggtgccaggtggaattgttctgagttccagtggctctggtgcaacttactttatggagccaagggatgctgttgaactcaataacagggaagttaaactctcaggtgatgagagagcagaggaattggtaatactaggcttgctaacttcaactatcgctgactcccaactgaagataaaaaatttgatggagaaggttttggaattggatcttgcctgtgctagagggtcgtatgccttatggacaaatggtgtcaaaccaagcttcagtgacagttatagcagttgccaatcggatcagagcagtgagtattcagtttatattgagggcattcggcatcctttgctacttgaacagtctcttatggcagaaggttcaactgtggatgcatctgaaatgcctgttccattggacatgtgggtaaaaaaggatgcaaggatagttgtgatctctggacccaacactggaggcaaaactgcctctatgaagaccttggggctgtcctcacttatgtcaaaagctggaatgttcttc

SEQ ID NO: 40480 - DNA, 352 bp, Setaria italica
  Peptide Sequence Number=SeqID_106454
tttttttaaaagaccaacaattgaacaaagcccttgtttgaaatgatatatctttttctcgtgacaatcacacaagcacaacagctagactatttatctgccaaacagcaatagaaacgcccagcatttcttccggaagcttaattccaggatatgaaactcatttttcacctaagaactacataacctagcggcaatgtgctgtcatgagtgcaacaaaataggggtagggaatagaatggcgacaagcctgacaaccaaacatcccactctgatgtaactcgcaaagcagcatgctaggtacgttgaacaaaggcaaaagatatgatggtaaactcactagtgcgactga

SEQ ID NO: 40481 - DNA, 544 bp, Setaria italica
  Peptide Sequence Number=SeqID_106455
acggcgggaggatggtcgtgttcgaggactttccggcggagaaagcggccgaggtgatgcgcctcgccgccggcggcgccgagcaggcggcggcaccggccccggccccggccccgcgcgacgaccttcccatcgccaggaaggcgtcgctgcagcggttcctcgccaagcgcaaggcccgcgtcgtcgagcgcgcgccctacacccgcccgtccccggccgaggaggcggagaagacgaagaagccggccgcctggctcgggctggggagcacggacgccgagcgcctcaccatcgcgctgtgatttggagctcgctcggttgcgagatcgattagtagtgtgatttaattgggcgggttcttggggttggattgggttggatcgaacagagcaggagcatttgctcgtgctcttacacagacagagaattgtagagatgtattcttgtttacccttttttttccttaacaagagtgctttgctcttgtaagattcgatagaaagaagatggagattgaacagttaactaccaaaaaaaaaaa

SEQ ID NO: 40482 - DNA, 426 bp, Setaria italica
  Peptide Sequence Number=SeqID_106456
tcggtggttttgcaggaaaggtaagaccttgcctgcattcaccttgttgcagatgatgttggagaaaggattagtccctgatactgttgcatatacctgcttgttgaatggattgatcaatgaaggtcaagtgaaggctgcttcttatgttttccaggagatcatatgcaaggaaggcttgtatgcagattgtattgcctataattcattgatgaaagggcacctcaagggaggaaagttaaatactatgaaaagtgtgatttctgatatgcataagaatgaggtttatctaaacactgctagctataacatacttatgcatgggtatgtcaagaagggacattattcaaggtctttttatctgtacaaagatatggtgaggaaagggatcagaccaaaacaatagtcacataatcgcttgctcat

SEQ ID NO: 40483 - DNA, 567 bp, Setaria italica
  Peptide Sequence Number=SeqID_106457
gggcagattgctggcattacctaattatcagtatgtgcatagaaaaaacacaataacacttattatatatcagcatcaaagaaaaatactggatctgacgggcagcaacaagacagagatgtactggtgtatcaatgaacaatgttttttttccttttttgtcaagagaaagattttccaggtagaacaggtgaggacctccaagtaagcacaagaaaatcttagcaaaaaggagaaaaagacagcgcaaaacatggttgatccaaaaacgaacaatcaaagtcgctgttgacagagggcaaaagaaactttgcttcaacgaacaagaactttctcctttaatttgatctaagaaaaaacaaggaagaattgcgcaaagcttcaaccaaagctattcttactatctggaggcatctcaagcgatttaagaacggccggcaagaattatacattccaaaatcgaccatcaaatatgaatcgataataaaacgacatgtgtaagccgtacacaagcttggtcccaaaaaggagacagtggctcagacggatacccaagttggaagaaag

SEQ ID NO: 40484 - DNA, 414 bp, Setaria italica
  Peptide Sequence Number=SeqID_106458
gaccaaagcaagccaggaaccaggtgcgagtgagcagcttcagtgtgagcaatgtggagaagtcgaacaccgtgagaagggttgcacactgcattgcccgaacaagaggttgatgcactaacttgatgtcttttttcccctgtatgcttcatgccttcatgtgagaagtgtaactggcattacgtttggtgctggaagcgatgccaagctgaagaaagcatgaaggctgaggatggcgctagctcggatggtgatagctgaagcaatacctccaagagccatgcatctccaagggatggtagatccacagggaactgaagatgctccggtacctctgctaccagagcgcctatttgtagtgttccgggaagagtttagattagttgcctaacttaccatgtcatcgtcgagctc

SEQ ID NO: 40485 - DNA, 419 bp, Setaria italica
  Peptide Sequence Number=SeqID_106459
ttcttttggttcttctactattgtatgttagtgtggtgataaaagtcttatttaagtgctatcagtgaaccttgcattggtctcacctgtatgcatgagaagcttagtaagctacttgttacaatggacttatcatggccacaaattgaaaaccacgaggtttgtcaaggaccatattgtgcaagtgacttaacaaaagactagcagttcaaagccatcagtgaagtgtgctaggcgccaggtagtctttcacaaaactcaaaagatcactaatgaaaatggaggtgcatgtgaaccatgatgagttaatgctgggactgggcataattacccgaggaccgaaaaccaaactgaaataaccgaaaccaagaattttgatcattagttcagtcccaggtatgaaatagccgaagtttagg

SEQ ID NO: 40486 - DNA, 393 bp, Setaria italica
  Peptide Sequence Number=SeqID_106460
tttttcaaatcaagcgtaaccttaaagcgccttgatgcattcagcacaagggctgcttgccgccacttcttcagcctctcgacgggagcgcccttggctgggatgtcgaacgggtcgcagtcaccgctgatgctgccccagctgctgctcctgctggcgccgccactgcgccgccgcgccctcccgccgcctgacgacgaggagtccatcccgctccgcctgcgccgacgaaaaccctaaaccccaggcaggcgccgcgagctgtaggcccctccacctcggcacctccggtatatatgggggggacgccgctgccggattggagcaggagcggagaagcttgccccggcgaggagtgttacggaatttggagagccccagcggtttgctgtg

SEQ ID NO: 40487 - DNA, 619 bp, Setaria italica
  misc_feature (542)..(619): n is a, c, g, or t
  Peptide Sequence Number=SeqID_106461
gtcttcgagctgcgagacggccggctggcggagctgcggcggccgccctccgcggaggggtgcggcgggtgggagtgggcgaggatcatcggaacgccggccagcgcctgcatgaccagctactggacggccgttgccacgtagccgccgccggcagctggggagcaaggctggctccgctgccggttgatagcgaggcggagttcaaattttgaaaagggagaacaaaagaaccgttgattagccagcccgctaacgccgtgaagctagcccactgtgttggaggaaaagaactttgcttgctgcggcactggcacgatcacatccacgtgcacccaggccggttatcctcactagaattgggcctcctaagcaagacagcagcagaaaggagtactgaccttcagaaagttcagcttatgtgtaatcttaaatcacatcacatcataggcgaaaatagtgagtaacagcttaatgcttttgtgtaaattcctcccttaatttcgtaatgtgcatgaagtattactccccccattccaaannnnnnnnnnnnnnnnnnnnnnnnnnnnnnnnnnnnnnnnnnnnnnnnnnnnnnnnnnnnnnnnnnnnnnnnnnnnnn

SEQ ID NO: 40488 - DNA, 312 bp, Setaria italica
  Peptide Sequence Number=SeqID_106462
tgttgttgattgcataattcttgtttctcttcgagggtaccttcttacatttatacacagacataccatttgcttgcttttcaagatgtaaacaacacacatcttttccccaacacccacatttacttacgtgaaaactacatcttatctgtagattttcttccactctgccacacagttgcaaagatggaaaatttcatgtcacttctgcttcctttacaatgttttctatgaaataaatgaggaaaattatagcagcagttgtcatcattgaaataaatctgcttttccaagtagggatctttgattttg

SEQ ID NO: 40489 - DNA, 1308 bp, Setaria italica
  misc_feature (18)..(18): n is a, c, g, or t
  Peptide Sequence Number=SeqID_106463
ttgttgatgttcattccncttgcatcgccgaaattcagcagttttgcgataacagtctgttgtcaacctgacactcagatagtcccaagaccattcctttacagcataaagagtaacaaattcacttcaaaatggtcgccaagaaatttcagatgccaagatctcataatgacagaaagttcttggattccattgaacatccatgcgttacattcaatttaaccaaaacttggctacaagccatcaggaagtagacaccaaagaattaagaccaccaacaatgccaaaaatagaccggcaaccactttctaagattcttcttcattcttcgacaccaatttaatgcgtttgccatcaacagaaaatctggagcttgaagctattttatccatcaatgtagcacggaggccatccttatcttcagccacaccacattcctgcagttccttgacgactagcttctgtagcttcttaagtttcataactccatccggatttgtcttcagtgttttagtaataatcttcttccagttgatcttttgtttctgaacacttttacagtcggcaccacctgcgagttcatctgcagtactctttgttttgttttctgacttcccatctttagattttattacctctccaatgctcgaacttgttaaatgctgtctttttgtgttatctggctcctctatggccatgtcatccattctctttcttttgccagcatctttttcttcatctctttcatgatcaccactctcaccaccatttacttgagcagaatcttttgtaggcacagccccggtttccttcacatctgcagtttgttcagctccatttgctggcttctgggaagcatggaaggcttttgcttttgccctatgcttctttccatcagcatgcagtaagagagtttgcttgctagtcgtagtggtattgcataggctgcagaaccaaggaggacgtgtcgacaggccaacattgatatcaacatctgcatttggctttggtttatctggcttaccctgggcaccattggatggcttgctctgtcccttgggaccatacttctcggcctcggagatgcactgggtgtgcccctgcaccgtatcctggctgaagaactcgccgcagtcgatgcatgacagcttccaggcggagcaggaacggaagtggccggcgagcttgggcttcttgaggttctcgccgcagtcctcgcactggaaccacaccatcgctgcgtcctccccggaagcttctggcggcaggaggcgctcctcgctgacaaagggtggtttaggactagct

SEQ ID NO: 40490 - DNA, 249 bp, Setaria italica
  Peptide Sequence Number=SeqID_106464
tattcactatcaaggatcaaggctagcaaaataacgatggcccagagcacgaccgtcgccgcaaccttcttcattgtagccttcatggcggcggctgcttctgtggcatcagctagtgcgtcaaagcctgcagcccctagaaagctgctgtctggcgatggcatgatcccaatcaccaccgacgacctgctcccgcactagcggcaaagtccctaacaacggcagggcaaggcgtagctgccatccaga

SEQ ID NO: 40491 - DNA, 1165 bp, Setaria italica
  Peptide Sequence Number=SeqID_106465
agagcagtagcaatagtacaactaaaaacaattcttcatcgatgctattatacaccaacgaatcactaataattttcttcaccaagatgggggtgaagttggacagccaccatgcattggtgccctctctaatggcggcgcgggcaagaaggacagaaaattgaactccactagcaacgaagaggaacaaagaatggcaatgatcggtgtagaacgtactactcagttcatggtgttaccatagcttgaaccgccgagaatgtgatgctgtcctcctccgccgtatagctccgtgggccccatcgaggcgccgccttccctcacgccgccggtgccaccggctccggaagcagacgcccctccaaggtggagctccgagatgttgggcaccccggcagtggagtcctcgttgctggtggcggcgtggcggccgtcgtcggggccctggtcgtagaggaatcccttgaagaggtggccgttgatggtgaccatcgcctggtacgcgtactcgtcctcgccgtcttcgatggacgtcacgcgcacgcacttgaacaccgccggcgcgcgcacctgccgcgggaggctgtccctgaacgacgcgtcttggtggctggaggtggtgtcgaagcttcggggcgtggtggcgttggaggttgatgtgtgggaggtggtcgtctgcgacgagaggaggcggggcttcttggaagcggaggcggaggcgacggccgcagcagaggcggtcgcgggagaggaggaggcggagccggaggcggcgaggtgctggcgctcacgtcgtcgggcggcggggacccaggtgctcttgacgtgggtggagcagtcgaagccgcggctcttgcagcaggtgcggcaccggttgtggccgcagtccttcttcgcttggttgccgcagtcctggcacgtggtggcgccggagccggaggagccggcgccggtgtccagcatcgggaggggcttcttgaggtaggcgaaggggctggcgctagggttagggttagcggccgctgccgaggacggcgactgcggctgcggctgccagaactgaatggcggcgctgccgggcggggcccccgagcccgacttggccgcgtccggatcaagcacgcagggcccccccggagagcagcgggaagatggggtctcccgc

SEQ ID NO: 40492 - DNA, 2419 bp, Setaria italica
  Peptide Sequence Number=SeqID_106466
gaagcatagtcatgcaaaactgttatttgaatggtgtttaaatctgattttgccactaaaatgtgtgaaagctcagtgcacaagtattgtaggatggtatcccagtctgtcacatactcacatattttgttttcaacataacttcataagcatggccaaggtttcgtccttggtccataatagttgcataaatgttaaatcaatatcaatcaattaggataattaaataactgatggtacaagaacaaacaggaagaggagaaaaaacaggtcaggttacatcgtgtttgttaaataggaaatatgctactagttcatttttttctcaagagtactctagggaattgggggaatagtagacaacagcagcaaagtagcaggtagcacagaagtggtataaaacattaatgatgggaaaaagagctgacaggttaaattcatatcttcacacaaacatttcaaacttcactgtgctaattaatagcgccatattaactgatcatgcgtggttacattcacactaacagaaaccacatggcactgttgatagtgaccataggatatgctttgttatttatatttaagattagattgagttatttctttaattctagggtattacttttttaagggtctaaagtacaaataccatctacaaaaggattgggattgtctctttagattaagaattctccctctcccagcacttaatcggttgccggacattggcatgttgtactacttgggttcagggccactaaagtatgaaaatgacaattgtccactatgctggactaaatggagctacaaatttggagaatcttttgatgcccttcaacagatcagatgatctttggatctttcaagcatgcatttacaagattaggcatgagcacatgagccagcttatttcctggatgcatacacaaggaattgattctaacgggaatccaggtccatattacgtacaggctgcacaactggcactatacagactatctacactagcatcactacaatacgaacatccggtgatgcaagctgcctcgtctgatctactaaagacacagctatggtacacatctcgtggtcgtcctcagcagtgtggatttcgcagaaacttcgattggcctccagattatgctgtcgagtttgctgcataagttcttgtagaacctgtggtattccagagtttcaccagcaacctttcgaacatcaaccatgtacagagaaggagcaacttcaaaaatctccagaacaacagcaaattggcccatcctgtttggtgatgtgccttcgagccgtagcttgtaattctgggaatggaccttgagacccatagactcagcaacaacttcgatcgtagctactatagtcatagctggttttctcgagacaaaacgggtctggcgcttcacaaactcctgttgcctatcaaacaatgctgagagatccaaaccttgagatagtgtaatcatctcaaaggcattcatcataagaggaccaccatccttgtgagttacctcctcagatacatacttgtcctcaatattgtcaaaaactgcctgaacatcatccaggctgacattttcatcttcaccacgcctaatagctacatagttcttcttaaaccatgggtcagcccttatttcttcaatagtgatacgagtttttggatttggatcaagtattctctgaatcaatgagctggctcctggagagaaccaatatggacatgaatactgagctgcagttatcttttcatacaagcttggaaggtcattttcctcaaagggaaggtaaccagccattaaaacatagagaataacaccacatgaccaaatatctgctgctgatccgtcatatccattgctgcctagcacctcaggagcaacataatttggggttccacattttgtgtgaagaaggcctactccattctgagacagtgtgctaagtccaaaatcagaaacttttaagtttccacgtgcatcaagaagcagattctcaggcttcaaatccctatgataaactcctttactgtggcaataatcaatggcatcaataagctgctggaagtacttgccggcttcattctcacgaagcttcccatggtgggcaattctatcaaacagttcacctccagtgataagttccaagattatgtatatctttgtcttcccagccaacacctcattaagcctaactatgttgggatgtcttacgatcttcattattgatatttcccttttgatctggtggagcatgcggtgggataggatggtctccttgtcgagcaccttcatggcgacggcggcgccggtctcggcgtcgacggcgaacttgaccttggcgaaggtgccctgcccgatggtgcgccccacctcgtacctccccacccgcttcttccgcgccgccg

SEQ ID NO: 40493 - DNA, 425 bp, Setaria italica
  Peptide Sequence Number=SeqID_106467
tgtgtttgttgcttcccttttacgtattctcattcatgcaatcgagaagcaatccgaggaaataaaatcaatggcagccatgttatccctcgccgtggtgatgtgcaacaagaatgctatgagtagagaagattttgctcgtgccacccctggagatgaaacaatggtgaagaagctcaaggagatactaaaagtaaacaagcactgcacggctgagtgtttggaagtagtgaagcttacatgccacgtggtggtagctatgattaaagcccagcccagctgcatccaacgtttcaatgaacataatttcgaggaaacactggcggagactttggaaaccatgtcagaggttgatgactgcctgctcttcgctgggaacatcgtgaggtgatcaagcctgccaggtctctcgcttctctcgtgaa

SEQ ID NO: 40494 - DNA, 335 bp, Setaria italica
  Peptide Sequence Number=SeqID_106468
tggggtcttgtaggtctagtaagtaggacggctgatattctggagcaggtgcaatgatgacagaaagatcaactattgtggcaccctgtgacaatgaagttgaatagcattgatgtgagtattctaggagcaataaaaaaatatattgcaaggacaacaaattcctatgcaaaatacaaatgctgctaaaagggactcactttcttgtagataaaaaggaattcacttattgaactttctttctgaggtatatggtaatcaaccaccatcagcaaacacaaagataaggggatttaaaattcaggaatggtgacagaaactgggtttaggaaaac

SEQ ID NO: 40495 - DNA, 659 bp, Setaria italica
  misc_feature (613)..(613): n is a, c, g, or t
  Peptide Sequence Number=SeqID_106469
tgacctgtaaccagcagacaagtggacaagcattgctggggagagttcatatgtaacctgcaggctttatatatatttacaggcttacagaacagatgactctggttagtggttatgacctgcaatgttgagcaggcgtcttcatcacaaatgtagagctgctatactctccgcaagatcgaaactgttttcctgtcatattgtgccagtcttaaaatccctaatggtagaactcgagaattctgattttgctggcatgaaactaccttggtgtttagcaatacttgtattagaagtcacatctgatgtagtgatgttcttatcttcattgatgagaactagagttagctgcttattgtaaatttgcagtcaagatgaaggtgtcttgtagatgattcagtattttacacataatgttacatttttagcatctttagtgttcccatctatggctgttcaagcatcttgtgatgttcagacagttcagttcgctatcagcatgaaggagacactctggttaaccagaagaggtgtatctggccagacaggttttagattttggtagagtttcttgttttacctggtgactctgagcagcccgtcctgctttccngataccacgtggaaaatcatttcatgctatgtatggtatctgctgc

SEQ ID NO: 40496 - DNA, 874 bp, Setaria italica
  misc_feature (607)..(607): n is a, c, g, or t
  Peptide Sequence Number=SeqID_106470
gcgctccagggccccggcgccatgctaggcggcaacctctcgatgctgccgccgctgctccgcctcgccgacttcgacgccatgagcctcggctcgagcttctccgggatggccgggaagccttccctcgacgccgccggagcctactcggtgggcggcgggagcgggctggagcatcagtggagggtgcagcagatgcaaagcttcccgttcctgcatgcgatggaccagggcccgctgggccccacccctggcaatgacaatggcgccggggatgttccagttaggtctagacagtggtgatggccgcggtggcggcggcggcagcggagaagacgggtcgggagagctccatgtgatgcaggccaagagggaaggcggctaccaagctagaggcatgtatggcgatcaccacttcgccgctgcaggttacgcttcctattccaacaatgctgctgcaggtaaccatctcttgtaatggtcgagcttaattcaggcaagctacgatcgatcgatccgatcgttgttcctgcaactattagctagaggcagagtgtgtgaggatggtattgtgatatagaaaaaaagctaagcatgcatttgcaangtttcttcttcaagaactggaaagagagagagagggagaggaggggctcgacttggataatggacgagccgtatgatggatcatgcacaagtattacctacagctgctagttagcttgcatgatcatcacttgttctatgtttcttcttcttttttatctgatccttttaggtttcactgtcgatcgagcatttggggtgaagtaatgtgtactgctgttcatcattttgttcatggaaacacctatcatatgtcaattattccccc

SEQ ID NO: 40497 - DNA, 1332 bp, Setaria italica
  Peptide Sequence Number=SeqID_106471
aaaacatgctctgcaaaacattacgatgcgactttactgattaaccacaaaccccgacctgctcgagaacttgacatcctcacaatcgaaaacaaaaaacaaacataatgctataaacatctatcctcaaaccaatattctgtacgacgaagccacacccagcctgtcaacccagtattgcctgctacagtatacttcttgctgctgttaatggcggcgccaccgatcagccttccatctcaacgatgatcttgcccgttgcatggccctcgatgctcttctgccaagccttgcttgcctcgctcaatgggaaccttgagtcgatcagtgtcttcatcttgtggtccttcagcagcccgaccaggaactccaggtcagccttgttgggcgacaggagcagtggcaccagccgcttcttggcgaacgtcaccttgtgcaaccctgatttaaggatggcggcgaagttcggggtgatgtcaatcaccctcccggtaggggccagcacaggttcaaacgtcgaccagctgatcccgaccgtgcagtggacgacgccgtcgtacttctttcctgatgggctctgcaggctggcaccctctggggtcctgtagtcaagcacctcattcgcacccaggctcttcaccagctccacattgcgggctccacaggtggcagtgacgtggagacctgccagcttcgcgagctgcacggcgtagaacccaacgccaccggatgctgcagtgatcagaacgtttaagggctggccagtaccgtcgaacttggcgccaatggacctcaaagcctggagcgcagtgccggctgcgatgggcagccctgcaccttcagcagcagatacctcaggaggcctcttgacggtcagactttcagatgccacagcatactcagcgagtccacctccataaaatgagttcagcatggcaacaacttcatctccagcttggaacccattgactcctggaccaacatcaaccacaactcctgccacatcagtcactgggataaagggcagtttgcgaggcaggaaaggccgtaacatccctttctgtatcttccaatccaccggattaatgctagctgcttccagcttcaacaggagctcattcttcttcgccgaagggacgggaacttccacatgcttgagcccctcggcgcccccgccgcaggcgtcgtactgcacggcccgcatcgtcgcggggaccttcgtcgcggctgcggcggccatcgcgggagggaagcgcagcgccggcgagtggggaggggaggggagtggacaaaggatttactcgagggggctcggctggttggttcgctggc

SEQ ID NO: 40498 - DNA, 344 bp, Setaria italica
  Peptide Sequence Number=SeqID_106472
caggaagatgtggcgggcgcgaaggcggacggcgccggcggggaggtgatgccaacggcagccatgggggaggcgatgcgtggcctcgcaattacagatgctgatcactatgggaggcttggaatcacaagactcgcttctactgatgaggtaaaagcggcctatgagaaaagatgtgaagaactaaatagtaaagaactggaagaagaggagctcaacaaggaacatgacctcctaaaggttctgatcctaaactaggaaccagactgcctcacttcacctgttccattttccagtacttcaatcatatctgcacatctgtaggaatcatttaccatactata

SEQ ID NO: 40499 - DNA, 257 bp, Setaria italica
  Peptide Sequence Number=SeqID_106473
cgccttctggggttggggttacgagtgaccgcatggcatcgactatagagacggcagtagatgcagccgaagatcttccccatttctggatgagcacacctccacgcttctgaattattttggtgaattcttcttctaaacatttggtgtccccaataacttgtttcgctggcttgccgtcaattcttgcgtttaagaaatctgcaacctgagcgatatgtctggccttttcaagtagatcccctggagatggcacc

SEQ ID NO: 40500 - DNA, 285 bp, Setaria italica
  Peptide Sequence Number=SeqID_106474
ggctggttggaattagtttgattaattcaaaataattcaataataagaaaactaagtatgactatatgtgcgacctagtcaaaagtcagatcctacatttacactttaaaattttagtgaatttgactgaaatttgttggaggttcgatttggttttggacggttttcggaccattagtggcctattcaggcatataattttggagttttagctgatacctgttccgcaaaaatctggccattgagattgagcaagtcagctcgctccattcccgggcctcgggg

SEQ ID NO: 40501 - DNA, 401 bp, Setaria italica
  Peptide Sequence Number=SeqID_106475
ttcgaacgcacagtatgagcaggacaatgcggatggcgaaacattcgatcatggttacaactacgacgctgatggtgtttcagcaggtgttgagctcttgatgtcctcattacgctttcgttttttcttcttcccctcttccacaacaacacctctagctgccaattcagctgccaaagcttccttgctgcttgttcctcaaggtactctttgttcatttcctcccagataatctttttatattgcgtttcttcctcattgtgaaggtaccaatcaacctctacatcgtcaatatcagaaaggctttccggatcagcatcgccttctacaatttcacttaccttccccccttttcttaggttattcctttggacttaccttcggttagttctatttttgtt

SEQ ID NO: 40502 - DNA, 522 bp, Setaria italica
  Peptide Sequence Number=SeqID_106476
tctgctttaggactcatttatgctttagccataccttgcataccattggccattgatgaaatcgcccaatatttggaggctgcaattggccccaagttcctgcttgtcaggaagaacctacttggggctggtgcactcgcatgacaacactgggcgatcctgaggtctttgatgttatgtctaaatgcatttgttagtgtaatcgcatagtttcattgatcttctgttgcaacaatgatgctgagttttgtgccgagtttaactatcctcgcgcaagtgatttctgatttgcgcagaggctgaaaaactcggaaagtgtgttgtcatcagcttcgtctctttgttactgtgagatgggagttaaataacagcacgacatagtctacttcagtgaaaactgtggacctagtttctttgcaacaaaatcaacatttcagctttctgaaacctggaaacctagggaaattagtcctacaaatagcacaggtctattcaccaagttagccaaagtgcaaatacatg

SEQ ID NO: 40503 - DNA, 590 bp, Setaria italica
  Peptide Sequence Number=SeqID_106477
taagtacctagtacaactttaaaaattgcatgtcccaagtaggatcccacacaatcacggtctgtgatcaccagaaaatatgatccaactgcaagtttgagcactcctatcacaccataaactgtttgaactttaggggttgatgatccacgtggtggcaacgcttcaaccagattcattgttccattggctcggctaactgacaagtacaagtcagcaaggccatcaattggttcaaatcatagctgtcaggaaactcccaaagtctcagccttgtatgaagtttagatgaagggcttgcatcatttgtcccacccatgactggataaccttcagcatgggcaactgtaagatggccacgagcatgcgcacagccgaacaagtggcctgtatctgagcagcgaagacgaggtctaccacgattccgattaaattgacgagatctactggcctggatcctgctattaagatgattcgcgcgagccgggcgggctggaaggacgcatcctgaaactagagcagcaccggtggccattggcccatagcccggatatctcgcatcggagatctcgggccacgaggaatctgaa

SEQ ID NO: 40504 - DNA, 284 bp, Setaria italica
  Peptide Sequence Number=SeqID_106478
aaatatgtctaatgcaatgccatttttgattaagaataactgctgaagtacatgtgaatgtgattgctttaccttggatgtacctgagtcacattggtagcgatccaaacagtctatgcaatttgattaagaataactgctgaagtacatgtgaatgtgattgctttacttggatgtacctgagtcacattggtgcgatccaaacagtctatgcaatttgttctgacagtgccagtctgctcctcaattttctcgtctttatcatttataaggaagtacctatg

SEQ ID NO: 40505 - DNA, 560 bp, Setaria italica
  Peptide Sequence Number=SeqID_106479
taacgtaaagggacttggttcaaaggttagtgagggagctgttggcgaactatacaagactaaatatgaagatggcgatgcaaataagaaagacgagatggacttcgacgcacagtatgagcaggacaatgcggatggcgaaacattcgatcatggttacaactacgacgctgatggtgcaggagcctacaatggcattgatgattttgatttcttttagccgcatttgtagagtggcacgccgaccagcatgaccttttgggacaagctggaaattgatccggaatataccgtggcaaaagaatcttcacctgtacgctactatagtttagtttcatctttatatgtctaaatgcatttgttagtataatctcatagtttcattgatcttctgttgcaacaatgatgctgagttttgtgccgagtttaactatcctcgcgcaagtgatttctgatttgcgcagaggctgaaaaactcggaaagtgtgtgttgtcatcagcttcgtctcttttttactgtgagatgggagttaaataacagcacgatattgtctaaaaaa

SEQ ID NO: 40506 - DNA, 1011 bp, Setaria italica
  Peptide Sequence Number=SeqID_106480
aaaaaagaaacaaaaggaaacgaaaaaggaaacgaacaataaattaactactaagaaagtacctcctttcttggcactgccatgtctcgactaacagatgtcatgtaatgtccttgaagaaggtccatggcatcctgcttagtcccatcaacaaagttattcaagtagtatctaccaagtgcattccgcaaatcattcagaattccctgagtagttcgctttccataccgaacaaaatctcccttcagagcaggagttccagagtactgaatgcttattgcatctccatgatttgcccacaatattttgtagtttgtgtcaaaggctggatgattgcttattgtatcatcaacaccaagaacttctattcgttggagttggctctccagaatttttctcccaatcatgctctatgtagagattgttagaattcagatatataagtgatggttgaagatcatagaaggatgcgtcaacaagagcacaatgggcatggggttcttaccgcatcatgtgttctgtttttagaacaaacaagtttacaactttaaccatataacaaatattgaacacgcagtcctaaagtacatcaaagcatacccagtataccagtttgggcatgattcacaattcaaaagagatatttttgcaagttccgcatctgttagatgtacatctaaattgtaataatactacaataaaaggatgaaggatgcccttagccaaacaggaaatctttctcaagttggttttgagaaacaaaaagggaagccgctaggtaacttggatgactaaaatggcattgcatagacatatttgattaagaataactgctgaagtacatgtgaatgtgattgctttacttggatgtacctgagtcacattggtgcgatccaaacagtctatgcaatttgttctgacagtgccagtctgctcctcaattttctcgtctttatcatttataaggaagtacctattgtttcctaagattagtccttgatctgatcatac

SEQ ID NO: 40507 - DNA, 958 bp, Setaria italica
  Peptide Sequence Number=SeqID_106481
gtcctcaattacgctttcgttttttcttcttcccctcttccacaacaacacctctagctgccaattcagctgccaaagcttcctttgctgcttgttcctgtaaaaccaaacggcaggcagtagcatcctcagtcaagatgagataccgtgttacattgatggagtcatcgctacctcaaggtactctttgttcatttcctcccagataatctttttatattgcgtttcttactacattgtgaaggtaccaatcaacctctacatcgtcaatatcagaaaggctttccggatcagcatcgccttcacaattttcacctcccccttcaggatccttggacacctcggagtcatttgtgagttccccggatgcaactgttgaagatttatcttctcttacaccctttcttgggttctcaacatcagaattctgtgtgtcacaaagagattcttccaatgctgcctccttaactgcaacagcttcttcagcccttttagcagcttcaagtctttgcttttcagctcgttggaatgctggagggttagcaccaccttctagtccacccgacagtttagtgaacttattgtagcatttttcacaaagtccatgagcaaaatgctcaaaaccttctttacccttgtgcttgcaaagaatttctccagacttgagtgaacgttttgaaacaggctcttgattatattcatcagctgttgccagaaattcttcaatcgttaagctgccagaatctgtactttcgaactctatcaatcgcttagttagagtggcttcacagatcaacctctacatcgtcaatatcagaaaggctttccggatcagcatcgccttcacaattttcacctcccccttcaggatccttggacacctcggagtcatttgtgagttccccggatgcaactgttgaagatttatcttctcttacacccttttcttgggttctca

SEQ ID NO: 40508 - DNA, 1670 bp, Setaria italica
  Peptide Sequence Number=SeqID_106482
cacaatccaactcagcccctatatttatttagctcaaaatcatatagtatttcagtccagctcttattgagcccgttccttaaattttctaggctaaattagagggccttttatcaccctataggtatcttgcgataaatataaaacaatataggtacatatagtataagtaacagcatttctgtgtttctaaaaaaaaggtaggaacatcgtttgccttcttctataactaactttccctttccttcacctacatcaatccgtgtaatttgagtgttatgtaatgcccctgatgtaatgtgacatttccctttctacttgtctcctggaagcatcgtatcctctgtaacttcacacaattcgtcatcctgtcctataagatgtccaacacatcccttttcagcaagcagttcgccttcactcttttttattccgttcccagagaaaatcgtcaatcatgacatccgtagctagttcgtagtcgccatcgccctttgatctacatggcatgctgaacacgatgtcctctgctatgccgtaaggatttccgttcgtgtatacccctgaagagaaccaatcgccttctggggttggggttacgagtgaccgcatggcatcgactatagagacggcagtagatgcagccgaagatcttccccatttctggatgagcacacctccacgcttctgaattattttggtgaattcttcttctaaccatttggtgtccccaataacttgtttcgctggcttgccgtcaattcttgcgtttaagaaatctggaacctgagtggttgaatggttcccccagatggtcatgtttgatatcttgtcgtagaacacaccagctttcagcgcgagctggcacttggctctgttctcatccaaccttgtcagagcatggaaattcttcgggggtatgtcaggggcgttcttcaagcaaatcaaggcattggtgttgcatgggttgccaaccacaagaactttcacattcttagatgctacagcattaagcgccttcccctgttccgcaaaaatctggccattgagattgagcaagtcagctcgctccattcccgggcctcggggcttggcgccgatcagaagagcccattcgacatcctggaaaacctcgtaaggatctatgccgatgctgacttccctcaggaggggatacagggaatcctccagttccattgctacgccttccaacgcttggaacgatttttgggagcccagtaacttgagcgctattggttgatcttgcccgaacacctcgccggacgcaagtttgaagaggagatggttggatatcgttccggctgcacctgacacagcaatgtttactactttcttccaggtttttgtctcctcgtccgccctgagatcgtaggtggtgcagaacaccccgaagcagtccgtgcgccccgccgcgtccttcaccgccgccggccgctcctcctgcacaacctgcttggtggcgtcgagggagcagcagaccagctggttgcggcgcgacctcgacctcaggcggcggcgttgcagcgccggcgatgagcggcgtgcggcggcgtgctcatggaattggaagggacttgtttggggtcggctcggcaagatggttgaggcggaggaggaggaaggaacagcagctgcagccgccatgaatg

SEQ ID NO: 40509 - DNA, 1178 bp, Setaria italica
  misc_feature (1118)..(1178): n is a, c, g, or t
  Peptide Sequence Number=SeqID_106483
cgctttcgtttttttcttcttcccctcttccacaacaacacctctagctgccaattcagctgtaaaagcttcctttgctgcttgttcctcaaggtactcatttatttccacccccacctcccttatctcccgcgctctcgttcccaccatcgcctcccccatggctgccgttggcatcacctccccgccggcgccgtccgccttcgcgcccgccacatcttcctgctcccactcctcgcactccatcccccgcctccgcatccgctgcctccccacccgattcgcggctccggcgtcgttccgcgcgcggtgcgccgccgctgcagacggcggggtcgcggcctcagagggcgccgccgcggtggcggaggaccccaacgcgggaaccgacgtcgccgggggcgccgcaacctccacgcggccgccctactcgctcatctcctcggacaatgtgcagaaggcgatgcgtggcctcgcaattacagatgctgatcactatgggaggcttggaatcacaagactcgcttctactgatgaggtaaaagcggcctatgagaaaagatgtgaagaactaaatagtaaagaactggaagaagaggagctcaacaaggaacatgacctcctaaaggaatcatttaccatactatcaactgaggaagagagaagattgtatgattggagcttgtccagaagtgggcaacctgagcgatatgtctggccttttcaagtagatcccctggagatggcaccagatcctccaaaggaacctgaagacgagttcccaacaacgcttgttggctacttcttcctggcgtggttcatactttctgttgccttctcggtgaccctcaacagatgagcactagatacctccccaaagaagataaagtgtaacccaatactgtattgcttcactatgaataatgttgtacatgacaggcacatggtaattagctgaagcacatagctgcacctcctgaaggtgaaacactcccaaattaccaccgatattgtttccgactaaagcgatgctgttaaatgtcggagatgagaggactgtatgggctgaacctactgatttcgcaatttacatgccttagaaagaaaaaaaaaaaaannnnnnnnnnnnnnnnnnnnnnnnnnnnnnnnnnnnnnnnnnnnnnnnnnnnnnnnnnnnn

SEQ ID NO: 40510 - DNA, 2263 bp, Setaria italica
  Peptide Sequence Number=SeqID_106484
taaaaataaacttaaacaaacaaaaaaccaaaataagtaagtaacgaaacaaagtttagaatagaaatagaatagaataaatactaaaaaggcaactcacgtggcgagccaaatggttgctttgcacccatcaatggcgtgactgatgaaaccgaggtcggttagtgaacgttcgaccattggctttgacaaaatgtgtgatgccaatacaaagaccagcccacagaagtgacagcagcaagtggcgaatatcattccgggcatgtcttagggacatcatcatgaacatcataactcccataaccaatgcaaaagcaaggcgaaaggacgcataattctctagaagtcctccttttcttggcactgccatgtctcgactaacagatgtcatgtaatgtccttgaagaaggtccatggcttccagtttactttaattttacgtttacctttaattttactttccaactaatttcatatttagtcttgtatagttcgccaacagctccctcactaacctttgaaccaagtccctttcgtttcagcatgttgaatgttgcttctgctggtgtttcagcaggtgttgagctcttgatgtcctcattacgctttcgttttttcttcttcccctcttccacaacaacacctctagctgccaattcagctgccaaagcttcctttgctgcttgttcctcaaggtactctttgttcatttcctcccagataatctttttatattgcgtttcttcctcattgtgaaggtaccaatcaacctctacatcgtcaatatcagaaaggctttccggatcagcatcgccttcacaattttcacctcccccttcaggatccttggacacctcggagtcatttgtgagttccccggatgcaactgttgaagatttatcttctcttacaccctttcttgggttctcaacatcagaattctgtgtgtcacaaagagattcttccaatgctgcctccttaactgcaacagcttcttcagcccttttagcagcttcaagtctttgcttttcagctcgttggaatgctggagggttagcaccaccttctagtccacccgacagtttagtgaacttattgtagcatttttcacaaagtccatgagcaaaatgctcaaaaccttctttacccttgtgcttgcaaagaatttctccagacttgagtgaacgttttgaaacaggctcttgattatattcatcagctgttgccagaaattcttcaatcgttaagctgccagaatctgtactttcgaactctatcaatcgcttagttagagtggcttcacagacatgcacaacagcaacaacatctgccttggtgtaattgtacccatgagacagtgcagcaatgtataatgctgcaccacataatccacttggcttcctcccagtctgcatccagtctcgcttcatgctagctacaatgcgtaaagctgtgtctgagacagcattatccctcctccccaacaaacgttctgtaaaacgatggatgaaaaggctgggatctataagcttttgaacaactggatgatctgcaagtagcaaaacttggcagagctggagaaaaacagcacctaggacataaacactgatttgcagatagtcagagaaatcgataagaagataagctttcttactttgccggcaggcaatgtaaaggcaagcagctgcaacatgggttgttctacgcccccttgtaaaattacggtcaatagctagcttatagaagcaataagccttgctaatgatagtttctccaccgctgacatgtaagttattgacgatctgactaatctcatccttccctttctctaaggttctttcacgggacattgaatagtgagaaccaatgcttgccagaatacttccagccaagcggctcgtccctgagggatctttaacaaaagtaggctcgtcagtgtatatttcctcatcaagaacctttccacatgtaccgcagcatatgtatcctttgtcggggtcctttattgaggggcagtaatcagcacagtgagtacaataaaccattgctgaaggaactagccttggatgatcaggtcatatcaaccttagcaccagatcgggaaggggaaagtggccggcgtgcagaggaggtggaggaggggcgccgccggcttgatttcgtggccgccggctcgaggggaggcggaggaggggtgtcgccgccggcttcaggggcgccgcagccagcttcaggggcgccgccgccagcttcagggaggtgg

SEQ ID NO: 40511 - DNA, 2389 bp, Setaria italica
  Peptide Sequence Number=SeqID_106485
ttttgtcaaatcacaaatacaatgctaattgcaaaaaggcatgttcacttggtttttacaaatgggttctgtcaagcagatcatgacagccagggccgcaggaattagaagtgtgagagagaaggaaacaaaagcttgttacaaaaaggaagaaagcttattacaaagggtaagtgacgtgcaaaaaaaatgcaatacttaatcttcacaaaccaatgtgtcgacaagtttgatgaatgatgataatctaaaaggcaactcacgtggcgagccaaatggttgctttgcacccatcaatggcgtgactgatgaaaccgaggtcggttagtgaacgttcgaccattggctttgacaaaatgtgtgatgccaatacaaagaccagcccacagaagtgacagcagcaagtggcgaatatcattccgggcatgtcttagggacatcatcatgaacatcataactcccataaccaatgcaaaagcaaggcgaaaggacgcataattctctagaagtcctccttttcttggcactgccatgtctcgactaacagatgtcatgtaatgtccttgaagaaggtccatggcatcctgcttagtcccatcaacaaagttattcaagtagtatctaccaagtgcattccgcaaatcattcagaattccctgagtagttcgctttccataccgaacaaaatctcccttcagagcaggagttccagagtactgaatgcttattgcatctccatgatttgcccacaatattttgtagtttgtgtcaaaggctggatgattgcttattgtatcatcaacaccaagaacttctattcgttggagttggctctccagaatttttctcccaatcatgctctgagtcacattggtgcgatccaaacagtctatgcaatttgttctgacagtgccagtctgctcctcaattttctcgtctttatcatttataaggaagtacctatgtttcctaagatagtccttgatctgatcatacagctgagaaaggcgttcaaagtgaacgtgtccgcaaactcggtggaagtcaaagtgcacatatcttaaatcttcactgagaataggttcgatagattttgcatatctttcacggagacgaccttcacctccacctgtattgacaagatcaacagccaagacagctccatatttcttttgcaaatcatgaaagtgccgctcaagcacacgaggcgcctcctcttgtctaacaatgtcaaagctaggtttatatgtcaaatcaacaatctgctcccacaagaatggcatagaacctcgaacttgtacatacgatgctgtaaatccttttgactgcattatctgctctgattcaacaaagtttgcagcataaccctctgcatcagctcctcgtctccacatccgagtacctatcctccgtgtgcacctacgtgcaatcagggtcacatttaccttttctgacccaacttctgcatggatgttttgaaaactgccttgaattactggcaataagtactggttcagcctgttctcaattagaggttccaacaagtaactgttccatagaaatcttggttctgcctgtctccaaaggggaagtgatttgtactcatcaccaagatcatgtagcctctgtgcagagagtgttaagttgatatcataggagaagtgaaggccaatagtcctctctgcagcatccaggagttccgagaattcagtttccatttttttctgttcagcagaagttgtgttaagtgcattattgcagggaagaacctttagtcctgtcactttaaaaattgcatgtcccaagtaggatcccacacaatcacggtctgtgatcaccagaaaatatgatccaactgcaagtttgagcactcctatcacaccataaactgtttgaactttaggggttgatgatccacgtggtggcaacgcttcaaccagattcattgttccattggctcggctaactgacaagtacaagtcagcaaggccatcaattggttcaaatacatagctgtcaggaaactcccaaagtctcagccttgtatgaagtttagatgaagggcttgcatcatttgtcccacccatgactggataaccgcggcaatgagaagctcctccgcctgcagctgggtggttgtccgggatcgctggccgtcgctggagcggggcggcgactcttccttcgaggcgacgcggagttagaacgtggggcctgacgaatttggccggcaagtatcaggtggccaacgggaggtccttcggcggcgcgagcttcctgcgagcggacgcgcctggctggcagccgcgcgagctccctccgcgggcggccgcgcctgctcctcccgcgggcagccctgctcctccgacagtgcccgaggctcgcgttg

SEQ ID NO: 40512 - DNA, 990 bp, Setaria italica
  Peptide Sequence Number=SeqID_106486
ttttgaaagcttccaatctttggacaggaataatgcaatggctatactgtacagagtatcagtaacccagtatgcaagcaaacctgatgaaatcaaacaaaacgaagacgacacacatcaccgtccctgacacgcacgctttccacacagctgctgactcgatcgagtcccgactctttgagacccaaacaatccatcacacattcacacactgatacatcacccaactcgcagcgatcaaagcggctccggccaccggcggcggcggcagtgcacgccgatcgacgtcgatcgatgcatgggcatgggctagtacttgtgctcgaagtcctcggtggcgcgcgtgggctggtacccgatgccgtggcggttgttggggaacaccatgaacacgtacccagcggcgccgccgacgacgggggggagcacggccatcatggtgcgctcgctgacctccagcgccgggtacaggcaggccacggtgtcggcgtccaggagcgcgatggtggcgaacaccagcagcgacagcgcggcgtggacgaagtcccccgcgcggagccggtacgccgacaggtcccgggacgccgtgtcggggtccggggagaaggtgtggaggccacggcgcgtgacgacgccgtagtagacgcggccgtcggagcccacgtagctgtcggtgaaggaggagaaggcgcagaagccgccgcagagcgccacgagggacccgctcaggaccttgttgaaggtggagcagtggccgttgttggtgaccaggggggtcaggaactggaacaggaacaccgtgccgctgggaaggagtttgatcaggtccgccatcccgcggagcgcgcggtccgccatgctcacgccgccgctcctcggcgccaacgacgacgacgacgacatcgcgggtcgatctgtcgatgctcgctcctcctggctgctggtagctgagcaaagtgtagcttctttcttgctgcccgagactagaca

SEQ ID NO: 40513 - DNA, 1063 bp, Setaria italica
  Peptide Sequence Number=SeqID_106487
ttgagagcacacatgaacggttcatctgaccaaactgaacgcgtgcagaggatgtgaggagccatcagcacagacaaatggtttggctatacctgctgacagtataagcacagacaggctgcgtgcagtattgcagtacaaggtcactgacttcctcccaatcctaaactacaccacaagggctgtacaacttacgataaaattggtgcaggtggaagcatgatgagacgacacacgactgaaaaaatacatcccaatgaggcaactcattggtcttcgttgcctttggctctatctgaaacccctcaggtcttcttcatcaggatgatcgaaccccatacatccagcctctattttataggaggtatgcatccaatcttgatgatgctgaagatgtagctgagaatgaccacacccatcaccttcacactgtcacacaagttgaggaaaaaagaagatcgtcacggaaagcatttcaactggcgttgtctctcgaggatggaaccggcagaaactgctcaatccatggacttgtgataataaaatgaggcaaggcaactcatgactatctaggaacgaaattaaaggcgtaccaagtgagaaagcatgtcaatggtaagatctacgtcaaactcctggagcttcagcgcatcgatgatgaagtcatcagacacattcgggaacgtgtgggagagataagccaccacaccccggaggtgaatatccaaatcactccccaaatattccgaggaagactcggcggagatgttgagcttccctaggctctcggcgtagaaatccagagaaagcgagtccgggaggtcgtactcatcagaattgtcagcggtctcggtcttttcagcttcacctggttgcttctcggagtcattccttcgattcaagctttctgctgcaaagctggccatggacgaaggcacaaaaggagcggcatatgggttcaactgaaaaccccaatccatcttttgggattcagtagtagaccttgacatgatggcggagtcgtgtcgtgggccgaggtcggcggcggcgcgtcgggctcggg

SEQ ID NO: 40514 - DNA, 483 bp, Setaria italica
  Peptide Sequence Number=SeqID_106488
ctgtgtcaacttggtttctttggctgctgaccaaaggaaacagaaatattttgttcattaagtattctattagagtccagcagcagcagaagacaactactccgaccattatatacagctcattgagccgtggtggtggctaacgctgcaactttcagaagcccaatatgaaaggtagtgttgaattaagtttgctaatcttaactgctacaaagttttgttctgtaaaaagcaatcctatcaacctctttataaatgagactatatagctcgctccgaagtccaaatttctttcatttatttgcaccaacaatctcccaaactctagtatttctcaatgatctacacagattatctaaactcaagacattctcagttccagtatttgttcatagctcacacaagaatgaatgctgcattcacttgtactgtactttgacaccttgccatcaatccatcatcatcatctaaatagatgatata

SEQ ID NO: 40515 - DNA, 665 bp, Setaria italica
  Peptide Sequence Number=SeqID_106489
tttttagacgttttaagaagtttcgggacctggatgatacggtcgcacaagtttagagaccgcttatacattttactcttttagaaaaatgagaagtctccggtcgtaagcaaatagataaaaaaatacaatatctatatctatgtcacctcacgagaactaggatctacttagaaaccaccaactagcatgcacacagggtacgtatacgtaccaatcaactatctgggtgcaccattggctagtaaattaccaaatcgccctctccctcttgtacatgtagtactatagaaatgaacattttaattaataatacaagtgacagatgttgtatcgatcgatctagttataagtaacagtctgctattaatgttgtgattataacagtaatccagggggttaattaaacagggacgagctgatgagctgagatcgagaaggagctagctgatgagaggccggcgacctggcgtttgacagtgccactccaacttactgccacctttaatccatcaatcgcccattcatttctgctcagctcctttctctctcatcactctaatcacctttgaaaatacactctctctctctctctagagatctttcttttattttttcttccctttctctctccctctcttcttggtgttgttggcgttgtctct

SEQ ID NO: 40516 - DNA, 611 bp, Setaria italica
  Peptide Sequence Number=SeqID_106490
atgtctgtgtgtccatctagatgctcaacaacctttccttcctgcagacaaaagtcccactcagatcttgattggcaaagggacattagagtctggaagacagcctcagaatttgcatcaacaacaccaactgccattatagccggatgatcatcccaatacgttccacgagatccaccatcgttcgcctcggtaaaaaaacgtaaaccatttttacatccaaatattgaccacggagaaggtgcgataacatcagatgccattggatcattatgagcagatgaaaatagagtccaatctattgagtgcatgcggctattgcggcgacttaacctgaaatgaacatagtggccaattagaaaatagtgaagctagaaataccattacataaatatgaatacaaatagttaattacaatgtcatttctagcccaaaaaaagttacaacagagcatggagtaaataactgcaatggcgagcagaatacggtaacgagtcaaactcagtcagataaagacatgtgtttccatgaagtgtaacataatagggttgtgcgtttgcttaacactcagccccacatacatcagcatctgtacccaattgggcttttaa

SEQ ID NO: 40517 - DNA, 721 bp, Setaria italica
  Peptide Sequence Number=SeqID_106491
taaattaattcctttttaagtttgactatctcaaattgaaaaagttagctaattaagttgaactacaaataaatcctcattccatggtcaccctttaccgggtctatagaagaaatgcaaggctaatggaaggataatgttataagagatcttgtgtatagtacctgagaagagttgtatcgttgtctactacatgcaatatctgatatgatgtatcatgttttagatgcagatcacatagttgcattggatgtggatgcgaggacatgagaaatcatccttgcatggtttcaagtgcacaaaggggaagttggaagtatagtacatagtatgatattgttggtaattaatccccgttgtggtgtggtgcttatcgtgagcaactccataaaaactccctcacccatggacgcctcaaagtggaggcaaaagtgcttctaaagacacttggaagcttgtgagtgcaacacaacaataataagtgaaaacacttgatctcatgcccattcaaagtgaagattcaatatttttcatgtcaattcttgaggaagagcaccttctagtcgatgtcgttttgagcaccttctctcccgtcatcaacatccctaccaccaacatatgtagcaccaccagtgagcgccataccttatcctgacatagctagctcacgacccttgcttgcatgtgctgccatcgccaatggatgtcaaagatacctgcg

SEQ ID NO: 40518 - DNA, 430 bp, Setaria italica
  Peptide Sequence Number=SeqID_106492
tgaagcaactaaatcatcatctaaattaatagatgatgatttaatgtcagagtggactatgggtggctcaatattatgatgaagatattccaacgctactgcaacatcaagagcaatgcacagtcttctcatcaaacttagccttttagcggtcatgctattttccattgtgtttggatgcagccactcatctagacttccattgcaaataaattcgaggacaagtgccttgaattcatcaccattatggtccaagccactgcacactgtgatcaccttcacaaggttccggtgccgaatcctccttagggcattgcactcagtcaaaaaacttctactggctcctcggagattaagattaataaccttaattgccacagtagctaaattctcatcaatgatgaaagttcctatgtatacatttccaaag

SEQ ID NO: 40519 - DNA, 543 bp, Setaria italica
  Peptide Sequence Number=SeqID_106493
actaagaaagaacaattcctgctcctttatcgtcaccattgcgggagatcaatttaagaggtaatcaattgacaggcccaataccaaaatcactttttcagctcacaaatcttgagcatctcgttcttggctcgaataaattgacaggcactatagaacttggctctatatggaggttgaaaaatctcactgatctcgacctgggtaacaatatgatatcactcgtagaaaaagaaggtgatacgatattctcttattcccttaaaatccagaacttattccttgcatcttgcaaccttacaaaatttccggaatcattaaaatatcttgacactattcaatatctcgacctttccaataaccaaatcgaaggggccataccaagttgggtgtgggagaaacccctggttatgttgaacctctcacacaacatgtttactactttagagaggtctcctacttttcagatgacagattttagattttcttgatctcagtttttaatagaattcaaggaagcataccaataccatcaactccatc

SEQ ID NO: 40520 - DNA, 738 bp, Setaria italica
  Peptide Sequence Number=SeqID_106494
tgtaagttgtggcttctatgccaaaccattttacctttctgatcttgcttagacatcttttaaagaggaggctggctgaacatgtgcctttgaaagcaactcgtgtttggacaaccatagagcttgctgatatctttgaattgtttgagttaatgaagaagaatggtgttccttctagtgcaagagcttatttgatcatcctggaagggttttctgaagatagaagattggatgaagtgacttcattggtttctcgtatgaaagaagataatgtacctctgaatgaagatatatgtactgctcttgttaattgcttttgcaaattgaggatgtatcctgatgcttgggcattgctttgctccatgattggacgtggttttttaccgaacttgttgtcttaccagcatctgctttctgggcttactgctgaaggacaagaggatagggctaaagaaatattcagagattccagatggaaagactacaatcctgatgaaattgtatggaaagttataattgatggcttcataagaaagggtcgctcagacatgtgccacgacatgatatccacattagaacagatgaactgcaaactaagtgatcaaacgtatgcaatgctgactgaggaattgtctaccagggaataggctgtaaactaacacactcatagctcacagcaaagtctccgtcagttgtgcttatgcaaactgtgccttccgtcagttatgcttatgcaaa

SEQ ID NO: 40521 - DNA, 1416 bp, Setaria italica
  misc_feature (1408)..(1416): n is a, c, g, or t
  Peptide Sequence Number=SeqID_106495
ttagaaagtgaacaatagcacatatcatggccttcctgttaacagtagaagaatgaaacttgccccattgagttccattgtgaccggttgacattattcatcagtacacccgaaattccattttcacgtcatccaaacagaagttatttgcatgtacaccatcgggctactacaaagtcatgcaggtacagaaaggaaatttggtgtcccagcaaggcaccatttcttcttatcaatgaaactggagctgcttctcactgggatggtaaaattatgatctgtcaggtaggccttttgtagtgtttgcatcatgaaacatttttctactattggcagccagcgcggattttaggacagctaatttcgtcgtcacggtctcacggaggtaggagaggggggaggggaacagatcaacagatatgggtgaggcatcgccggagtccggcgccgcggcggccggaggtgccgctggtccggcgccgccgcgaaaagggaagtcttgcaagggctgcctctactactcgtcggtgctcaagtcccgcggctacaaccccatctgtgtcgggatcccccgctccatcccccaagttccgaactacgtggtggatgagcctaaggaagaggcgatgtctcaggggcatgatctgaggcagttcaggtacgggtgcgcgggttactccatgtacgtggacaacagggacagcagaggtggcgagagcgagggcaagacgttgttgccgtattgccgggggcttgagctattggtggacagcagattggtcgagaaacaaccgtcaactgcacaacaagctccggcacatgtttcaaaggatgcagctaccacccgctctcaccaggagggacaacagagacccgcgcacttggcgagacaggaattcttgggaaggtttaagaggagtgccggactggtcgcttcaggtgtggccaagaatctaaacaaaacggccaattatatcaaggaaaatatccaggacatattttaccctgatcgccgcccaccgaaatagtagccgtgctgatggtcatccgtgcacaggttgagagctggagaaaaatgtttcatgatgcaaacactacaaaaggcctacctgacagatcataattttaccatcccagtgagaagcagctccagtttcattgataagaaagaaatggtgccttgctgggacaccaaatttcctttctgtacctgcatgactttgtagtagcccgatggtgtacatgcaaataacttctgtttggatgacgtgaaaatggaatttcgggtgtactgatgaataatgtcaaccggtcacaatggaactcaatggggcaagtttcattcttctactgttaacaggaaggccatgatatttgttttgtcttatgtttaaccttcttaattaannnnnnnnn

SEQ ID NO: 40522 - DNA, 1105 bp, Setaria italica
  Peptide Sequence Number=SeqID_106496
gtccagatatcattgaaaagctagtcccaggaaaccataagcagctttcagagagcacggcatcacacagatcaactgcagtgcagagtatgagtagcagacctgtgcccagcaatctttctacatctaatgccaagtctgaagctacagctgggcccaataatctttcagatttgaagcgcaagttggcatcacgaaatcaattgcagctggtaaatcaacaagatgcacctacttctaatactggtataacaagagcaagtctctgccacagcactcttaataagcagctaccttcgactgatggcaaacaacaagattcagcacaaggagggcatgaaagcttctacaacaggcaaatggttcggtcaggtgatatagttccatctcattgttcagatagcactacgttatcaagaccagtcagtgcagtatcatccactgatgtagcagcaccagatagaaaagaagaaagaggcaggcttgtcctcctggatttgagaagcctcatcacatttctgattcggacaaatttgtatatgtgagctcccctgcttgctctggactatgcccccgcatctggtgccctggtacaagattcttgtggtattacagatcaacaagatctccctagctgggctacagattgcctgaaagatgatgctgatgtcacaaataatctaaacgtgacaacctcttcacgttcaactgataccaaccagagacatgcacagtttcaaggtaccttcttccctggttggtcgaatcaacctcgcttgtcaccttatcctccacatcataagcctgagtattgggatggaaccaccggtagctacatgttcactgggggatatgatacattttgccagaggacaacatcaggcatgagaggtggtatggcgggcacattgctccaacagccgacaatgccaagccctcatggtagctggactgatggaaacacagattctggaatgaactgtccacaggtcgacatagcgtaccccatgtacaccctgttctagcaccagggcaaaggtgcccactttccaggccctaacaacagtcatgtacaagtgataagcataccttctaacctaggtgg

SEQ ID NO: 40523 - DNA, 624 bp, Setaria italica
  Peptide Sequence Number=SeqID_106497
gtaagtttatctagtcagacgatatatatcattatctgatcatggcaatgttgcgataacattgtcccgtttacaataccaagttaccaaccgcttcagttgccacctatccacaaaagcaggagtcttcaccattgtgtttacagcaaaattgtgcagcccagaacagaagggaaacaccacaatggacaaactcaacatctccatactttaaagcttcactgaaactatagcactagttacaatatcatgtaaggctagttaggatttgattttgaaacgatgataaaagtaaaagacgagagagagaggtcagatccgaaagtcttcaatgtctgacagaagggttgcaccaccagttgatctttcatctgggaggctaaccaccaactgtccacaagcaccagctatgtcttgacccatctgctggcgaacagtggttctgatgttgtagatgcctcttatgaccttttggaacttcttcacattctggtcactgcttgtcttgaaattgcttgatgacccaattggattgaatggtatcagatttacaaccgctttaaacgtttcaagcagtttaccaagctgatgcgcatgctcctcctgatcgttaactccgtcaag

SEQ ID NO: 40524 - DNA, 833 bp, Setaria italica
  Peptide Sequence Number=SeqID_106498
taacctttatctaatcaagacttggacctgaaggcaactagggataaggatcactttggatcctgtcgtgcagcatcagctggcttggacacatctagcttcgatgatggctctttgtgccatgagcacccagctgatccaaggccttgaccataacaaaaatgctatcctgtacatactacaaatatatgggagtgcccagcccaacttagtgttccgatgctctttctttgaatccgatcttagctatcaatacatcatttcagtcaatgaaatttttatcctcaaggacaagtgttggactgtgcatagcctcttaattgcaagcagttacatgcttattatctatataaacttaaaaaaagaccaattaatggttcatgattctgtccacaattcatgaattttgtcagaacttttggtccatgtgggctcagactttgctacttttgacctatatgcctggctttgccaagataagagtccataacatgttactgcaattgtgctagcaaactccagtacttcactaccttttatctgcttctgtgtgtatatcttcacaaaattacaaagcatcatttctaactgacacaatttgtcctctgtttaagtgcaagggtcttatattggtaactgtactgtaaattttcatcttgattacagatatatgttgttggtaagtgatttgaaattactcgtcagttcgatggagcaatgtaatatttgcaattgcactttttcaggcttttcacagcggtgtgatttcttttattgatatctccgtctgaatttttatctcactgattagcaataaaaagtgataagtgatt

SEQ ID NO: 40525 - DNA, 732 bp, Setaria italica
  misc_feature (38)..(38): n is a, c, g, or t
  Peptide Sequence Number=SeqID_106499
caaaatagcacagaagggactgttgtcagatttcgacngaaaacttcgcagtactttcagctttcaggcttgacctttctttcacttaacaatcagtttgaaaattttgaactgggcgaattgttgattgttccttagacaaagggatgttaacctttccaaacaatttacactgtcagttgtggctaccaactatagccaattattagataagctgtggcaaccgacatttatatttaactcattgcagttaatttttcacctacatttctaattattgtacccaattttttctgtttgttgtggcaacgccacctcccagacattattgcaaatccttgccaggtgactgcaccgaccaccaccatctcctgcatggtgtgttgttgtttttttgacacatgaactatggatgattctgatacacactccagtgttgtttgcccctgcatggttggtccaaaatctgtgagttcttttggatagcgggtgattgattctaatgttaaattctgtcggtggaagaaaaatccacaatttgtgattaatccagtaaactagtaattaggatatcttcaaattatatcaatatcctgttttttagtatgtgatccatcttgtataacaattatactgaatttttattcgacgtgccatggcctgaggttgtggatcctgtgaatctccaatttagttttactttaggggaatttaaattaaaaaaaaaaaaaa

SEQ ID NO: 40526 - DNA, 456 bp, Setaria italica
  Peptide Sequence Number=SeqID_106500
cttgaaaagggtccaaatatgaaaaaaaaggcacgactcagtaggcagggacccaaagctttctttctcaggactatgggtcgatctaaaactcatcaaatgaactaatctggatccataactacactttgggtaaacttgcatccctaccaagaaacagctacttcttctgaagctcgttcttgacaagtaaagatttcactgttggttacttggccctgccgctcagcggctctgcttcagcagtgggttagcttggggagcggcctgctggtgtggtcgcgttgcgagcgggcagggggcagggggcagggggcagagcacgttggagttctggaatgtcaggaagagtgcttgtgccgcgagcgctgcatctgcagcctgccagcagtgttctgcgcaaggcgtgagccgagcaacggagagcggggtgttggtgtgattgtgaccgagccg

SEQ ID NO: 40527 - DNA, 386 bp, Setaria italica
  Peptide Sequence Number=SeqID_106501
tctagttaggccatggctcacatgatttaacaaactaactgctacgagataaagactaactaatgaataggtagctctaactaactaaccagcatatgatgctaacaaactaattgcaacgctagtaaactgctatgcgtatcctgctgcctcgccatatgcgcgatcacttgtgctgctggactggctaaaggcccaacccatagcagtagcagcaatagcaaatagtggagtagtgggagtatgtcctaagtaatagtagttggtagtgtcctactgtatttgtactatactttgacttgtgctctatgctctattgaatatttataagaggtagaagcaactacagctctagttcagcggcactaattcgtgctctctgttct

SEQ ID NO: 40528 - DNA, 389 bp, Setaria italica
  Peptide Sequence Number=SeqID_106502
gttgtctccctctccctctccctccttgttatcgctttccggctctatttctacgcttatgctggctcacacaccttgctttcatgagcactgaagatggacattgaatcggcgaggtgtgcttgctgtggcctcaaagaggactgcacccaggaatacatagataatgtcaagggcaactttggagggaaatggctttgtggcttatgctcagaggctgtaagggatgaactcagtaaagacaggaacagccaggatggaattgaagaggctatcaaggctcataaggaattctgcaggatgccgctgtcaagcccagcagttcgggtagctgatggaatgaagcagatgctcaggaggaggtcaggggacaagatgaggccagcaac

SEQ ID NO: 40529 - DNA, 1273 bp, Setaria italica
  Peptide Sequence Number=SeqID_106503
gtttctacaagcctctgtttaacagggcagcatgttcatcgtaaagggattctcaaaattgtcctgacaaaattctccagatttcagcctttgggccatatgcaggtagacctgccatttcgattagacagtaaattcgttctgagacctgctgcaccatggcagatttacataatgcgctatcaaatggcaatcgattttacaatacgaaataaagcatattcgagcacaacagcgcgcttctgttcctcggacttcaaaatgcttgtgcttgattcgtgggttaacggtaatcagcttcctggaagatctaactgcaggagctctggcaattggggataacatgtaaatgctggagcggagtgttgcgcattatcagcctagaagggcttccctgcagcttccatcatcgcttttgttcggatcagtctctcgatttgcctcacaatttcaagaaccatgtcctcaagggtcactgagtcaacgctgctgtagcccagctgagaagccacattttgtactgaaacagtaatatcagaaattccatagcgttctttcagatcatcatgctgctgacggagcttgctcatcgcctgtgaaaaagagtctggatctgtagtagcttgtgttcccgtgctcttcaacatatcgtttgccgccatctcaagaggtacatcaatccaaatggagacaccatgcctcagtaagcccagattagttgagttcatgacggcgccatccccacagcaaagcacaaggctacccatggacgtgagctgctttaacccttcagtctcaacttcaagatatcccttctcatcggattccttgaaggctctaagggcatccttgcccccaagaacatcctcgagcagttcctcactgcagaggtagcggtatattatggaattggcaaggagcttgccgatattgcgcttggctgtgcaatccgtgccgacgatataaattggcgttttcctgaaatcgcccacggcttcagcagttttcctgagtagatcaacggatgggttgagctcctccagaggcaactcggaactcgggaaggcgcgaagacgatgcagacggatgcggcgcccggcggagagcgacgccggcggcgtagcgaacgagaagcgcctcggggagacggtggagggagaagaaaagaagcctgtcgccgccgccggagctgctcgcatcgccatggcgcctctcccgtccgtctcgctcgctcttctcgcaggtcttttccctcccccgctgagacacgcaa

SEQ ID NO: 40530 - DNA, 314 bp, Setaria italica
  Peptide Sequence Number=SeqID_106504
cttcagtgcaggagccgcagcagcagcaggaggaggttggtggtggtgatggtggcagtgctgctgatggctgcgggtaacgacgacgacgacatgggcggcggcggcggcggcgcatctgcaggcatcatcagcacctactggagcagctctcacatttgatcatgcatgttccttaaaataattagtttttcatcatcaactgcatgcgttaattagtttagtttgcataatcgatccatctaccatgcactatttccagtggatatttgaatggcaaatcaatttgaatagttgactcatttcatgaaaaa

SEQ ID NO: 40531 - DNA, 485 bp, Setaria italica
  Peptide Sequence Number=SeqID_106505
aaggtaacgctgtggggatagcaccgccatcggatccctcgtccaggaattgcaagagttgtggtgggtctgagacatcccttgaagcacttgagagggaaggcaattcaagcattacgaagtgaaggcattcaagttgatgttgtgggggaggatctgcagactaagccgttcgagggagctctgaagtcatgcctcactgtaaatgctccattactttacagagctgcatttaatgtccctttctctgttctgaagtatgctatgacagcagatggaaaaatgcggcaagtagtggacatgcttcttgggtaagtggtaaagcatcccgagggcgtgtatttgagttacgcggtagaagcgatgctgttattgttggcggaaatacagtgcgctttgacgatcctcggttaactgcaaggcatgttaaggggcatgttccagtgcgcatagtgatgtcacagtctctcaaccttcctgaggaa

SEQ ID NO: 40532 - DNA, 477 bp, Setaria italica
  Peptide Sequence Number=SeqID_106506
tttggggatgttatcctcaaaatgaataaaaagtttaaacttccttagtagcagtgaccatggatttatgcagctattaatatttgaatgtgtctaaattggttgtcaatctccattctgatggtaatggtaatatggttgaaggaagcacaaactctgaagtctgaaccttgagttgcatcagatccattatccttccagaacgcaccttgtcgactatcttgctgattacaataccaaaggattgctgttacttggccaacttctttttgagatgcttacaacaaacggtgcttggtgttgcaatatggaagctttgagctgctcgtgcaggaatcaaactatcaaactgctcctgaggaacaggttgttttacagtgttttctctttgagtctataccttttttttgtaccttgcatacttgctccaagtgatgtctaacattcacacagagaggaccggaagccaaaatatct

SEQ ID NO: 40533 - DNA, 543 bp, Setaria italica
  Peptide Sequence Number=SeqID_106507
ggaaggacaacagaagaactgcacaatttgttatcttattagctagtcaagaacagtatgtgttgtttgccaaacctcgcaagcaaaagcaaatcagagaaagaatcgaattccatcgaacttaagtagtctcaaaaaaaggcatcaaactcatataattagaccgacaagaggtttaaaatatctgagaaaaacaagcacgcacggttgaagtagcagcgagaatcgtgaatactttaattttaagcctacgcgagatctataaccatgaaaccatcaaaattgacaacctttagcaaaagagaaaccaatgacatgatgaagctaaatatagcactcacatgcgcgcgtacttactttgcagccgcttcaaaaaaaacctgtggatccagcatgcaccccgttggaagtgaaaagctgtcttgcttgctcaaattacttccatgcactcacaaacacacaaaagctgctcaggcgaggcgcgcacggtggaggagaaggggcacatgcatcagcgcttcaggagctagctagcaagctggg

SEQ ID NO: 40534 - DNA, 488 bp, Setaria italica
  Peptide Sequence Number=SeqID_106508
aaataatttaatccaggcgcagaatctagcctaacagaaaatcatcaccttctcttctcatcgcctccccaccccttccttgagcttgctgtcataattgttgttttctttgcttcattgtgttctagtggagcaagtggcggccacggccaccaccattggtaccgctctattcggacctatggaggaagagaaccccacctcgacagcaaaggaggaggagcctcccaagaaagctgaggcagctatggcaaccaccaccgaagcggctcgagttgtgcccttggagggtgagaacctggccctggtggtggaggaggcacccaagaaagtcgaggcgatgatgactaagggggagggggaggaggaggagcacaagaaggtcgtggtgggtgggcaagaggaggatgtgggattgaaggggaaaggtgggggttttgggagtttggaggcagagaatgatgaggctactaagggttagtaaagta

SEQ ID NO: 40535 - DNA, 400 bp, Setaria italica
  Peptide Sequence Number=SeqID_106509
gtcattatagaatccaagcagattttgagatcaacatagtttttgttaatcccttctgctatcagagccactgtttcttcctctgagaatccaagaactcctgttctgcttgccaaaatgtttctcacaactattggcgaactgatgcatttgttttcaatatgaatgcagtcaagtctttgaaacaaggacctgacagatcttttcgcagcttcattcaacattatatcattctttctgaaataatctacagccttttcacgctgctcgcccactatttcagctccggtggacctaaagaggtaagaagaaaatcaatatgctaacagttcaggtaccaaatcacagagttcagtttctattcaattgcaactccaagctgtattgagatgaggaaaaa

SEQ ID NO: 40536 - DNA, 1705 bp, Setaria italica
  Peptide Sequence Number=SeqID_106510
tcgtctactagcatcacggcgcagcagtcgggtccgggtaccacggcctcggcatcggcgccttcacgctcgactgggcgggcatctcggcgtaccacgggagcccgctggtggcgccgtgggcgtccatcgccaacacggccgtcggctttgtcatgttcatctacatcatcgtgccgctctgctactggcagttcaacacgttcgacgcccgaaggttccccatcttctccaaccagctcttcacggccgccgggcagaagtacgacaccaccaaggtgctcaccaaggacttcgacctcaacgtggccgcctacgacagctatggcaagctgtacctcagcccgctcttcgccatctccatcggctccggcttcctgcgattcacctccaccatcgtccacgtcctgctcttccacggcagtgacatgtggaagcagagcaggtcggccatgaacgcggtgaagctggacgtgcacgcgaagctgatgcagaggtacaagcaggtgccgcagtggtggttcctcgtgctgctgctaggcagcgtggttgtgtcgctgctcatggccttcgtctggaaggaggaggtgcagctgccgtggtggggatgctcttcgccttcgcgctcgccttcgtcgtcacgctccccatcggcgtcatccaggccaccaccaaccagcaaccagggtacgacatcatcgcgcagttcatgatcggctacgcgctgcccggcaagcctatcgccaacctgctcttcaagatttacggccggatcagcaccgtgcacgcgctgtcgtttctcgctgacctcaagctcggacactacatgaagatccccccacggtgcatgtacacggcccagctggtcgggacggtggtcgccggggtggtgaacctggcggtggcgtggtggatgctggacaacatcgagaacatctgcgacgtggaggcgctgcacccggacagcccgtggacgtgccccaagtaccgtgtcacgttcgacgcgtcggtgatctggggcctgatcgggccggggcgtctcttcggccggcacgggctgtaccgcaacctggtgtggctgttcgtcgtcggcgccgtgctcccggtgccggtgtggctgctgagccgggcgttcccggagaagaagtggatcgcgctcatcaacatccccgtcatctcgtacgggttcgccgggatgccgccggccacgcccaccaacatcgccacctggctcgtgacgggcaccatcttcaactacttcgtgttccggtaccgcaaggggtggtggcagaagtacaactacgtgctctcggcggcgctcgacgccgggacggcattcatgggggtgctcatcttcttcgcgctccagaacgcgcaccacgagctcaagtggtgggggacggaggtggatcattgcccgctcgcctcctgccccaccgcgccgggcatcgtcgtcaagggctgcccggtgttctgaatgttcagagagctgaccatggtaaccggtgcatgtaagggcgtggcgtaacgcaacacctgctttgagaaaccttggattcagccgagcatcgattgaccgatgcagtgtctgtcactcgtgaatgtaacacgtactttcttcatcacaaaggtgcacttatggcagtggtggattgagggggaggaaaacaggagcaaaaagtccacacaacagcgctcggtgttc

SEQ ID NO: 40537 - DNA, 263 bp, Setaria italica
  misc_feature (1)..(65): n is a, c, g, or t
  Peptide Sequence Number=SeqID_106511
nnnnnnnnnnnnnnnnnnnnnnnnnnnnnnnnnnnnnnnnnnnnnnnnnnnnnnnnnnnnnnnnnacctttttattttagttaagtacataggtgttgtgaagcttgagccaacgagcgaagcaagtatagtgattgtgcatgatggaagcgtaaaggaggttgatccagctagtggagataatgtgctcaagtatagtccttggaaggagcaggatgctgaaggactggctagtgcaagtgaagcgttagaaacttggtgtt

SEQ ID NO: 40538 - DNA, 963 bp, Setaria italica
  Peptide Sequence Number=SeqID_106512
gttcgccggcgggacggggacgtcggcgtcggcaatggagtggggaatgtcggagctgatgcgaaacccggaggtgatgaagaagctgcaggggcagatccgggaggcgttccatgggaagtcagtggtgacggaggccgacctgcaggcgagcaacctccggtacctgaagctggtggtcaaggaggcgctgcggctgcacccgccggcgccgctgctggtaccgcgtgagagcatcgagccctgcgagctggacggatacacgatcccggccaagtcccgcgtcgtcatcaacgcgttcgccatcggccgcgaccccaagtactgggacgacgccgaggagttcaagccggagcggttcgaggacggcggcgtcgacttcatgggcggcagcttcgagttcctgccgttcggcgcggggcggaggatgtgccccggcttcaactacgggctcgccagcatggagctcgcgctcgtcgggatgctctaccactttgactggtcgctgccggagggggttgctgaggtcgacatggaggaggcacccggcctcggcgtgcgtcgccgctcgccgctgatgctgtgcgccaccccgttcgttccggtggctggctcgacgaagtagccgaggaagacgtacatctcgccgcgtaggttgcatgcatgcatgcatgcatgcaaacaggcgctcccgcccggcctcgtgctggccacgtgccgaccgagcaccctaagtatctgtccgcgctgcaattatcctatactgtatgtggtgtacgtgttgcgtgtatgtgctgtacactgtggtgtgtgctggctgtggttaagtttgtactggttgtctggtatgtatcgcgacccaaaataattgaggcctcttgtggctaattaataattcacctgaactgaacattcataagtaaaaaaaaaaaaaacctttaaaagttaaaaaaaaaaaaaaaa

SEQ ID NO: 40539 - DNA, 777 bp, Setaria italica
  Peptide Sequence Number=SeqID_106513
tacactttagcctcatctctttgaaagtgaaattaatgttttgtatcattgtcgaccttccccggccctgtgtatttcttttatgaatttaagttttcggcagctctcggtgttgtatatatgctgatttcacagtatgttgatactcgtattcaagaaggttcaatacattgtttctctagctgtctatcctaataacatggatcctagttgcatcaatccttctttactaagcagcctataatatgaacaactttctattttgtaccattggctttagaaggaatcaattagtttaagtttcctgctgtttttggttctaggttgtccagtttggggaggtatgctgtgttactgagatagatctagggatgcaatgtgatgccgtgaacagctagctatatactcttttgactctcagatgttgaacactgcataatggctacattgcaataaaatgggatgagggcagtagatcgacttgtatttctgaatgaaacattagtgggacacatttaaccccttgacctaaatgagacaagaatttatacagtaacatccagaacagaatcattgactgttgcctaactagcttgagctgattaacatgttaaaaacttaaaaatgctctaacctatatatccattgtatatatgtgcaagtgaaatgatatttgctgtctacaattttatgttggaaatagtttgatcagtgagggagcgtcagatattctctgcatacaatttaaacctttttgttctttgtaattagctgcag

SEQ ID NO: 40540 - DNA, 479 bp, Setaria italica
  Peptide Sequence Number=SeqID_106514
gttccccaacttcaactctgtttcggcatagtcttcattgggattgtaatcatactaatcacaagtaactacactgttagcttggaatagcatgctaaggactagtaagaaatatacgagtacaacaaaaaaattgcccaagaaagttggggtaaggttacaaaagaaacacacaaatttcagatcatagtgtatcccgaagtttatttattaacaaagttaagctaaatggttgtatgctttgaaggatacataaaatgtggaattatccaaaaatatgtaatatgcaggttgagatgtatagagcatgaacaagacaagattataagacattgtctgccatcctagaacatcatagtacgtcaaggttgactggctctggcagtgataattagcacacaagccctgtgagatttaaagcttcagaagtgctaagaaaactgtgcagctattgcagataaatttatcttcagattccg

SEQ ID NO: 40541 - DNA, 353 bp, Setaria italica
  Peptide Sequence Number=SeqID_106515
tccctattttttcttttgttgtcagttagtcagcctcagctctgcattttcttctctgtctgtgccgttcgtctttacagcttcagcttggccttcaggcagtctagtcccctgtgcaggtaaacagagaaggaactagttgccatctgaattccagcggcaagtgcaggtactgcatcttttggttttgcaggtcacgcaagtaagcagctcaagcagcagatagtaccttgaaaggttgctttcatgttacagagtccaaagcactaaactaattacttaatgctcttttgttttgccgatccgaatttctcaaaagaaatgtcattgtcatgctacagtaagtaatcatt

SEQ ID NO: 40542 - DNA, 1073 bp, Setaria italica
  misc_feature (1)..(59): n is a, c, g, or t
  misc_feature (62)..(62): n is a, c, g, or t
  Peptide Sequence Number=SeqID_106516
nnnnnnnnnnnnnnnnnnnnnnnnnnnnnnnnnnnnnnnnnnnnnnnnnnnnnnnnnnntcngttttttgcgcgggccacaagaaacaaaatcaagcgaaaccgatagaagaccggcccggcccgcaagggcaaggtaccgtccaggtcatgattgactgtgtatatattagcaaatgaacttcacagctttacactttcggtcatgattaactgtgtatgttcacagcgtccagtctgtgtgtgggccttcgtgagatcactcactacttggcgccggcggcctcttcctccccctcctcttccttccagacgggaaggatgccttgcccggccagcctcttgtaaacccagaacaccacgtactgggaggttatcctcttctcatcgatcaggaatggctcgatggtgctgacttcgttgctgtaggacgatagcgcaaagcccttgggtcctgtgaggtctccctttggaaagaaggcccaaaaataataaggaacgtcatcctttatgaaggaaccctccaacgtgttgttttggaaggaaagctggacctgggacacgttctcctccgcttccagggcgtccttcagaggaggaatgatctcctcctgcatcatctccggcagcggcttcgccggggccttctttggcttcgcggccgcggccggctttgctgctgctgctgccgtggcttccttcttttcaccgtctgcagcatccttcttcttgctaacagtggtggaggtggaggactcctgctgcacggccgagcacaaggcgacggcgccgccgctgccggcacgggggaaggcgacgatggccggcagcctcttcccgaagagcggggcggcggagcacctgcacactgctgcgtggccagcgggagcgctcagcctcagtgtgcgcaaaggctgaggaggcgccatggcgagaactggcgcgaaagcaagcaaccaccaccagcggtttcacgagccacgcaggccggctagcatgcgaatcagatgagccgctgcggtgagacgatttgtgcgcgcgtgcgatcaaggttcgatggacacacacagggag

SEQ ID NO: 40543 - DNA, 469 bp, Setaria italica
  Peptide Sequence Number=SeqID_106517
ttccttacttagtatcctctgcccataaactccattgaatgatctatcaaatgttgaaactgtattatatatcttatctttgtgaaatgacttttatgttatcatattttcataatttcattgcttcttattgcagcatgtcagccatagatttctactgttcagttgacaaggttcaaggtgctgacggcaaagatcgtgttgtggtcacatttgacgggaagtatctgcctcacactgaacagaaatctgaacacatgatgtcaaggctggcccgcaagacatcttaagatggttgatggcggggagaaagatgctgtacctacatggagctactatgtagcaatttgttcacttttcatatgttgtggtttgaagatcaaggatcgatcaagcctgtttgtgttttccaaatgtccgaatgatcaataaagtaacagatcctagaaaactaaaaaaaaaaaaaaac

SEQ ID NO: 40544 - DNA, 1001 bp, Setaria italica
  misc_feature (993)..(993): n is a, c, g, or t
  Peptide Sequence Number=SeqID_106518
cacctggccactacacgccgcgcggcacacatcaccaccggtgccgtctcgtctcgcctcgcctccacttgccactcctacttcctcgagcacctcgtgagcagcgcggcgggtcgcagagccagccgagtgcggagaggggtcgggaagggccgggggggaagcatggaggagagcggcgtgagggcggcggtggtgcggcgcctgatggcggcgaaggcggagtccgggaagagcttctcggacgtggcggccgagacggggctcaccaacgtctacgtcgcgcagctgctgcggcgccaggcgcagctcaagccggacacggcgcccaagctcagggcggccctgcccgcgctcaccgacgacctcgtcgacctcatgatgcagccaccgttccggtcctaccaccccgacatcgtccacgaacccgccatttacagattgaatgaagctgttatgcattttggagagagcatcaaggaaatcatcaatgaggagtttggtgatggaatcatgtcagccatagatttctactgttcagttgacaaggttcaaggtgctgacggcaaagatcgtgttgtggtcacatttgacgggaagtatctgcctcacactgaacagaaatctgaacacatgatgtcaaggctggcccgcaagacatcttaagatggttgatggcggggagaaagatgctgtacctacatggagctactatgtagcaatttgttcacttttcatatgttgtgggtttggaaaggaatcaaggatcgatcaagcctgttttgttgtttttccaaatagtccgaatgatcaataaaagtaaacagatcctgaactcatgcacgcatggactgctaaaagcctggttgcacccttgctggctttacggttcgacaataaagaataaacacataattgttgcactacatttgatgatgccgggatttaataaaaaaaaaagtttgttttgcgtagtaaaaaaaaaaaaaaaanaaaaaaaa

SEQ ID NO: 40545 - DNA, 373 bp, Setaria italica
  misc_feature (324)..(324): n is a, c, g, or t
  Peptide Sequence Number=SeqID_106519
gttcgataatggaatactatgatgcaaacttctcaattcatgctaaaacttctcctgtttgcccaacctatgatgaatttgagaggaagtgctgtgatcttaagaagacaacagtgagccaaatatttgcccttcaacttatgcaggtgccacaagtaacagaagaagctgcactagctgttatagagcactatccaactcccttcttactggcacaggcatactacatacttgacggtgatacccctacccaagaggcgatgttgaaaaacaagagcgaggtggtggatgcaggagcaagccgaagcatcttcgagcttttcngtggcggtggacgaatattcagaaatagtttcagactggcgtaactggc

SEQ ID NO: 40546 - DNA, 972 bp, Setaria italica
  Peptide Sequence Number=SeqID_106520
caccagtcgacatgtatttgtttttctaatcacatttacagggagttcatcttacagcacggcaacgaatgtcatctgagacggtacgcttccatatcagatttcgtcagacaaagtagcaatctgggaaactgcatcctcaaggcgagacaagtgtgcagcaaacctatccttcagctctgcagaatccgcttcatcaaaggcgcctcgaataaccttgagaccattctgcagcaacagcatcccttcgcagattccatccggcaccttcctcttcctcgtgctggcatccttcgtaatcaccactttctcaggctcagagacaactgttatttcagaataagcttcaaccagtttcttcagcgatctcccctctgaaactaggaaccggagttgctcttcagaccatctgtcagtgtgcaaggcagcctctttctgaagataagccctcagctccagcatgaatccgttctcttctatgctcgtccctgtgcttgcattgtatgaaagggcagcatctccaggaacaaatttccagagttgtgtaaaggattgggcgtagtctaaagttacccaaaggaacccattacaaggtgaatgagtgcccagtgccgttccttcagcaggagatgatacagatcccacattgcagaacaaagttcgttagcatcatcttcagtaacgttcaagtgaccaagaattgccatgaaggaagccatcgatggtttgcattgagacagcactgcatttgagttatctgaagtggacaagaacagagtgtgcaactgcaaagtcaacttctccatctcactgaatgcgcagagatgcctcgtgtttgagataatatccaacatggagctaatgtgcttggcaaggtgatccttaacactatctggtgcagttccatacatgtttatgagagagatggtagaacttaaacatagcggcgatgctcttctcgtctacgatacc

SEQ ID NO: 40547 - DNA, 303 bp, Setaria italica
  Peptide Sequence Number=SeqID_106521
taacaaactagagacaagttgtacatttcatattttcatagcatggcaataccatcctatagtgtagttgctaggtctaatcagtactgtaacaactaacattctctttattttgccatgaccatggtggtagtactgggaccaaacattttcaggctcgtgaggtgtggttggtgcacctggagcacggaatgggtctcacatcatgacatggttgggttgtaaatgttggctattaatgggtggacaaaagtcactagatgaagaaaaactggatgaaacttggacaaaaaaaaaaaaaaa

SEQ ID NO: 40548 - DNA, 713 bp, Setaria italica
  Peptide Sequence Number=SeqID_106522
gacgcctcgctgcgcctcagccccgccttcgccgacacagccgccgccgtctacagggccgaggcgcggtcggtgagcttcatggacaatcccagggaggcggcggcggagattaacgggcggtggccgtgtcgtcggtggtccaccagtgcgtcgtcaaggtcgacgagagcgggaccgtcgccgccgcgggcaccgcgagttcagtatcgttactgcagccgtagtaggcgttccggaatgtggtgtggaacaggagcgtccaccccggccggctcaaagaacgcgtgaacagaacttgacttgaaattggatcgattacacgctgacaactagttgcagcgagatggagcacaaatgatcgagggatgcaacccattggcgacgggcagaggcagaggcttggccgcagacttgagctccgatcaccgatgcaggtagaagaggcgacggagagtgtgggggagggaccaagcgacggcgatggacgaccgaggcccccactccacggacacgcaggcacgacgacgccacgtgcattgggagagactctgcacgcggactgagtctgtgatcctggcgttggcatcgttcgcatattgcttccctccaatctctggagaaatggattggaaacgtacagtatgcatatgtacgaagggcagctagcattattggattggttgtgccctagctatcgatttcagacaaaa

SEQ ID NO: 40549 - DNA, 233 bp, Setaria italica
  Peptide Sequence Number=SeqID_106523
gagaacctccagctctgctgcatctccctcggcctcctcctcatcgccgccgtctgcccgcacgtcgcgctgctcagctccgtcgggcgcctgcaggccacgctcatcgccgtcgccttccctctcgtcggggtgtctgcagcgcttgatgctcttgtaaatattgctgatgggagaataaatatccatgttcttatggctcttgctgcgtttgcttctattatttagtaggg

SEQ ID NO: 40550 - DNA, 647 bp, Setaria italica
  Peptide Sequence Number=SeqID_106524
aatgctttataaatcatatggtgatctaaaattgtgaaactaattttgttagtttccatttaacatgtatgtttcaaatctgcaacttgtgttagtagaatctatggtttatcacccgtgcactgatgaaccaatgcatgcgcatgaagtcctttgagcatattatatgtgcacattatatacttatatcacaaatttgtacgtcatatataacacttacaaatttgttagaaaatatcttaattacaagtatgccatatatgttctgatgtgatggcatgaaaatgattgttactgcggatcgaagcaaggcttttcagggcttactcattgaacaagcaacatggttataccattgtgttgtccttgtaaagttggatcaagttttccgcacatctagatgaaccgtatcatctgacatgttctaaccaatgtgacacgtcaatcaataaaaccatttctacaaagtttcaaattggctgacgtaggcctattgacttcccctataggaactcaaggcttcacacaagagagatgctaattaactgtttctcgcaagcaactaacatgagctacacgctaataagcttttgggtgaattgacttcaatttgattcaatactctacctataaatatgtatgctccc

SEQ ID NO: 40551 - DNA, 580 bp, Setaria italica
  Peptide Sequence Number=SeqID_106525
ttgttctactactaccttgagttcacacattcactagaattcaatcaataattcagctgagtgcatatataaatataaaacatacacaataaagcattaaaaatagaaatatgatgctaaatatgttattgggattctaaacatacttatttaataaggcaggatctatcaagtatagcaaaatgtactatgcacgatcaagtataccagttttgattactgcacacagatgttgcagagcttttaagtgcaaatatatcacataaatataggttcagtgagaaactggaaaaaatattattaatcaaggctagtagattagatcaatggaaaccatacttctgatgagacaaagaaaacaaaagaaaagctcaaaagaattcatatattatcaagaaagaagggaagcactctggataccagcttatgtgacccaaaaaaaaacaatgtacaaagatagatttgtataagttacatcacatagttatgatatatataaatacaatgttaataaagaataaataggcaacttcacaaacagcttataaactcgtcatccataacaccacggaaatacttt

SEQ ID NO: 40552 - DNA, 235 bp, Setaria italica
  Peptide Sequence Number=SeqID_106526
cccttgagaacagcagggcaggtatcggttagctcctcaaatccatctgtttcgatgaactcctcaagattggtgctagaactgaggaaatcgaagcacgcttccttcagaccggggcagtggtgccggtcagctaaagccagcatcctcgccacggagtctgcacgtatgcgcctgcacagcttctcctggcaaatcagcttcatcctctcgaggccatacctgtcggccgcga

SEQ ID NO: 40553 - DNA, 308 bp, Setaria italica
  Peptide Sequence Number=SeqID_106527
catgtgacctccacggcgccgtggacggagcgcccaccgccgcgcgggctctgctccgggatttttgtttttcctgtcgcttcgttgattcgatttaggagggagtcgaggccgacgagaagttgatttggtgacaggcgccctgatacaccgcgcgtattctggttgtacggggcgtggatgctgtgaacatttgtatggtctggggaggcacgggtcgtacatagaaactttagtgccatgaaattgtttcttctttttttcctgccattttcacgtcggcgtctatgtggagacgtcgcacgttt

SEQ ID NO: 40554 - DNA, 805 bp, Setaria italica
  Peptide Sequence Number=SeqID_106528
ttagtacatacattttcacaaataaaattgtccaaggtgaattattgccgatgtctcttcccacgagtcatgatggagaaagtgccaattcaaatggaatggctccaacatgatgttactgtcgaaagtcgaaatccttttattttcgtctattaaagagtatttaagtccttgaagtacttggaaggtttgtttcaaattttcaaggaacaagtatttttttaacaagatctgattatgtgttaataaatagtaagatgaagaaaaatttgatatactaggtacaatagcgcctaagagcccaaaaatatctcgaataggaattctaggattcgattcttttaccgcattgggatattttgaattcttgaataaaccaattcgagaacagttggatgccgacaaaatcatcaaagatggatattctttatttcgattcaacaaggtgccaatagcttctttatgttggctaagtgattgaatcttcgccttggaataaaaggaattggtattgttgcgatctaacctattattgggaatcagtcctacacttgtcctatcataccttcttcgtgtatacgaagtagtagacttgactaactcaattcttaggaaatcgcgaatcagatcatttgttcttacctcaacaagagaagcacgagcaccctctttttcttcttgttcccaattcactactaagcaagttcgaacgaattgactattcgtgtgataaattctttgagttaatttgctattttcatgagaaataaaattcacaagtcgaagttggagattatcctcttct

SEQ ID NO: 40555 - DNA, 372 bp, Setaria italica
  Peptide Sequence Number=SeqID_106529
acaatggacagctgtgaaggtgtcatcagcaatctgcctcaccatgctgctcatggcactcctcttggctccaagctgtgggagtaaggaggtgtgcgacgagtggctgagcgacacataccgtatgctgctcctgtgcagcagctacatatgcaacgagcactgcatcggcgagggcgccaccagggggaatgcggcctgctcttcgtcaggtccttctgcttctgcaccaaagaatgcgactgaatccagtgacctcagctgtgatggtgactttccatttttcagctgtgatggtcactgatgaataagagcacaaggttgtgatccaaggtgttgctcagaccttcagatcaatcaataagcatttag

SEQ ID NO: 40556 - DNA, 606 bp, Setaria italica
  Peptide Sequence Number=SeqID_106530
tgctgagatggttggccctgttgactaccaaaacgacatggacttttggtgcaggaagaataaatggattggcagctttcctgtaaaatggcacatcataaaaaacgtacataactccaccttccgaagtatcttgctgcagaacaatgaagataaacctgtgaccagtagcagagatacacaagagatacactacactcctggaacaactatgctcgaactcttcaaatataccagagcagagggatgtgtgcttgatgacttcatggtgcatgaggaggaggaagcaaggagtggacaactcgagaggtttaagctgcgccagggtgctccacattttatacctgcttggcatggcccttgtaccaaaagacctatgctacccaaatcagacagcgtgctgaaggacagaattgtcagtgagacaaacaatctgacagacaagctacagaatctcaacttggatgggcaccagagttcatgtcaagaatttgggaaccggactagcgaagcttccaccacaaacacacagaaaggagccattgctatggagaccaggttcttgataatcctgtagaaggttattagcttcagacgtgaaatttg

SEQ ID NO: 40557 - DNA, 703 bp, Setaria italica
  Peptide Sequence Number=SeqID_106531
tttttttttagagagaaggatgatgacttgtttttcttatcgctgttacagctgtccttttttgtactatttggaaagaccgccacttgtggccgccgtctccgccctccccacgccgcccaagcccggcccagccagctgccccccctccctcgtgcttatccacaacgtaccgatcgaaaacccttcgccccgccgcccgcccgcccgcccgccgaccaggacgaggacggagacggatggacgggttggctgggaggtagacgcgcgggatcataagcggagacggagaccgttggcgccgtcgagggagtggatgatgaataacgtcgtcgtcgagtgagtcttggcggtggccgccgctggctgctcgctcgctcgcctgcctgctgcttcactcggcgtcggagctctcggggctcggcgcccggttgagatccgggttcttggcgcgcccgctccacgccgcccgctgctgctgctgctgcttctgctcctgctgctggcggtgctcctcctcgtcggcgtgcagttgcagctgcgggaggtggtggccgtggtggtggtggtggtgcctctggcgctcgcggtggtgcggcggcgcgaccatcatgccggtctgcagcgcgtccacgcgcgaccccacctcgatggccttcttccggatcgacgccgcggacagcgtgccgccgtcggggttcgc

SEQ ID NO: 40558 - DNA, 328 bp, Setaria italica
  Peptide Sequence Number=SeqID_106532
gtttggaaactttgattgtgaatcaatttcttaaaatatgtactaagccttaataactcccaaagcattgtgttctatggttttttttttctttagtagtatgacctttttttggttaggttcatcaatttattggtgcttagctcaattctaattgtaaaaaataaagtgtgtgaagaccctgttttcctttcagtcgtcgaagaagaatgtaatgtgtgtcaaaaaggatgtacattgtgtgttgccaaattcttgtaataacagtgtaatatgtcaaaacctaactgttgtcaagaggcaaaacaatgcatatcaagtgtgcctt

SEQ ID NO: 40559 - DNA, 1493 bp, Setaria italica
  Peptide Sequence Number=SeqID_106533
cccaaatgggacagttgaactggagtctaccaaagaagaacaagatgcattggattcatgccaaacattttccggacccatatataagaagcaagcgcccttcctacgccagcaaaggagctcttcttcaaaacaagggtctcagttatcaagaaactactatactcctaggaacagcatccccaaagtgcctaaggattccctgcagcaagaagaattgccggtgctgcagctagttcatgccaatgacatcggtgatagatcaacctcaaattttgttcagctggtgaagttgttctaactggagattgcagcaactgtccaactgagggaaatgagagttcacaatctggtattgatgtggctccatcagtatcttgcaacttggttccagacttgacgctacaagctgcttccgatgattcccacatatttagcagatccttactctttatgtcacctcaagacaagggtgtatacaccagttggagctccaataacttgtgcacagatccttgcgctgcagaaatcgaggaagttcgatgtgtgaagctaactacagaggataattctcaagaatcctgtaagtggtattctgctgctggacacctgtcacagaaatgggttcctgttggaaagaaagaggcgtctagtgtcatccatttagacatctcagaggcttctgttgttgaaggtttagtttcagctaatgatatttctgattcagttggtcctgtatcagcaaatggtgaagatagcaaattagctagtgaaatgactcctaaactaaactcatctgagcatgtcgatttaagaagccaagcatataatgtaattgagactggttacagcaagataaaagaagccatcagttgtgtttacacggcacagcaacgagcagaagacatccaacttcgcatcggtaggcctcttgcggattttgaacattttgttaactctgcttctccagttttgcactgtaacccttgccctgctggctgtaaatcatacttgcaaaaatgcgtggaggatggtttatgtttccatcagactccatacatcactctaagaagtgtctggcagtggtatgaagagcctggctgctatggtttggaagtaaaggcacaagatttccgtagatccaaagggttgtggaatagtcattgccagtttactagctatttcgtgccatatctatctgctgttcaacttttcagacagactaaaagaaccaatggtggaagcattgttaaggaaacaatggatagggatatgccatgtgaaacatctccgtatgagaatctgccccctatatttgcaaagcttctgccgcaacaatctaatccaacaaacaggtcgtctacattgcatactgaagatgatgaacagctaaaaagtggcgagctcatatttgaattttttgaatctgaacaaccatattcgcggcgacagttatttgacaaggtaaatgaagctgattgctggtgtgaaat

SEQ ID NO: 40560 - DNA, 945 bp, Setaria italica
  Peptide Sequence Number=SeqID_106534
aggttctcgttggaggagctgagcgcccgcctcgggaggctgcgggagagtgacaaggaggagagggagagggcgccgctggaccgcttgggcataggaaagctgcgggacgcgctggagacgcaagcgcacccgaccaaggatcagaagaaggctggcggcgctccaagtatggcaactttgatgggctttgtcgggcagacggtgcagggcaagcctcaagaggagctggtggagaggtatttccatcctgaccacatgtcatcggctgagaagatgaagctggagctgaagagggtaagggaccagttcaaaatgtcggagaatgactgtggttctgcaagagttcaagtagcacaactcactacaaaaatcaaacatttgtcagctactctacataagaaggacaagcattctagaaagggactgcaagagatggtccaaaggaggaagaaatatctcaagtacttgcgtagaaccgactgggattcgtactgcctagtgttgaaaagcttagggctccgtgatgtgccggaatacaaggccccagattacaagagcaagagcaacaccaagtccaaaaccaagaaaaagagtaaaagaaagatgaaggcataatcatttcctcggcttttaacatcatgaccagaattggtagttgagtacgtgcccaggccctgtatatgtcagcacctttttccgatctcaacttgctgctctttcatgagaaaagtttgttttgattcgattgcctttcgctcttatatattgcagcccccttgtagcaattgttttggaccttctccaaattgctgtgagtgcttcccttagttctgttatgtgagctcgaaaaactattgtttacggttgaggaacaagctaataataacaagagatgatgctgagatcgtctcattattttgaataaaaaaaaaaaaaaaaaaa

SEQ ID NO: 40561 - DNA, 1169 bp, Setaria italica
  Peptide Sequence Number=SeqID_106535
gaagaaggcgtcgtcgccgctgatcccgccgccgtcggagatcgacctggaggcgggcgggggcggggaccagctgcagtgccggatctgcctcgagaccgacgggagggacttcatcgcgccgtgcaaatgcaaggggacgtccaagtacgtgcaccgcgactgcctcgaccactggagggcggtgaaggagggatttgcattttctcattgcaccacctgcaaggctccatattacttgagggttcattcccacactgacaggaaatggcgaacattaaagtttcgtttctttgttactagagatatactattcatctttgccctagttcagatggtcatctctgcattggcatatctggtacattttattgatgggtaccagcaatattggttgaggacagcctggggttttgacaatgaagttagtttttattacatatgtggtgcattattgttttttgctttgttggggttatcaggatgcttcataacttgttatgatcgaagagttcgaaatgacttggctcagccttgtcgagaactatgtctttgctgctgtcagccagggatgtgcgcagattgccatcttccgggcacactttgcatgtggaccgactgcactacgtgttttgaaggttgcgcaactacagctggagaatgtggtggttgtttgggaggcgctggggaagctgggctaccattgctccttatcatgggggtgattgtgctcgggcttttcacagttattggcatattctacagcgtcctggtagcgacaatggttggccagcggatctggcagcggcactaccacattctcgccaaacgaatgctaaccaaggaatatgtcgtagaggatgtcgatggtgagcgcacagactggtgtcctccgccactccccgcagagcacatcagccagctcaagtctctggggcttctataatagctcacgccatcatgtcaacggcagatgatgatgacctaagttaggactcagcgcggcatcacccagctgtacaggaggcgttccaatcatacatagcaggaagtccaggcgttccaaggtttctgcggcgagatgtggaaatgttgttctcttcttttgtacattgtaacgggaaaaattctgcctgacaaaaccgtaaattttataccaagtgaatggc

SEQ ID NO: 40562 - DNA, 438 bp, Setaria italica
  Peptide Sequence Number=SeqID_106536
ggttgatcttctcgacaatggcaacatcatagcaagaaagatgcagcatcagcaattttcaacctgtgtctgctccatgagaacaagtcaagagctacaaaaaatgggatcgtggatgtggcaatgagagccatcgatgatcagttacttgtcgatgggtccctggctatactggctttgctatcgagcaaccacgaggtggtggagatgatcaccgagtttgatggcaccgcttgcatgctccgtgcaataagggagagtgagtgcagccgcagcaaggagaacgcggtggtggttctctttgcgatctgcatgttcaaccggatgaagctgaaggaggtcgaggtggatgagaagataaacggctcgctagctttgctcgcgcagggtggaacctcaagggcgaggaggaaagctgtagggatccttgagaagatg

SEQ ID NO: 40563 - DNA, 299 bp, Setaria italica
  misc_feature (249)..(299): n is a, c, g, or t
  Peptide Sequence Number=SeqID_106537
taaaaatcgaatcgtaggttacggagataaagacgatggatggatgaatggatcatggatgtagatgtaggtttgttcagggtttaggatctaggaactgaatacgtgccggcatggtgaggattggtcctctgaattctcttaggagctgtagatatagctctctgtctctctcgatctctgttcttggcttgtaaattctcgtagctgttgttcagaggttagaatctcgattcttttgtataaagnnnnnnnnnnnnnnnnnnnnnnnnnnnnnnnnnnnnnnnnnnnnnnnnnnn

SEQ ID NO: 40564 - DNA, 377 bp, Setaria italica
  Peptide Sequence Number=SeqID_106538
ccttccactgcaatgcagcttgcagagcctcttcaatattctgtattttgacatgcaaatgtgcaatctcttctttcttttgcatcagcacattgcttgccacattgtccataaggttcaacaggtttccattattttgcagagatatttgctgttgcactgcagcttgcacggtgtgggaagaagaggatgatcctgatgaggccgccggcgagggaggagcaggcggcgcggcggacggcggagagagtcctggcacgcgcctgacctcgcgtcgcacggcggtggagcggctgtggcgtctgctcgtccgctttccctttccccatgagagcaagacgacaaggacctagaagaagtgacttaggtagaactag

SEQ ID NO: 40565 - DNA, 475 bp, Setaria italica
  Peptide Sequence Number=SeqID_106539
acaataatataacccaaggtgaaacacactactaaactctcagcaaccatggcagccaagatttttgcccttcttgctctccttgctctttcaattagtgctgctactgcgtttgttattccacagtgctcttctctgctgagtgctgctattattccacagttcttcccatcagttataggtgtgggatcagctcaatcgattgtgcagtcctcatagttaccatacctgtacaaccaactagccatctcgcaactgccatacctattcaaccaattggctgtaaggagccctgctacattctggcaacaacccattgttggtggtacctgcttttaggttaactataagttgtacttgaatacactacaagaaatgtgttgatttatgaccaaaattttatgacatatttattctcataatagatttatgacgttttttggctgaaaacgtcataatgtttctactattccgt

SEQ ID NO: 40566 - DNA, 492 bp, Setaria italica
  Peptide Sequence Number=SeqID_106540
gctgcctttcgccattcaagttgatttcttggttcagagaaatggaagaaatttctgtgacctttctgttcaaagcattaagttggggttcggttgcacccttatcctcaccaggttcacaagctgccttacttgaatttgcactgagtgaggttacagagggtattctgctacctttgggatctgccatgtcagaaattttgaggtctacaactggggcctcatgacgctcattcgaccaaatatccaatgatttaacattttcagggattttcttaacacatagattacttgtgctcaaggaagtatgtggatgacaacttgaatccactgacaagggcaccttttcctggactttcaagtccttattgcctattatctgacctaccttaacctcaacttgtggtacttttggagatcccaaatgaaacccttccttatttgaagatcctgttgacttttgtcccttggaattttgataactcagccttg

SEQ ID NO: 40567 - DNA, 1015 bp, Setaria italica
  Peptide Sequence Number=SeqID_106541
ggcgcgcacgaggggagggtgttcaccagctacagcatctacaagggcaaggccgcgctgtccttcgaccccaggccgccgcagttcgtgccgctcgattctggagcgtacaaggtagccaaggaggggttcgtgctgctgcagttcgcgccagccgtggccacgcgccagtatgactggacgcgcaagcaggtgttctcattatctgtgtgggagataggaactctgcttacacttggtccgacggattcatgcgagttctttcatgaccctttcaaggggcggagtgaagaaggtaaggtgcgtaaggttcttaaggttgagccaacaccagatggcaatggtcgctttttcaacctcagtgtccagaatcgtcttctcaacgtcgatgagagcatttacatccctataaccaagggagagtttgctgtcattgtatcaactttcaattacatcataccacacctgatgggctggagcacatttacaagttctatcaaacccgaggattcacggtcgtacaacaggccacagtccacgcctgagtatgagtggcgaaggtgaccgatgatgtgcacgagggagatggctacagctcaaagggtggaatcgattggtttggtgcataattcggttgggtaatctgtgaagaatgccttttggggttttactggctttgtttcctttctagcaaagctggacttggtagcaccccagctattcagaatttctcagctatgtagaaaagtttcacggggcatggcaatggcatggccgcatgggatgggggccttgttttgacttttgagcaacaaagctcagttctgactaggggctgccgcagcagcagataccccgttgttgatgttgagatgcttagcacaccaaagctgcgaaggcttcgtgtcagtctgcccctaacccacagttcttagtggtacaaactgagaaatgacttgtcctgccactgcgccttcgcagctaccttccattcttgaaatactcacctcaagtt

SEQ ID NO: 40568 - DNA, 308 bp, Setaria italica
  Peptide Sequence Number=SeqID_106542
aaccccatactctcaaaatgagcaccaccgagaggttcattacaagctgcgctgctgagcaaggtaaacagagcctgcggaagcggaatctgattcatggtactggtgcgtcagaagtgaatggcagtgatgaggctgctgcggagggtgttctggtgatggagaaacacaaggctccaaagattttgtgtgaggatgagcttctccaggtgctgggcatggagcgtcatcttgtccagtttgaagcaatgggctcctctagaattgaagcggctgttgaatgggagctgaagcgggccgaggcagcc

SEQ ID NO: 40569 - DNA, 779 bp, Setaria italica
  Peptide Sequence Number=SeqID_106543
catcggcgtcatcgcaggatgttcaagttcgggacttgatgtcatccggatggacaaatgagcggcacagctcctacttaagctccatggaggcatccttcgtggaccaactatatggacatcagaaccatgggattcatgcaaataagaagcatctgggcaacaatgggttcaaggtgatccaagagggtgtttgcaagaatatcaggtttgagaggaaccaaccttgcacgcgtgatgctggaatgaactaccttcctgagaatccatgggtcaggcgttttaggccacgcagtgctggtgtgagtcgccgtgatgattgtgccgaagctatggctgatgattacgggtcaggaacagacacggtccgagagaaggtcaggatgcatgggggagaagtgaagccttgtgccagacaaaatcttattggtaaaagcaaagaagtctctgatcaaaattttgccgaggaggaggttgatgctagtaatgaaccgtgcaagaaacagaggcctacttcatccagtggggcaccaaatgacccgggaacgtaatgggctcaataatccagatctgttgttgttttgtttttcttctggaaaagcacgagctgctacaaaagttggtgaaatccaaggcgctccaaaacctgaaggatgtcatggaagacatgttctgggatcttgctgaaacactgttacaggtgctatttgaagtcttttggtggcgcaaactgaattatattctgcaattgctctctaccgcgtccgtggtctattttg

SEQ ID NO: 40570 - DNA, 396 bp, Setaria italica
  Peptide Sequence Number=SeqID_106544
tgttacttgtctaaaacttttgttctttcgttgttgtctaacgtagtctttcttgttattgggtagttacttgtattgtttgtaaagctttgttcatgacctccaactcacattagattggataatcaaccactgcttctcacttcgagatgtatcagacatgaaggaagctatcatgaagcatttggaattaaacaacagtgatggacttgaaattgttgcggtaaccgggcacacaggaatccatacatcagatgaacctagaacggcggagaatgctcagacatctatattgtctgactcatgctgtataaatatgggatctaaagatgatgttagaatacagaagacaagtaataaagtggcagtttaagtactaactaactaagtaaagta

SEQ ID NO: 40571 - DNA, 2372 bp, Setaria italica
  Peptide Sequence Number=SeqID_106545
taactaaacgtaacctaactaaaggtattgtagtaaagtttaaatttctagtcggtctattctactagtaacttctattgttgttttaccggttaccaggaactgctgccattgcaaaaatgagaagtgaagttgaaacagtgggcagtgatacaacgaccacaaggatgagaaagttaaattcagcggcatcacagaactcatgtgtttcggtacagaactctcatgatgcattgcatggaaattcgccgttgcttgcaaggctacatgcaattgaagatgaaaataaggccataaaggaatctctttctagaaaggatggtgaacttcagttttctcggactatgcttgcccgcacaacttccaaactttcccaagttgaagcccagcttgaagagttatcaagaggccgggctggtgctgaattggttaaaggtagccctacagtggtggaaaaccctctttcatctatctctgagaatggctgcaatgaagataatgttagctgttcaggctcatgggcatcagccttgttgtctgaactggaacacttcaagaaggggaagcccacagcacattctagtaagagcacagcactatcagacatgagtttcatggatgactttgcagaaatagaaaagttagcgtcgggatgtaatgataaacctctggaaccatatgtttcaaagaaagaggtcacagagtcatctggaaaagagctagttccagttgatgtctctgctggaacaactgaccaaattcaccaacctaagattgagaaggctgtcctgaagttaattgaacttattgagggagttatccagaaatcatcaaaggactgtagtaagacagttgtgctatctggcggagaagagaataatggccaagaaatgctatcaggctatgttgcccgtgctttcttgtggaatatatcagaacttacttctgtactgcaaaactttgtcttcgtgtgcaacgagcttctgtatgggagtactgatgttgaaagctttgttcatgacctccaactcacattagattggataatcaaccactgcttctcacttcgagatgtatcagacatgaaggaagctatcatgaagcatttggaattaaacaacagtgatggacttgaaattgttgcggtaaccgggcacacaggaatccatacatcagatgaacctagaacggcggagaatgctcagacatctatattgtctgactcatgctgtataaatatgggatctaaagatgatgttagcacacagaagacaagtaatgaagtggcagtctctaaatttcaggggatagaagaaaaggcttcacatttgcgggcagaacttaatgagttgaaggaatctggaaaaataacagcacatgttgatggtaaatcgacaatgaatgaatgtagcacacgtgaatccatcttcacgtctggactgaataagggcaaacaagaggggattagttgtcctgaatccaagcatcaacttgagtgttgctctgctaaagaaggctcaaaaaatgttgctgacaatgaagagaaacatctgcagatgcagctggagatctcaacagcatcagagaagttgattgagtgcagggagacaatcctaaacctgggaaaacagctgaaggcgctggcatctccaaaggacgcgatcctcttcgaccaggtgctccagaccgcagctcggtctgagcgaaaaccccgatcgcaatcactaagcgagatgctatctatggaggatggcggattctatgtcccaagctccccgaaaaccaaggagatcatctgcactgaaccaagggcttcaactgaaagaaacctctctgccgacgagggagatgatggttccgccgcagcatgcagttcctcgcaccctatgccagtggcacagcccgtaaaacaggcttgcagggtgaacggaacctgcaagggcgaagctgatgtgaaggtggtaacacttgccgttgtcccgaggaagcagaaggggaacggcagcttgctgaagaggatcatgacggggaggaggaaggaggccaatgccatggccaagccacaggtggtgctgagttcttagctgacagagaaggatgggagcctcggacatggcgagtctttgtttcaggtgtaaattaagtgtgtgcgtttgtgtgtggatcggagccgtgttcaggtgaggttagtaataaaggtgcactgtgttgtgtataggctgtatggattagtatggtatgtgacgtagtgctactcatcgtgaccctgaaggcggtttacctgcttgtgtgttctgggaaggttgttgtacctgcgttgaactttgataatggctagtggtttatctgacaaaaaaaaaactaactgagaa

SEQ ID NO: 40572 - DNA, 644 bp, Setaria italica
  Peptide Sequence Number=SeqID_106546
gcttgctttcacaccagccagctccacactcactgactcactctcctcgttactaatactactcctgcttgctcgaggccgaggtaggtggtgcggcatggccaggtctgatcaatacgatccctttgtatgggcgctgcccatggtggagggcagcagcaacctcaggggctgcggcggcgccaccggcgacgacgacgacgacgacttcgacgtggctccggctgcataacaactgacggatctctgcagtgtatgcatgtgttctcggccatgctgatctatgagctgagagatcgtatatagcgatgagctagtacgtttgctgaggtttccgatcgaggtgctgtatatttcatgcctccgagctagaaataatttcgctcccctaatagcttgcttagctagctctagtagttattactaacaataaagaagcatccatgcatggccatgtgtgtatatatggagcgcagagacctaatgtgggggttctactgatagttttggtcgaaaataagggtaattgctgtccagggcttcatgattaatggatgctcgtgcatctttgttggtgcacgaggtcaggagttgtacttccattatgttaaagaggcattattctatgtctaaaaaaaaaaaaa

SEQ ID NO: 40573 - DNA, 454 bp, Setaria italica
  Peptide Sequence Number=SeqID_106547
aagtcagcaacacttcgtctctaacttttcaccagattatccaataacatttggccctcctgaatattcctagcagcgaatagaccccatccatgtattccagatagaccacaggagaccctcttgttttcagttttctgtaaataacaaagccgttctttgaacgttgagaaagattgatcgtccttatgatccatgcacgcattaaggccatcaataaaatcctgggaatggtgtcgaggtcccattatccggtgggcaatagcctctcgtggttctttcttgtatttcaatatttcataggccagacaccttgcagctagacagtcagaaactttagcaggaagcaccttctcctggtgattttccttcctgacaagtcttgtagctgtctgtttctcaccatcttggagaaaaaatttggtagagaacactccttcaggtgtctttacaa

SEQ ID NO: 40574 - DNA, 1226 bp, Setaria italica
  Peptide Sequence Number=SeqID_106548
ttgttcgtaggttccctatttattccggttgggtctaattagtccttcttcgttggtttcttttcttgtatttcaatatttcataggccagacaccttgcagctagacagtcagaaactttagcaggaagcaccttctcctggtgattttccttcctgacaagtcttgtagctgtctgtttctcaccatcttggagaaaaaaatttggtagagaacactccttcaggtgtctttacaattaacacattgtctcggtcgggagtactgtgaaaactacagtaggaaaccattttcgtaatgtgcctgccatttctttcagaatattgcaactccatgcgatatccagccctcgatgcacacattgagtggtaatacgtagagcacttgtagcattgggtgcaggcaccatgcatttgcttgcatataacacatgtcttcttaaagtactctgcaggaatattcaatattcccatagctggctccattgtctcctcaactggaaaagagactttaggttgaaaccaggcacatgtaacatgaacccacagtccatcaatatctgttggcttgagagcaccccctttgataggacataggcagcattctcttttccgttggggggattcacaagctcgacaaagccatgttgtaagatcttgcacagctcgtgctccatagcactcttggtgtacagctatttggcatctgttgcaaatgataattttattgtagtcccaatcctcaacccatcggcaaacagcacaccgttcagttgtccatttagcacagacaggactgtaagcattagcttgcaattgtagcaactcttctttcttaatgcctggggttgaggactttgaagttccacagggaatatcatccagcaaattaatgagtggctcgccagtgctcttgagtttaatactcatcttccaattctttttccttgagccagtatgtttctcccactcattcagactcatcatcctttccttgcaagacttacatttacatagcatcatgtgcttctcaggtacatacagtgcctcctccccgttgcaacaaactggtatcattccggtcagtttttcctttgaagtgctagcacattctgaactgtttgaagcattcattttttcagttgctaccactggtttgcgttttgatttgcagtccggacagaaataatcagcattttctaaatcctccatgttgttgcatgtcag

SEQ ID NO: 40575 - DNA, 764 bp, Setaria italica
  Peptide Sequence Number=SeqID_106549
ggattcggagctgggggaggcgacctgcaagctcgcgtggctcaacttcgcgtgcgcgaggggcgacatcgactcctgcgtcgccctgctctccgagctcaaggtgctcctcacaaggttacctagcttgccaccatcgtttgagaagacacctaatgcggtcaaggagctgaaaatcgcaagggctatctacgagaatgctgttatcttgagcttgaaaattaaagaccgtggggcacttgagaggagcttgtgccagctaaaagaattttacatcagtacttgcggtataattgctccatcaccaaatgaatacccatttctgggccttaatcttctgaggctgttggctgagaacagaattgctgaattccatactgagctggaacttctgcccctggaagctttaaaccatccttgcatcaaatatgcaacagagcttgagcaatcctttatggaaggtgcctataaccgattcttcaatgctcgccaggctgtgccacatgagacatatgtttaccttatggaccttcttgctgaaactgttagagatgaagtagctgaatgcagcgttgatgcatatgactacttgccaatcagtgttgccaagaaaatgctaatgtttagatcagatcaagagcttctcgagtacatatcagaggaacaaccagaatgggaaatcaaggattgctcagttcattttgacatggacaaaacccaagtctcacatgaacttgccatcgttaagctgttcaagcaagctc

SEQ ID NO: 40576 - DNA, 395 bp, Setaria italica
  Peptide Sequence Number=SeqID_106550
ttattttgttccgttttttattagtgacgttatttgaggatgagaggctgcagagacgtcattgtggagtccgcactcgtcgacctgtatgcgaaatgtggtgcggtagaatacgcgcacagggtttttaaaaggagcagtgtccgcaacatgattacttggaatgccatgatttgtggttttgctcagaatggccatggcgagcaggctatcagtctgttcaataagatggtcagagaaggggtcaggccagactacatcagtttcattggtgttctttttgcctgtagtcatactggtatggttgaggaaggaaggaactacttcaactcgatgaccaaggactacggcattgcccctggtattgaacattacaattgcatggttgacctcct

SEQ ID NO: 40577 - DNA, 446 bp, Setaria italica
  Peptide Sequence Number=SeqID_106551
cgttttgtacttttctaggttcataggctttgctatgcatctggatatatattatgtctagatacataggaaaaactatgtatctataaaacccaaaacaaccaacaatttgaaatggagggagtagtaattttctttggctttcagacattttgctaagttgttctgttgtcgttcatccaattgctgtagttctccctgaagcaccttatttttaaaacatttgatgtatttgtgatgcaaatttgaaagctagtattacagtaaggtatctctaagttgcaaaatgtaacagtatgaagggcttttctcctgacaaacttaagctgttctcacatggacagtgtaagtatttctaaatattatttatggagtggtcaacaataatacaagttttcaccctatggttacagatctccttatgattaaatacattttctatttca

SEQ ID NO: 40578 - DNA, 800 bp, Setaria italica
  Peptide Sequence Number=SeqID_106552
ccacttttaacttatcatatctagctgtgcttttcttgtctttggaccagattggaacataattggtgattacaacactatgatccacaaatgggtgcacagaacctatagatttgaaggataagatctaaagatccaagcctggttcaactttagaaaacaaaaatccaaacagatggtagtaatttgctagcgtctatcataattctcagtaacctagcttggctgttgtttataagaactaagaaagggaaatacgttagtaagtaatgatcaactaatacattaagaaatgaaaatacttacccttcattgatcagattccaagccacattaaatagaacagtatgggagagccctagtttgctcaaagcagaagaaagagaagcatatggatggactacttcaagttaatcacacagtgttgtcagtaacatttgctctgcctgtattacactctctctatactgttcaaaccagtcctgaccacgtagcatataaggaaggaggttgaattcatgattctgagaaacctcgcatgaagccctaagaacggtattcaaaaggcatgctgtttcttctgactttgctgccagaaacaaggctgcagtcgcaaccaactgcaaaatttttcacatgaaaacattgttatcatgaaaggaataaatcagattagcaataagcagatatgcttatagattatagaacagcatatactcacatctcatgtatagatgatataacgattatagtgaaaaaatgccaaattaactgtccgatcctagataactagaagtagg

SEQ ID NO: 40579 - DNA, 1181 bp, Setaria italica
  Peptide Sequence Number=SeqID_106553
ttttttctaaggaaccaaactgaaacttccacgactatattctaataaagatcttttactttccacaaaatatcaaggacaactttgaacatcttcccttttttgtacacagcaacactggctgtaaaaacctaaatgaaaacgaatgggtataatctcaaaataccaacacatatcagtaactgaagaaagtgaccatataccaatgtgtacatattttggcagtggtcaccacaaactaagtaaatggatctattgtacatggcaaacatattgaatatcatatcctaaagtagctccttcaattgctggacaacatcttgaacaatgtatggagttgtcttgaactcatgccagaaatttgggtggggcataatgtcataacggagaaactttgcagcaaggaatgcagctccagcagcaatatgatgaggtttgaactgaagccatagtgaactttgtagcccttcattgatcagattccaagccacattaaatagaacagtatgggagagccctagtttgctcaaagcagaagaaagagaagcatatggatggactacttcaagttcaaaatcaagtgttgtcagtaacatttgctctgcctgtattacactctctctatactgttcaaaccagtcctgaccacgtagcatataaggaaggaggttgaattcatgattctgagaaacctcgcatgaagccctaagaacggtattcaaaaggcatgctgtttcttctgactttgctgccagaaacaaggctgcagtcgcaaccaaaaatctatcatggcaggcgtgagatctgtggaagaagaaccggtggcaaaagaccacggccgtcgcgattgttgtctgtggcagcccgagacggatgccaaggcaacgcagataagcgcaataggagacgcgcagtctggcctcgagcgcggaatcgatcccatctctgcgcgacggagaccgtcgctcgatctcgtctcgcgacagcaacgcccgagcggcagtgccgccctcccgaggcctctcggacgccgccggaacagatgccggctgcggcgttggcggcggcggaggcggatcccaccgaggatccggcgctcggcgagccccgcttcggtgggggtgggccggtggccgggtgaggttgagagggaggcggaaagaggcgctcttgcaggtgcg

SEQ ID NO: 40580 - DNA, 790 bp, Setaria italica
  Peptide Sequence Number=SeqID_106554
aataacaaaagtaacaataaaataatattttttatttatcatgaaaaaggtacataatacatcactacattcaggatagaccgaaaaaaatgtgtgtattatgacatgttgcagaagtattcttaaagataatatccttagattgtatttacacaaataactaatgaaaatagaaagaagcttcatacatatttccttacttttgcctacaatagaataaagaaggctgatactggcagaaaatgagcaaactccaactacagagttgcagaagatattcaaataacttattttgtggctcagatggcaagagtgacagggatattcaattcttgaaaactatttgatctcatattatatcaaaaccagccttaaagtatctaagcattgcctccatcaaatctcatcctctgtggctctgttgcagttgccacaatctagtccaaaagtgaagagtacagaaagatcgaccaataaccagcgcattcaaatgaggttagttggtaaaaatgtagacctaggaactgtgtatggtaacttccttccagtcaaactaactatacatccacacaaaaaaatgtctggctagcatttatcctggtaaaagtacccacttttaacttatcatatctagctgtgcttttcttgtctttggaccagattggaacataattggtgattacaacactatgatccacaaatgggtgcacagaacctattagatttgtaaggattaagatcttaaagtaattcctaagtccttggtttctaacttttagtaaaactaaaa

SEQ ID NO: 40581 - DNA, 1022 bp, Setaria italica
  misc_feature (1020)..(1020): n is a, c, g, or t
  Peptide Sequence Number=SeqID_106555
cgatccgagaaaaaaataactatatgtatttgtatctgatcgttcgtatccgatccattttcatccctagtaaagattgtcatatggagcattgtctgaactattatgttttatacgcaataactacttggggattgattagcaaactaaaacaattgcaactctgctggagtgtgctgtgcaaatcttttgtgccatgcaaatcagaccatgtcatgatcaaatgacatttgaaaatcctggaatggcatgtgccaccggacagcattatattgtcaaagaattgatgtatgtatcccaagatgcatgtctgattgctaggatttagcaagcaaattctgcagaaggttcttcaataatgaatgtgatacctgaagcatcttttagtggtaaggataactggataaaattttgtccttttgtaatgtgttgatgtttggtggatcctcaagcccttaacatctctcgctgacatggcttttcatgttgtgcaagaaatgaccttattttttcatgcaaacagttcactaattgatggtttctccaggtcttgttgaatttttatctatttattaagtatcatccaagtatttgttctttaattatttgaataatgcaggctacaaagttcactatggcttcagttcaaacctcatcatattgctgctggagctgcattccttgctgcaaagtttctccgttatgacattatgccccacccaaatttctggcatgagttcaagacaactccatacattgttcaagatgttgtccagcaattgaaggagctactttaggatatgatattcaatatgtttgccatgtacaatagatccatttacttagtttgtggtgaccactgccaaaaatatgtacacattggtatatggtcactttcttcagttactgatatgtgttggtattttgagattatacccattcgttttcatttaggtttttacagccagtgttgctgtgtacaaaaaagggagatgttcaaagttgtccttgatattttgngg

SEQ ID NO: 40582 - DNA, 443 bp, Setaria italica
  misc_feature (403)..(443): n is a, c, g, or t
  Peptide Sequence Number=SeqID_106556
ggccagcacaaacttgcaggtgactgatcctaaagatacttaaccaaatgaacttcaggcctgattgtaactgctgccctcactgtaaagaagaattgccgaggagattttttgaggtttgtaactgcggcgtgcaccgttgcagcctcagaggccaacagaaatgcgttgcctttctgaatcatcgtggtgatattaggaagaaccatttggttaatgcttgtacgtatgttgacttactttatttctgattctcattcacaatcaaatttattgtgtcatatctaaatagcttaatgtcctgtatcattcagcagtgtagccttgcattatgtgaggggctatcaaaattttatataaacaattatgaagaaatctgatacgaagctggcaataaaaattnnnnnnnnnnnnnnnnnnnnnnnnnnnnnnnnnnnnnnnnn

SEQ ID NO: 40583 - DNA, 615 bp, Setaria italica
  Peptide Sequence Number=SeqID_106557
ggaaggtttggaggtgttcagtcatcagagcggccggtgacggcagaggcggtgaatcgtcaagcggcggccaagacgatgatgatgaagaaggaggaggtgacaatgaggtgccgcaaagcagcagcagcagcagcagctcccgagaggatctggagcgcctggtcgggcctgacgaggacgacaagttcaacgggttggaccttgcaaacctcatcaggaagaagtacggaagatcctacgatgtgacgttgataaagaaggagttcatggggaggaatctgcttgcgatgaatgtgatgtggaagtacagggagcagaggtcgttcccgctgagcgaggaggagtacctgctgcggctggacgaggtggccaacacgctgcggtgctggggcgccgtggcgcacgtccgcaacaccctggagaagctcaaggagaggccgcgcatcggcaaggccgtcagcatcttcatcgacatggaccagacgggaggaagagccaacgagtggatctacaagtgatgaaccatgtttcattttgtttcaaagtccaaatgctgtttcgcatggaaacgaacggcagagattttgtttcaaagtccaaatgcgtaattag

SEQ ID NO: 40584 - DNA, 477 bp, Setaria italica
  Peptide Sequence Number=SeqID_106558
gtttctgtttatctttaacatctcaattcaaagcttccagaaatctgggtcttgatattcactaataaagaatctgacaggagagaaactttagaactacaatggcctgtcttttgaaaagcaaaatgctcagtacttataataacatataaccatgtaaaatgattctggttcacatcccatctaatctagatgaattttaatggactaaatctatcaacatggaaggaaaaggactgtagcagcttaaatttctaattatccttttgttttcagatctgagtttctaatttgtacctgcttagctatgcataggctatggcattgacttttactggtttagtcatggtacttctttgcgctttcatttttctgcatatgcagtcaataatgtttgaacttcatggatctttcaattttgcgtttgctgtcccttcaatgatgcacaaagcttccttgacatgattatcagtatca

SEQ ID NO: 40585 - DNA, 376 bp, Setaria italica
  Peptide Sequence Number=SeqID_106559
tttcaattaattcttcacatacagcttttgcattccataaaaattaacaatacaaaataatctcctaaatcttaaaatctgaaaataaaatagtcctatttgctgaatgctaagttcatctttgtaagattgggtgttatccatgtgggacaaggccagttagaccaaatatgagacacaattttcttcctgctgctattttccaggtcgataactccaatatcacgatgaacattctttaatgccacaggcggttcactgcggtcatcagtgtagtaagcatgattttccttcaattgagggtgttcatcagcactaagacaaagtgaattgttgtgcccaagaaataaaatatgattagacaatctctttgttt

SEQ ID NO: 40586 - DNA, 430 bp, Setaria italica
  Peptide Sequence Number=SeqID_106560
ttgcgtgatgctctggttggtctccctggtgttagtgggttatcgactgaacaaaggaagagactgaccattgctgtagaactagtggcaaacccttcaattatattcatggacgagccaacttctggccttgatgctcgagctgctgcaattgtcatgcgtacagtgagaaatacagttaacactggacggacagtggtttgtacgatccatcagcccagcattgatatcttcgaggcttttgatgagcttctgttgctgaagagaggagggcgtgtcatatatgctggccagcttggtgttcaatctcgcatactagttgactatttcgaggcaattccaggtgttccaaaaattacagaaggatacaatccagcaacatggatgctggaagtcagctctcctctagctgagctcgcatgaacgttga

SEQ ID NO: 40587 - DNA, 659 bp, Setaria italica
  Peptide Sequence Number=SeqID_106561
gcccgaagcccgcgcagtcccgccccccgccgcggcgcccccggcggagcgcgcgcggttggtgctgcgcgtgctgcctgtggctgacgctggtgctggtgggtctggtgttcctgggcgccatcgcggcgggggtattctacgtggtataccgcccgcagccgccgagcttcgcggtgacctcgctgcggctggcggcgctgaacgtgtcggactcggacgcgctgacctcccgcatcgacttcacggtgacggcgcgcaaccccaacgacaagatcgcgttcgcgtacggcgacatcgcgacgtccttctccgcggacggcgcggacgtgggcgccggcgtggtcccggggttcctccacccggcgggcaacaccaccgtcatccgcggcgccgcctccgcctccgcggccaccatcgaccccgtgcaggcggcggcgctcagatccaagaagtcccacgccatgtccgcggagatggacgccaaggtggggttccagatcgggcggttcaagtcgaagcgcatcaacgtccgcgtcctctgctcggggttctctaccggggtcctaccgaccggggtacgaccaaagacccaaccccgaccgaccggacgacccgacgaccctacgaccggaacgacggaagaccgaaccgtacga

SEQ ID NO: 40588 - DNA, 896 bp, Setaria italica
  Peptide Sequence Number=SeqID_106562
gcccacaaacggcacagagactaggagggaggagtctttcccggagtcgccgggatttctctcggccggtggggagagcagagcgccgcgatccggcggcacggtcaggcgccgaggcggcgtagctatcctcggcagcggtcggcgccccggggggccacgccgcgcggcgagattcggcggcgatggctcggtggcgggcgcggcgcctcctaccgctgctcaccttcgtcacgctcgggatgatcctcggttctttgcttcagttagcacttctccatcagctggatgatccctcacatttaatgcatgctgataatgatccagaggctgctgttcttcgcctcggatatgtgaagcctgaggttatcagctggacaccaaggataattgttttccataattttcttagttcagaggaatgtgactacctaatggcaattgctagaccaagactccaaatttccactgtagtggacgtcgcaacaggaaagggtgtaaaaagtgatgttcgtacaagttctggtatgttcgtgaattctgaagagagaaaatctccagtcattcaggctatagaaaagaggatttctgttttctctcaaatacctaaagaaaatggggaactcattcaagtattgaggtatgaagcaagtcaatattataggccacatcatgattacttttctgatacttttaacctcaaacgtggggggcagcgcgttgctacaatgctgatgtatttgactgatggtgttgaaggtggtgaaacccactttccacaggcaggagaaggccagtgcagctgcggaggaaacattgtgcgaggactgtgtgtcaagccaaaacaaaggcgatgccgttctcttctggagcatgggattggatggtaacacgga

SEQ ID NO: 40589 - DNA, 407 bp, Setaria italica
  Peptide Sequence Number=SeqID_106563
ttctagtgtattagtgtcatatgacatactgacttcagatccattcccctgttgatcgtaacctagacatctaaattattagcaaatgcatatctctttgtatttggatgttaatttttctatgtttggttcttctggtaagacatttaatgataatatttatagttcagaggaatgtgactacctaatggcaattgctagaccaagactccaaatttccactgtagtggacgtcgcaacaggaaagggtgtaaaaagtgatgttcgtacaagttctggtatgttcgtgaattctgaagagagaaaatctccagtcattcaggctatagaaaagaggatttctgttttctctcaaatacctaaagaaaataggggtaaacttactaatttactaagttaatttagta

SEQ ID NO: 40590 - DNA, 417 bp, Setaria italica
  Peptide Sequence Number=SeqID_106564
acccgcggacggagcccgagtacaaggacgtgctgcagaggaagcggccgccgtacatggccgagcttgacgacccgtcctacttcaccgtgttcggcatgagagatctcttcatggggtacgatgttttggttgaaaacctctttgaccctgctcatgtcccgtatgcgcacaaggggttgctgcccagcttccgcgatgagcaagatcccggaagagttgagcacgatcaagagtgtggtgatccgatcacgatgaagatagatcagaccgacataaacgggttcttgtcgacgatgaaaggaggcagcatccgcttcgtggcgccatgcacgttccatggcacacgactacccaaagttgacgctgacggcaaggcagcggctggtcatgctcgtggccttctgcatccctgtt

SEQ ID NO: 40591 - DNA, 708 bp, Setaria italica
  Peptide Sequence Number=SeqID_106565
tttgttaaccttagttatttaagttggtcctaagttgctcgaacaggtagactcctgggacctctctgcctcgtctcttcctgcccagacctacttctggttgtcaagaagggtttactctactgttgagtctgggaaggacacaatcgaagctgctaagagcacggcatccgggctgtcaacaaaggaagatcagaatttagaggcttatccggatccttctggtgatcctacaaagttctttcaaaggccagatgatggattcaatcaagatgtgtaccagattgggcttttgctggccgtgatctacttcattgtacaatttctgaaaacaactctgtgatcgcgcaccagtttcaacaaattcgccaaatcctccgggtgtagtactgtagtatgtgtatacattgcatgtaactatgtctagcaaaactgtttcatataggtacgccaccatcttaagtggaagagatttgagactttcagacagttgatgatccattcttgctgatattagtctggctttttccccctgcgagctattaatttggcagtcatgacttcgtgttgtcacttatgtgtagccaagttgttgagtcttagtgtattaatggcatacatttttagaaggtttacggcaccagtggaagttttccctattttgtgttgaaacctatggatgcaaatattttaatttaaaaagtatat

SEQ ID NO: 40592 - DNA, 1080 bp, Setaria italica
  Peptide Sequence Number=SeqID_106566
cccaatggccaccaatggcgacccccaccgccactgcgctctcctgctcctgccgcccctcaccctcctcctcctcctcctccaccgctgccttccgccggctgaacatcgcctccgtttccagtggaccgcctcctcgccgccgccgcctccgtctcgcgccgctgcacgttgtcgatgactcgaaggaggtgcaggcggaggcaagcgccgccgccgatcttcccgaggagaggtctcagacggataagatggtcgacggcatggatttcgggaagctctgcaacgacttcgagtgcataagcagcccctacgtggagtccacggcgaggcagatagcgcgggacatcctcgagctgcgggaggacaaccgggcattcaactgctatgccgtctccgtcaaatacaaggatccgttcaggacatttgttggacgtgacaagtacatgaggccactgtggatcaccaaggcattggaaaaccctgtagtgacagtccaggaaatgtcaatgcaatcgacaagtaatctgaccatcaagtgggcattcagagggaagcctaagaatccattctttgcaaccattggaggagatgtcattgtccgtgttgaatcccagttcgtgttgaaccagataagtggccaagtgctcgaacaggtagactcctgggacctctctgcctcgtctcttcctgcccagacctacttctggttgtcaagaagggtttactctactgttgagtctgggaaggacacaatcgaagctgctaagagcacggcatccgggctgtcaacaaaggaagatcagaatttagaggcttatccggatccttctggtgatcctacaaaggtacatcaatctttctagttccataactgtgccgctacatgatgaatctccaacttatatagctatcgtttgatcatttctaatactcaaaattctgaagaggtcagttcagttatgccttagttattcagagccttgttttggttttctgggtgcagttctttcaaaggccagatgatggattcaatcaagatgtagtaaccaagaattagggacttttagactaggacca

SEQ ID NO: 40593 - DNA, 543 bp, Setaria italica
  Peptide Sequence Number=SeqID_106567
aaaggaataggatggccgcagagtggatccattgtcctgcagcttaggcagcaattcgacattggcagtgtcatcatcaattattatactgtgagtattgacagtgcattccttccgccaactatcctgctcctcccaaggactggagatgctccatgtggaaatatcccagccctggcaatcagagctgcggtgcatttcaacaagagtaaggcgacctttgctgaaagcaaagtcccgatgaagcagaatctcatcacggcggaagccgaatctgatgagatctcggggtaaaggcaagtaccgctcacttccgcggtgaagcaagtcgcagacgaggatgccccgccaggggtcaacaaatgccactacacctcctccgagtgcaatcaccttggccgtgatatgggtcattggcatgaggagagaaatcgtagctggtggtccatttcttgtccatggagtcatagagacagaattcgaagctcgcagacgggttggcagtgagattgagtgcggcgatgtagagtggccgtgctcggg

SEQ ID NO: 40594 - DNA, 847 bp, Setaria italica
  Peptide Sequence Number=SeqID_106568
acaaaaggcaaaggaagcggagtgagaagctgcaagccaagaatggaagcctaacgaaggggaacaaggagctgcaggccaggaatgacagcctaacgaagcggattgaggagctgcaggccaaggatgatggcctgacgaaggggaatgaggagttgcaggccaagatcaacgatagcatgaggaagtggaataaggagctgcaaggcctctataagcatattatgaagattatgaagattctggaaaatgagattgacactaagagaaaggacttgctgcaacttgaggagctgtacagaacattctttccaattccacagcctgaggaggtcaagtcgtctgtggaagttcagtcaacttctcagggcttgaatgacgggctcactggatgcactgatattgggaccaaaaaactccggggacattattctggagtctgttccgtgcctcaagcaagcagaggcaatcctttgccaagctgcatctaacttcgaggagatcggccatctccaaactcaagtgaccaaatcggagactgccgttgaccagctgatggctatggaccgtaaacttgttgagaccaaggcagctctcaagaaggagattgctgcctatgctgcctacctggaacgcactcagaagaaaattgaagaggcagagtccgagaaggcttcagctaaacagctgatggctacgacacagcaggtccaagatgtctcggatattggctttgatgatacagaggtagacattagaatttgtgatctcatggttaccggtcgcaagtcaaagtcaagtttcaagaaaataaacaacataggagcgactaccaaaaccggtcggt

SEQ ID NO: 40595 - DNA, 520 bp, Setaria italica
  Peptide Sequence Number=SeqID_106569
gatgatgaccccttgtcctataatgttcctgatcctgatttccatgattttgacaaggatcgcaccgaggaatcttttcaaagcgaccaaatttgggctacatatgatgacgaagatggcatgcctcgttattatgcatttattcagaaagttctctccttgaaaccattcaagctcagaatgtgctatctcgaatcaaagacaaatagtgaatttgggcctttgaattgggtttcttctggcttcacaaagacatgtggtgatttcaggactggtaaatctgaaacatgtgatatagtcaacatgttctctcaccagatgaaatgggagaaagggctgcgtggggttatcaaaatttatccacagaaaggtgacatctgggctatttatcagaattggtcccctgactgggatgaagaaactccagatagtgtgctccatgcctacgatgtggttgaggtgctagatggttatgatgaagatcatggcatcaacgttattcccttagttaaagttgctg

SEQ ID NO: 40596 - DNA, 667 bp, Setaria italica
  Peptide Sequence Number=SeqID_106570
cctcaaccaacaatcgtaaggcaatggaagcaacaactatctggttgaggtgctagatggttaggatgaagatcatggcatcaacgttattcccttagttaaagttgctgggtttcgaacagtatttgagcgccaacaggatctgaacgctaccatgaagattcccaaagaagagatgtttcgattttcacatcaagttcctttttacaggatgtcaggcgaagaatctccaaatgtccccaaagatagctatgagcttgacccagctgctatttctaaagaactccttcaagggaacacagaaacagtggaggcaaatggaacttcctaatgttgattaagacagttgacgacggtctgccttggttgaccttaccattttgaagcaatcaagcagaagttgtcgacacttgcaagttttatagttttccttctacagcttttgacaattacctttgcatagaagggttagaatggggtcagtcattaaggagtcagccgcttagctaaaaggtgtaattagggtgctctgacatgaattttgtcgtgatactatacttagtaactctaaatgtgggtggagtactaacgcaaagctcatgtagcagtttttaatgtcagtgttgacattgttttgtcttgaatggatctaatgttttttcctggg

SEQ ID NO: 40597 - DNA, 675 bp, Setaria italica
  Peptide Sequence Number=SeqID_106571
aactcacatcacttatgctctgacaacaaaatgagctgttgggcaatatggactagatgattgtcgcgttgaggagaacccactggatgctcttgcatcacaggatttggatgaggattttgcttttttaggtggactacccaggtcgctgctcttctcaggaacagcacgctgaggggtgctgtatatagacacacacttgcgcttcctgcggttgaatgtgtatttgatatgtctggcaccttcagcttgcatggaagctccagaagctgtctttgcatgctcttctttgttcagggagatagcaattgaagcatcaggtttctctaaagcttgcacgggaagtccagaagatgccttcgaattttcttctttgtccaatgaactaacagttgaagcatcagccttatgtgaagccaaagtgcagcttccatcctctaaaacttccttacagcttgcagtattagtatttggtgttctctgctctagctggtccaccactaagttaccataatctataggttcacttttggtcgactgaaggagcactgtagagctgttttcaggttcaaattgaccattatctacactagtctgatgcataaagttttcagtagtacatttcagaggtaggtacctattttggtctgatgtatcttaggcgttttgttttaa

SEQ ID NO: 40598 - DNA, 689 bp, Setaria italica
  misc_feature (29)..(29): n is a, c, g, or t
  Peptide Sequence Number=SeqID_106572
agagtaagaattcatctggcaacacgtanaatttgatttcacccaaagaatcacatcttcaattagagggagcagaggtctatctccctcgccggtcaccaatctcgccgaccacagaaggttaattgatgctcgaaagaagaaatcaaatgcacatcctcaaatcccctcaccaaaaattccaagatgccgccgcctttttgcccaatcaggctgcaggatctctgttctctgagaccgctgtctcggccgcctgtttctcctggccttcctccggtggaggcgccgctgcgtcggccgcctgcttcttatcgcctccctccgacgccggcgccgcggaggcggagtcggcttcttgggcctgaaaggcctcggtatccgcggccatggcgcgctcggcgcggagtatgggctcgtagtagtcggcgtgcgcgtccatgcacttccgcagcgcggccgtgatgtcctggcaccgctccacgacgtcgacgccgcccgtctcggcctccgcctcctccacgcacttctcccacgcggtgaactcctccttgcacccgccgcccttcatgaagaggcagaacccgcactccccttgctcctcctccccctcctctgcttcgccggccccagcggaggcttccaagaccaccgtctccgctgaatcggccggccgcctccaccggcgtcag

SEQ ID NO: 40599 - DNA, 1279 bp, Setaria italica
  Peptide Sequence Number=SeqID_106573
tttggttttcgttccttaattttgttttttccgtttttttgttttttcttttttaaggttttttagtttttagtttttacttttagttttagtttcttttgtttccggtttcgttttgttcggttctttggtcctaagttgtcttcgtacttacctttaatttacatcttctccttcctcaaccactccgaacaacaagtggtagacatggagatccaagcacggcagcgactgttgggcgtttgcgccattgtgatggcgatgggtttcgccaatgccgtgcaaggagagacagagctgccggtcgttgtcggcttggccaagtgctcggattgcgcgagaaagaacatgaacgccgaggcagctttcaaaggtcttcaggtggccgtgaagtgcaggaacagcaacggtgagtacgagagcacggccgtggggccggtggacaagtccggcgccttcagcgtcccactggccgccgacctcgtcggcgatgacggcgagctgaagcgggaatgcttcgcgcagctccacagcgcgtcgagcgagccatgccccggccaggagcccctccaagatcgtcgcggcgccggccgtccaaggcggcggcgacaagactttcgtcgcgctcggcggcgaggtgcaccgctcgtcgtccgagtgcgcttcggcgatcctttgctaccctttcctccacaagcaccaccatgtagggatccacacgcccgtggttgtccctcacgtcccagatcacggccactccctgccgcctgtcaccaagcctccggtggtcgtgcctgagcacaagccgccggtgcccgtgccggagcacagcgcgcctccttcgacgccggtgtacacgccaccgtcgacgccggtgcccgtgccggagcacaaacctccgtcgacgcgaacccccatctaccacccgccggcgcagcgcaaaactgtcgctgacccgtagctctcggagctgctcccgttcttcaagaagttccctttctttcctcctgcagcgcactagaaagcttggtcagtggtttcttggcttttgcaggttatgcagagtcctcggaataaaggttgtgaggttgattagttcagcatgaggttgcgttaatttagattgtgtgtgctatgtattggagataattattaggtctcttgtgtaattttctcttaactgttttcatttatgtagctctggtaagaaattggaaattcgaaccatcattggcatgaaagcatgctaagtgctttcataagttaacataaaaaaaaa

SEQ ID NO: 40600 - DNA, 460 bp, Setaria italica
  Peptide Sequence Number=SeqID_106574
tttcggtacgttacgtttcttacgtttagtttttttttttttttttttttgttctttgcttacgttacagctaatgagcttaacaaaagcaagatatggacacgcggaccacaatgtttatctaggttacagctaatgagctacacaaaacaaatattcatgcttccttgaaaatatactggattccagactgagtttacagttgctccaatcccatgagtattgaatagatgtctggtgtacaaaacctcaaaacaaaagccaagcttcactcttttaactgggagaaacttgctagcatattcgaccttgaatttgctagctctacaatcaattcaagggctgtctcaaatgaaatttgggctgttcgtagttttggagacaccagtgctccaaagactgacaatgcttttgatctcgctctttgaacatgattgctagtgccagcatcagtagccga

SEQ ID NO: 40601 - DNA, 962 bp, Setaria italica
  Peptide Sequence Number=SeqID_106575
tttgtacctactaattgttttattcttaggtttaccgtcttaattgtagtctacaatgtttatctaggttacagctaatgagctacacaaaacaaatattcatgcttccttgaaaatatactggattccagactgagtttacagttgctccaatcccatgagtattgaatagatgtctggtgtacaaaacctcaaaacaaaagccaagcttcactcttttaactgggagaaacttgctagcatattcgaccttgaatttgctagctctacaatcaattcaagggctgtctcaaatgaaatttgggctgttcgtagttttggagacaccagtgctccaaagactgacaatgcttttgatctcgctctttgaacatgattgctagtgccagcatcagtagccgaatctgccgtggttgcatcactttcagggtttccatctggggtagtagctgatcctcgatgcctcaactttggctcagtactagcttgcttaccgacatcataggtggagtgacattcttctttcaaacaccacttcgataaggcaaagtgtggttttgactctgatggtttcaggccagcatgatcaacaacttgcagcttagtggcagcagactgttctttatgatcaaacagtgtacttgaaacacgtgatgggcccatagaatggcgagcacttgccagatcgagccacccctgacgaagagcggaggagagggagtccatgaggaagaggtaaccgtccaccgagtccatgaatcgcaggatctccttgtcgtcgtcgcctcgcggccgcccttgcttccccaccaccgcaccgtcgatctcccccgcgtcttccaccccaggggcggatcccaggagccgcggctcctccgtcgccgccgtcatccgatccctggatcccgcaacgctccgccgcaccctagtcaccttggggggccggccgggggcagcaggca

SEQ ID NO: 40602 - DNA, 441 bp, Setaria italica
  Peptide Sequence Number=SeqID_106576
agacttgcttcacacagcctgtcagccattgcactactaccttttctttccttttggttggtctagcttgtttctactacaaaagtatgaagtttgcttcataagcgcgaggagagaacctggaagctactcacaaagtttctccctcggagcttatgcgtagttaaggctctgaaatgagtaatgagtgctgaggatagacttgagcgagcttcctcccattctcatgctctgctagcttatggagattgccagtggtcatgacctgtaaccaaagaagaggaaaaaatgcgagataagcagctggaacatgagaaccagcagctggaacatgagaaccagggcaccaggaatggctgctgatctgcttggtactcatagaatcctcctcgccttgtttggagataaaggaaaccatcacaaggatatagagagtagaga

SEQ ID NO: 40603 - DNA, 578 bp, Setaria italica
  Peptide Sequence Number=SeqID_106577
aatcagaacatgcatacatccatccatccattcaaactgaaaaagttttctacagagtctgaccccagctaaacaagcatacgttcttgttatacacaaataaacgaagggacaagaaacagtttgaaaaggttcaattgtacgaaatgagctttatctagtgcctgatatgaatctgacaaggggtcatgccactcccaagcaaaagctccttcagcctgtcgatcatgggaccatgctccgagcaaatgatttcaacagtcataaggtgctcacatgcaaacgatctatttccttgctcgcccatgagtgctttaggtgcaccaacatactcttttagttccagagttagcttctcaagattaggtgagttctgaaggaagactatcaatccatagaaatttgcatccagacaccatgtgccaagagtcagcagcttaagattgttgaattttgggcaccactgcaaattatttccgagtatggccagctttgtttgtccaaaatacaagtccatttttctggcacaagaaaggcccaagagaaattgacggatatcatcaaccagagtatcattg

SEQ ID NO: 40604 - DNA, 541 bp, Setaria italica
  misc_feature (351)..(351): n is a, c, g, or t
  misc_feature (359)..(359): n is a, c, g, or t
  Peptide Sequence Number=SeqID_106578
gatttctccacttatggatgatctgaggaatttctgttctcacatgactcgacaacagcgcagcagcgacaaatgcacaaagtgcaagcattatcaacaccgaatcccatccccttcttgaaatgaagccagtaagaaatggacctaacgcagcaccaagggatcctgtcccatctataattgccgttaccgtggccagtgcacgagaatctcctttgagagacttgtgagtgccgagatcagcagaaactgcagttgttatcagagcatagggtccattaacaaacaggccactgatcatcatcaagccaatgtttgtcgcttttgaaatactgccatatgcatgaaagnggaaaagngatggaattgccaggtacatgaagactgcggcagttgtggctctagcattgagctgatcagatataaagccagcaagaattccacaacattccacctacatcaaacagaactgatagatatccagcagatgcagctgacatgtgctcgcctccaataggagtctggctcaagtgaatgggag

SEQ ID NO: 40605 - DNA, 2574 bp, Setaria italica
  Peptide Sequence Number=SeqID_106579
aggcggcggcgcccgcggaggccgcgcccaaggctgagcagcctgcggaggacgaggcgccggtcgtcgaggacgtcaaggaggacgaggacgatgacgacgaggatgaagatgacgacgacgacgacgacgacgctggtgaaggtgagcttggtgcaggggcaaccgagggctccaagcagagccggagcgagaagaagagccgcaaggccatgatgaagctcggaatgaaacccgtcaccggcgtcagcaggataaccatcaagagagccaagaacatactgttcgtggtgtcgaagcctgacgtcttcaagagcccgacgtcggagacgtacgtgatattcggcgaggccaagatagaggacctgagctcgcagctgcaagcccaggccgcgcagcagttcaggatgcaggacctcagcaaggtgatggccaagcaggacgcagcggcggcggcggcggcggcagacgaggaggaggaggtggacgagaccgggatagagccccgcgacatcgacctcgtcatgacgcaggccagcgtgccgagggccaaggccgtcaaggctctcaaggcgcacgacggcgacatcgtcagcgccatcatggagctcacggcctgataccatttgccttcgtttgctggtactgctgctgcttcgtcgtcagaaaacacccggtggagtcagatgcatcgtgtgtgtcgccgttcaattttgagatttgaataagatgttttgtttgttcaccttaaggacgttgtgatcatgtcagtttccagattagtgtcatcttcaagttgttaatcgaattctagtatatttctagacgagtctaaatgccattgcaaagatgacagttttgatcgtgcatgttactacacggaatgtgagaacgtgagatgctgtaagcagtaactaagcactgaatccatttttggacaacatagataccattattgtaaatttattggatcaatgcattgttctgtaaacaccttatacaatcgacgaatgagaggccaacaatatcctataccgacatatcctttcttctatagcaatttgcaactcctattgtgacacctcaatacctcaccagtaaatacctaacagtaaccagcggcctcaacaaaataatcctctaatctcactcctcagctccgcttattttttatttgtcagggctgaaaagcactgaatgggtataagaaggctgaaaagcactgaatggtataagaatgctgaatgcccccacatcaccactaccgccaccaagaacacaactattttttgccgtcaggcttgtcacggtaattcctattcaaaagctcaaggagaagaatggccgcagagtccttagccttcttcacactcggcattggctctccaatgcactcgtcagtccatccacggtcagatgtattcacccttaccgcataaacaaatcttttggcatgggcagggccaccctcgtttatgcacctgtattgtggcattggccattgccttctcaagcagatgtcgttcagggtctgcctagtgaacatctgagagccgtttttcttctcgctgtctttttctgaatctttctttgctgcggtttccttctccttcaagacaacaagcgcatttctcgctgccaatttttgtgccatcttcttctgtgggttctgacctacaccaatctgaataccatcaacaaaaacttcaacggtagctacattggctgtccgggatgctttgtattctaatccttcagcttgctgctggcagcgctcttggagctcccttacaggatgcattggaagggtgtccggtgttaccattggatcaagtaaaggctgaaaaaccttccagactatcgatgtattatacccactatcgaggaatattgccccagcaatagattcaaaaatgtctccaaggaccttgggagccttacagtccccaagcccaaaagaattgaaacctggttttgaaagctcctcctggacatcctttacaaactctcgaatctgtgtctccaatgcagacgatccatggcgaagatgtacatgcagcttatgcttaactgcaatccttgcaaagttctcattattaacagctgcagctctcaagtcagtcaagcgaccaggaggtaggtcggtataagtgaaaaataagtgctttgtaatgagatgatctaacacagcatcaccaacaaactccaagcgctggtaacatgaaacaccagatgacggccttgatgcatgtgtgatagcctcaacaagtaagcctttactctgaaacttgatacccagtgcaccttctaatgtgtcaaaattgatgcttttcattatgctctcaggtatgatatatgcctttgaaggagggatctcctgaggatccaactctgcatgaatcccaatccatctcatcaggtggtttgcagccatcttccctcctgctacatagtagacaccaataagtgcttccacgacatctgctaaagttttgcttgacagaacacgatagcagcttgaatctgcctcaatttcaccgtcttcttgcatgctatctgcatagtcatcataag

SEQ ID NO: 40606 - DNA, 714 bp, Setaria italica
  misc_feature (709)..(709): n is a, c, g, or t
  Peptide Sequence Number=SeqID_106580
atccctcagggaaaggcatatatcatacctgagagcataatgcaatgcatctcatcaggtggtttgcagccatcttccctcctgctacatagtagacaccaataagtgcttccacgacatctgctaaagttttgcttgacagaacacgatagcagcttgaatctgcctcaatttcaccgtcttcttgcatgctatctgcatagtcatcataagagtccttttgtaattcactactaggagtagattcctcatcaaagatggatcgttcagaatctcttgtttcttcatcaaatacaggtaacactcccggagctgcccatcttgatggggcaaaccgatctgcttggatataagattggaggcttttattcagagcatagtggtacaggatcatgttgctaaccatctgttgtcgcatccttgtgagctgcccctcgtgcttttgaggatattttaggaaaaggaatctacttacaacccatttcaagtatgcatcacccagcagctctgctctttcatagcagaatgtctcctgacatgatgcagcagtcaaggcttctaatatcttatttgcaggaaccggataaccaattatgtccttcagttgaattgcaagaagcatgctctccacccttctcattattgagggtaacctctgagctccacgaatgagtgatccaggaagaggatgcacaaggcacaattgggngtaag

SEQ ID NO: 40607 - DNA, 287 bp, Setaria italica
  Peptide Sequence Number=SeqID_106581
agaagaagcaacgctccattttcctctcggccgccggatggacgcgagggaggtgtgaagcctggtcgctaactgatgctcgtggagagattcggaggagaggagcgcgcggtgcggaggcggtggaggcggaagcgccgacgatttggacagcgcagcgacggaaggggagcagcaggcggacgaggggcgcgccgccaggaggacgacggttgccgccgccgccgccgccgccgccatgggcgagtcgctgctcaccgcgctctccatggacaccgcaacggccc

SEQ ID NO: 40608 - DNA, 625 bp, Setaria italica
  Peptide Sequence Number=SeqID_106582
ttgccagtcgatccagccgtcaccgtcaagtaacggcccccaccccacccccgcgtccaggctccttctgggggaggccgcgggtccgcggctcaccgggctggctgcgccccaccggcgcccgcctttaactctcccccgcctccgttaccgtcttcccccttcccacctcctccccacccccgcctgcgctgctcatccgtcgacccgggacgagccctcgccgattcgatttcgtatgatttgatttgattgcagcgcgcaacagggaggggatctctctggaccttcgtcgttgggcggcggctcggcggttcctcgatttgagagctccggatttcttggacctgcgtaggtagaagaagcaacgctccattttcctctcggccgccggatggacgcgagggaggtgtgaagcctggtcgctaactgatgctcgtggagagattcggaggagaggagcgcgcggtgcggaggcggtggaggcggaagcgccgacgatttggacagcgcagcgacggaaggggagcagcaggcggacgaggggcgcgccgccaggaggacggcggcagcgagagaggggaggggagccggcgggacccaggaaggctcgagggaggagcca

SEQ ID NO: 40609 - DNA, 493 bp, Setaria italica
  Peptide Sequence Number=SeqID_106583
acagtctttagatttggttattgtgttttggtgctttaccctatactttgaagtgcaattgcagttttaccatcgttttttgaattttgtaattttatcctttactatttacaactcaacgcaattttgtctaaacaaaatcatgttaacttatgaatataaatagtaaaagaacaaaatcataaattaaaaaaagggtaaaactacaattacaattcgaagtagggcaaccgctcctgttatttgtaccacaaccaaaagcccaaccgaacgaaagccgaaaggccaccgacgccgagcgcttcaagcattatgggccaggcttggctacgaaaagcccgctctatttgccggggcgccgccttggcccaccgcaggaagcatttcgggcaacaaaaatattgcccagcgggctgggtgatatataggacaaagggtcgggctgtgcttttgggctgctcagcgtgtaccgatagactcaaccgtgtgaacc

SEQ ID NO: 40610 - DNA, 1049 bp, Setaria italica
  Peptide Sequence Number=SeqID_106584
cgaaaaaggaatcaaattcagatgagtcagatttagcatttgactctgatgatttctgtgaggagattgcaaaaactggtggacatgatgaagtttcatctcctccattacccgatggtaaggtggatgatatggaaaagagcacttctcaggctaacacagcaaattccaatgatgaccctatggagactgaaatggaccagagtgtggttttaccagtttcagggagacggcagactgaacggttggactacaaaaaactgtatgatgaggcttatggtgaagcaccatctaattctagcgatgatgaagaatggtctgggaagagtacaccaagaaaaggccatgaagagagtgaagctgattctcctgcaggaaaaagctctagaagtacaaggattgtacaccatagtgatgaactgactccacagagcgctcaaaaaagcttgcatcctgattctcttcatggttcggttgatgagaaacatgaagatcttacttctaatggcagcaatagtacatctaagaaaggacattttggtccagtaattaatcagaagctacatgaacattttaagacagaaccataccctagccgttctgttaaagaaaacctggcagaagaactagggctaacattccgtcaggttagcaaatggtttgaaagtaggcgtcatttcacgagggcagcttcttcgatgaaaggcatctgtccagataatcatagccctgaaaatacaaatagtccagtggccactagtaagcaacttaacgaacctgaggggatggagatggaaaaaactaatgcatgcggaaacaaggatgctaccatctctagaaaagtgggctctccaaaagttggatcaagaaagaatcgtcgcaagaatgcctccgcaagtgacgtgagagggtcaaaagttgactctgctgaggaccaggttccagggctggaccttgcagacaaggcaaggcaaaaggcgatacagcgggagatgatgaagaagaaaaagggcagatgaaatttatagccaagatatgagccaaaattt

SEQ ID NO: 40611 - DNA, 777 bp, Setaria italica
  Peptide Sequence Number=SeqID_106585
aatatataatcgatgaactcctcacatacaaaggtggagccatcctccgaagggattgatcgcttccttttaacttttgttggcacctttgtctgcactacgctcacatcaccaaggtgaccaaagctcacctccctgttaagccattcttcaaggagcattgctcttcctcctttgattcggggagctggtcctgaagtggtcaaacgccctctgaaaaacacctctgcatctttgtgcccgctccatctgtcgatttgtactgtcttcaccacatgagccagctgtggcttcaaactcagcatagctgagccatactttcaaatgcttcgttctaccaagcaatctctcataaagcttcctcgctctatcaaattcatttccatcaatttcaaactccaagtactccttccatatgagctctggattatcaagggttggctgagcaattgcaagctcatatactgcttgagcacgatcagactcaccaaggttcttttccaggtcagcgtactttctccaagcataagagtttgctgcataacactcgatgaatttctggtaaagtgttctcacacggtcaaagttgcccagagatacctccatctcaatgtatttattaaacaccttaggctttggagcaaccccaattgaatttccaagtattcgccttgctgcgcttaaattcctctgcctgatctcaaactgggctgccatcagccaaatttttgcaaaagtgaatcttttgtgagggattaggttcaggcattccctgta

SEQ ID NO: 40612 - DNA, 398 bp, Setaria italica
  Peptide Sequence Number=SeqID_106586
cacctatctatgcatctactcgccttgggacaagcacagcatgactgggagcagcagctccagctcgtccagaaatgtaaaacagcagtgagtaccaatgataaggctcaagaacgttcttgcctcacagaagcagttcggcccttttcaccgcaggtgctgcaccattgtatagatgtcgccatgcgccgcatctggggaaataggaagaatgggagccccgcgaaggaaataggcggaggagaagcggagcatgccgacttcctccacttccgcctctcctcgcgctagggaccatgcgaccccgaccggcgaccgctggtggccttgggatcgatcttgtggccgtgggtgggggtgaagggggtggatcgtggggccgtccggtctttggggta

SEQ ID NO: 40613 - DNA, 2792 bp, Setaria italica
  misc_feature (1)..(67): n is a, c, g, or t
  Peptide Sequence Number=SeqID_106587
nnnnnnnnnnnnnnnnnnnnnnnnnnnnnnnnnnnnnnnnnnnnnnnnnnnnnnnnnnnnnnnnnnnggatgacttccatttttttttataaatcacacaacatataatgtagattgatgatggtatcctgcagaggtccaattatttgttctcccagttttgcttcctcattcaattacatgaaaatcaagtacgtaaaaagtagtaggcttggttcatgagcttttggccttggatttctttgctttgaacctttgttacttgttggtactctaagactcatgtagagtttgcctgccaagtgaaacaccaaggcgaaatcagagtctcaatctaccaaaattgatgaagaaaaaccacttgttgagtgagatcctcagcagcatcgtagcccaaaacagcccagcaagcctaccactcagatcgtggtgaccgtgcgtcgtcaaacacaacctgaagccgacgagccaacggcgacaagatagctgtccacccccaccacgccggctcttccactggacaacgacgaatcaaagtctgggtgctgcaggttaattatcatggtcttggtactgtcaattcgaagtgggtgctgtagaaaaccattgatctggaaaagctcgtttcgttgagacccggcggtggagagatgaggataacaatgtggtttttatagtgactgctgtcggtgtcttcatgatccagcttgagtacgtcaaatcagtttgcgaatcttttcaagaacagtttcagaaccaccaattttccctccacaagtttctatactgcttactgcaggtgataactgtgctccccagattttgcaatatctactgctattttcttgtagaactgtttctttatatccaccagaaattgaagctcaattgtttgttttgcacctcgtcacatgacatcattttaaggtactgcttgtgcttaaaccatgccgccttcctgtcaccaactgcaacagtactgcctcaacacaatcctcgtcattacaaacacatctgatcactgaactccagctctcaacatgcggagtcactccaagatcaagcatccaagtcatgatttgtgcagcctcctccactttcccaactccacaataacccttgataactgaatgaaacaaagaaaaatgaggcacaatccctttacccaccatatccaccaggtacgcctccgccttttcgtacaatccgcttacacacagcccatttaccaatgttgcatatgtcgctgcattcggtgtgcatccactgtcaaccatatcaccaacaaccttgcaggcatccaatggccgcccctcgcggcacattccaacaatgaccgtgttgtaatgcacaatgtctggggaaactccacggcctcgcatgagacaaagcaagcggtatgcctctcggagctgcttcttgcggcagagggcgttcaacacggtggtgtatgccagcggatcagcagggatgcccctgtgcagcatttcgtcgagcaatgtagccgcagtgcggacctgggccttgcggcagagcgactgggtaaggatgcggtaggtgtcagcgtcgggggatacatggagtgagcggagacggtggaagagggatagtgaaacggcgacgtagccagagcgagcggcggcctcaattagcaggttgtgggaggcgaggacgagtggcgtggggaggggtagccgcgaggagacgaggcggaggaggtggagtgcggatgggaagtgggagacagtggaggagaggacgccaaggaggcgaagaaggacctgtgggtggagcggcagggggctacggccggagacgaagagggagttgaaggtggagaggaagagttgaggttgccgacggaggcggagcactgcgaggatgagcgggagcagaaggcgcggagacggcggggacgggaggcggcggaggagcgctagcgcgtggggtaggtggtcacggcggcgggcgaggcgaagcaggagagagtggagcgtggcagggtgcggagtggtagtcggggaggtgatggtgacgagctccagcgcgaggagcgggtttggctgcgaggtcaccagcttgtgtagccgcgccggcgagatcgccggcggcaatgggagcatcagcgtggctgtatagcagcttgagctggcaatggcgtacaacggagcggaagaggactagggtcgggaaaaagatttgggttttggactttttggttggtggcagtatgggccgggctgaaagtggaccaagacgtttgtgggcctctttggttccagcaaagggcacctatctatgcatctactcgccttgggacaagcacagcatgactgggagcagcagctccagctcgtccagaaatgtaaaacagcagtgagtaccaatgataaggctcaagaacgttcttgcctcacagaagcagttcggcccttttcaccgcagggaaggcaccctttgtatgaattaggtgagagaaaaaaacaacaatgaagcataagctagctattaaaaaaatatgctagaaatgctactcataattgaagatttccctttgaactggtggggaaccattggtgctatatagaactaatatgacaaactatcacagtaaatccagcttggcactagtatcttggtttcagtgccaaggcaagaacatggacttggaaacatccagtctgtaacatgcagactcagcctgtgtataatcatttggaagaccacagactagttgttcaaatgtaaatatgttgtcattaaatttgctccatagacaaactgtgacctcc

SEQ ID NO: 40614 - DNA, 439 bp, Setaria italica
  Peptide Sequence Number=SeqID_106588
gaacaaatgaccttccaccttttccaatcctccctttcttcataatgggttcaactgatatcagtttgttttctattgttctttgaattgtttctgggaatgattagtttattttaagccatgaaagtggacgattatattagaaggaaagcaacccacctgtggttccggagtttttacagagaaaaacaaaatcgatgcctcgccacataaaagcgataagtggatgtttttaaaataacatctgccacaggcagtatttgaaactggcacatgtggcatttgggagaatgtttacaacattttcgagctatcatgttaccaatttttagcagcctatatcggtgaatctggattgtatactacaaactcttgttagtatctcctttaggatcttttagggctactgccaagtagtgatttttctgaagtcctccaa

SEQ ID NO: 40615 - DNA, 557 bp, Setaria italica
  misc_feature (531)..(531): n is a, c, g, or t
  Peptide Sequence Number=SeqID_106589
aacaaataacgaaaatacgttacaacaagcaaagaagaaattaagatggctggcagtgcaagagtgacaggagcgtacctgtgctgcctcaccgtcgtcttggcagccatgtgttgttcctcctccccgtacgaggtgcaggacttgaaagacgacatcatgaaaaactgcaggttttacatcgagaaaaatatgggcagcacgtttccgccggaggaaagtgtctgctgccaggatgtgaggcgagcaaacgtcgcaaatatctgccaggagtttactgaccaggacaaggagaaaatcgcgctgcacaagtgggctgcggtcacaaaggtgtgcaggaacgccttggccgcagggactaattgtgccggttacattgttcctccgctgcatgcgtaatcattgttaattaagcccacttggttggggcgtgctcagccgagaaatatatgaataaattatatatgtggttgtatttgtgtgcatcgtccgggaatctgcgtagtgtaccgtcatttttatcaacgcaancagttgtaataatataaaaaaaaaaa

SEQ ID NO: 40616 - DNA, 717 bp, Setaria italica
  Peptide Sequence Number=SeqID_106590
caaagctctctcttcctttactatgtttatcttgctgaagctggagttcttttgcattatctattatgcccaaggcatctaaagtttcccccaaagagtcagttgatggagatgaagttgtttcctcctctatagtttccaagatatgagcacttgtgccttggtcttgagtattatcggcttgactagaagattcagccaagttggttacaagacccagtcttgtgtaaatttcttcctctagacactcgtcatgatcttgagcatattcatagattaattcctggatctcaaaatcattaagaagatctcccacagcctcatagcagatgttattgatgtagaaatcgattccgtcaataacttgtttccgggagggggagctggtatttgagtaacttgattcgagatggacaagtacaccaacataatttctaacaaaagcaatcatatccaagatatggtgttcatcaaatgcacttatgcattcaaggaaatcaacacaaccattctcttgaacaaacatccaaaaggcgataataatcatcgaaagggatggatcaatttcaaaagaaaataacaagcaagagaacaaccagcgcactttcttaaggtaggggtgtgaagccatggatgttagggaagaagaacttgaggagatagttgatgtgttggaacactagatatataccaatggagataatggccaatgttctg

SEQ ID NO: 40617 - DNA, 681 bp, Setaria italica
  Peptide Sequence Number=SeqID_106591
caaaggatgatgcatcttcctctgatggtaacgatttcaccttgccatagttgcacgcccgcatgaactgttggatcccatcaatgaagtgttcttactggtaattgatcaattatatagtaatcttagagaatttcaatatgagtatctcgtatgagtgcatagaaaaattttaccgcatattttagttgctagaaagtacctaagccaagtgcttttccattgtgaaaaattcctacctgtcttgtaaatacaaaccaaagaacattgttatttgctaataaataagaattgagaagcagcaattacattataaaaggaagtttcggatcaagattaggtccacatgtccagcaacctataggctacaaggcgtagagtaatacactgactaatcggagaaggtaaaaaaaatcaaagaaaccctacacagatagaacatgtggattcttgagaatcagaatgaccacattggggaggaacggaaaaatacccggggtcgaagttgaagcacacatgttcatcgttgcacatcctggtgacggggaacgggaactttgccgtgtgccctgggcacacggtaaagacactaaaatactcggcaaacctttgctcggcaaacggcccacggccaaaattgtaaacggcaaactaagtttttcgtcgggcctcggcaaagtc

SEQ ID NO: 40618 - DNA, 825 bp, Setaria italica
  Peptide Sequence Number=SeqID_106592
actaccatctgcaccatctgattcatcaaatgctgaagttccttctatcgatgcacaaaatgttgaggcaggaacaggtgtcagagaaactcaaagcatcctcctagaaagaatagccagtgagatgaaccggcttaaattctacatcagtcacgcacagaacctcccttttattgagaacatggagaaaagggcccaaggtgctacaaaattgcttgatggtagcttggagcgttgctttgtggatggtctggaacaccgtgatgcgaaagttatttacaactgtttgcgcgcttatgctgctatcgacaatacatcatccgctgaagagcttttccgtacaacagtggtctccccattgattcagaaaatagtccctcaaaattatgcaaaagcagttgctggtgcatcttctgatgggctggaagatgattatgagcagataaaacaatgcgtagaaaaagattgcaaatttatattggaaatatcttcatcagaaaattctggattgcatgtttttgattttctgggtaattcaatactcaaagaagtcctttctgcaatacagaaaggcaagcctggggccttttctcctggaaaacctagagaattcctgaagaactacaaagcgagcttgggatttcttgattttctggttactgccaatccaagtctgctgtaacaaagttccgctctgagcctgcttacaccgatttcatgcggcaatggaacgttggtgtctacttttcattaagatttcaggaaattgcggtggccttgattctactcttacaaacacaattagtcctgttggaatgaacgagg

SEQ ID NO: 40619 - DNA, 1528 bp, Setaria italica
  Peptide Sequence Number=SeqID_106593
tttgttattttttctttgggtttaattttcttaatttactttcttaaagttaagtttcctttttcttgtctaattacagaaaggcaagcctggggccttttctcctggaaaacctagagaattcctgaagaactacaaagcgagcttgggatttcttgattttctggaaggttactgccaatccaagtctgctgtaacaaagttccgctctgagcctgcttacaccgatttcatgcggcaatggaacgttggtgtctacttttcattaagatttcaggaaattgcgggtggccttgattctactcttacaaacacaattagtcctgttggaatgaacgaggctcaagggaagccgttgctcttgaagcaaagtattaagctcttagaaagtctgcaggcctgttggagtgatgaggttcttgttttctctcactgtgataaattccttcgtctgtcattgcagcttatttcgaggtatacagcatggctgtcatctggtctatctgcacgtaaagcttctgatgggagtccaaattcgcctgcagatgctgaatgggcactgtctatacctatagacgatttcatatatataatgcacgatgtacatgctgtaattggtgagctttcagaatcaggcagcttcattggacacgtgaatcaattactagcatcatgccccattgaagtgcttaatcttgtgaagcaaagtatactgcaagctgttgaacctttagaggaggtgttgcctgtcataatgaatgtcatgattggaatcatagttaagaagtctaatgaggacctgaagcacctgaaaggaataacagcgacatataggatgacgaataaacttccagtgaggcattctccatacgtatcagggattttacatccgctaaaggtgtttcttgaaggggagcgagtaagctatttatcagaagatgataaaactaagctgtgtcgtggatctacagacaagatcactgcaatttattatgatttggtctcggaagttgtcactgtggcaaggaaaacggagtcttcattgcaaagactgcgccaaggtgcacaaagacgagtaggggctagtacggatgcctcagataacatcatatccgatacggacaagatctgtatgcagctatttcttgatattcaggaatatgcacgaaatcttcgtactataggtatagatgcaagggaaattgattcctacagagctctatggcagtgtgttgccccaaaagacaaacaagagaacattcagttttgatgtaaagaacgctatcagtatataaaatgaattgtcatccatagatctctccccatgagtaggtgtatctgatgttgtccttttggctggaagtaagtatgatgcattcatagataagagaactggattttgatacattcgtttattttattaggatgatcggctccagattttacagctataatccaaaattggagaatgtgtatcgaaacatgatttcattcgaaatacaagtatactgttgacccctggtttaaa

SEQ ID NO: 40620 - DNA, 780 bp, Setaria italica
  Peptide Sequence Number=SeqID_106594
ccctcgacaagagacttgcaaggctaccatcctcgtcaactcgtgccaagagctcgaggtgggcgcactcgccgccgtggggccgcacgacgtgctccccattggtccggtgctcccgaccggcgaagaggccagcatcttgaagccggacgacgccaagtacatggagtggctcgacaccaagccggcgagctccgtggtgtacgtctccttcggaagcctggcgacgatggcgagggagcagctcgacgagctgctccatggcctcgaggagagcgggaggccgtacctcttggtggttcggaaggacaacaaggcgatgctcgccggagccgaggcggagatgggcgaacgtctcaagaacggcatcgcggtggagtggtgcgaccaggcgcgggtgctgtcgcacgcggcggtgggatgcttcgtgacgcactgcgggtggaactcggtggccgagagcgtggcgagcggcgtgcccatggtgggcgtgcccaaggtttcggagcagagcatgaacgcgcggctccgcgcgcacgagtggcgcgtcggcgtgcgcgcggaggtggacagcggcggcgtgctgcgcgccgcggagctgaggaggtgcgtcgaggaggtgatgggggacgggacggacgcggcagaggtgcggcgcaaggcagaggagtggaagctggtggttgcagaggctatgcgcaatggaggatcgtcgtattgtagtctccttgcaccgtctacgaatgccacgagactacaatacgacgatcctccattgcg

SEQ ID NO: 40621 - DNA, 577 bp, Setaria italica
  Peptide Sequence Number=SeqID_106595
gttccctcgattgattatttgtcgtctcagaagctagggcgttgtgatttattccatgtagagaagtatgttgaagagcatgggactgctggggaaggtgggaagaaaatgctgaagacactcatgttttttgaaggctgtcccaaaccctttggttgtacaatcttgctcaaaggtgctaatggtgatgagctaaaaaaagtgaagcatgtggtgcaatatggagtatttgcagcctaccacttggctcttgaaacatcattccttgtggatgaaggtgcaactcttccagaactcccactgaagtcaccaatcattgttgctttgccagataaaccttccagtgctgatagatccatctccacaatacctatcttaccaatccctagtgcttcatcaccaaatagtagcctggaagcccttgagttgagaaatgatgatttgacatttagtagcactaaaagaatggaacagacagcattgggagttcgttctgatgaaatcaatgtccaaaatggacacattacccgtttgctggatgtagctcctcaatcatctattggtcccttggttcagc

SEQ ID NO: 40622 - DNA, 1146 bp, Setaria italica
  Peptide Sequence Number=SeqID_106596
agaactccactgaagtcaccaatcattgttgctttgcccatcatcatgagaagtgcgtacagagagaggagcagctggcatatcttaccaatccctagtgcttcatcaccaaatagtagcctggaagcccttgagttgagaaatgatgatttgacatttagtagcactaaaagaatggaacagacagcattgggagttcgttctgatgaaatcaatgtccaaaatggacacattacccgtttgctggatgtagctcctcaatcatctattggtcccttggttcagcattcaaacatttcatcttgccaatgtcctgattgtactagagatgtgaatagaaatatgaatttgcaatacagccaacctggaaccactagacatgtgctggttaatgacttaggtgcattgccttctgattctacaaatttgctgtctgttaagagtgacaattcatttgccaagaattctgagattggttacaaggtagaagatatgccagctgctcctctcaatgtacagatttctcatgatgatgacaatgcaaaggataattcagttgccaaaacagatgaaattccagcatctcctgctgacaatcagagtatattggtttctttgtcttctcgttgtgtttggagagaaactctctgtgagcggccacaccttcttcgcataaaatattatggtaactttgacaaacctttaggcaggtttctgcgtgaccagctatttgatcagagcaacctttgtcagtcttgtgagctgccaccagaggcccatgtttattgctatgttcacccccaaggcagcttaacaatatcagtaaggaaactttcagtgaagttgcctggtgacagtgaacatgatggtcgaatttggatgtggcatagatgcttacgctgtcctcgagttaacgggcttcctccagcaactaaaagagtagtgatgtctgatgctgcctggggcttgtcttttggtaaatttttggaacttagtttttcaaatcatgcagcagcaagtagggtagccagctgtggtcattcgcttcacagggattgccttcgcttttacggctttggtgaaatggttgcttgcttccgatatgcgtcaattaaggtccactctgtgtatttaccaccaccaaaa

SEQ ID NO: 40623 - DNA, 817 bp, Setaria italica
  misc_feature (769)..(817): n is a, c, g, or t
  Peptide Sequence Number=SeqID_106597
gttctacagggttcaaacagcctcaaggatgttcaagttgctttcagcaccgaccacaagtacaatgaagccaacaaggtggaacaaccagacagccctttgaagccaacaagtttaaatgcatttgacatcatctcgcactccaaaggatttgatctgtcaggcctgttcggggaccgagagcagaaggcgaattcacggttcatgacccaaaaaccggcatcagcaatagtgtcaaaactggagcagattgctgagacagagcgcttcatggtgaagaaacaggacggactggtgacactgcaggggtccaaagaagggaggaaggggcagctcgcaatcaacgcagagatcttcgaggtgacaccagccttttatgtcgtcgaggtgaagaagtcagcaggggacacactggagtatgaaaggttctgcaacaaggacctgagaccttcactcagggacatctgctggagcagtcaatcagaggagaagcttccttcaatgactgagtcatcacattaaagccatcctcttagtcagtcgaaagatatgccctttaagcgcaatctcttcagagatgcgactacagctaccctcctttctccttttccccccctttctcaaagggctaagaccttgctcctttgagcaggaggttgtagggctctttgtgagcctttttgccagttttcttcttgtagtagcaattgttgaacatggaactcctgttcctttcatcaatagaagcacgatgatcagcactgtaacnnnnnnnnnnnnnnnnnnnnnnnnnnnnnnnnnnnnnnnnnnnnnnnnn

SEQ ID NO: 40624 - DNA, 266 bp, Setaria italica
  Peptide Sequence Number=SeqID_106598
agtgccgatgaaagtgatatctccattgctgttggcaaaaatgtgccataggcaggtatagttagtttagctgtaattatatgcataatttatttccattttcacatctgaagttttggttgagcgcacaggaaaataactaggcttgaaagaaccattttcacatctgaagttttggttgagcgcacaagaaaataactaggctagaaatttactttcaagcccattgttttaacgtgtaaaaatggtaatcaactctcaggaag

SEQ ID NO: 40625 - DNA, 346 bp, Setaria italica
  Peptide Sequence Number=SeqID_106599
gcgcgatggtgccgagggagcccttcttgggtcggccgcggtggcgtacacggtgtagacgaggccgaaggtgacgatgatctccatcaccacgccctccaacgcgccgatgcccgacaggccgtgggtcggggtcgcctgcatgcccaagagaaaacttgcgtcagtgttcggtttgcttatcgagctctagctgccggcggcgaacttgttgacgtactacgccggtggagtactggacgaggacggcgccgacgatggcgccgaggagctgggcgatccagtagaagaggccggtgaggatggtgatctggccgccgagggcgaggccgaaggtgacgggggg

SEQ ID NO: 40626 - DNA, 505 bp, Setaria italica
  misc_feature (449)..(505): n is a, c, g, or t
  Peptide Sequence Number=SeqID_106600
gcaacaagctgagagttctgcacgtgaaccgctgccgaaacatctgtgaccagagtttgatagccctcggtgatggctgtccacaccttgaagttctgcacataaatggctgtgccaagattaccaataatggtctggctttttttaccatttccaggcctcatgtgaacctaagggtggatgaagttatgtccattggtccatccattgagaatttgttccggatgcaatgatgagaggttctagttagattttctatgtttgggcttacaagttctagcccgtctcattacaggtgattgattcttcagtcattatgctgcgtgttatgtttgctccggtgcgtacttatttcttcgttgtaaaatatcatactgaagggtgttgtggactgaacaatatatataggtacaaatgagttgaattcaaatcatttgtactttaggttnnnnnnnnnnnnnnnnnnnnnnnnnnnnnnnnnnnnnnnnnnnnnnnnnnnnnnnnn

SEQ ID NO: 40627 - DNA, 523 bp, Setaria italica
  Peptide Sequence Number=SeqID_106601
atgtcacatgtcgaccgccgacgtaaatgtggaaaccttcaactccggcctgtatagtcaaaacaaacagcctctcctctacaaaggggaatggccatgtcatggctggtttctttgcacgccctatgaatctcttcaaccatgaagttgtcttcgactccttggtgtcaacaatatcattacgtatccatttctcacatttggggaatccatcaaccttgtcctcgttgtcgtcggtgggcgtgccgtcgcaacgctgcgcggcgccccactgcatcctgtagcatgtgttgtgctcgaggatggggtgctggctccagtcccccctgagcctcgggttgaggtgcagtatcctgggcggctcctctccatcaacggcgcgcagcccctggagctcgaccatgaactgcgagaccatgacggtgccgtccccctggcgcatccgcgcgagctgcggcacgtactccctgtgcgcggcgcggggcgtggcgacgacggtgacggaggagcccgcggcgaggcc

SEQ ID NO: 40628 - DNA, 607 bp, Setaria italica
  Peptide Sequence Number=SeqID_106602
attctgccgggatttgtgggtcaacaacgtgatggcgattcggaaatgggaccaatgacctggttgccaatattgactggtgctactggggttcaggaaggaacaagctgtccacctaattttggcagtaattgtctcaaacttgcatcttcattagcatcgccaagtcatgaacctgttcatcatcgtaacagaagtcgcagatactcggagatgagctttgccttgtgaaaagttgacagttgaagtggattcactaaaccagctttgagtctgtagaatttgcatgatctattgccattttgctggacagctcagatctttctcaagaccaactccccggattcttatagaactacagatttttctcttttgttttcttcacctagcaggtttgactaactgctgtggtcatctgcatgaattggaccattctatggggttgcagtatcccactcttaggtctctcatcatgagaagaacctgaggtggcggttactgacgctaactcttgttcagctctgcctctgatttcgtcttctgcagtagcttcctgctgggttgctcgccttttgaagaaaatgtgctatgcacgcatttcactaag

SEQ ID NO: 40629 - DNA, 544 bp, Setaria italica
  Peptide Sequence Number=SeqID_106603
aaacaaaaagaaacaaacttaactaagtctgtagtctaatcggaagtaacagtgtgagtagtggagcagagaggacctgttttttcgatggtggcagcctttttgttggtgatatggaagcaagaagctctacccaatatgaaccaggttccactagcactccaacaaaattgccagttatgctgttcagtggcttgcatcctatggggcctggtttcccctctgtttctatgattctgccgggatttgtgggtcaacaacgtgatggcgattcggaaatgggaccaatgacctggttgccaatattgactggtgctactggggttcaggaaggaacaagctgtccacctaattttggcagtaattgtctcaaacttgcatcttcattagcatcgccaaggtaaattcaaacttcatcgattatcatgccttgtattacagatttagataccatactctcatttctggtacatattcaaagcgagtatttatgaccagatgtattatgtgatattttaaccactagttccaatggcagctagta

SEQ ID NO: 40630 - DNA, 1036 bp, Setaria italica
  Peptide Sequence Number=SeqID_106604
gtttttttttttttttacagtagctgataagtgtatgcttcaaattcatgccaacatcacaaattcacaaagcaagctgggcaacacaaataccgactgatcatttaactatttgttcttcattggggttatatcatccgtaactcttacaacaaaaattcacaaacatttcaattctgccacttcctgaaattttcttacatgctcacaatttcaccagccatattttgcttgagtttctgctttcgtaagaatgcccttcgagcgcctctccgcaagctccatctcctttgacttcatgtcaaagtacagagaaccaatctggtgcttccttttgtgcaacttggatggttttcctttcgcagatggggcaggctgataactaggaccaaaggccagtccagtaagcttggacgtatcctgcttaggtcgattcttcatcagctctgcctgatctacctctaaaatctgcgctggcatatcattcctgcctctcttcccgccaatcctacccatctccggtggcaatactggttcttgcgttggtgctgccacctcatggacataccctccagtataatctactccatatggcgctgccgcaacatactcgtatccaccaccatgctcccctccgtgtgaatgaacatacccaccactttgctctcctccagatgcagcatactgtgctccagccacataatttggattggcactaggatcccagccataattcgcaccatattgagcatagtagtttggatcccacgcataggcttcatatccactggtgctcccggctgctgcataatagccttgctgttgctgctctccagctgcagcttcgagaccctgctgttcttcttgcccctcctccagctgctccggcacaggcatgtcctcctcactgccactatcctctgaatcgtcgtcatccgaagcgacatcaggcttctcaggcgctccagtgttggcaatggagcctgaaggcacgggcgcgccgagattcgacctctacggcgcagccgtatcgata

SEQ ID NO: 40631 - DNA, 1224 bp, Setaria italica
  Peptide Sequence Number=SeqID_106605
ttggtcgtccgtctacggtcactaggggccggccgcgtctcgtgcctggttatcgacctcctggcgtcgtgggcgataccggtggccgcgcggtgcggcctgccggttgttgggttttggccggcgatgctggcaagctatcgcaccgtggcggcaatcccggagcttatggacaagggtctcatttctgaatcggatttcaattgcaacaaagaccagaacattgcagatctcgacatattgccggctaagttaaaccttagattccaagatcttccatggctcatcagcaatagcgcagtatcccagaaatcaagactagccttctggttacagatagcgaatcgtgcgaaaagcctcagctacatccttgtcaactctatccccagtgaaggtggcgactctgacaagtatgatccaccacagggtcaggaaatcctccccatcgggccggtattactcaatgacgactcgacgaaggctactgcagtgtggcagactgaccagacttgcattgactggttagaccagcacagtgttggttcggtgatctacgtttcattcggaagctgggctgcacctatggaacctgagaaaataagtggattcgcacatggtttggaggcctctggccaaccattcttgtgggctctcaagaaccacccatcatggagagcaggcctccctgacgggtacatggagaaggtagccggccgtggcaagattgtctcgtgggcaccgcaggatgacattctgaagcacgaggcagtggggtgctatatcacgcactagggctggaactcggcattggaagctgtacggcatggggttcgcatgatatgctacccgatcaattcagaccatttcgtcaactgtgcatacatggttaacatgttggagattggaattctgctggttagcagtgacagcagcgatgtgaaagattgcattgaaagagtcataaaaggcaatgaaggaaggcatttacagcaaatggtcaataaaatgagagaaacaatcacggttggtgaggcaatgtgtgttgccaagaggaatctcagcctattcatggagagaatgaagaacaactagctaaatgaagacatcaaaagaggacaagtaacaccggaaaactcataaaatgagggtccatggttccccaggttttttttgtatttcggagtctattttgattttagttggtaataattccctatgtatatg

SEQ ID NO: 40632 - DNA, 430 bp, Setaria italica
  Peptide Sequence Number=SeqID_106606
ttttaacgtctcaaaaaaagctgataagctcattcacagggggcctcatcctcggcaggtccttccttgcgtcaaccccatggcgtccccaaccccgatgagttggagctcctgtctcaatggcctgagcaaccacatacagctcctactgtttctgcggggagggttgggatggagaatctcgatctaaactcgcagcaagaagatttcccctacattgaagagtactcggcattactcgatcgtggaagaggccgtgccgatggcgggagagcagcctcgtttcaacctccccgtcaaagcgcaagtggtattccaattggacggggaaggagtgctacacgaggttctggccgtgcccgtggaagaagtgtctgcgcatcacattcaccgccggcaggtgcaagtcctcccctccgtcaatcattaa

SEQ ID NO: 40633 - DNA, 260 bp, Setaria italica
  misc_feature (9)..(9): n is a, c, g, or t
  Peptide Sequence Number=SeqID_106607
tcgcgtcgnggccgacggtgggggtggacgtgcggaggaggggggacgacgacgacgacgatcgcttggccttgcggcagccgccgccgacggggacgttgcggaggacgccgcccttggtccagtaccggcggcagctcttgcagaagtggcgcggctgcgacaggttgtagttgttgtagtagcagaaactggtgttggtggactcgcaccgcgggcacttgaccgcctcgggcgccgcggccgccggcgagaccccg

SEQ ID NO: 40634 - DNA, 1586 bp, Setaria italica
  Peptide Sequence Number=SeqID_106608
ttaatacatattctacaggcacaacattgtcacatgattaacagctttctccaatggattacacgatcagaaatggtagatcgatttggcgaagagattttgtaaatcaccggttcaccacccttaataatctgtatatcctgctgtgttagcccccaagtcgatcgccacacacatgaacaacaccaagaaccgagaaaaaaaaatagaaaccaaacaaccagagagatcaaacgccatatgtgaacactaataatcacctccacctcttattaactccgatccttgtctctatccctatcttcacatgctgacaacggcgcgtgcatgcgccatgcatggcgcgccgccttaccaagggccgccgccgccattgctgctgccgttcccgatgatgctattgctccagaatcctggggtctcgtggccgccggtggtgacgccgctggccccgctgccgtcgcctgcttgatctttgctgtgctcgtactgatcggctccattgttgtttgcgcccccagctgcgctcaccgccggcttcaggtcctcgaaagggaagagcaacctgccggccgcgctctcctgcactcctagcccggcgctgtaacccccagcgccgccaacgccgcccgtgccgtgcgtgtccagcgagaacccaagcacgctctgggagtgcggcggcgggggcatgcggaagtcgccgagagcgaatcccgcggccgcgtactcggccggcatccctagctgaacatgctgcagcggcacgtagcagccggtgctcctcagcagctccatcgccgagagcgcgcctacacccctgccggcggcgccgtttcccgccatggtcgccccggggttgcacacgctgctgctctccaggctcgggaacgccgagaactccggcgggtgcaggccgcggccgttgtggtgcgggaacgccaggttgaggtcgtgagcgccctcgtgcatcagcttggggtgtttggctgcgagccccacggggatcgtgccggacaccgccgcggaggtggaggcggcggctgtggccgcggacgacacggccgaggacgagcgcttgttcttcctggagccgccgcccacggggacgttgcggagcgagccgccctcggtccagtagcggcggcacgtcttgcagaagtagcgcggctgctgcaggctgtagttgttgtagtagcagaacttggtattggtggagttgcaccgcgggcagttgagcgcctggtcctgctgtggccgcggcttacgctccccgctgccgctcgccaccacctgctgttgccgtgcctgcttggccttgacgttcctagctgcaactgcttcctccctgggcagaggtgatgccaccatcgccgcctcctgcttgtttaacagagtagatggcgcagtagtgttgctggtggtgctggagatcatgtccatggatccttccttccttccttcttactagcaaggagttgaggatgaattatcgattggcagccactaatcagatccctctcgtcgctgttgagaggaatagggagagtgagagagagatgaggactgtgagagatgccttttagttt

SEQ ID NO: 40635 - DNA, 1143 bp, Setaria italica
  Peptide Sequence Number=SeqID_106609
tggagatagattatatgaagaaaatagcatgtgcgatgcacgatgactattttgccatcatgaccacaactagctgattgttaactagactagtaccgaattgcattgactgctgggttcccttcctttattcgcttcttcttcacaatgatggtgcgttgcacggtgatcattgccgcacttatgtcatcgatcagacgacgacatggatgatcagatgacagcatggatgatcagatcgatccttgccagtaatactcgacgccgctgctgccacctgatgccccgcctccgttgttgttgttgttgttgtcgtccatgtccgcactgccatcaccaccaacaacctgctgctcctgtgctgccaatgaaggccactgctggaacccaccaccagcagcaggcatagggagctctagtgcctgatccacaccctgcaggagccccaccagctgtgggtcaggtgagccacccaccatcccatgcccatgctgcattgtaccaagcaacggcggtgctgccatccggttgttcccgctgtcaagaaaccctccggtcagtatgtccaggagcgatggcgtcgtgccagggttgaacaatggagacaagggcgggaagggcagggagtggtggtcactgctggggagctcaaagccgccgcctgtcgacatgaacgtcgggagcacgttggggaagtcggcgggcataggtgccgtagcagtaggcatcatcgacagttgttgcgtgaggttcatcttcttggagtcgttggagctggaggatggtgctggtggtgccgaggaggaggaggatgagcccccggcgcggttctgcttgttcttccgggagccgccgccgacagggacattgcggagggtgccgccctgcgtccagttgcggcggcaggccttgcagaagtagcgcggctgcgtcatgctgttgttgttgtagtagcagaacttggtgttggtggagttgcagcgcgggcagttgagcccctgctcctgctgtggccgcggtttacgctcgtcggcgccgctcgccaccacctgctgctgccgttcctgctttgccttaatgttcctagctgcagcagcttcctccctaggtgatgccacccctgtgaataggtagaatacgccg

SEQ ID NO: 40636 - DNA, 1070 bp, Setaria italica
  Peptide Sequence Number=SeqID_106610
ggatcgattatgcaaactaaactaattaacgcatgcagttgatgatgaaaaactaattattttaaggaacatgcatgatcaaatgtgagagctgctccagtaggtgctgatgatgcctgcagatgcgccgccgccgccgccgcccatgtcgtcgtcgtcgttacccgcagcatcagcagcactgccaccatcaccaccaccaacctcctcctgctgctgctgcggctcctgcactgaagctgctgccgacgatccaccagcagcaaataaaccaccgtcgttcccatgctgtgacgacggcagccactgctgctggagcccaccagcagcaccagtcatcccaggcccatgctgcagcatcatcgcaccaaacgacgacggcgtcggcagaaatggcaggaggtccaggaacgatgacggcgtcgtgccgggattggacggcagcgacaagggcgcgaagggcagggagtggtggtcactgctggggagctcgaagccgccgacgccagtggccgacatgaacgtcgggagcacgttggacaagttggcagcagtaggcggcggcatcatcatcagcagttgttgcgtgctgctgttcatcttcttggagtcgctggagctggaggacgatgccgatggtgccgacgggttctgcttcttcttccggcagcggccgccgacggggacgttgcggagggtgccgcccttggtccagtagcggcggcaggccttgcacaagtagcgtggctgcgtcacgctgtagttgttgtagtagcagaacttggtgttggtggactggcagcgcgggcagttgagcgcctgctcctgctgtggccgtggcatacgctccccgcccgcctgctgctgcttggccttcttgacgttcccagcagcagcaggtggtgtatcgctgcctcctcctgcttgttctggatagtggatggcataatagtgttgctggtagtgttgaagatcttgtccatgggttccttctccttccaccaagcccgcagcaaggagttaaggatggaggaaggaccggtcgcagcctccgatccaatccctctcgt

SEQ ID NO: 40637 - DNA, 482 bp, Setaria italica
  Peptide Sequence Number=SeqID_106611
ttgaagcaattaaactctaagtatcaaagacatcctaaaaaatattttgaaaacatttatgtaaattacctactatcatattttaattttatttattattaataaattataaattgcattatagttatttaaagagagaaggaaagtatcataatctatgttattttgttagagtaatatttttatatacagagaaaagttagtttttcatggaacatatttcaaatttaggttcagcaattgttaatactatttcagtatcatgatctggaggtagtgctgaattagctaataattgattcatctcttttttacttttttaaatcactttcttaattttaataaaaaatatttgaaattgagtatcttttcttgtagagagaaaaaaattatcttttaaaaaatagtacttcaaataatgataaaatcgagtgatagaaaaattatccaaattagattctagttatattcatttgaataat

SEQ ID NO: 40638 - DNA, 423 bp, Setaria italica
  Peptide Sequence Number=SeqID_106612
gtaagcaggaagtgctacttatatcaagaatggtactgcattctgataatctattattgtcttgctaccttccgtgtcatatagttcaatgtgctgctgctctcagcaggaaaaacaaatgaagtaactgcatcaaagagcacatataatatgccgcttcattaggtccaaaaacaactgagtttaccaagttatcatatagcatcagctgggtttgtcccttgatggttcaactgtcatttctagtgctgtgggttttgcttatacaacagaatttgaacaaccaattaacttttctacagaaggcttatcattttaataatatgacctaccatcttcatggaaacagtgagcaaaaaaaagggcataaacctacttcaagaaaaattattcacaaacacagctacaactgggtataagctg

SEQ ID NO: 40639 - DNA, 606 bp, Setaria italica
  misc_feature (594)..(594): n is a, c, g, or t
  Peptide Sequence Number=SeqID_106613
atatcaaattttagatgatgatgatcatatgtcagaatgtttgaattaggacttgcattcatggttggaggaagtaaaaaaattgagaggcagttgttacctgtgcggtagtagtgacaatctcaatcttagaagtgtccatcttgttaaaatgtgccaactaaataaaattacattagagctattatgtgaaaagttgatcaataaccaccctcactttgttattatatataactgcagagaatgcaacagtatatgatttgtatatttttatgatattgccagttcattaatatattacttggatcatgtatatactaatggaaggaactcggtaaatattccaagttcacttttgattgaaatggaaagaaactgtgtaaattatcctagattggcgctatttagtcaaacaatataatacatagagtagctgttactatatttttcactatatgcttctacacatagaattgtagcaataataacatatgtaaggaaccaagagttgaaattgttacatgaaccacaacgaaattttgttaatatttgtgtcaggagttagcaaaactgaaaataacaacaaaatcaatntggacaaaagtg

SEQ ID NO: 40640 - DNA, 480 bp, Setaria italica
  Peptide Sequence Number=SeqID_106614
ctaggtgtgaacgttccctactgttccatcttaaaaatttgtatatgtatagatctatggaacactaactttttatgcctgttactctttgtattgtactaggaggaaagtgccaatgccagcagagacacattatttttcttgagactattgtgtcattcttgtatatcgatattagttctggaaatgaatggtacctttgtcttttgagagctgcatatctaatgatgcaacatcacatcttatctagcttcggtcatgttaaacttgtcaaggataattcttattagttattggcaatatgtgcaggaagtagttagtttttttgtccatcgcaatttgctggttcaatattttgatctctactttttttcactccttgtaaattttaaacaacagggatctcaacttgtttcgtcttataaatccatctatagtgagctatgaaaaagctttaacatgtatgcttggtacttttca

SEQ ID NO: 40641 - DNA, 285 bp, Setaria italica
  Peptide Sequence Number=SeqID_106615
gagaacactgttattcttaaaaatacaaactaatacaagaaaacaaatatctcaaataaaactgctacaggaaaaagaaagaaacaaaattattatattctcatatgtagaaaatcagaaaatcaaatggaaatacggttgtgcctatttgtggtacagttaaaactcattgtgaaataaagctgaagctacagattatctaaaacaaagaactgttcaatttcatattactttcccttttacatatacacttattgtctatggaactttatgtttgctaataag

SEQ ID NO: 40642 - DNA, 230 bp, Setaria italica
  Peptide Sequence Number=SeqID_106616
aactgcgacttcaatagttaggtggtagtattcaaaatcatgtttggcatctggatggatgcaagaatcacatctgtttttgactgttcttccatcttctttgtattggtagggtcagtattctcctcaagatcgccatcatcatctgattgttcctttgatgtgccactgttagctggcttgcctcgaaaatcatcatagtctatgatgtttgagtttgtaactagatc

SEQ ID NO: 40643 - DNA, 382 bp, Setaria italica
  Peptide Sequence Number=SeqID_106617
taagaaagaaagtttaagaaatacaaaaaacaaaggaaggacaagaagggtagaaccaaattttgatcaaggcatcagtccttagactagaagttaacaagaaggacggaataattaaaaagctgaggccacagttcgagagaaggatgaagaaaatgagatgcttcatcagcggcttcaacaatatgaaaaccgatggttagagtacgagcagaaaatgaaagctatggaggaaatgtggcagaagcaaatgcggtcattgcaatcaagcctttctgtagcaaaagaagagccttgctctggatgagacccctaggatgtcggactcatccgtggatcagagctgggagatcaatggaaaccatgttggcaggtgggtctc

SEQ ID NO: 40644 - DNA, 162 bp, Setaria italica
  Peptide Sequence Number=SeqID_106618
ttcattacattctgagactgcatcaacgttctcatcagatcctgaatcttttgctcataggagccagcttggtgcctatctctccactggccaaaggaatttctgcattttggaggtcgagcttggtctgactgtcttgaaatggcgcacatacgtcactga

SEQ ID NO: 40645 - DNA, 221 bp, Setaria italica
  misc_feature (78)..(78): n is a, c, g, or t
  Peptide Sequence Number=SeqID_106619
atgcagttaaaagtttaacagcaaacaataacaaaaatgtgtgatgcagttaagatgaaccaacctttcaagtttacngaaaacaataacaaaaatgtgtgatgcagttaagatgaaccaacctttctcctcatagtctcaacatcaactataagatttctattgcagaatttcatctagtatgatgtattcatatatctgaggttactactcctccgatt

SEQ ID NO: 40646 - DNA, 550 bp, Setaria italica
  Peptide Sequence Number=SeqID_106620
gtattttaagggttcaaagctgtttcagagggcatcaagcacgttatcatgcgagagaacgaataagaggagttttggatcttcaatcattcattcgtggtgagaatgcacgacaaatttattcgtctctgtcgaggaaacatagggcagcaattattctgcagagaagtgtgagatgttggcttgcaagacggtatttcacaaatatccggagggcctcggtggtaatacagtctggtattcgtggtagtcttgttcgaagatgtaacggcaatattgatctaataaacgtgttaagagagtttgaatcaaaacaggtatgtaaaatgggcgccttatatcgtgctgctggtagtcatatgctccgtactgttgcttctgatccatctgatttaattcagaactacatgaattttacattgttattgtttcaggaggcagagggtgaccaaattttgatcaaggcatcagtccttgctgagttacagaggcggatattaaaagctgaggccacagttcgagagaaggatagaagaaaatgagatgcttc

SEQ ID NO: 40647 - DNA, 372 bp, Setaria italica
  Peptide Sequence Number=SeqID_106621
tcctcaacctaaggctctactgcctccaaaatcttcctgccaggcccttttggcataaacatttcgccctagttgcttcatagactgacatgtatgcaattgtgaaaaggtcataaataccatcaaaggaagcttgagaaatcaattgtgaagtatttgaagcttgtgtgttggggtagcccaacgaagattcttgtgatttagcttcctgaaaaaatggacttacataaacatcacagcaacaaagcggcaaggggcttggtgcagccagtacacgaggtttctatcactgctaagctccggaaagccactagtactgcacatccttacccacatagtaaggaaaaatgatatatttatagcttgcagttc

SEQ ID NO: 40648 - DNA, 940 bp, Setaria italica
  Peptide Sequence Number=SeqID_106622
agaatttcatctagtatgatgtattcataataatactagaaggttaactaactacctccgattcacaacacatgtcctttaaccttaagatagtgtacatgtcgcagtatggatctcacccagatgtgggtggctgcaagcttcataacacaaaacttaagctcgctagaacattaaaaggcaagctcatcagagagcaatctttataacccatgttacctatgagcaaaagattcaggatctgatgagaacgttgatgcagtctcagaatgtaatgaatctccatgcatcctcttctgcaggttctccaagctagcgacacgtcgcataggagccagcttggtgcctatctctccactggccaaaggaatttctgcattttggaggtcgagcttggtctgactgtcttgaaatggcgcccggagaaaatgttccatgctgtcttcaatggcgacagaagcagaagctgcatcagatgcacatgaagtcaagcgcatgctactcgcgggcttgtcagatgtggtgggtaataggagggttgttccagttagtctcctgacagcttcctctgctatgttcacacacaagcattatgaaatgtttgtatggtagtatcctgtttggactcctcatgtgcggtatcgatgttctcgagatagaacagcccttccacgagggaaacaccgcaggtctaatgggacacacacttggagcactgcgacatggtatgggcacttttaatattttgtttcattttacaactcctcacacctttctcctcatagtctcaacatcaactataagatttctattgtcaagggttgcatccttgtatttctgagtcatatcagccaagcgctttagcaaagatgcattctcagatgttaacctggaaacctgtgattcaagatcggtcaggtgttcttgcttcctctttctt

SEQ ID NO: 40649 - DNA, 1053 bp, Setaria italica
  misc_feature (994)..(994): n is a, c, g, or t
  misc_feature (1011)..(1011): n is a, c, g, or t
  Peptide Sequence Number=SeqID_106623
cccacggctccccttccacctccggggccgccgcgtcggcgccgtcgtcgcccagctccccaccacgcatccagaggtagcttctggggacaagaagatcagatggtcttcaagggcggtgcggtcatttgcgatggcggaactggaggcacggaagatgaggtatcctaccacaggcacggaggggctcctcatgggcattcttgttgaaggaactagtggtgcggcgaaacttttgcgtgctaatggaatcaaccttctcaaagtgcgtgaggaggcagcaaatgtgcttgggaaatcagaaatgttttactttagtcctatgcatccaccattgacagaagctgcacaacgagcccttgattgggctgccagtgagaaactgaagtcaggtgaggatggagaagtaactgccaaccatttgctgctggggatatggtcagataaggagtcagctggccataaaattctggcttcgcttgggtttgatgatgagaaagccagattactcgcccaaacggccgatgaagaggctgcaatgagtcctagatagcaaagtgaggacctagttattattctacttctctgaggctggtgctgtgcacttggcaacctcaatgcttactggcgcctcgagttccatgggcgctcatctagttacctggaggttgcttctgcaaagtttggggcatgagatgtgttaggttgaatctgatatttgactctcactgagtcactgttgctgatgcctgtaaaaacattgcgattttctttgcacgattgcttttgttccttgcgcagctggatttgtgaactgtgaggtcaaatccgatgtttgtactcactattgctgatgcctgcaaaagcatcacgaattctttgcacgttgagcttttccctgcgcagctggatttgtgaacttctggtaaatgacctttttagggtccagattaagtggacatgatgcttccttacaaaaaaaaaaaaaaaaaanaaaaaaaaaaaaaaaanaaaaaaaaaaaaactaaagagacaacgacaacagggagtagg

SEQ ID NO: 40650 - DNA, 3579 bp, Setaria italica
  Peptide Sequence Number=SeqID_106624
ggaggcagaggaggtggcggagaagggtggaggcggagaggaggtggattccgcggctgcggcaacgccgaggcggctgtcgcccacggcagctgcgagccccacccaaggcgacgccaggtggggtgacaccagctcgtacggtgctaagaagaagcatagagttttttgtcagcttccgaatggtgattgggcattgtgcactgtacttacaacctctggtgacgagtccgtcctaaagatttctgaagggaaagtattgcggttaaaaacagagagtcttcaacctgcaaatcctgaaattcttgatggagtggatgatcttatgcagctaagttatctaagtgaaccatcagtactgtacaatttgcagtacagatactcccaagacttgatttatactaaagcaggcccagttttggtggctgtcaaccctttcaagaaggtttcactatatggtaatgagtacattgatgcatatagaaataaaacaatggacagtccacatgtttatgcaatagcagatgcagctcttcgtgaaatgaaaagagatgaagttaaccagtctataattataagtggtgagagtggagcaggaaaaacagaaactgcaaaaattgctatgcagtatctggcttctcttggaggtggaagtggtattgaatatgaaattctgcagaccaatccaatactcgaggcttttggcaatgcaaagacattgagaaatgataactcaagtcgttttggaaagcttatcgaaattcatttcagtaccactggaagaatatgtggtgccatgattcaaacatttttacttgagaagtccagagttgtacaatgtgcagtcggcgagcgatcctaccatatattttatcagctatgtgctggtgcacctgcgtctcttagagagaagttgaatttgaaaaaggtggatgagtacaaatatctcaagcagagctgttgctattcaattgctggtgtggatgatgctcaaatgtttcgaactgtgacggaagctatgaacattgtccatatcagcaaagaggaccaagaaaatgtttttgcaatggtttctgctgtgctttggctgggggatgtttcgttcacagtaattgataatgaaaatcatgttgaaatcattgtagatgaagcttcgaaaacagtcgcagaactccttggctgcagtattgaagatctcaatttggctttgtcaaagcgccacatgaaagtcaataatgaaaatatagtccagaaacttacccttgcccaggccactgatacaagagatgcactggccaaatcagtctatgcaagtttgtttgagtggcttgtagaacaaattaataagtctctctcagttggcaagcgccggactgggcgatcgatcagtattcttgatatctacggctttgaatcatttgataagaacagttttgaacagttctgcattaattatgccaacgagaggctacaacaacatttcaatcgccatttgtttaagcttgaacaagaggaatatgttgaggatggcattgattgggcaaaggttgactttgaggacaatcaagactgtttgaatctctttgagaaaaaaccactggggttattgtctctgctggacgaggaatctactttccccaatgccacagatcttacttttgcaaacaagcttaagcaacatcttaactcgaattcttgcttcagaggagaaagaggcaaggcatttgctgttcgtcactacgcaggagaggtggcttatgatacttcgggttttctggagaagaatagagatttattgcacatggactccatacagctccttgccaaatgcaaatcttctctgccacaattttttgcatctaagatgctagctcaatcggataattctatatctgttccatatagatctagtgctgccgattctcaaaaactaagtgttgctatgaagtttaagggacaactgttccaacttatgcaaagactggaaagtacaacgccacactttattcgctgcattaaaccaaataatctacaacttcctgcaatttacgaacaaggacttgtgcttcaacaactaaaatgctgtggggttcttgaggttgtccggatttcaagatctggatatccaactaggatgactcatcagaagtttgctaggcggtatggctttcttcttcttgaggatgttgcatcccaagagccacttagcgtttcagttgcaattcttcatcagttcaatattttgcctgagatgtatcaagttggctacacaaaattgttcttccgaactggtcagattggcaaacttgaagatactcggaatcgtactctgcacggtattttaagggttcaaagctgtttcagagggcatcaagcacgttatcatgcgagagaacgaataagaggagttttggatcttcaatcattcattcgtggtgagaatgcacgacaaatttattcgtctctgtcgatgaaacatagggcagcaattattctgcagagaagtgtgagatgttggcttgcaagacggtatttcacaaatatccggagggcctcggtggtaatacagtctggtattcgtggtagtcttgttcgaagatgtaacggcaatattgatctaataaacgtgttaagagagtttgaatcaaaacaggaggcagagggtgaccaaattttgatcaaggcatcagtccttgctgagttacagaggcggatattaaaagctgaggccacagttcgagagaaggatgaagaaaatgagatgcttcatcagcggcttcaacaatatgaaaaccgatggttagagtacgagcagaaaatgaaagctatggaggaaatgtggcagaagcaaatgcggtcattgcaatcaagcctttctgtagcaaagaagagccttgctctggatgagacccctaggatgtcggactcatccgtggatcagagctgggagatcaatggaaaccatgttggcagtgggtctcagctggtaccacgcaccaccgggcgggaaatgaatgcggggctcagcgtcatcaaccgcctaacagaagaatttgagcagcggagccaggtctttgctgatgatgccacgttcatagttgaggtcaagtccgggcaagcggatgccagcctgaacccggacatggagctccggaggctgaagcagaactttgactcgtggaagaaggacttcggcggccgcatcagggagacgaaggtgatcctgaacaaacttgggagtggcaacgagtcatcacccaactccgtgaagcggaaatggtggggcaggctgaatacctccaagttttcgtgaatttatgtgtgaatgcgatgtgtagatgcgccggtattttacacgccggcgcggttcctagcgcctagagtttatattctacgggtgttgtgaaagtccagtgtgttgggctggatttgtgatccgtggagggcgagttgtatagttcttccacgagggcttcctttgaagtcaaggaccactgagttgtgatgtaattacttgctgaaatagttgttaaagggaagattgtgagattgctacaaaaaaaaaaaactaagagactg

SEQ ID NO: 40651 - DNA, 3481 bp, Setaria italica
  Peptide Sequence Number=SeqID_106625
cgaggtgcgagaaagaaagcgactttcctccgagcatggcgggcggctgcgccgaagacgacgtggtggaggtgagctgcggcgggggcggccgcgaccccggcgcctacgcggcggtgctcaagaggaggctcgacctgtactgcgccgccgtcgccaaatccatggaagctaaatcacaagaatcttcgttgggctaccccaacacacaagcttcaaatacttcacaattgatttctcaagcttcctttgatgatgatggagatggggcagatctagttacaaactcaaacatcatagactatgatgattttcgaggcaagccagctaacagtggcacatcaaaggaacaatcagatgatgatggcgatcttgaggagaatactgaccctaccaatacaaagaagatgaggagaatgctttcaaatcgagaatcagctaggcgatcaagaaagaggaagcaagaacacctgaccgatcttgaatcacaggtttccaggttaacatctgagaatgcatctttgctaaagcgcttggctgatatgactcagaaatacaaggatgcaacccttgacaatagaaatcttatagttgatgttgagactatgaggagaaaggtgaacatagcagaggaagctgtcaggagactaactggaacaaccctcctattacccaccacatctgacaagcccgcgagtagcatgcgcttgacttcatgtgcatctgatgcagcttctgcttctgtcgccattgaagacagcatggaacatttttctccgggcgccatttcaatggcgacagaagcagaagctgcatcagatgcacatgaagtcaagcgcatgctactcgcgggcttgtcagatgtggtgggtaataggagggttgttccagttagtctcctgacagcttcctctgctatgttcacctgaaaacaatactttgctatcaaaataaattagaaggaaaccaattatgtctatttctacagcctttgggtaggggaatatgaaggcagttgtggctcactcgtaactcaactagaaatctattgcaatggagttttgtacaatgcttattagcaaacataaagttccatagacaataagtgtatatgtaaaagggatagcaatataaaattgtaaagacatgtttcttttattatatgatcatgtgcggttttgttaattacttagattttcgtgaagatttttgttttataaaacatgattgagacagatataggataagacaattttgcagttagtttacatgaatatgttaaagcccttaaacatgaacactttgaaattcaaaaacacctttactcatgatgcaacaatacagagttgcacatactcacacacaagcattatgaaatgtttgtatggtagtatcctgtttggactcctcatgtgcggtatcgatgttctcgagatagaacagcccttccacaagggaaacaccgcaggtctaatgggacacacacttggagcactgcgacatggtatgggcacttttaatattttgtttcattttacaactcctcacacctgtaagagaacactgttattcttaaaaatcaaactaatacaagaaaacaaatatctcaaataaaactgctacaggaaaaagaaagaaacaaaattattatattctcatatgtagaaaatcagaaaatcaaatggaaatacggttgtgcctatttgtggtacagttaaaactcattgtgaaataaagctgaagctacagattatctaaaacaaagaactgttcaatttcatattactttctctccaccttttagccatccaaagaaatgtaaacattgatctagtctctgtgcagagccttagtacaaatagctgcaactaatgctccctatggagaacaatagtatgataatatgcaaattgatgcagttaaaagtttacagcaaacaataacaaaaatgtgtgatgcagttaagatgaaccaacctttcaagtttacagaaaacaataacaaaaatgtgtgatgcagttaagatgaaccaacctttctcctcatagtctcaacatcaactataagatttctattgtcaagggttgcatccttgtatttctgagtcatatcagccaagcgctttagcaaagatgcattctcagatgttaacctggaaacctgtgattcaagatcggtcaggtgttcttgcttcctctttcttgatcgcctagctgattctcgatttgaaagcattctcctcatcttctttgtattggtagggtcagtattctcctcaagatcgccatcatcatctgattgttcctttgatgtgccactgttagctggcttgcctcgaaaatcatcatagtctatgatgtttgagtttgtaactagatctgccccatctccatcatctgtgtgcggaaataaagaaccaaaacagtacagtaagatatgtaaaatacaatggcaatgattcaatatggtctatgctttccaaaccacaatgcagcatatctgcacactgctgttaggaatagcccagcgcaactcactaacagagttgatgtcagtgttcagtataactgaagcagatcagactattcatgtctcaacattatatctgacctcaccagcattactcatagtttaagatcatttctccgggacaattaatcaaacaccatatggacgtcaacccaccacaaagctaatccagaattgacatttctactcacctctctgattccttgggcattagttaacctattgtactgaaacttctggtgagatcagatcttcatcttctgtatgtaattatcacagaagactatcctctagctgatggttcagcgtacttgaaccaaggctgagaatcaagtgtactaggacaactgaagtttggtatctaatgttctattagaatgttcaacagggtgaatgttgaattgaataggattcgacttctaacacactttggcattagacctcatggcggaccacatttcctcaacctaaggctctactgcctccaaaatcttcctgccaggcccttttggcataaacatttcgccctagttgcttcatagactgacatgtatgcaattgtgaaaaggtcataaataccatcaaaggaagcttgagaaatcaattgtgaagtatttgaagcttgtgtgttggggtagcccaacgaagattcttgtgatttagcttccatggatttggcgacggcggcgcagtacaggtcgagcctcctcttgagcaccgccgcgtaggcgccggggtcgcggccgcccccgccgcagctcacctccaccacgtcgtcttcggcgcagccgcccgccatgctcggaggaaagtcgctttctttctcgcacctcgtacctcggtgagggcctgagggggaaggaagggagctgggagcaacctgagcaatggtggacaccggaggggaggccgcgtttataccggcagcgttgctggggcgccagtgggcgag

SEQ ID NO: 40652 - DNA, 2172 bp, Setaria italica
  Peptide Sequence Number=SeqID_106626
gggggtcgtaaggaggaggagaagaggaagccccgcgtgctggtagccggcggcggcatcggcgggctggtgttcgcgctggcggcgcggcgcaaggggtacgaagtgacggtgttcgagcgcgacctgagcgcggtgcgcggggagggccagtaccgcgggcccatccagatccaaagcaacgcgctcgccgcgctggaggccatcgacatgtccgtcgccgaggaggtcatgcgcgccggctgcgtcaccggggaccgcatcaacggcctcgtcgacggcatctccggctcctggtactgcaagtttgatacgtttactcctgcagctgagcgggggctcccagtcacaagggtcattagccgcatgacgctgcaacagatccttgctcgtgcagttggcgatgatgctatattgaatggtagccacgtagtcgattttatagatgatggcagtaaggttactgccatattggaggatggtcgaagatttgaaggtgatcttttggtcggtgctgatggaatatggtcaaatgtgaggaagacattatttgggcattcagaagccacttattcaggttacacatgctacactggaattgcagactttgtgcctcctgatattgacacagttgggtaccgggtatttcttggtcacaagcaatacttcgtctcttcagatgttggcgctggtaaaatgcaatggtatgctttccacaaagaagaggctggtggcactgaccctgaaaatggtaaaaagaaaagattgcttgagatattcagtggttggtgcgataatgtcatagatctgattaatgcaactgaagaggaagcgattcttcgccgggatatatatgaccgcccacctactattaattgggggaaaggtcgtgtgaccttgcttggcgattctgtccatgctatgcagccaaatctgggtcaaggtggctgcatggctattgaggatggttaccagctggctgtggagcttgagaatgcctggcaggagagtgtcaagtctggaactcctatggatattgtttcctccttgaagcgttatgagaaggagagaaggctgcgtgttgctattatacatggattggcaagaatggcagcaatcatggctaccacttatagaccatatctgggtgttggtcttggacctttgtcgtttttaaccaagctgcggataccacatccgggaagagttggtggcagattcttcattatgattggaatgcctgcgatgctgagctgggtccttggtggcaacagttcgaagctagaaggaagacctctaagctgccggctttctgacaaggccaatgaccagctttatcgatggtttgaggatgacgacgcattggaacaagctatgggtggagaatggtacctcttccccataagtgagggaaacagcaatagcttgcagcctgttcgtttaatcagggatgaacagagggcaatctcttttggaaaccggtcagatcccagtgactctgcatcttccctagcattgcccatgccacagatatcagaaaggcatgctaccatcacatgcaagaacaaggctttctatctgactgatctcggaagtgaacacgggacatggattactgacaatgaaggtagacgttaccgcgtgccaccgaactacccggttcgtttccacccctctgatgtcattgagtttggttccgatcagaaggccatgttccgggtgaaggtgctgaacacgctcccatatgaatctgcaagaagggggaaggcagcagcagcagcagcaagtccttcaggcagcataaactgagacaccagccaccactcctaccatcagccacactgtactgtacagcattcagtaaacccgcgacactgcatcagagaaagaagatggaagaacagtcaaaaacagatgtgattcttgcatccatccagatgccaaacatgattttgaatactaccacctaactattgaagtcgcagttctatgagaataacttagttgtacaataggaataggcaatttagctgttgccggactgtgtacattgttgtaccatcaaagaaaatactgtacaccaagaaggcatattgtaattacggcaggaacacagttatactgtgataatgtaatatataagtgagataccagccaccagttctttaaaaa

SEQ ID NO: 40653 - DNA, 434 bp, Setaria italica
  Peptide Sequence Number=SeqID_106627
cggtttggtccttctccacggagagcgaggatcccagcagtagagtgtcgcgaggcgcagcactcgagaggaggggaagcagtgataataggaccagaaggatggtgaagaaggttgccatggctgaactgaacagatggtttggatgaggggggctgcttctcaaggtctcatatgtccaagttgcacttcttgattctcctctatatggtggttgcggtaggcatggtgggtaggtgttcagaaatcagaatcatgtctatatccacctgttccttcatgtttaatatggttgacttgagtcaatggtggtactttgcctttatattaacatctgatatgcgttatcctgtgtcctaaccactatgtggctacgtaaccttgtctgtttgttgttactttaaactgtgccttcgaacaagtggcagatttca

SEQ ID NO: 40654 - DNA, 464 bp, Setaria italica
  Peptide Sequence Number=SeqID_106628
gtcggcgagtgcctggacggcggcgaggtcgtcggggtcgtcggagtcggtgaggtcggcgaggagggaagcggcggcggcggcgaggtcggcattgtcgtgggtgaggagggaggcgagggaggaggcgaggccgatggggacgaggtcggggaagagctcgggggcgccggcgaggaggcggaggcggtcggcctcggcgtggagcgcgatctcggagtcggcgaagcgggcggggtcgtcggggtacttcatgcgggcctcgaggttgtcgcggaggcggcgctcgaaggccagcaggaggcgcttgccggcccggaggtcgagcacctcgacggcgtcggcggccgagaggtcgacctccccatcaggccgcttgcgcttgtgggcggcggcggcggcggcggagtccatggccaaatcctccctcctcctcctcagctagggtttcgtttggcttggaa

SEQ ID NO: 40655 - DNA, 532 bp, Setaria italica
  Peptide Sequence Number=SeqID_106629
aaagaaacaggaacagcaaattcatgagtccaagtatgaagataacccaataagcatttctgtattcagaaacatgttccaagcctttaatttcataactgctgaataggcacaaaaacagtacagtacactgattcaacaaaaatgttcaaataaaattggctgctggtcagaaaccttaaagacagtttcagggatcaaacactgaaagattgcatgtagacaaccttatttagctggactactgcagagctagcgcgttgttctaccggtttgttaacttctaccaagatgctttcttaacccccgtcagttcacccttgtttgccaatgtgcggaacataatacgggacatgcggaatttcttgtagacagcacgggagcggcctgtgaaaatgcagcggtttctaaggcgtgtcatggagctatttcttggcaactttgacaacttatagcggaacttttcccgcatatccaatggaagatcagggtccctacagacagacttataaagctttcctcttaagctcat

SEQ ID NO: 40656 - DNA, 444 bp, Setaria italica
  Peptide Sequence Number=SeqID_106630
ttaatttagattaggaaatgtgatttttttgaagtggactatagcggcctgcctctcgtgtatattggatcgggtttcgtcaatgcatagcagcagccacaaacaaacccgttatccggaaactattagctttaatgctactcctttcttcagtttgaattatatgttattttcattcactttgtcaaaattgtcaagagtattagaaaagacaacatcacattcaatgcaatggctgagctcgtgctaaagtggaaaatgtttctgatcccgatagtttctctaccacttttcatataaaccctgaacattttgcttgggcgcacctgtcatgaataccatcatctgctacacccttttggtttatgctcctcacgcatctgcttagtgttttcacctctgtttcaggaagaggtcggccaaccttggattggccgacaaggc

SEQ ID NO: 40657 - DNA, 388 bp, Setaria italica
  Peptide Sequence Number=SeqID_106631
gcgctaatgctggtcaggatctgactctgaccaagtcggctggttgtggttctgggtgtggtggcggctgcggtagtggcacggtcatcgagggctccaagacaagccacgccacgtctggcggatgcggttccgggtgtggtggcagctgcggcgccctgttcaactccagtactgctgccggccagggcctggccaagtcggctggttgtggctccggctgcggtggtggttgcggtagcggcatgatcatcgaaggctccaagactacccaagccaagtctggcggctgtggttctggttgtggtggtggatggtgggggaggcgccctgttcaattctagctgtgctgccggtcagggcccgcaagtcggctggctgtggttcc

SEQ ID NO: 40658 - DNA, 378 bp, Setaria italica
  Peptide Sequence Number=SeqID_106632
ccacatcgatgcattgttcttccaacaaccgttgaaacagtgctagaaaaattaaagcacccattttttatggtcgttgtctaagactggtgcttgattagatctcatcatcgagtggatgggcacaaatgctttagtaatttttgaaatgctaatcctatcaattgtgctggtgtcatatctgactggttgtcgcagactcgcaggtcatcagatgcatactttcttggagcaatcaattgagttttggatgagcaagtaaagcttacttggtatcttgaaaaaaagagtaagctttcttgtttctggttcaacctgcaaggtagttgacaaactagcaatgattttgtctatttcaactatttgtgatgataaatc

SEQ ID NO: 40659 - DNA, 603 bp, Setaria italica
  Peptide Sequence Number=SeqID_106633
ctcaatctagcgtcctagctgccaccacgctcatccctctccttccccgtcgaccagcttgaccccgtcctcctgtagccctcccattttgttccccacaaccttctctccatcgctcctcagtcctggtgccgctcgtagccgccgtcgcggctatgaccaagggctgggtccaaagggtgcagcaggatgaggaggaggaggagacgactcgcttgaatcgtacagcttcagcttcaatgaagattggcaagcgtgactggagaaaatggactcgcaggtcatcagatgcatactttcttggagcaatcaattgagttttggatgagcaagtaaagcttacttggtatcttgaaaaaaagagttgcaagacactccaaagcaagagggactatgatctactgaagagcttgaagaccttttcatcttatggctcaggagcaagaaatgaggcctatgagcattgtgtgatatttccactgaattctgtggtgtcattagagcctatgctgagtaatttgtagtcttcgttgtaagtattattttgaattcaaatataaaataaaaatatttcatttgttgggctgcaagcctagaataggg

SEQ ID NO: 40660 - DNA, 488 bp, Setaria italica
  Peptide Sequence Number=SeqID_106634
ttaaccctttactagaccttactagactagaacttggtctcctgtgcagtcctggagggggagttgagaacgacccaggcgatggtcactcggaacacggaggcgttggcccggtccctggcagaacggtccaccctcacaaatgagctcaaccagctccgcgacacggcataggtcgtggtgactgaggtgcttgagtcaggcccgagtactagcaggcctgccatccagcttgcggaggtcccggacatggtcaaaatgcttatctccgacggtgtgttccacggggcgtcgggggtgctgacgtcggtggcgacccactaccctgacctggacttcgaggcggtctgcagagggtacaccgacataaggagcttcaagaagatccaggcgctgggtcagagcttggcccagagtgcacaaacgatcgccacgcagggactgcaacatgggtcagtagaggctcgtgctgtggatggctgcacgtg

SEQ ID NO: 40661 - DNA, 438 bp, Setaria italica
  Peptide Sequence Number=SeqID_106635
tacaggtgatcctattccatttccagaaccggtcgtcgcattagctgcagcatcagactgttgccaagcagaagaacaattcatttcagaaagatgagtgtcgaataaaatatcagttacatacttacataggtgatggtgatattattaaaaataatagctgctcccatcataagtgttatttgttttacactactgagctgtgttctcattcaaaatatgtgatgtttgccaatggtcagaattacatacagtagtcccttactgttttcccctagaaaaaggaaaggggggcccagattttatcaacttgaataattatactaacaagaccatagaatggctaagctgcagagaatgacttggtggacagttctatgtagcttatatctaatttagctgcgtgtatgcagtcctaacgtttgtaactttattttt

SEQ ID NO: 40662 - DNA, 979 bp, Setaria italica
  misc_feature (1)..(38): n is a, c, g, or t
  misc_feature (92)..(92): n is a, c, g, or t
  Peptide Sequence Number=SeqID_106636
nnnnnnnnnnnnnnnnnnnnnnnnnnnnnnnnnnnnnnacttagaacccagcacatgcctgcgcctagtcatggacttgtatttgctcgacncttttatccacaaaacacgacacgctgaaatatacattaacaagaagatacagctcaaacgcggttacaagggaaagggatcaccaaagaaccggttcttccacaaagctgaaagtgctgcagccactgcatatacgacttacagcaggagagtggccgactggccggacctccagtccgcctccagcagcgccttccctgtggcctccaccctgaaaactaataataacttaaagccagtaacctaccaatcatcaatggcaattctggagttcttgttataataaaagagcctcccaaccaatgttaattttggaaatgcttgccatagcggaggccattcaatcggtcgcccccaaatggtctgcaaattcctgggcgtatctctctgacaaatggcaattcagcacttagtccatggcgagctttgacacccgtggcagctccgtgtttgcctgaccatgttccgcgaccactgactgaagctgtaacttggatatgttctgttggactaagcttgttgatgtgggagcttgtataggcagcctattgacatttctttctgaaaatatagtactgagcaaattgttgcttgcatgaggagctttctgactttaaatggcaattgaagaacttccttgatatcaagaagtggagaaaccaggccacggtccttctccaccaaagaaacatttatttcctgattgcttgtatatagcactgaatgcttgtgaattccatctcttgcacaagtacaaagcacccaggtggatttctgcattgattaaactgaccttgagaatgtactgaaactatatgccaaacaaagtgagcacattttcattttacttgaattcacaaccaacacaaacaacagcaacctgcgg

SEQ ID NO: 40663 - DNA, 1145 bp, Setaria italica
  Peptide Sequence Number=SeqID_106637
ttttttttttttttttttttcatcgcagaaaatggcaggtattgattgcatagacatcaagttacatacacatgatgataccatctcattatcctactatgtagattggttgtgcctcactgcaactgtcgacccatacatgggaaatatttacctccccattccctaattatttgactctgcaaacataacctgaggtgttgctcagcaacagaacagacctatcgcttatatacaaagacacttctttcaggtatggctccctcctttggtgttactgagcctggaaagtaggtagaggcaacctgaggagaggaagattgatgcagcgaagcaaaggaggtcagtacaggatgtaatggtcactctccagctcttctcaaagatgccaaccagtagactcatgacaatgacatggcccagctttgtcttaagatcattcaccgactggattaccagccacttgggtcgttccggaagactgaacaagccaaacaagttggagccataagacatgtccatttcactgatgaacagctcatacaagcccgtcccgaatacaaacatgaccgttccaatgagaaacatgtcaatggcttcaagcaacattaggatgagcattccaccgccgtgcaggtagtactcgacgaaggcgtccatcacataaacgcatcccttgaggaagcaggggacgcagccggcgagcaagccgccgatgccgaggaaggtcatgaagcggcaggcgcagatgaccttctcgatccgatcctccagccccgccccgaacttcgtctcggtgggcagccccaccgggcggaagagcacctcgcgcatgccgccgcggcggtgctcctccgaatgaaccgcgcccgccgccgccgctgccgcgtgggaacgcttgggtgacaccgcctctgaccgcacgcgcgacctcggcctccacgcccacccggcgcaccccgccgccacgcaagtgagaggcctgagcttcattgccgccgcaagatgattcaaaccgcttcctccaccagtaacttaagtcgccgctttgctcccgcaccctgctccgctccccgccgcacgcggccgggggatggttaagtagccggcgcaccgagcagcccccgctcgactgaccgcacccg

SEQ ID NO: 40664 - DNA, 455 bp, Setaria italica
  Peptide Sequence Number=SeqID_106638
actccgatcaacattagtgttatttaccttgggaacaaggtacttgacggcccgactgcagaggtactcctggatagttctaatgttgctgatgtatttaacatacttatttttcgttgggtcaagtgtcatgtactttgcacgtacagcaaacctctctgtgtgcttaccctcattggatatgtagatcataaaaggtataatcgaaggatgtttcctcattagacccatcacaaaattaaggcttaagtgaacaccctcaacaacaactgattctttcctatcttcccatgcagtaattaaccgatccaaactgtcaatcaccatctcactctgtgctttataaccttctatggccatttgcttcttcccaattgctttcccatcaacttttttcagttagagccccacttttctcgtaatcaatatttgagctgcttgacacgcctgagccc

SEQ ID NO: 40665 - DNA, 418 bp, Setaria italica
  Peptide Sequence Number=SeqID_106639
cggaggcagctaaagacagtggcatggatcgaagcaacactccgatcaacattagtgttatttaccttgggaacaaggtacttgtcagctcgactgcagaggtactcctggatagttctaatgttgctgatgtatttaacatacttatttttcgttgggtcaagtgtcatgtactttgcacgtacagcaaacctctctgtgtgcttaccctcattggatatgtagatcataaaaggtataatcgaaggatgtttcctcattagacccatctgaaacaattaaaaggaatgaggaataaactggccatgccgatcatgaacttgacagttccacctttaatagcagcatagatgtgatatagtaggtttgatatgagctaatacaaatcaacaacaagaatagaaaggaaagaagtaca

SEQ ID NO: 40666 - DNA, 568 bp, Setaria italica
  Peptide Sequence Number=SeqID_106640
ggtgttcttctacttcaactcgacggcgttcgtgacgtcggtggtgatcatcgtcctgctcatgaacgagtccttctaccactcggaggccaaggtggaggcgctggaggtcatcgtggtgctcgacatggcggggctcatgggcgcctacatcgccgggtgcacacgggaggtctcctcctccatctacatcatcgtcctcaccgtcgtcgtcttcctctacgtcctctacacggcgcagttcctgcccaagctctggggcctcctcgtccacgtgcccttcctccacaaggcggcgcagggaggcgcgctgcccgtgccgcacgacatcctccacacggccaggccgcgggtggacatcggccggaccaagtcggcgccgccggggtcggtaggattggtcacccgaccagaggacgagtgatggcggcgatcgtgaataattccgtttcctagagcttcagcaaactttaactagctggatccacttttctctagtctctagatgtatcaagattatttgctcgctggctaaatgagcccaatttgtctagttctaattggttgt

SEQ ID NO: 40667 - DNA, 874 bp, Setaria italica
  Peptide Sequence Number=SeqID_106641
catagtctacatgactatctaaaccaagtcaacaggtatatattcgtgactgagaataaataggaaaacatgatgattctaaatactgattgaattgcattgaacttgcagggtacaggaactgggttgttaatggaacagataacaaattcacaggagaaggagacatatttggatgtacctgaagctaattttgaaatggtaaactttatgagccatggtaacataatagtatacaaatggtttcatgataatttaaacaaagaagttcttaaaattttacagaatgaaccagcaacttacatggacatacttactaaaagatatggatttgaggtacgaatatatatgaacttagataaatatgacattattaaaaatagagggcactacatccgaagaatatgaacagattccatgacaaacatttggaatgaagatcaccatgcatagcttgccaagtgaagatgatatgatgaaccaggatcaagagaacgaatcaagatgatatgataaacatttggaattgaatattcctcaatagaatgagtctcaacatcttattcagagtcactgtcggtaaaatcacatacttcgtgacgcctcttacgagccatctaaatgacagaaaatgttttaccacatataaggagagcgtaaaagatatgtaggtattcaacaccagttagatttggaatactatttcaattactattcaccatactcaggcaatggaaactaagcaattaaccataatcaaaaacaactaagcattactttactaagggtacctaatcaaacatacaagacagttaattcattatatgtagaaaattatcattacaaaatcacatttttttcatatacagatgca

SEQ ID NO: 40668 - DNA, 504 bp, Setaria italica
  Peptide Sequence Number=SeqID_106642
taaacttcacctctggaaggtagtaccaattcacgcttgtgttgctgtttgttcttccatactagcatcagtgtcaaccttcaatgctttgtcttgggtctgcagggcttgttctgtgtcgttattgctccttctctttctggattgcggacctaatctccttcatttccaatttcagctgctccacttcagagtcaagtcccttcttcagaccctggagttcattctggcatgtcctgacctgtgtctctacgttggagcgccagttctgcacctcctgtttcagcttctggatcctctccagcaactccgcctgcgacgaggtcagctccttgacgcgcgcgtccagctgctcgaaccccgacagtctcggatgacgaagcgcggcggcggttgccggaggaggaagagacggtggcggcggggcagtgctctcggcggccatccggagggttgattggcggagtctgtgaggttcgggcccccgccaccggatcgactcgg

SEQ ID NO: 40669 - DNA, 827 bp, Setaria italica
  Peptide Sequence Number=SeqID_106643
ttgtagacttggaactgttacaaaacaagcaattcttgtacatgtagttgaccaccttacaagattaatccgaaacattgcacttcagtttgctggtactggtagatatttgcacctgatggtatggattcaaaaataatacgagtactacatatgatttagtgtatttgccagcttttttccttttttgatccaccgaaaggagctgaatatccagcaggataaacttcacctctggaaggtagtaccaattcacgcttgtgttgctgtttgttcttccatactagcatcagtgtcaaccttcaatgctttgtcttgggtctgcagggcttgttctgtgtcgttattgctcatctctaaagttgtgatttgcgtaggtagattacccttctctttctggattgcggacctaatctccttcatttccaatttcagctgctccacttcagagtcaagtcccttcttcagaccctggagttcattctggcatgtcctgacctgtgtctctacgttggagcgccagttctgcacctcctgtttcagcttctggatcctctccagcaactccgcctgcgacgaggtcagctccttgacgcgcgcgtccagctgctcgaaccccgacagtctctgcagatcacgaaccagaacgggaacgcacaccatgaacacaagcggacttgggaggctaaattttgcaagaaccgatcagagttctaaattatggactcgatcaccgaagcagcgattgagcacgcctaccggatgacgaagcgcggcggcggttgccggaggaggaagagacggtggcggcggggcagtgctctcgg

SEQ ID NO: 40670 - DNA, 692 bp, Setaria italica
  Peptide Sequence Number=SeqID_106644
aataacacagactttggctcctatgtaccacgaaattctccacttccatctcaaacaatagcatttctgtcgctttgggactaacactctaacaggttaaagttggacaaaactccctcatcaaatacccatattgtcttcaaataattaagtgcttcagagtattattacataaggaaagcatattactttcgagaagcctcttagtttcatccacataaataaaatgattctcagaaaggaagaaccagtggcagacttcaattgggccctaggggtcagatctggaaaaatgtccacgggttgcacactccatggctggcgccaggaaaaattttctggcacaacgcaatcactgtaccaattgtaacagatcatatgtttcacaagttggaaattaggctaattggctttgttcaaaccaaaacatcaagacctaacatggtaagattacataattcttaaagaaatttacagcgaaacaagacattctcatactttcgaagtgcttgattacgcttccacatacaaatacttcatctttctgtagtccaatactctaattcgaaaaaatctgctagcggaatcgaggggaaacaatgctaatcagctaatcaccagatttaaatacacgccaaggagaggaagaggggaggacaaaacctcgccgccgtctattgcagattttttgt

SEQ ID NO: 40671 - DNA, 2060 bp, Setaria italica
  Peptide Sequence Number=SeqID_106645
ttacttaaagtctatgtctctccaaaagttggggaaagcaatggaggctgctaaacagtgtaaaagtgttcttgatgctgttgaaagcatcttccaatgtggcatacctggtgtcatggtggaacaaaaattgcaggaaactgtcagtaaatctgttgaacttctcccagaactttggaagcaagctggggcctatcaagaagcacttgcttcttaccgccgtgctcttcttagtcaatggaatctcgatgatgaatgctgcacaaggattcagaagagatttgcagtttttttgttgtacggaggtgtagaggcgagccccccaagcttggcttcacaaactgaaggttcatttgttcctaggaataatttggaagaggcaatcctgttgctcatgatactattgaagaagtggttccttggaaagactcactgggatccctccgtaatggagcatttaacatttgcattgtcagtgtgtggccagacatctgtgcttgccaagcatctcgaagaggttttaccaggaatataccctcgaactgagagatggtatagtctagctttgtgctattttgcagcttctcataatgaagctgcattgaacttgttaaagagatctttaaataagaacgagagtccgaatgacataatggcccttctgttggctgcaaagatatgcagctcgagttatcttcttgcttctgagggtgtagattatgcaaggagagcagtcaaagatgtcgaatcatcagatgggcatttaaagagtgtggccctccattttctggggagttgcctcgccaagaagtctagggtggcttcatcagatcatcaaagatctctcttgcagactgaggctttgaaatcgcttaatgaggcattttctcttgaccgtcacaatccagaattaatatatgacatgggaattgagtatgctgagcaacggaacttgcatgctgccttgaaatatgcaaaggagttcattgatgcaactggtggatccgtctctaaaggttggaggttgctatctttggttctttctgcacaacaaaggtattcagaagcagaagttgtgactgatgcggcattagatgagactgcaaagtgggaacaagggccattgctaagaataagggctaaattgaaggttgctcaatcattgcccatggaagcagttgaagcatatcgtacccttcttgctcttgttcaggcacaacgaaaggcttatggttctatcaaaaatggtgcagaggaggatgaggacaaagtgagcgaatttgaagtttggcaaggtcttgctaacttgtactctagtctttcctactggagagatgcggagatttgcttacagaaggctaaagccctgaaaacatactctgcgacaacccttcatgcagaaggtaacatacatgaggtgcgtgagaagatacaggacgcattggctgcatacttcaacgccctctcaacagagatagagcatgtcccatccaaggtttccatcggcgccctcctagctaaaaaagggcccaagtatctccctgtggcgagatgttttctctcggatgccctaagactagagcccaccaaccgaatggcctggttctacctggggaaggtccacaagcacgatggcaggctagttgatgccgccgattgcttccaggcagcatcgatgctcgaggactcggaccctgtagaaagtttcaggtcactctgatgggtcatctacagcaagatgaggtttccttttttgccggctaatttttcctgctttgactttttctttctcggtacatagctgggcagaaaccggatgccagctatctgtaacttgtatctgtagttgccggtgtgtttgtcggggactgacaaatgctgtaattggctgctaactggtactatatacaaattgctttgcctgatggctacatcaggctggcactgcggcactggaaacaaaccatgtgatgatatgacccatcgctacaaatatcacataatatgattataacgagtcgtcagctaacttcaaaacaatattgctgatattacagtaa

SEQ ID NO: 40672 - DNA, 407 bp, Setaria italica
  Peptide Sequence Number=SeqID_106646
gacgacacttgagtttagctggcatcaacagatcaaataattagccaaataattcatgagtactagctcttgtacgatttttaaaataaatataattcttcagatgtatatgccacttttctgggccctgaacattgctgaagctttacttctgaaacttgtaaatccaaccagaaactcctcttgtgctgggtccaatcctgaagagagcacatgcacatcacgtggtcagcagaagaatcctgttgctcctgctaatactgtgtcatcactcatcatatgatgaatgacatgccatgccatgtcatcttcttcttgcacatccacaaaagcggagaatctctagatgaacatcttagcaaaatgctttgccaatttatgaggccaggaagctgtactggtgcaca

SEQ ID NO: 40673 - DNA, 422 bp, Setaria italica
  Peptide Sequence Number=SeqID_106647
tagagtgctttgttctagaacatgttgagcatgacagaccagagatttgaaaaggaaatagccttgcttgagttgcagtggtatgggtactgtctgttcagagctcttgcaagcttacatagacagggggtagtgcatagagatgtcaaacctggaaacttcctcttctgtcgcaaactgaagaaggggtatcttattgacttcaacctggcaaatgatctccaccagaagttcttgaaaaacagtaaatctgagacaatttcatgtgggaaggatacggcatctcaaacattatcaaaatttgccccagtagttcacgccaaagaagcagttgatgattcaaagcaacctcttcctttgaagaggaaaagatccagtaaaaacccagtggatagtgcacctaagatcgacaataaaagtaa

SEQ ID NO: 40674 - DNA, 513 bp, Setaria italica
  misc_feature (48)..(48): n is a, c, g, or t
  misc_feature (187)..(187): n is a, c, g, or t
  Peptide Sequence Number=SeqID_106648
tccaggcaggcaccaatgcatgcaatcgtcgtgctttttgccgccagnggttgaaggatgagcatcagccctgaattcactcatgcgagtgatgtccaaaaactctgaaagtagactgttcaagagccttcatcaagtgtttgtttaccaagcgtgcttccatattcgtgccattattgtccaaagngaaaaattcttccacctcttctgaggacaagggctggttacgttgacaagatccaccttcattccagtcaccaccttcaaaatgtctaggagataatgcgctgaaattcttccgcacatttggtctcattgctttgttcacgaatgttatcatgtgttgaagagccaaatccagtccggcagatggcagtaaaggaggtacaacaggcttcccgttctcaaagaacagcatcggtgattctattggatcgaacttcgagggtgcccaccaccaatgcccagtgttgaaaataagaacatcatggaagctacatgcctctacccatg

SEQ ID NO: 40675 - DNA, 505 bp, Setaria italica
  Peptide Sequence Number=SeqID_106649
acgggaatgggatatcagtggaaagaatgctctcgcttgtgtgaacaagctgcagtgaataccaactcggtattctgcgtaaactattgtacagatgaatgcttcctattcatgccctagggggaagaacttctctatttctacggcaacatctcaactttccttagactagctctcaactgcttcaagatttactgctagcaaatcgttccatgtatcggttaatccaggcaggcaccaatgcatgcaatcgtcgtgctttttgccgccagtggttgaaggatgagcatcagccctgaattcactcatgcgagtgatgtccaaaactctgaaagtagactgttcaagagccttcatcaagtgtttgtttaccaagcgtgcttccatattcgtgccattattgtccaaagagaaaaattcttccacctcttctgaggacaagggctggttacgttgacaatctcctagacattttgaaggtggtgactggaatgaaggtaggata

SEQ ID NO: 40676 - DNA, 484 bp, Setaria italica
  Peptide Sequence Number=SeqID_106650
cctctttcaatatacaaaactgtcacctgtcaggtgccatacagccatcattgaataaaattaagtgcaatgcagtcagggtatgctatggtgaaatgaacccaatgttgaatgactaacaattgatgtttgaatgaatctgccaatttcaaatatgttacagcatttagcctttcatcattatttcctattgatagaatcaccaatggacgatgcactgcaaacagttgtgcattcttgtattttaggtcgaaattagcccatgagactgcaatttactatagtcctgggcaataaactcagctgtttgctagctcccagttccaaaatttattctgatcacatggctaaagcaatggtataaagtcccacgttctgtaactctgtttgctagctctgttgttcctaaaattttcccgttataacttaacttttgggttaaagttaaccctttagttttttcttttaactttttttcttttta

SEQ ID NO: 40677 - DNA, 1321 bp, Setaria italica
  Peptide Sequence Number=SeqID_106651
aatcagatggagatgaaaatgaaaatgaggatgcacagaaaactctgcaacatcaacatgaatcagaaaaagaccaacaagaactcaagttctaaaaggagaaaaggatgataagagaaacaacaacttttatgagcgacacaatgacagtgatgaccatgactacaggcttggtatagatagcacagaaaacaccacagtaggcgactgtgataacagtccgccacaaggacttgatgttgtaaaagtgaaatctggtactcaactgcaaggtagtaagaaaaaatccagcaagtgcaaggcaagtgatgatttgtcaaatgtagaaaagagattgcaaaagatggttaagaaagttagtactaagaagcacaagaatgataagacaaatcggcagtttcaagaaaagcacagcaaagataacaatgtagatttgcttcatgaagataatggagatgaagccacacaagaaaactgggatggagttcaacagaaaacaaatgatgtgaaagtaaaatctagaggcaaaatgcatagtggtaagaaaaaggccagcaaatgccagacaagtgatggtttgcacaatggagataatgaagcaaaattttcttgtgacacagatgtgtgccatagagacaaagccacaatagataaatggggaagaaattccaaaagaaaaggctgatgatgttaaaagtgaaatccaagacgcaaggcggtaaagaaaaaagctagtaaacatccagcaagtgatggtttgcgcaatggagataaaggagcaaaattttcttgtgatatagaagggtgtgatatgagcttcagcacccagcaggacttggcgttacataagcgagacatttgtcctgtaaagggatgcaagaagaaattcttctgccacaaatatttgcttcagcaccgcaaagtccacctggatgagaggccgctcatgtgttcattcacaggctgcaagaagacattcaagtggccatgggcgaggacagagcacatgagggtgcatacgggggtgcgcccatatgcatgcacagaacctggctgcactcagacattccggtttgtgtcggatttcagtcgtcacaagaggaagactggccattcctgtgataagaaaaagaagaacagtacataacttctaactgcttatgcacaagtacaggtttcttctctgacggcaatttgaaggggatgctaatcgaataattgcatcagattccattggttgcggaattagtcggcattaggagtctaattcatttcattgtttactgcctctgtataacagctgattttctgtcgctttagg

SEQ ID NO: 40678 - DNA, 394 bp, Setaria italica
  Peptide Sequence Number=SeqID_106652
gggggaggctacctcgcacggtggaaggacaaacgggactggagcgagacgggcaacaacagtgagcggaggaaggggcgagcgtggaggctcgcctaggagagctcggcgacggtggcgtccgtggtgtcctcgatagcgtcgtgggccagcagctccatggtgatggactgggccagccctgaggaggtcgagatgcagcgcggtgacggattctcgctgctgatctacgcctagctaacaccggtgagtggcgatggcggcggcattgctcggattggttgcagtgatggtaaattttctccggattattgtagtaggttgcgatgttcttgtgcagttagagtccttgagggattgaaattgagcttggacttggattacagtagcgacc

SEQ ID NO: 40679 - DNA, 880 bp, Setaria italica
  Peptide Sequence Number=SeqID_106653
tagatgggggatcgacatcatataagcactagctatcatcactatcaaggaggctgttcaatttctagaagtatgcctagtgctattagccttgaagatatagaagaatctcctgattcgaattatcatggtcttcaacaatacatgaaggatcggcctcatataagcagtagctatcaccggtatcaaggagattgttcaatttctagaacaagtacgcctagtgccattaaaagctttgaagacatggtgagaacaagggatgaagttctattaatgaatgccttttcaccagattcatgtaacatgattcctcaacaacaaaataatgctacaatgagcatatcttcaagatccattatgcccaccgctattcaaaaccatcaagatatggttaaaaatgagatatggaaccaactcgatgaataccttctcaacggatctagatattattagtcctcaacaacaaaagaacattggaatgaacatatcttctggcttagatattcatgatttggaatcattattcaacaactgtacaatttctccccagtttctatcagagtgggataatacatttccccaaagttctacaatgaacatggacccttatgttcattcacctgtcccacaagatgataggacattatttgtcactttctcaattggatatccattaactaaaaaggaagtatataacttctttatgagcaatttcggtgatgtcgaaagcctaagcatagaggagccaggttgaactcaggccaccacagtatgcagtagtcatatttggctctctggagacactgctactcatccttagtgggaaagaaaaggtcaaatttgtgatagggggggaaacaattttattggggtcttc

SEQ ID NO: 40680 - DNA, 1063 bp, Setaria italica
  misc_feature (1024)..(1063): n is a, c, g, or t
  Peptide Sequence Number=SeqID_106654
tcacgtaccgtaatatcgtgtcattgccatactagatgtaccataaaatcgagtacacactcactataggaagatttagaatcgaggaataaatgcctttcgaaaggaaaaaaaaagaataaaggagtataggcgctcaattctggaggagccgctgtttctagaaggctccgtactttccagaagcaaaccagtaaagcaagaagaacccagaagtgcaaaacgaggcgtaaatagtcggaaactgcagggaccaaaacgaaaacctacagcgccggagagcagacatggccgccgcggcagccccgtgggccccacctcgccggcgtcggccgcgcgctcctcctcctcgcggccgctgcccacttcctcccagcagcggagtcatcctgcccgcgagacaactcactggtgagagacataagccggatgcaccaaagcaactatgggagggaaggattctcgcatataacggtcgccggcgcgctagctcacgggatgaaggaggtggaagtgtggcttcagacatttggtccaggcaaaaggacacccatccacaggcactcctgtgaggagaattttcgttgttcttaaagggaaaggcactctctttctggggttgagctcgctgaagtacccagggcagccacaggagattcctgtatttcagaatagcacatttacaatccctgtaaatgatccccaccaggtttggaattctgatgagcacgaagatttgcaggttcttgtgatcatatcacgtccacctatcaagatattcatttatgatgattggagtgtgcctcatacagccgcgaagctgaagttcccctactactgggatgaagaatgcttaccggcgcctaaagatgaactctaggtttaagtgtttgctacagtatatcagctttgttcacaatcctgctggattacgattgacatctactagttgtataatataatagttctgtgttgtgactcaggaacatatgcatttaagcacttcagaagtagagccaaaatnnnnnnnnnnnnnnnnnnnnnnnnnnnnnnnnnnnnnnnn

SEQ ID NO: 40681 - DNA, 897 bp, Setaria italica
  Peptide Sequence Number=SeqID_106655
gctcttgtcgtcggcgtcggcggcgcggacgacgtcggcgaggacgcgggactccacgtccgggtgggacgcgaggagccagaagaaccaggccagcgcgacggagctggtgtcgcggccggcaaggatgaagctgatgcagaagtcgcgcaggaactcgtcggagtagcccccggggaggtcggccggcggcgacgacatgagccgggagaggaggtcgcagcggccggccagggtccccgtcttgcggagctcggcgcggcgctcggcgacggtccgctcggcgtaaactcacggaccgcgcgcgtggcctccacgagcgcgcgctcgctgcccaccccgaggaggcgcttggccttccacacgaagggcggggtgacgaaccgggccagagacagctcggtggcgcgctcgaacgcgctcgcgaacggcacgtcggggaggccctcggcgaggcagccggcgtcgatcccgaacgcggcggcgcagatgttgtcgaacgtgaaccggagcagcaagtcctgcatgtccacggcctccccgcgctcggcgatccggtccagcagcgggagcatcttgcctcgcaccaggccgccgatggtgcccgccgagaactcgaggaaccgcgccgagtgcatctcggtgctggcggccctgcgctgcgcgctccaggcctcgccatcggcgttgaagatgccctcgccgaggagctccacgaaccgctcccggtagtagggccccttggggtagtttgcgaagttggtcttgaggacgtgctcgacgttggcgggcacggaggtgatgacacccgaggagcccccgccccacgtcccgcggtaatggaacgtgccaccggtgcgggccagcgccgccgcgccccagtcgtagatgttgtcg

SEQ ID NO: 40682 - DNA, 783 bp, Setaria italica
  Peptide Sequence Number=SeqID_106656
tcctatttccagcagcagcagcaaaagtaaggttccatcagaggttaggttcgaccagaggttaggttccagcttaacataccaccatctagcttagcttggtcaactttgacctagcaaaacctcaagcttcgcttccatctcagcttgcttcatctttatctcctcttgatccctaatccttgcatttttctgtttcctgcactttctttgacagatcatccacttgtgcacgttgggagttgacaattgactgaagctcagcatttgctctcttttccgtttccaaatctgctttaacgttcttcacactgcatctaggctgcgcaatttggatctaattcttctttgtgttctcaccaagcacatcagctacaacctgagtcgcaaagttgggttgttcaccttctgttggtgcagatagcttgtttttccattttgagtaatagctagctgtatgataggtgtgtagactttcttttttctttgctgtagtggcactccttgaacaaatcaaatgcatcaggttcttgatccttgtacttgtctccctgaaaacaacatttgtatggagcaagattttttacttgttgacaacacttcatagttgcaagaatgagaagaaagagaatgtaaattcgtcgtttatatttgtgcagcaagtaagaactaatgttctacaaaattatgaactcatcttagcaacataaacattagatgaaactagaagcatcatttgctaaaacatgctgaaacatgttcgcttgaaaaaaaattggaata

SEQ ID NO: 40683 - DNA, 966 bp, Setaria italica
  Peptide Sequence Number=SeqID_106657
gttcgcgtcccgggcctgctcctccgtcaacgacatcctctactacggctcgagcgacgtcgcgtccccccctacggcgagaactggcgccaggtaaagaagatcgccaccacgcacctcctcaccagcaagagggtccgggcctatcgccacgcccgcgagcaagaggtgaggttggtcatcgccaagatccgcaaggcggccgctgcaggcatggccgtcgacttgagcggcctgctaaactcctttgccaacgacatcgtgtgccacgccgtgtcgggcaagtttttcagggaggaaggccggaacgagctgttccgggagctgattgaggcgaactcggcgctcatggggggtttcaacattgaggactacttcccaggcttggtgaaggtgggcatgatcaagaggatggtgtgcgctaaggcccagaaagtgaacgagggatggaacgagttgctggataagctcatcgatgatcacgaaagaaggtgggagtcacaacttggggacgaggaaagcgacttcattgatgttttgctctctgttcagaaagagtacaatctcacaagggaccatgtaaaggcacaactggcgatcatgttcgaagctggcacagatacatcattcatagtgctggaatatgcgatgattaagctcatgcaaaacccccacctcatgaccaagctacaaaccaaggtgaggatggctataccaaaggggaaagacatgattactgaagatgatctgaatgccaatgacatagccttcttgaaggcagtcattaaagagacactccgactccatgcaccagctccgcttcttgcaccccacctatccatggctgattgcgacatagagggctacacaataccttctgggacacgtgtcatcgtcaatgcatgggctcttgctagggatcctaactattgggagagcgcagaagtagtttctattgtccggtta

SEQ ID NO: 40684 - DNA, 708 bp, Setaria italica
  Peptide Sequence Number=SeqID_106658
gtcaaaaggtaaaatcttcatcagtggtccgcgcaatcgtctcgccgccgccgtccccgcctccccgggccgtcatcgatcttccctccctcggcccgtcgcgatggccaccggcggcaagcccgaccctgccgcgccgccgcaggcgccttcggcggcgaagggagtcttcatgcgccgcatcttccccttcctcctcgccaccaacgtcttcatcggagtttatgtttttgccaagacctacaaaagagaccaggacaagaaaaatgctgaggctgccgctgcatctgctgctgttgcagcattgtcatccccagcaagtgcaactgcgaaggctgcagatcctgctcctgcacctgcacccaaaagggttctcccaccactatctgaagatgagcagcggcacgtgttcaaatggatgctggaggagatgcggaagatcaaaccacgtgattcctctgagaaaaacaagatcaatgaggagaaagctcttctcaaggagttcattcgtgcagagtctctccctcgtttgtgatgattgcatcggctgtcctgctggtcttgaattttttttctgcaactgcagtccagtgaggacatgctctaaaactacttgcctttgtagctggcacaatggtagctattttttttttgtactgtcacttatcttcatttgacaacgaaaggtctgagtggttccagtcgtac

SEQ ID NO: 40685 - DNA, 270 bp, Setaria italica
  Peptide Sequence Number=SeqID_106659
aatgctcttcatagaaccgacacttgtaacatgctcaatttaaggattaccttcacacatttaagatataaacacataggccaataagttatctgaatttgagtgctggaaaggcattttccactatcccccggtatcataactaactaaacaaacatacctaattaagatgtacattttcatgcagtgaaaaactaaacagaaagcagggatatctgaaagactaaattgcacccaccatacaacaacttgtcaggtgggatcaaattg

SEQ ID NO: 40686 - DNA, 415 bp, Setaria italica
  Peptide Sequence Number=SeqID_106660
aactgtctgaacattttgggagttttgcttgttgcgcttggcacattatattgttcatttttctgctttctgaatggtcgtggcgctatatgttagctttttgccgctctagctatcgaacaaaaagtgatggcgaacgaacagagagaggtaccaaaacattacatgtcttgtttttaggcgatcgttttcaatgggcaccttatatgatgcgcatgcctgtgctttttgttgtgcaaccattggaggatcatactgatacgaagctcggaggctgcaccagtttgtatgttctgatgaagcacagcatcttcacttttaaaaccatttttcttcatgggttccagattcaggtactgaaacgccaagatggttaatttcggtaagagattggtggcagaccaattggaggagt

SEQ ID NO: 40687 - DNA, 418 bp, Setaria italica
  Peptide Sequence Number=SeqID_106661
agacctacgcctcgaaggagaaatggcatgtcctggctccatgggaaaggagacccgaattgaagcaggtggagacgaggcggcaggcaggcagggatcgtcggaggacaggaccaggaccacaccacagggacagcagcagggagatttaaattcttcgccggagatggcgaagatccagaagctgggggtgaccatgcatgcccctgcgccgtgcaggtcgcagtactgtggtttctacagcggttgcctggactctgcactacagctcggcactgcacgaacatttgagaccaccgtcctccggctggtggattttagaccgcggcaaggttacggacgggatcaaattaattctgttccgatgagttggttactgttctactcgtgaggtcagtttcagttgccgtttcgtttc

SEQ ID NO: 40688 - DNA, 728 bp, Setaria italica
  Peptide Sequence Number=SeqID_106662
gcacagcctcatgcatttcagacagcacaagttccaccaggagatcgcgttagtgctggaacttttcagagttaccaacctcaacctcattccggtgcgccaattggatttcagggagaccgatatcgaccactatcatatcctcagcctcctccaaacatgttagttggtactggagtgccactctcacggtctgcctcagtggcctctcagggaacacaataccagcaagtcccaccagcagatgcaagattgaaggaaaaggaaaaacttgctagtttggcacgtaagctgggcgtatctgattataatacctacgaaccactaggtcagcagtcagcgagcacacctcaatctctgcatcctagtcagctacttgctcaagctaaagcaaggcaatgggttcaagctaagaaaagctatgttgcagcaactccacaaatgaggtcttccagtgggcataattcgtcaaatcatgcatctgggggtactgttctttcatctggttcaattcagatccagcagcccttgtgccaattgaattctcagagtagtcgtactctgagtggaaccactccgagtaatttgcttgatgggaagtaatcaccaccgtggcctcatcattagattactatcctttttactatgtttgtagtcttttatattagagatagatagattatcagacaaacttcctggtagtctgtcttaggagagtagaaaggtca

SEQ ID NO: 40689 - DNA, 555 bp, Setaria italica
  misc_feature (1)..(33): n is a, c, g, or t
  Peptide Sequence Number=SeqID_106663
nnnnnnnnnnnnnnnnnnnnnnnnnnnnnnnnngttcaaaattaagaacgtacagatactacataccaatccacgttaaattatatccaaataaacgtagcaataacatttctgaacttttcgcatccgaaatattcacttcatcatcagtttcgttcggttagcaccgtctacaagatgatctttctttttttaaaaaagaacaaggttatgaaacctcactttctttttgcctgtgctttctttcctcgaactgaatagatagttcatgacaactccattttgttcccaagtacttttgctcctttttgtctgtacatacatccgtaccggatcgggctaatactgtttccacctttgtctgcagtgtcattctttgaggtgagcaatgcgggatacaaactgagactgcactgcagcatagttcaatggccgatgggtcctttggtatgctctcatttagcttagcaccacctatgagatttccattctgaaagttcctgggataaacatcactgcctaaattttttgttcttgtcactctgccaagctata

SEQ ID NO: 40690 - DNA, 455 bp, Setaria italica
  Peptide Sequence Number=SeqID_106664
gtccctattccatgacaagaatgaggggtctccaagagtccttggcttaaacatgtagagaactacgaaaaccagtgcaaggaaaaggcacaaaccacctacaatcagatatgcaacaccaatgaaattatttttgcctccaatccaagatgtagttgaaaggaccaatgctttagaccctccaaaactatatgtgttatagttgttctgtataaccacagttagttgatcgttcgccataatatctgtctcaattctgccataaagctttctgaaagttggaagggcagcagttctcatccaaacaatgagatcttcttgctcacttaacggtatgctctcatttagcttagcaccacctatgagatttccattctgaaagttcctgggataaacatcactgccaaatttttgttcttgtcactctgccaagctatatccttttattcacaaca

SEQ ID NO: 40691 - DNA, 480 bp, Setaria italica
  Peptide Sequence Number=SeqID_106665
ctgtaagcattcatgtagtgagacctttctcgtgctacatcatgtatcagatcatgtacaacaagtagtgttcatctttctgaaaaaaagctccggtcaaccaaatcatcaaaactgtcgcttcctgcatcttccagtttctttctttcgtccatgacaaagccaagtgcaatccacatccgtatcagctgatctttgtcaaatttgtaaccctttggaaacaaagcacaatatgagaagagcagctgaaggtggtaagataagtgattgtaactgagcattagtgctggcacaatgccatctatcccattttctaacttccattcatcactatctgaaatttttctccagtgaatctcatcaatatttcttctcaaaagtgtgcccacacttttagctgctaatggatttcctttcagtttggtggctatttcctttgcaattctcatcagcttttttggcctgataattctcatcacc

SEQ ID NO: 40692 - DNA, 503 bp, Setaria italica
  Peptide Sequence Number=SeqID_106666
gctaaagctagtttagcagatcaaacattagtttatatgtaaaatatacattgaattctcttgatatgttctgaaaattctgggcatagcaattagcaacatgagttcagatattgcttgctatctagaagttccagcgtttcttcaccaatatatacgtgcagtttatgtcgcttattctttttgttatattgtttacctgtaacatgtgaatgagtggtactgtaaaagcataaagttttacttatacgcattgttcctatattagacctaatagtttagtgtattcttgtcagtattaactggtaaactttggattctttatgtagttgttcctccaaaatagacatgattttagcattacctgattgtatttagtacttgattgtgcaaagtacatttttacatgttctgctgctgtccagaattgccaatttacgacacctttttaaaccctatccaataccaaaactgttttagcagaccaaacacttgtatatatg

SEQ ID NO: 40693 - DNA, 1666 bp, Setaria italica
  Peptide Sequence Number=SeqID_106667
cgagctgccaggtgttgttgtcgacgagggcctggtactcatccatcatcgcggcacgccagttggcgtcggccagcgcgctgcggtagttcgtcggaatcggcgatggagaggatgacgtcgtggccgccagcccttcatagctgacgcgagggatggcacccgtcatggtgcgggtgacacgcggcggcggtggcggtggcggagcaggagatgccgccggtgctggtaagggcgccgtaggtggtgccggggcggcaggagccgcaggggctgctggggcagcggccggctcggacgtagtcgtcgtacgggagcggcggacgtagacccgtgggaagggaaccacgctgggtccaagcgggggcacgtgaccacgcccgcccggtggcgaagaaggcgatgccgcaacgtctgagggcggttgctccacaggcgtcgaggagagagtcccacctgcaacaacagtagggcaaggcaccgaaaccatatcgtcgtcgaggaggaagtcgagggaagcggggaaggaggtgtctaaggtggctgtaaagggaaaagtggtttcgtcaaatatgacatggcgagagatgatgatgcgacgggtcgataggtcgagacagcggtaacctttgtgcgaggggggatatccgaggaagacgcatgctgtggagcgaggggcgagcttatgtttggaggttgcttgcatgttggggtaacagaggcacccaaaaacacgcagatgactataggttggtggctggttatgcagtcgagtgtagggaatttcatgcttaatggaggaggatgggcgcctattatggaggtagcaggctgttaggagcccctcagcccaatatgggggcggcagggaggcatgaaggagcatagtacgaatggaattgttgagtgtgcggatgatgcgttcggctttgcctagtttttgggggtgatgtgtaggggcaggagaggcggacggtgagtgccttgagcagcgaggaatttggtggtggcggtgttgatgaattcagtgccgttatcggcctgaacacattttaggggaagactgaattgtgttttggcaagcgcagcaagctcgactatgtgttggtggacctcagattttttcccgagtggaaaaacccaacagtagtgactataatcatccaaacataccaagtaatatgaaaaaccagacagactgttgatgggggaagtccatacatcacagtgaacaagttcaaagggtgcatgagttatggaatgcgaggaactgaagggtagacgcgtatgcttgcctaactgacatgagtgacatagggagcggtccactttattacaggaaacaacatgaattttattaagacgttctaatgcagcaggggctggatggccgagacgttgatgccacagtgtcgacgaagcagccaagaaagcatgagatggggcgacaggtgtgccggcaggcatggtgtataggtccccgtcgctgttacagcggagaatcacgcgtcccgtcctgagatccttaacagaaaaaccatgtgcgtcaaattcaaaggaacaactattgtcgcgagtgaactgacggacagataacaggttgcggactatggatggtgcgacaagaatattgttaagagcgctgtgtctgctaggtgtaggaagg

SEQ ID NO: 40694 - DNA, 403 bp, Setaria italica
  misc_feature (390)..(390): n is a, c, g, or t
  Peptide Sequence Number=SeqID_106668
gctatgctgtgtgtttcttaactagccacttttttgccttttccctatggttttttggtagcatgatcgtatgtcttcagctttatgacatgatgttacaatcagtcttctgccctagataagatcaatatttgaaaactttttatttgtagcagcaaatgatgcctcggaacctgctatgtatgttgcatatatttatggcttctaggtcctctattctgcttatcagttctttatgcacgtatcatgtgcgcttgctttctgtgttttcgatcttcacatggtcttggatgtataccatgcattgcctttgagttcatcctatactctctattccttcagtcctttccactggtgctcagcaagtggtcaagttggctaattttttanattgcttttttac

SEQ ID NO: 40695 - DNA, 643 bp, Setaria italica
  Peptide Sequence Number=SeqID_106669
atctaagaatcaaacaagtcccctgagatttttcggcttagagttaattaggactactgatctgaaaaccttaaagaaccacgagaatttggataatcagttcaacataactctgaaataagctcaatcaaattgcatgctgtataagaacaacgatgatcatgtgctcaagagaggcttatacaaaccacaatgggtaaggatgcaaacataatcagaagtatagaagaacacaacaatatcaacagaacataaagatacgaggctgaatagacgagaggcacaaaaatcataatcatggcagtgctaagtagatctaaaggaacattgtcattcaattaccaaagagtaattatggaagcaacaagtagtttttgctgacaatgaagaaaaaaactagaaaagactgaataacaaaggagcaattagtgaggaaaatatatggagtccccacaacttaatgccctaagtagtcatgtgagattaactgaatcatttataactgttagctatcgactgtgataacagttttcccagacaggaattgaagataactgttctaacaagaacgaactaccatcctacactcatctgcaaaacttgggcaggccagaaggcagagcaggggcggagccagactatt

SEQ ID NO: 40696 - DNA, 752 bp, Setaria italica
  Peptide Sequence Number=SeqID_106670
taaagttaaacataacaatcatgtctgctctcccgccaaagatgcgtgtgcttgcggcggtggtattaacagccttcgccgccgcggcatcgacgtgcgcggccgccggcgcaaacaagccactgctggtggagaacctgcccgcctccgccgaggcgaaggatttcatccgcgccggctgcaacgagacctgcatcaggaggccggatgccgccagggcgtgctacgagctcctgctcccgtacgccgcgtccatcaacagcagctacaacagggcctccctcgccatcaccaccgtcatggtgtccaagctcacggacctcgccaaggacctgcgctcgttcggcgaggccggcaaactggaagggtgcatcaggatgcttgacgagaccgtcgccggggccagggatcaggtgctgccggcgctcgaccgcataggcgccatcgccgacgacaagctgaaagccaaggacccgggctttctcctcgtctggagctggttcgttggcgtcgacaacaacttcgtcaagtgctgggatggtggcctcaagcgcatcatggatcgggtccccagctccatcgtggcggaccactccgaatatgccgccgctgctattatcttcaggcccaggctcaagtgggctcctcaatctccagacggacgaaaacccataggacgttttgcattacctgcgtcggtgcctatccaaatcagtcctatctcttcacgtacactatttatattattcatt

SEQ ID NO: 40697 - DNA, 306 bp, Setaria italica
  Peptide Sequence Number=SeqID_106671
ggcgccagggaactctgatcgatcaacgcgcatgtagcagatagctcgtcagtaattcagtacagtgcaggtgtattatgcgactacagttcattgatgagtgatgttgtagctgtatggctgtctggctggcctactactcaccgatcttggccagatcctcgaagaatttggtgatggcggccgagttcttcttgatcccggacaccttgcccctctccttgatcagaacctgcgtttgatcatcactcatcagaaacgtagtacaaaagatatgtttcagtccctcagattcagtgcctagta

SEQ ID NO: 40698 - DNA, 671 bp, Setaria italica
  Peptide Sequence Number=SeqID_106672
ttcttcgccggccggggcttcctctttcttctcctcgacagcggcggcgtccttcttctcggctgctgcctcctcggtggcggcggcggcggcgtccttctcctcggctgctgcctcctcggcggcggcagggagcagcgtggagaccttctcgaacgtggcgaagatggggccggacagcagggccgggccgaccttggagatgccctcgctcacttgcttggcgccagggaactcgatcttggccagatcctcgaagaatttggtgatggcggccgagttcttcttgatcccggacaccttgcccctctccttgatcagaaccttgagcggggcaggagcagactcgtagatctcgacgaccttaggctggagatcctccttcttctcctcgaactcgccattgatcccctccttggactcgtcgaaggacttgaggagctcggcggcggcggcggccttcttgccgccggacttggcgaagacgagcttgatcttgggcagcaccttggacttccagatatccatggcggctcggcaatcaggcaggcagaggaaaggacacgacagctacggcagggagcagcagcagcagcagcacaggctagcagctagctagtgtctatgatgagtggctacagatcatacgtgaggtggacgcggctgctgtg

SEQ ID NO: 40699 - DNA, 776 bp, Setaria italica
  Peptide Sequence Number=SeqID_106673
gcttgagaacttcttctagagtcacttggctgatgtatctatcgtctgcacaaaaccatgaggatgagcagctgctctgctgttgctgatttccaagctttcttgctctcacgtaagcaacatagtgtcctgtaaccaaggacttgctgccacggtgctctacaacaccagctagacgatagagggaattacctttgtccacagagcttgggtccatgaatcgccctacatcaagatactccttaaatctcacatgctcactcattttaagcctgacttcgtaacaggtgaaagctctcttaagctgaagagttaatacaggcggcagtttcttaaaaagatttgtttgaataccatctccaacattatcttcctgctcattttttttgtctttcaattggtatgaactatgatccatcgctaattgctccgtcatgtcctgatacacttcactattattggctctgaacttgttatgctgcaactcatgttctttactagttatgctgcgagcagtagagtctttttcaccacaactcatccctgagcttgttccttcagtgatactatccacgtgtttgtataattagactctgttcatcagatgcatgaggttgcctatttgaagatgatttgcattctactgacaaattactcagtccactagatttctcatttgagcgtactgtcctagtctgattgttcagtatggtccccaacaacttttgtgtcttcattggcgcttcccaccatctgctcaccatttttacttggtt

SEQ ID NO: 40700 - DNA, 689 bp, Setaria italica
  Peptide Sequence Number=SeqID_106674
gttgcaaggagggggaggctgctgaaacgcacaagaaaaggtaagaaaacagtgggctcgtcagaacattcagctatataattgaaaatctggaagcaaaaaaacttcaaagcatggtcgaaaaaactaaggggcagagttgtattcttgatacaggggatttacacaagacaagactatctatctacatcaacaagaggtcacaggttagaagattttccttcagttccaaatgctggtcagactagagagagatgcagtgttactgacaacgtacgtctataacaacaggtgatgctgaagctgaaaagcaaacacattggaggtgcactatcaaagaacaataagagtaagttgcaatacttttgcactactggaatgtaaatatctgattccagcagagtagctcatgaatttttcagtgctgacccttttgcctgtgactggtcatagtcgttgtttacggcgtgtacagcgagcttccaacatggggccgagccagggaaggactccatggaggagacatgcagcttcggcctgagcacggcgcaaggtctcgtggaattcgagtgtgagagcagcgcgagtaagcagaagtgggtagacgatgtgcagaacctgcttcgtcaggttgctctgcaggatcaagtaggaaataactggattactaaaactcaactagcgcagtc

SEQ ID NO: 40701 - DNA, 953 bp, Setaria italica
  Peptide Sequence Number=SeqID_106675
gtccgttgcccgggtcgccgctgcggtggccgccgtcgcggcggccacgagctgcgacgcccaggccaccaagatggccgcggccatggcgtcggccaccgagctgttagcctcgcactgcgtcgaggcggctcagcacgcgggggcgcgccacgagcaggtggccggcgccgtgcaggccgcggttggcgtcaggagccccggtgatctgatgacgctcacggcggcagcagccaccgctcttcgaggagcagctacgctgaagcagagagtgcagcgagagacgaggagcaatgcgagtgttcttccatacgagaaggggagcgagaagggtcattcgtggagcactgacatctggtgcaaggagggggagctgctgaaacgcacaagaaaaggggatttacacaagacaagactatctatctacatcaacaagaggtcacaggtgatgctgaagctgaaaagcaaacacattggaggtgcactatcaaagaacaataagatcgttgtttacggcgtgtacagcgagcttccaacatgggccgagccagggaaggactccatggaggagacatgcagcttcggcctgagcacggcgcaaggtctcgtggaattcgagtgtgagagcagcgcgagtaagcagaagtgggtagacgatgtgcagaacctgcttcgtcaggttgctctgcaggatcaagtaggaaataaactgggattactaaaactcaactagcgcagtctcaatttatacaaccattttcatggtagcagacggtgtgttataggaattgccttgcatcagggatgcgaggggtacatattgatggtactcttgtcactgacttatatattgtactacatacaaaatgatgagataaggaatagattaatgttttgtctaagactaagagtgactgtttgtcaagtgagtgtgtcaaattgccaataatagg

SEQ ID NO: 40702 - DNA, 295 bp, Setaria italica
  misc_feature (286)..(286): n is a, c, g, or t
  misc_feature (295)..(295): n is a, c, g, or t
  Peptide Sequence Number=SeqID_106676
ccaggtgtgtcagtcgcagttgagtctgttaccttttttgcatttcttttcgattcagttgagtcgtgcacatgaccgtagcctgtttgctcggtcgtgtgctgttgtcgttgctcgacgcgcgctctgttcgcacggggagcgagtcgtgcgcggcgtgatccggacttgtgggatggcacaaggtggagaagggtcacggcgcgttctgtagttgcgtctttctattcggaaaatacagagtcagaaaaacgcagcacttgctgcaaccaaaaaaaaaaaaaanaaaaaaacn

SEQ ID NO: 40703 - DNA, 439 bp, Setaria italica
  Peptide Sequence Number=SeqID_106677
cgaaaaaaagacctaaaaatcctgcgcacacccacgaccagcagggcatgcataatctaaaggataactcgaatgctccctccaatctctgctcagaacgatggtgaaccataccctaagtcaggtgctggatcttgcgcttcagccacagggcccgcacgtcgccgccgagcgagatgaatatctcccggttgccaggcagcaggaagacgtcgggggcgaccgacttctccacctgcgacaactccaccatgccgttcaggatctgaacgcatttcgatatgctgtagctgtcttcaggcttcggtagcagccagtcattgtgtgaattcttgtagtttgcagagtcgtccatcgcccggtcgttgctgttcctcttgttggaacagtgccatgaccggggcggtgcctgccactgctaactactagtccttgttgt

SEQ ID NO: 40704 - DNA, 226 bp, Setaria italica
  Peptide Sequence Number=SeqID_106678
acaagatcgccggcgccggtccttgtctgctcctccctcgccgacgatcttgtccttcatgttggccaccagccggcggtggaggtggtaggagatgaggatgatgctcgtcgacaccgcggccaccgctgccaaccccaggcagctccccgcgccgctgccgctccgccccatcgccgtcaagccgccgcctttctgctcttccaccacgccacctacctaaagt

SEQ ID NO: 40705 - DNA, 482 bp, Setaria italica
  Peptide Sequence Number=SeqID_106679
tcctggacaagctgtgcttgcagcacatgccacagcctacaatcacatgcacacacacacgcaccctacaaattcctacgcgccgcatccaaacaggcgcatgctactgaacctccgggacctagacacacgaggcccggcccgtcgccggccagcggggagcagctcgttctccgggagaccctccggcggcgcgcggccgccgagcaggagacgctctccgtgcgagagatcgaggtcgtcggccggaggacgagcgacgaaccggcagctctgagagcggctgacgccgccgtaggctgcgctggtgagtcgctccagccgcccctgcgtcgaaggagcgccgccggaggagaggcgctcgtagtccatcgctcttctctctctcctccgcttcttgatcgtgccgaagacgaaagagatgagaccctccaccatcgttacgcgatggtctgctgcatcgatacaaataaagcagcaga

SEQ ID NO: 40706 - DNA, 937 bp, Setaria italica
  Peptide Sequence Number=SeqID_106680
cgctgcaatgtgcttcatgctcgatcggcgtgatggagacaacactgcttttgttcagttcccacagcgctttgatgatgtcgacccaacagacaggtattgcaatcacaaccgtgtcttcttcgatgccaccttactcggtctaaatggcatccagggaccttcctatgttggcactggttgcatgttccgccgaattgctgtctatggtattgacccacctcgttggagatctgatgacttcaagatagtggacaatgccaacaagtttggcaactcaatgtccttcatcaactccataccatcagctgcaaaccaagaatggtccatgacatcaccaccggcagatgaggagtcaatcaaggaagaacttgataatgtcatgaagtgtgcatatgaggaaggtactgaatttggcaaggaaataggctgggtgtacaacattgctacagaggatgtggtgaccggcttccgactgcaccggacagggtggcgctctatgtactgccgtatagaaccagatgctttccgtggcactgcgccaatcaacctcactgagcgcctctaccagattctgcgctggtcaggcggttcccttgaaatgttcttctcacactgcccgctccttgctggtcgtcgactcaacttcatgcagcaagttgcctacaccaacatgacagcctacccaatctcatcggtcttccttgttttctatctcctcttcccagtcatatggatcttccgcggcgagttctacatacagaagccattccccacctatgtgctgtaccttgtcatagtgatagtgatgacagagctcatcggtatggtcgaaatcaagtgggcaggcctcacgttgctggattggattcgcaatgagcagttctacatcattggggcaacagctgtgtacccattagcaacgctgcacatagtg

SEQ ID NO: 40707 - DNA, 358 bp, Setaria italica
  Peptide Sequence Number=SeqID_106681
tttattactacaacaagttttcaactcctagtgaaaatgccaactaacccagtacaaaaatcaatctagcagctgcttgaatgttctctacctcaaaaagcaatctgctccactgaggagcggtccttgcattggttttgtttaatgaggtctacctatataagtagatttttttctaactaaaacaatgaattcatacttctcaaagtttacagacactgggaacagcatcaattcaactctgcttcctttttttttttttcaaaaagcaaacagaatcatcacttctactgcagcctaaaggtgttgataattatccagaaaagcaaatctcctttctataaggttcagcggtttg

SEQ ID NO: 40708 - DNA, 408 bp, Setaria italica
  Peptide Sequence Number=SeqID_106682
tgttgagctggccgggacgttccctccggcgatggtggcagtcggcgggttcgacctgctcaaggactggcacgcgaggtacgtggacacgctgcgccggaaggggaagatggtgagggtggtcgagtacccggacgccttccatggcttctacgcgttcccggagctcgccgattccggcaagttcatggatgacatgaagctcttcgtgaacgaacatagatgcaagcgtcctgtttagatgatctggccgtttcgagcatgcatggagaattggagattacgtggaatataatccgcgtcaaatctatgcaatgtcacgcactatatataatactagctaccagagcttccgtgcactgtgcattcgacgaggaagctggtagtattatacatagcgtgatgtct

SEQ ID NO: 40709 - DNA, 2519 bp, Setaria italica
  Peptide Sequence Number=SeqID_106683
gccctacccctctctcctcttctggtcttcctttcctggcggcgccggctgagcgagcggcagcgcccttcgccacagcttcgccacgccttcgccggcaacgagtttccaggttcctgctgtcagggaaaatgacaatggaggcaaagttggcgttctcccaggacagcccaccaatttcaatcatttgtgcggctaaggttgcgggtctacccctaaccattgatcctagtcttgcttctggctcggcacccaccctatggtttggttctggagaatcactccatggtgtcaacccaattctccacttcattgcccgcggtgcatcattttccagcttctctgggcagaatgctatcgagtttggacatgttgctgagtggcttgaatatgcccccatgttcctttccggctctgaatttgaaaatgcctgctcatttgttgatggatacttgacctccaggacttttgtggttggtcatgggctgacaattgctgacattgcagtttggtcaaatcttgctgggattggtcaacggtgggagagtctaaggaaatcgaagaaataccaaaatcttgtccgctggttcaacagcatagatgcagaatacaaagacacactgaatgaaatcgtggccgcatatgttgggaaaagaggaattggaaaatctcctgcaccgagcctcaaggaaaaggtacatgattcaaaggacccatcagctccagaagttgatctccctggtgcaaaagttgggcaagtttgtgttcgttttgcaccagagcctagcgggtacctccatattggtcatgcaaaggctgcactattgaacaaatactttgctgaaagatatcaagggcgcctaatagttcgatttgatgacacaaacccttcaaaagaaagcaatgagttcgttgagaaccttctgaaagatatcgagacattggggatcaaatatgatgctgtcacgtacacatctgactattttccaaagctaatggaaatggctgaaagtttgattaagcaggggaaagcatatattgatgatacgccaaaggaggagatgagaaaagagaggatggatggtattgaatcaaggtgcagaaataatactgttgaggaaaatctctcattatggaaagagatggttaatgggactgaaaggggcaagcagtgctgtgtgcggggtaaactcgacatgcaggatcctaacaagtcgctcagggatcctgtttactaccgctgtaatactgatcctcaccatcgtgttggttcaaagtacaaggcctatccaacatatgactttgcttgcccatttgttgatgcattcgagggagtgacacatgctcttcgttccagtgaataccatgaccggaatgcacaatattatcgaattcttcaagatatggggttgaggagagtagaaatttatgaattcagcagattgaatatggtttacactcttctcagcaagcggaagcttctttggtttgtacaaaataagaaggttgaggattggactgatccacgttttcccactgttcaaggcattgtccgtcgtggcttgaaggttgaggcattgatacaatttatactccaacagggtgcttcaaaaaatctgaatctgatggagtgggataaactgtggacaatcaacaagaagctaatcgatccagtgtgtgcaaggcatactgctgtgctgaaagatcagcgcgtgatctttactcttaccaatggtccagagaagccatttgttcgaattttaccgaggcataagaaatgtgaggctgctggaaagaaggctacaacctttgctaacagaatttggctagattatgctgatgcatcagccattagcaagggtgaggaagtaaccctaatggactgggggaatgctatcattaaagagatcaagatggagaatggagtgattactgaactagttggagagctacatcttgagggctctgttaagacaacaaaattgaagaccacatggctagcagatatagaggagctcgtccccctttcgttggtggaattcgattatctcatcagcaagaaaaagctggaggaggatgaagacttcctcgacaatctcaacccttgcactcggcgagagaccccagccctcggagatgcaaacatgaagaacctcaagcatggagaggtcatacagctcgagaggaaaggctactacaggtgtgacgccccgtttatcaggtcatcgaaaccggtggtcctgtttgcgatcccagatggtcgacagcaggcctcgctgaactaggcagcgtgccaccgagggcacatggaattccttaatgtaaggtttggcaatcaatattgtggtatatactgtgattaggcttactcgccgtagattgtgttcactgctagatggccaggcccatcctgccaaccgagtggcatgggcattttgattttggttgatacttacatcagtttgaagatgctggtacttctatagccaaaaaaaatgcatcccagcatagtcgcttac

SEQ ID NO: 40710 - DNA, 372 bp, Setaria italica
  Peptide Sequence Number=SeqID_106684
tgcccattgcagcaacccaagagcctgatttcgttcctgaccgtgggctgcttcgtcaggatggagaaggaagggtcaccgagaggggagagtcttcctggaaggctgatgaagctcctgttgacatggcggcgggagttccaaggggcgcccgcgccgccggcgccgtggcggatctcggcgtcgctgcagatgaagccctctagggtctgggggagccgcttgcggtggaggggattggcgatgaggtcgcgccaggctttcgagacgcacttgaaacggtggatggatctcacggggacgcgggataggatggtccacgatggagtcgtcggggagcccggccgccggcgccggcgccgcggtgccgct

SEQ ID NO: 40711 - DNA, 539 bp, Setaria italica
  Peptide Sequence Number=SeqID_106685
taagtttcttctaagttctcaatctgattgttgtctgtcagatcatactttgtgttcttaaacttaaacgtctcgattcatgagacgattaagttttctagcgaaaactgctccttaccgagtgtccacccctccctgtgtgcttgcaccatcaaatcctttaggcttttcatcgagaacttgccaccattagttagaagcctcgaccacttggggttcgatgttaatagcatgtggagaccttcgttaggaccaatcacctcaatcagcatagaattttctttgaaatggttaactggattcttgtacagtaagtggtaacaatctttatcaacgcagttgacagtacaactttcttgtaatagaggtgcaatggttatcaacattatattgttgtgcctgcttatttacgtaaagataagtaattcaatttacaagataattttcactctaggaagactagttgtaaggttaggttataatagcttaacgaaagtcgtacttccatgcaacaattacatctcattcatttaacgaaa

SEQ ID NO: 40712 - DNA, 534 bp, Setaria italica
  Peptide Sequence Number=SeqID_106686
cgtggcccttgtatatgtatttgaataggtatttcacagatttaatgctactacatgcctcaacattgatgtggcaattgaaagtacgcagcagacatgggttgtatgggacgacccactgattgtccaggatgtgacctctaattatttccttacgaccatcatcgcgtcgtcgatagattggggtacgaatccttaccttgcgacgttgaatcatagaatggccgcgggtaacggtttttgcatgaagtacgtccccttgtgcatggacataatggatttagcatcccgcatgggccatgcatcatatgcttcgtcaccatcctgtagaggtcaaggtacttcttcttgtttggtagctcagcagagataaggaggtcatactgttctggacacgtgatcttgtacttcctctgcattattagcaaaaagtgtgcatgcggcaagcccctcttctagaactccacgacatatacgaatgcacggacctttccaagtatgtctttttacctaaagttaattagttacttttta

SEQ ID NO: 40713 - DNA, 489 bp, Setaria italica
  Peptide Sequence Number=SeqID_106687
ttttttttaaggtagtagtaactactatatagacatatacaaaagttacaagttcatttacatcacaaaagtatgtatgcaaaaatttgagtgacacatataaattgaaatatatatatatatatatatttatatatataaatgatgtgctgaaaagaatacttcttcatcatgaatcaattgacttctcaattgagtatccttccttgcatcagagactcagggtagacaatccatccaactccaagaacaggttccactccaatcaatgatctcatgtatagcgccttcagaacaatctgatgcccaataagaccactccaaagcctccaaatcatatataggtgaatcaagaaaaaatagctcgggaaactaatcatgcatcaacaatgcaagccatgggaggaggaattcgaaattggaaaagaagctagctgttcattttggtgctccgacgactgatgcttcaccgacaatcgtactaattct

SEQ ID NO: 40714 - DNA, 344 bp, Setaria italica
  Peptide Sequence Number=SeqID_106688
ctcgtagttatgactaatctaaatggaaacatatagagggagagggctctcccgttaccactcggttgagagccccctctgctccttaaaaaaaccaaaccttattgcaaactcccaactcactcatcatctcctccgattccgtcctcgattgctcctccatcgaacgccgcttacccgcctccacccacccagccattggtgccaccacaactcccctcggcctgcccgcagcccccactggcgggggcggcgcatcgccgtcttgctgcgctgcctgcacctactaacacggcaccgctagatccgtcctctcctaaccccaccgtcgagcctcccccacc

SEQ ID NO: 40715 - DNA, 1285 bp, Setaria italica
  Peptide Sequence Number=SeqID_106689
ctcgaacgggcggccatgtgaatattcaggtcaacgagtcctgatccatggcaaagcaagcctatgcaacgagcagcctggtggtgggctacggggtgtgctccagcttgctggccatcatcaacaagtacgccatcaccaagttcagctacccaggcctcctgaccgccctgcagtacttgacatcagtggttggtgtgtggctactcggaaagcttggcttcctctaccatgatccctttaacttccagactgccaagaagtttgcaccggctgcagttgtcttctaccttgccatcttcaccaacacccacctcctgaagcatgccaatgttgacaccttcatagtgttcagatccctgacaccgcttctggtggctattgctgacaccacattccggaagcagccgcgtccttccaagctcacattcatgtccttggtgattattctgggaggcgcagttggctatgtgatgacagattcggcattcaccctcactgcatactcatgggcactcgcttatctgatcactataactactgagatggtgtacatcaagcacatggtgaccaacttgggctgaatacctggggctttgtgctctacaacaatctgctttcgctgctaatggcaccggtgtttgggcttttgacaggggagcacttgtcagtcttcagagccattgaatcaagaggacagagctggtttgagcttgatgcctttgtggcagtttcattgtcctgtgtgtttggtctgctcatcagcttctttggtttcgctgcaaggaaggcaatctccgccacagcattcacagtgacaggggtggtcaacaagttcctcactgtcgcgatcaatgtgatgatttgggacaagcatgcaagcgtgtttggtttagtttgcttactcttcactctcgccggtggagtgctctatcagcagtcagttacaataaaagggaattccccagcacaacgagaggtggcagctaagcaaggtacagatgataatgacacggccgggttggatgaggagaaccaaaggctggtttcatctccaaaggttgtctgagcctctgaagtatatggcccctaaagatatcaagttttgttcgtttgtgtaataggcattgtttctaaagactcgccatagtcatatactctaggaaagtcaagaggtagcattgttgttgtagaatgacttctggcctgcactcggttccatacggactcaacttaactgtataccagagtcactatgtacgtccttcctgaaattttacatatt

SEQ ID NO: 40716 - DNA, 353 bp, Setaria italica
  misc_feature (305)..(353): n is a, c, g, or t
  Peptide Sequence Number=SeqID_106690
ggtgcccatgagggtggtctcgaggctggctggggcagaggttgtggagacggaaggggcggtcgccgacgggaagatcgtgacggcggcgggatggccggaccttgcgccgttcgtggctcgcctcgtcgacctcctcggcatcaccgtttcgttctgaagcggcgtcgcatctctgctctgcaaactctcagcgcgcgctgaactgaacactgcggtgttctgaatgtccagttgtttagagattctcttcatgtggtttgagaataaaaccgatgaatcacataaagttttgttgacaaagnnnnnnnnnnnnnnnnnnnnnnnnnnnnnnnnnnnnnnnnnnnnnnnnn

SEQ ID NO: 40717 - DNA, 469 bp, Setaria italica
  Peptide Sequence Number=SeqID_106691
aaactgaactcctgaataaaccatgtcccatttgggatatggccacacattgtaagacagcaccattagcaacctgaacccgaacagagtcagacaagggaaccacccatccagtttgtgagtaatgtggtgactgaggaaagtatgggagctgcctgagtcaactaaaattttcagaggtatattctggattgatccttccaattgcatggtgcgagggccctcggtaccagctgatgtatctttggagagtgctagaaagagctgttcctaaaaatgatgatcagaaccagcataattgacactgtcaggtccctgggtgacttttgaatggcgttgagctgtacagtagctgaacacttgtggccatggtgccattttcggcacatttgtcacacagtcctcgagcccgccgataagctcgaagggaagcaaacttgtccaactaagacttgttgaaatctgtagg

SEQ ID NO: 40718 - DNA, 477 bp, Setaria italica
  misc_feature (444)..(444): n is a, c, g, or t
  Peptide Sequence Number=SeqID_106692
cccaactagcacatgttacaattgcaagtcccctgcttggcttacgtggccaagatactttagcttttactgcaggaaatggtaaccctggattcttgtaagagcatacaggaaccactttaagcaaggaaccatgaaattccatcccattcaatttcgaaacagcatcctcagcattttctggtttaagaaatgtaatcttcccccatttcatttcatctgaggttgcctgaaaatttccgaatttataaaaattagatataccagggacatgagcatccaccaaacaatcatgtccttctcatctatatcccaagcattttgatgcagaatctccactgtcagatatctcttcccaagctccaaatgtttgatttcagcacctgagccaaatagtgaaagaacagagcagcctggtctcctctcatcacattcattcctcancatcttagcttcaagttccaaagcatcattaac

SEQ ID NO: 40719 - DNA, 534 bp, Setaria italica
  Peptide Sequence Number=SeqID_106693
ttttagaattcaaaatctatcccaaaaagaatggtgttttaggatttaaatcttatgcatacataatttggtgcgttgatctcgtgcatgcatgattctatggaaacatatttcctccatttctatatgcaaactgaactaattaaggatacatgtgtctttttcattcatccctaatctgtttgaaaaatctcaaaaaatcattatttttaggacggagggagtacataataacttattagttcacagttaaacaggccagtcatttccagttggctaaactaatcaactaatccataatcgaccagctagacacagagacagctggattactatatccgtctgcgcccttaagataagtggcacaagcaaccacaaagctacaagttaaatggacaatctcttaaagtaaggataaagcatcataatgaaaaaaaagcacattagctgtagtccacatgactagcattaacgtacctgcaatgctcgcaaagagtttgttgagtaactatttttcttggtaattttttgtct

SEQ ID NO: 40720 - DNA, 745 bp, Setaria italica
  misc_feature (716)..(745): n is a, c, g, or t
  Peptide Sequence Number=SeqID_106694
tttcttttcttacttacttttctttcttagttcgttatttcgttactttggttaagttaacgttgtcgttgtctacctattgaaggctgccgcggcgacgcttctgatggcgctggtggtcgcggcggcggtcaccgtggtcccatccggcgcggccaggcccgacgactccgcgacggtgggcaccttcggccatggccacggccacgtcggcggccgcacctggcgcgatcaccacggcggcaaccgttccccgctggcggggctgacggagtgcgtcaccgtctgcgggtccggggtgaccaagtgcatgctcgactgctacaagccggccatcagcttcgaccccctgcagctgcccgtctgcctcctcaagtgcaccaacgacgccatggtctgcggctccagctgcgccaccaatctctagacgtcgttcagtcacgcattaatcctgcatgccaccgcttgtacctaactaccgatcgaatgctatgccatagtgccatgcaatgcagaagtataccactaggggaatatgtcccaaatacacctatgattgtaattcatgcatcccatactaccaatgggttgcaaaaccgtccttaccacgaataatgcaatggctacttattacataccggttcatcgaataataatttacgttaatttaatttaagttttagtttaaagttttactttttttacttttttaaaannnnnnnnnnnnnnnnnnnnnnnnnnnnnn

SEQ ID NO: 40721 - DNA, 720 bp, Setaria italica
  Peptide Sequence Number=SeqID_106695
atgctattgtgctgcaaaatttcaacatcatgctcattatttacagaagacaactcggggtagccacatcaattttgcagccccaaataactcaattacaaatttgtatgaacacaaattatgatacatggcaactatttacacttgaccagtgccgtagttgtttgttaccacagaatggtacaaggagtaactgcacaggtgaatgaaaggaaattcactttactttcatgtggtggcagtggggttttgaggtaagttggggggttggggtttcagaagattagttttccagaaagcatatttctcaagacatccaccagtcacaggcactatgcagaacgccagaaaaaaactgatccgcatgttgtgatccaaaaacttgactaggattatgtacatggatgcttctgaatatatggctatcattcaaagttatcaatgaacttattaatatatggttcctcagcacagttagcagcagcagaacatgcaattctttggaaccaatgatgaaagaatcaggtagtattgacatgaaaggatgccatgggtgaacgagtcagactgaacgagtcagactgaccgggaccaaggccccctcaaaagctgtagcagcacaggaagggctacagcgatggcaagacagtttttcagaaagccgaaatgtcagaatagttctcagatatccacccacgatggtcacacaacactgcagaa

SEQ ID NO: 40722 - DNA, 531 bp, Setaria italica
  Peptide Sequence Number=SeqID_106696
agaccaagtccttggtcccggaggtcgtgaaagccatctgcagaggcatcgagaggcttgtggaggagggagtgaggtacgtggtggtgtcggggacgctgccggcggggtgcctgccgatggcgctggccaagtacggcggcgccggcgaggcggggaacgcgacgacggcggagtacgaccgccggacggggtgcctgcggcgtctcaacggcctggcgcagtaccacaactggatgctgcgggaggccgtggggcacatgcgcgccaagtaccccgccaccaagctcgtctacgccgacttctaccgcccggtggcgcgcctcgtccggcggcccagaaaatttgggttcaccgaggagcctctccgggcgtgctgcggcggaggcgggccgtacaactacaacaccgaggcggcctgcggctcaccggacgccaccgtctgcggcgacccgtccaagtatgtgcattgggacggcatccacttgaccgaggccgcctacaagtacatcgccgacggctggctggatg

SEQ ID NO: 40723 - DNA, 852 bp, Setaria italica
  Peptide Sequence Number=SeqID_106697
gcggcatgtgtcagccataagctaccacttttagaggtacacactcccattgcagatttggaattctttgttgacaaaccataggactaccatctgcagtgacaaagtgagaaggagcacatgattgcaaagggtactgcaactgtgcaggtaacttatcacttacaaaggaccccacacttccagaatccaccaaaattagaatttcctgatttgccaccaacccatgtaacctcatagttttcctcttgatagtgtttggagaagcagaatccccaatagtcattaccacatcagtgttttccccctcactatcaatagaatcaagctcctccatcaaaggttgctccaaagcatcccacaactcttctatgacatgaatagcaacctgagctggacacttatgattacggccccacttttctccacatttaaagcagaggccatttttcttccggaattgcagcagggactgaactctgtcctcagattcccccttttttcagacttaagttttgggacaaaccccttctcagctcctgtatgcttgaacttatccactggaaaattggacttagacactgccttatggttctctttggttatagaccggctcacttgtgaggccaaaaacctcctcctgaacaaaagccaacgctgacgcgtccatcacattactgggcctatgcaaagaaattggcacgcgtatctcctccttcagaccacccatgaaccgagtcacaaaataagtatcatcataagcactgttgtacagtaaaacgccgtgagataactcctcaaacttctcaaggtactcagccacagatccggtctgacgcaaaactaattcct

SEQ ID NO: 40724 - DNA, 918 bp, Setaria italica
  Peptide Sequence Number=SeqID_106698
tttgtccaaatatattcaacttaggatgagctgatcaagcaaaaagctgtcaagataccaaagaagtcaacttaagatgatgatgtgctcatgctttacgaaacctacatgccttctcgaacacttcaattacatcaggtgggcaagttcttttcagattcctgtaaccttgggttctctgcacagcatccctagcaattgaacaggtgataaattccaagcaagcatccttaagcatgtcacattgatgctgatcagctaaagcaaatgtggttgccacggtctgcacacagagattctcacaaagaatactttgacacatcagagttagcctctccatgccataccggtccgcagccacaagcaggtggcggatcatatcggtacgagcatctgccttaagataatccaaagggggcaacgagtcagtgtagatgaaatgaagcagctccctgaaaacatcaggctgcatatcgtcgatggttatgggcactgccttatcttccctcaaaggcccatagagctgtgctttgaagacaggtgagcgcgtggcgaggacaaccttgtgcgctgcgaattcctctcctcctacactgaaagtaacatccacccccaccttctcttccaacagcttggcataatgccctgccatatcagactgcggcacctgaattttgggaatagttttggttgctgtcctccatggctccttgatgacagtgaccgtgcattccattgtgaggcaatcaccccgaaggcaagtaggcgattcgaagatgctgcgttttgcccgaaagaaactaatcgcgctatgaaaatctttgtctctttggaactccctcggtgcttccttgtgcaccgagaccaacagcccagtgctctggtcgaccaaccgcagctcgtaggacgccctcaact

SEQ ID NO: 40725 - DNA, 776 bp, Setaria italica
  Peptide Sequence Number=SeqID_106699
tcgccgttcaccggcgacctcgcggccgtgacgccacattacatcaccgcggtaagcttgtccaactactgcgcgtacctggtgacgcaggggctggtgcctgacaacggcctcgtcgccaacaaggtcttccacgccgtgtctgacgaggtccgcgatgccttgcgcgggtgcagcacaatgacagagatccggaacaaactgactgtcactcctgaaaacggcgcggcgacgacaatcctcgggatgggcgcgcagctgtcggagaagctcatgtccttgtacaagagggacgacgagctgtgggagcgcctgggtaggttctgggcagggttcctgctgcacctgtcggcgtctacgagggcggccaagcacaggatacatctgcaagggcgtggggagctcaccacgctcctctgggtgctgctgtcgcacgccgggttcctcggcaacaccagccacggagagcaactgctggacccggaagacctcaacgacgtctgctgatcagtgcgcgcgaatgtgtgtgtgagcgcttagatctcggttgtcagtcccagagtatcttcacgaatgaccaatgattcctttgtattctagactgctggttagtttggacttcgtgtggtgtcttcaccctatgatttcttcgtgttctatgttcatgtatggtcatcatatttctgaatgcttgtaagccattgttatgttcttatataatgtattcacagcctcttacgtactttgaaaggcttgaacttttgtctacttaaaaa

SEQ ID NO: 40726 - DNA, 470 bp, Setaria italica
  Peptide Sequence Number=SeqID_106700
tacttatttgtcggttattattgttacttgctttgcaactatttttcctttgaatctgcaaagtgcaaactgaagttgcaatgctaatacacaccctccccctcaccccaccttccaaagttctttcttacctgatggtttggatcttttgattgtcttgagatgtgattttgggtcattactgtacgtaactttgcatcacagtagtgtaatgtttcaaaactacttttagtgacacattttgtatatccaactttgataatttgaaacgtacacgttaacattttttgggatgttttaccacatggatttttaagtgccaatggtcgagggatttatgaatatggaacttcaaaattgaagcaatgcagttttctctaaattacataccatcactgtacttttttctgtaccaatcctacttccctttcatgagagcttaccacatcttatatgattttgattactgc

SEQ ID NO: 40727 - DNA, 554 bp, Setaria italica
  Peptide Sequence Number=SeqID_106701
caattgaaattcctggggagttatacatttgtgtattgataagaccattcacaatttcttgaagctcgatctcccccccagataaaccatatagccaagagaaaccataaaccagaatagaagagcttgccccacccatgagtaaatatttcatagtagcctcattagaccgtagatctctcttggtatatccagacaataggtaggaacataaactgaaacattctggagctacaaagatagttattaaatcgttagcaccacataaaaacattccccctagagtagctgttaatacgaataacagaaactctgttatagccatttctgtacattcaatgtactctacggatagaggaatacataaagttgaacataataaaataagaaattgaaagatttcgttgaaattgttcgtttggaaatttcccgaaaagctaattataggttcttctctccatcggaacaatagggccgttatgcttattactaaacttgttgaagagatgaaatagaaccaaggtctatctttttgatcagaggttaaatcgatc

SEQ ID NO: 40728 - DNA, 437 bp, Setaria italica
  Peptide Sequence Number=SeqID_106702
ttgttgtgcccccactgcagcagcacgtcgccgacgacggcaccgccgccgccgccgccggtggaggtcggcgaggtggtgtcggaggagtcggagttgtggtggtgcgcgtggtcgcgcgccgggctccggccggccgccgacgttgataaaggcggcggctgcggcgcgcgggcgcgaagcggcttggactcgtgcggtgtggcagcgaggtacgaggcgaggcgggagccgtccgttgcgccacggccgggacgcgccgacgacgccaccgagtaaagcgccctgtcggcggtggcctcatcgtcctcctccatcggcagctctctcttcacggcagcaatcctcaccggagccgacaggcggctgtctttggttgggaggctgagcgacaacgacggctccaaccgcgcccatgagcgcgacgacggcgaggg

SEQ ID NO: 40729 - DNA, 230 bp, Setaria italica
  Peptide Sequence Number=SeqID_106703
cagagcttaatcatatctttccgtgcatgctgcatgggcatgccgtcgaggggatgggggccaatactaaccttgctcgtctgttttggaaccacacctccacctgccgtggccgcaggttcagttgcttggccagcgcgactttctgcttctgctcaaagccaaaaagcacaccaacagaaagcgaaaagagaggatgttcagtcacagataagctcatctcatctgga

SEQ ID NO: 40730 - DNA, 1445 bp, Setaria italica
  Peptide Sequence Number=SeqID_106704
caaaacaaaatcaatatattatatagttggtgaaacaaatacatcatatggatatatacatgaattcacatccaaataaactgggatgtgtatgtggtgtcatgtcatcatcatctaatgatgatacttccctgactgacaattaataaaaggaaattcatcagtaacaactactaaagctatagctacaccaacaacatccacaatactacctatagcagcagcaacaccaagctagacattttttttccctagatgcatgcatgcgtggtgctccatcctcctcacacgctagtatttcattagcttgtgaaaaaacaaagctaacgaattaagggggaggggaggggaatatatgcaatctatggccaatcaattgcttgtacatgatgacgaataatcgatgatgcagagatagaatggctagctaaaaatatatgtatatatatacatataatgattaaaatgatttgctattgcctaaatcatgggtgaattgatggacgaaacgttcagcaggcagtggaatgggtgaaagggctgaacaaatgggctgctcggccggggccgccgcccgccttgggccggtctgcaccagtggtggtggtggcaggcgctccggcgaggcgctcgcaggaggggcagatggagagcgtggcggcgggcatgaaaaaggtggctgggtgggggtggttgagggcgcggagctgctggagctcgcggtggaggcgtcggttctcctcagttaacgtctcgcagcagcgcttgagaagctcgcagtccacctctgtctgcttcaatttcgttctggctcttctgttttggaaccacacttccacttgcctcggcctcagattcagttgctttgccaaagcagccttttgcttagggttgagggtgctgtgctccttgaagcggtcctccagcagcgccgactgctccttggtcagcctcagcttcttccggctgttgcacccttcgtcgtcgtcagccgctaccagcgccgacgacgccaccgagtaaagcgccctgtcggcggtggcctcatcgtcctcctccatcggcagctctctcttcacggcagcaatcctcaccggagccgacaggcggctgtctttggttgggaggctgagcgacaacgacggctccaaccgcgcccatgagcgcgacgacggcgagggctgttccttaagctcgtggtggccggaggagccgagggagaggcccagggctagaccgacctcttcttgctccatacagagtttctgctgttgtctaagtcagggagataacgcaagcaatggtttcttgcgaaagttttacctatggcctgtgtgcatgtgctcgctagctgcttctgcgcttttgtgtatgtgtggagagagagagctagagagagaatggttgggggaggagagaatatgtgtgtgagggcgcagaagggt

SEQ ID NO: 40731 - DNA, 523 bp, Setaria italica
  Peptide Sequence Number=SeqID_106705
attgattaattaagtgttttttagaatcccatgtcaattctttgttgaatcagaaatccaatctcagccatacttcgacatgccatgccttgttgataacgtttctcggtttctgtaaccatgacataccatttctcatcttttttgacatcaatcgtggtaatttaggttagattcttatgggaactagtatgttttttggcgctagaacttgcatacaaattggacaatttgaggttgttgtgttgggtgttctcataaatccacaggcctcatgcatacagaccccatcaaactttaattgcatccatgaccaaattttcaataaaatgccaggaccttttgtaagttccagtggaaattattttgaagtattacgttacctgctactttttggtgtgccctaatactattatggccgtattttccagttttgctctcatgaggccaacaaaattagacctgctggcacatggtcgatgtcagcatgtaactgtgaggactgcctattcttttagaatgc

SEQ ID NO: 40732 - DNA, 512 bp, Setaria italica
  misc_feature (290)..(290): n is a, c, g, or t
  misc_feature (423)..(423): n is a, c, g, or t
  Peptide Sequence Number=SeqID_106706
taaccaagtttggtttgtctaaagcaaccatatccattaccacaagagtatccacaaagtatcttaccttctggatgtacaactcaggacccaactgaaggagctaaatttactgcaaatcagtcatatccattatctagtggttatttgcacagtggcttgttaacttctggatatgcaactcagaattcaacttacaaaggcaggactcatttgaatccaactccatatggccatttatatactgatttgctctgtctaatccacaaagtaactatgaaggtcattgngacatctgctttaaccaaggacgcgccagtgcacataataatgacatatatgagtgtgagcgtcagcgtttcagcgaaggaacacctgcgaaactaagcttacaatgtattcccacatacccctgaatttccngaacgcaatgggaaaatagtaccagcaattgatcagaaaggaattctgctgattgcattcagatccctgattgtgatcagatgagatat

SEQ ID NO: 40733 - DNA, 560 bp, Setaria italica
  misc_feature (71)..(71): n is a, c, g, or t
  Peptide Sequence Number=SeqID_106707
cattctgaagtggatcacaattaacaaactcacatcaattctttcttttctttgttttgcgtaatgatganaatttgatgctgtgcatctccatcaggtttacccaagatcatggacggcgatctacatgcccctggacaacgttgggatgtggaacgtgaggtcggagagctgggccaggcagtacctcggccagcagttctacctccgtgtctactcgccggcgaactcgtggcgggacgagaaccccatcccgaagaacgcgctgctctgcggccgggcttccggccgccggaccaggcctctctgaatctgaagctctgaaccgaaaggcccggtgttcatgtcacgaaggggtgactgaaacttgcgggaatcagttgatgagggtagagatatattggaatgctcagattgctgagcagagttccactctggcgttgtttcctcatattattttagcaattgtagtctaaacattttgcggtgagtttattgtacgggaagcgtgctcgcttccttactgacactatcgatcgaatgatatataatttattcat

SEQ ID NO: 40734 - DNA, 1186 bp, Setaria italica
  Peptide Sequence Number=SeqID_106708
aacaaaccagttcccggggccgcagatcgaggcggtcaccaacgacaacctcatcatcaacgtcttcaacaagctcaacgagccgttcctcctctcctggagcggcctccagcagcggcggaactcgttcgaggacggcgtggccgggacgacgtgcccgatcccgccgggcggcaacttcacgtacatcatgcaggccaaggaccagatcggcacctactactacttcccctcgctcgccttccacaaggccgccggcggcttcggcggcatccgcgtcctcagccgcccccagatccccgtccccttcccgccgcccgcctccgactacaccgtcctcatcggcgactggtacaaggccaaccacaccgatctgaggtacatgcttgatagcggcaaggcgctcggcttccctgacggcctcctcatcaacggccggagttggaacggttacaccttcaccgtcgagcctggccggacgtaccgtttccggatcagcaacgtgggcctggcgacctccctgaacatccgtttccagggccacaccatgaagctggtggaggtggagggctcccacaccatgcagaccacctactcgtccctggacgtgcacctcggccagtcctactccgtgctcctcaccgccgaccagcccggcttcgactacgccgtcgtcgtctccacgcgcttcaccaccaagatcatctccaccaccgccgtcctccactacaccaactccgccggcaaggctcccgggcccctccccggcggccccaccatccagatcgactggtccctcaaccaggcccgctccatcaggtggaacctgacggcgagcgggccgcggcccaacccgcagggctcgtaccactacggcctggtgcccgtgacccggaccatcaggctggccaactcggcggcgatcatcaacggcaagcagcgctacgcggtgaacagcgtgtcgtacgtgagcccggacaccccgctcaaggtcgccgactactacaagatcggcggcgtcttctcggtgggcaccatcgccgacagcccgagctacggcagcgcctacctgcagacgtcggtcatgggggccaactacagggactacgtcgaggtcgtgttcgagaacaacgaggacgaggtgcagtcctggcacatcgacggctacgccttctgggtcgttgga

SEQ ID NO: 40735 - DNA, 1381 bp, Setaria italica
  Peptide Sequence Number=SeqID_106709
ggtggcatcagggttcttagcagaccgaggatcccagttccatttgacccccctgctggtgatttcaccatattggccggtgactggttcaaactcaatcacactgacttgaaaggcattttagacagtggaaatgacctgccattccctgatgggcttcttattaatggccaaggctggaatggcaatagatttacagtagaccaagggaaaacatatcgttttcgggtatcgaatgtgggcattgcaacatcagtgaatattaggattcaaggccattccatgctcctggttgaggtggagggatctcactccatgcagagcacattcacatcaattgatatccatctgggccaatcctactcgttccttgttactgctgatcagccacctgcagactactccataattgtctcgacacgttttaccacccctgtgctcactaccaatgccatcctccactacagcaatgcaaatggggctgccacagtaccgcctcccccagcgcctacaactgagatcgatttttctctcaaccaggctagatcaattcggtggaatctgacagcgagtggaccgaggccaaaccctcaaggttcttaccactacggtcttgtcaacaccacaagaacaatcagactcgccaactcgcgggcaaccatcaacggcaagttgagatatgcagtcaacagtgtctccttcatcccggctgacactcctctcaaggttgccgatttctacaacatctcgggtgtgttcacgctgggcagcatgcccgacaacccaaccggtggcggtgcctacctccagacatctgtcatggcggccaacatgcgggaatatgttgaggtcatctttgagaacgctgagaactttgtgcagtcatggcacatcgacggctacgccttctgggtcgttggaatggatggaggacagtggacaccggcgagccgtcagggttacaaccttagagacgccattgctcggtacaccttgcaggtgtaccctcagtcatggacagccatctacatgccgctggacaacgttgggatgtggaacgtgaggtcggagagctgggccaggcagtacctcggccagcagttctacctccgtgtctactcgccggcgaactcgtggcgggacgagaaccccatcccgaagaacgcgctgctctgcggccgggcttccggccgccggaccaggcctctctgaatctgaagctctgaaccgaaaggcccggtgttcatgtcacgaaggggtgactgaaacttgcgggaatcagttgatgagggtagagatatattggaatgctcagattgctgagcagtagtttcctacttcttggtcgtttgtccacttctattatttatttttagtctaa

SEQ ID NO: 40736 - DNA, 636 bp, Setaria italica
  Peptide Sequence Number=SeqID_106710
tttgtcaggttaacttgtattcaaatgtagttgcaaatctggcatcagaattgtcatggtcaaatgatcctgcctcttttgggtcttccctttccagtctaactgaactagaaacacattgttttgtggagctatggtagtcaggttgccaggaggtattgaagaccgcatatggtaccgcgtgatgctgctcctcaatctgataggggaaggataatctatctcgaaatgactcagtgagtttcaccgacaacattgggttccagccatgctgatcatttgaagcagtttgaacattcaagctcaactcattagctgaagctgttcttctgtggacgcatggttcgacatcctctagtaacaagtttgaaacctgcttgcctctcttccaatcagaactcgaaatatcattaacacacacccatggcaatgccatgcactcacgtgctttgctatctccacaaggtacgtcatttttccaatcaataaaacttggaagaccctgattgtatccccatggtaaagccatgaactcacgtgcgtcatcacttgcatcagaggatgaacttttaccagttcttctcagcttagttgatggattaaagtcctgcctgtaatctagcaagtaatcaaatt

SEQ ID NO: 40737 - DNA, 660 bp, Setaria italica
  Peptide Sequence Number=SeqID_106711
aaggattggaaaagtttttgtattgattcatcataaggttatctgttcttgcatcacaatcaaggcacatagatgcaatggtgaaactacaccctcattgctagtgtgacacaggacatccagaaggtcaatatcatctaaacacagtttttgctactgaactcggctgccttgtgtagcagtagagttgaggctagttagattgcagtaatcagcggacagttagttgcttccattctagtcttctactgaatccacaggagacggacagaatggaagcgaaggaaatgaaaatcaacaaccgccaaatctaactgagagaagatgcaaccttgttgctcctacaacctctcagaaacctgaaaacaaaacagatactcgcattgtgataataaaagaaaaaacaaagtcatagtgcaccttgctgttcaccagtcttcctatccttgattaaagcaacttcaagaacatctccatgttcctcaaataaaggacggacatctggacacaagaatctatcacaaactgaagaacacaataaattaaaaactaaataacagaacaataaaacatcacgcagaaaaaaatgagtatttgactagcttaaattcaatcacttgttagccaaaaagacaatgaaccccaaaaaaaaggagcatg

SEQ ID NO: 40738 - DNA, 2848 bp, Setaria italica
  Peptide Sequence Number=SeqID_106712
acagggtcagtctcttccatccatgcaaccgattcaacaactttcccaggcacaaggacgaaacacaaatgccgatgaaacagcaggaattaaattactctcaattacaggcagctggttccattgaccccagcaggattcagcagggcattcaagctgctcaagaacgtgcttggaaaagttagggcagcaggtcatgattacaaagagctagtcaagactcggaattgagctgtgttcgagcgagtgcaacatcagctggacctgcacggtgcctcgtatcagcagcacgccagaacagaacacagaaccaagcaaaaacaatcacagcgccaattgtactgccacgacgcacggaacatcacaaatcatgccacaatggtaaggaaaacacaaacgaatgggacccaggaaacgacctccggcagctcctgcgtgggagtaccaacccgctggagaacatgaatcgctaacaagggatacatggcctaggtcacaacgatgtacacatacaggatctaccatctacatatcagtctaatctaaatccagagttacactgatcgggatgggcgcctggctatgcaggctagctgttgttacagatggacagcacggggacagctcaattccgagtcttgactagctctttgtaatcatgacctgctgccctaacttttccaagcacgttcttgagcagcttgaatgccctgctgaatcctgctggggtcaatggaaccagctgcctgtaattgagagtaatttaattcctgctgtttcatcggcatttgtgtttgtccttgtgcctgggaaagttgttgaatcggttgcatggatggaagagactgaccctgtggtggtgactgcagttgctgtgctgcaatcttttgttggtgctgttgaagcaaaagcagtttctgctgttgctgctcatacagcacaaactcttcaggcttctcccacttactctcacgagtaacgctattgtagtagtacttaaaaccttcaggggacgtatgctctgtccagttgcaggttgaagacactgcaggtgaaccaacctgctgtttaggaacctgtgctgggggttgctgatttaggttagtttgctgctgcattagttgcagctgttgctgcaactgataaatcgcttgctgtgaagactggtaactagactgcaaagctgcctgctgttgaagcagcaactgtggtgcttgtgaaggcatctgctgcattgactgctggagcatttggggagcaacactggtgggaagttgctgctggccctgcatgggattggactgtacagatgaaggagcctgtaaagcacctagagaagcattctgttgcatcaatggctgtgatgctggaggttggccaggtaattgcatagatggcatattctggccatatgaaacaggtcctgtggattgcggaacctgaagctgcccaatctgttgaatagatccctgcaggggctgtccttgctgagcattctgcaattgtacggggaagttctgtggtggaccaggtggcttttgcatgggtgggatctgttggcttcccagatgatgcccttgtaccatgggagggttcatgcccacatgcgatgaagttggcacagctgtctgagttgataaggagccatttccaggaaacatcggaggtcgaaaaccagcagtatctgctgatgttacagcaccaccaagcgccaagggattgtcagatccaaaattattgtattgattagatgccattgaccttggacttgatggacgccaagagtcagaaggcatgtgccgaccccttggttcatcaagattggctgttggcctgataacaagggctgcatctgatcgaggactgaaaccaggacctccaaatgcagggccacccctcgattctccaggtctaggcctcttaggatcagcaaatcttatgactaatggttgctcgcaccccctcattatgtaagtcccactaagggcattcatagctgccactgctggctcttttgatgagaatttgacaaatccacaacctcggctctgcctcatgccatctctcataatgtaaacatcttccacatgaccatatggagcaaagatctcttcaatctcctttggagttgcttgcttattgagggacgcaacaaataatttgtgctcaatggccccatgtcgttccctttcgccatcagcatatctaacttgaacaggacccatcgctccaggtaaagtgtattggttgtgaagacccctgatggccctatctgcctcctccgaagtagcatatttaacaaaacaacaaccttgctgttcaccagtcttcctatccttgattaaagcaacttcaagaacatctccatgttcctcaaataaaggacggacatcttcttcagttgctgtcctcggaacagagccaacaaaaagtttgacataattacttctgctatcatgatcttggaaatccccacggcctccgcctcggttaccgccgccgtaccggtgcctctgcttgccgaagtcgtccacaccgccaccgcctctgtaccctccacccccgccaccgccgccagaatagtcggaagagccacggtacgggtggaacctcccgccaccgccaccgccttcctccccgccgcgggagtagcggtggggtgggctacctcctcctccgccaccgccgcctccgccgccgctggaccagcgagaggggccccgctgaaaccggcctccggagcggtcgccgccgccgcggtgcatgtggcggggctagggttttgcggggaagcggaagcgggtggagagcacgagagcaaggcaactgggcgaggcggagggatcga

SEQ ID NO: 40739 - DNA, 596 bp, Setaria italica
  Peptide Sequence Number=SeqID_106713
tttttttttttttaaacaaacaagaaaacgaagacgaaaccaataattccataagcggtatggataacaagttggcagccatggtactctagtctggtgccacgggcggttgtttaggttcacacaaacaactttcagagggggcaaattcccgagaactaggaaagtttgggtggcgccaagaatagcgtcaagaagccgactgagctaagctggacggggatcaattgacatgatggagcaggcggctgtcaatttatggttgaggaggctgcagcaacttggaatcgcaggccacgatcttcaccttgctcagtgtttctgaaatctcctcgctcttgaaggttgcatctgttagaatgaaggtccagacgttgtcgcagaacctgtaggtgtgcagatggcccttgatgttaaccttgctcttgacctgactgtccagcgcgtcagtcatggacttgtcgaactgcacaagaacttgaatggcgagctcggggctgacggccccgctggagacgagctcgtccagcgtatcggtgaggcaggtgccgatggtggacctccggtacagctcgaaggtggccatcccccaacga

SEQ ID NO: 40740 - DNA, 521 bp, Setaria italica
  Peptide Sequence Number=SeqID_106714
tagtctacaatatcaatctgttttccattcagcaaaatcgattcacaatttttttaacaaaccatgcagaagagttgccgattatattaaaagaaaataagcatagccacagcaaacaacaaataacaacaccggccggttggattaggacatcaacacgcaccgcgcagcattgccggttggattgggatatcaaccacaccgcaccaagcaacttgttactcaactcaacaaacatcatttaacatgttggattgggatatcaatccgtgccacataacctcatcatcttgctgcaataacctcatcatcttgctgcaactccaccgccagcggccttagcacctccgcagcatctccagcaaccgctccactgaaacataagccctgcagcgcctgcactaccaccaccagcagctctctcttctttttttcttttttttgcttttttactttttaggaaagaaagaagaaaaagaaatgacccaccacagccaggtggcatacgtcgaaccaccgtg

SEQ ID NO: 40741 - DNA, 561 bp, Setaria italica
  Peptide Sequence Number=SeqID_106715
ttttttttggtgtctgaactcatagttctcttcttttgccacacaaaggatgagctaactgcatatatttttacgaaagataggccgatagagtaactaataataagcctaataactaagctgaaacagaggaagcacaagaggtgatactgatagaagaattcaggatagctgctagtagtaatctagttgcagactaagtaaccaggaggctagttgtcgtctccgtaggcgaggaatcggtagcgctcctcgtaggggccgtcgaagtagaggtcggcctcgaaccagcgcgggtacctgacgaggtccccggcgacgaagtgcatgtagtcgtcgccgtggacggcgccggcggggatcaccttcacctccccggacacgatgtacacgagctggtccacctgccagtcccacggcatccggcaccgcccgcccgtgcgccacgacgaccacgtctccatgacgcgcagcgcctccgcgcgggcccgcgccaccgcgccgcgctccacccgcaccttgtacacgtcctccagggggcgccccagcagcgcgccgccg

SEQ ID NO: 40742 - DNA, 430 bp, Setaria italica
  Peptide Sequence Number=SeqID_106716
gggaaaactaagggaaaaaggaagttcgaagaaaacgagagtcctagctcttcgtgcaagctgcctaaaaagcagcaaaagttgcaaaagcatgaagcatcaccgaattgtttcttaagcataggtaagctggagaattttataacaacatggaaggaaacatgtcgtgaacatccagtccaacaggtatgtttagtactcatggttaaatctatgtttttcttacataattgcaaatctaagtaatctcatatatgtacctctaatgaggaagcaagcatacatcatccatttcctcaacttatctgaaacttaattgattgttagttgtttaccaggaggcatgctcagtctggacttatcctatttcagactaatttctttgtacctgtcactgatgcaggttttggaaatgatagcaaattactat

SEQ ID NO: 40743 - DNA, 404 bp, Setaria italica
  Peptide Sequence Number=SeqID_106717
gaaaggcttggtttgaaatctgagactaataaaaaaccagctttagagattagcaaggcaagagagagcggaaaaaagggaaaactaagggaaaaaaggaagttcgaagaaaacgagagtcctagctcttcgtgcaagctgcctaaaaagcagcaaaagttgcaaaagcatgaagcatcaccgaattgtttcttaagcataggtaagctggagaatttttataacaacatggaaggaaacatgtcgtgaacatccagtccaacaggttttggaaatgatagcaaattactatggaagaacaccatcagagaagaagaaaataataaatttctgttcgcagtacccaggcattggccttctcaatgttgccgttaaatcgatgggatgtggtctgctggatagca

SEQ ID NO: 40744 - DNA, 389 bp, Setaria italica
  Peptide Sequence Number=SeqID_106718
aacccaaataatgatatggtctaaagtttttcccccctctcttttattgcatgtatgtggaagcaattggaaacttctgtgcatgtctacaatgtggtgattacatcagaagcatagctgcagactgaattttagatgaaagataacaagtccagcttgcttttttctctttgaggccaagccccagttaaattagaagaggcatgaccacaatggcagatttgatgtatttaaccgctatagtccctgttcatatgtaacttacgagaaaatgttcaacaactgaccataaaacgaaccttgccatatactagagattccttttcactccataattctgtccattgttagcaggaaatggtacataggtagccacacatagattgcag

SEQ ID NO: 40745 - DNA, 464 bp, Setaria italica
  Peptide Sequence Number=SeqID_106719
tagttagtaacgagtacgaccgccgcggcgtgccctggaccgaggaggagcacaggctgtttctggaggggcttgagaagtacgggcgcggcgactggcgcaacatctcgcggtggtcggtgaagacgcgcacgccgacgcaggtggccagccacgcgcagaagtacttcatccgccaggccagcgccggcagccgcggcgacaccaagcgcaagagcatccacgacatcaccaccccgtgatcgttcgtggtcgtggagcacacaagcgcaggcagcaagatccggcccaagctatctatgtgcctgcatttaccgtagcttctacctttgcgagacgaaaaaaaacagccgtccctgtggttgtagagatgtgggcaaaattaagctagtggttggaatctggcatctggaacttgtattaagcagtactactatatagtggaataaattgtgcttgtgtgt

SEQ ID NO: 40746 - DNA, 252 bp, Setaria italica
  Peptide Sequence Number=SeqID_106720
aaggcagggcgcgcgcgcggcgtcgtcgtcgtcgtcatagcacagctgcacaaggagcaccgcctcgcacaccgccggaaaatgggatccgccgtgcagctcatcggcctcctcggcgtctcctcacctcctctcgcccagtcccactgcagctgcagcggcggcgccaagaagcaggtctgctcgctccgcgcgccgcggcagcagagtcggcgccgcctccgcgtcgcccacgccgtcgagatgggcgcg

SEQ ID NO: 40747 - DNA, 469 bp, Setaria italica
  Peptide Sequence Number=SeqID_106721
aaattgtgatcagtatttcgctgcatcttggatatgcaaataggacatgaaattattaacttgctcacggcaaccatagtagtagcacagaaacttgtttggtagccggagcagtccaacaaagaataggcaattatcaaaaacaaatagatcatccatgcaagtttttcagaactggcatctacaatgcattgcttgtgaattttggtttattgcctgcaggtacctttaccacatggcatagaaaccagcaggtatcattcctacaaaggcatacaaaccaggaaaaagaatatatcaagccttgttcaggtggttaatgttcgctagttcgcattcctcaaagctgattatgcgcatttcctctgccaactgccaaaggttttctaactaagggaggggttatagttcaataacctgaataggttgtgtcgactatacagttcagcctaagaaaggtcaaaatacg

SEQ ID NO: 40748 - DNA, 369 bp, Setaria italica
  Peptide Sequence Number=SeqID_106722
tgcccgggtctctctccagtgtagacttgggccagcaatgctagatatagcttctaattttgaattgctggcagctttatttggcagtggattagttgagccagatggcaaagcaaggcgtgagttcctgaatggattcctgactgaactagcatgggctttggcacatggagtagagtcattcttcaggtctcttgtcatgggaacaaccggcatgctctccttgtttgtgtgcttcttcaggtctcttgtcatgggaacaaccgggatgctctccttgttgtgtgctccaaatctttgagctttctcttacttggaggactttcagagtttcttttatctacaggaatgtctacatgagacttggag

SEQ ID NO: 40749 - DNA, 556 bp, Setaria italica
  Peptide Sequence Number=SeqID_106723
acgagaaccagaagcccggggatccgacggagaggaactttgggctcttctaccctaacaagcagcctgtatacccgattatcttccccaattagcattgcagttcagatttggagtacagatgaatgcttcgatgacgatttgatacttatccaacggttagtggtcactgtacgcactatgcaacgtcaatatacaattaggggtggtaaaggaccctctaattgatcctagcaaatttaaggatcggactcaataaaaaccggactatagtattatataattttgaaataaggttgagttagattgtgaaggaagcatgagggctatgatccattaccacccctatatacaattcatggcggtaacaaaatgacttctcttttagtaaccgtgcgtacttggctagttggcttcctgtcttagaattgcaggcttgtagctgtgagctgccttttctgttggtgctgtcatgctgtggcatttgaagttgtggtctttgtaatatattattattattattatttgctataaagggacatttcttcttaaaaaa

SEQ ID NO: 40750 - DNA, 951 bp, Setaria italica
  Peptide Sequence Number=SeqID_106724
caggccacagcacgcctgccttgcaacactcattgttcaccccactcctcacactagctacatcgtcgacggccatggcggcgcccgtagccaaaagaaccctgtccctggcggcgtgcgccgccgtcctcatggcggtgtccttggcaccggtggcggcgaacgaggaaggagacgcgctgatggccctgcgccatagcgtagaggaccccgacggcgtgctcgcgagctgggaccccaatctggtgaacccgtgcacgtgggttcacgtcggttgcaacgacgacaaccgcgtcaaccgcatagagctcgccaacatgagactgtcgggtcctctgccggcggagcttgggaaactggagcagctgcagtacatggaaatgagcggtaacaatctccagggcccgatcccggaagagttcggcgacctgaagaacctgatcagcatggacctgtacaacaacgacatctcagggcacctgcccaggacgctcgggaacctcaagtccctgcagttcctgcgcatcgaccacaaccgcctgacgggaccgatccccagggagctgtccgaactgcccaaccttgcgaacgtggatttctccagcaacgacctctgcggcacacccgaaacttccgggccgttccagaacgtccccctcagcagcttctccaacaacccgcggctgaggcaggggccgggcgcgtacgacgcccactgctagactgagactggctggcaccgccagcatgaataacaagagatcgagcggtgtttggtagagcagtgcgccgacggaatcgaggacggcggcgcaggctgtgtgtgtgtgtgtgtgtcagggcaaagcagcacccctctgacgggggcctcgtctgtactctgtgttcacccggcgccgatcgcaagtgagaaattgagaaaaccaaattaaataataggttaaaaaaaaa

SEQ ID NO: 40751 - DNA, 345 bp, Setaria italica
  Peptide Sequence Number=SeqID_106725
cgcgcaaggcgctgctggtgtgcagggtcatcgcggggcgggtgcacaagccactggagaacctgagggagttcgcggggcagacgggcttcgactcgctcgccggcaaggtcgggccctactccaacatcgaggagctgtacctgctgaacccgagggcgctgctcccgtgcttcgtggtcatctgcaaaccgtagtagcatggcagagctagagacaccacaccatctcatctcattgttactagtaattaaccattcttttttcccttgttatgttctgctctttgtcgtgcgtctcggttgctactctgttgccgtttgtttcagctaacagctagtaagt

SEQ ID NO: 40752 - DNA, 1400 bp, Setaria italica
  Peptide Sequence Number=SeqID_106726
ctggcgaagcttcacagtgcagctccagcgcatggctttgcttacagcaaggctgccattgagaaggcattcggtcgtgagctttctgaaatattcgagtcctttgatgagaaccctgtagcttctggaagcattgcacaaatacatcgggctacactaaaacatcaacatcctggaaagcatgttgcagttaaggtgaggcatcctggtgttggagaatcaatcaagagagactttctactcatcaatcttctggctaaggcttctaatatcgtccctggattgagctggctgaggctggatgagagtgttcgccagtttgcagtattcatgatgtctcaagttgatctttctagggaagctgctcatttgagtcgttttatatacaacttccgcagatggagacatgtttctttcccaaaacccttgtatccacttgtgcatccatctgtcctagttgagacttttgagaatggagaaagtgtttctcgttttatggatgaaatcgaagggaatgctcggatgaagaaagaccttgcacacattgggacatatgctttcctaaagatgcttctggaggataattttattcatgcggatatgcaccctgggaacattcttgtccgtttaaatgagagcaagctttcaagaagaagatttttcagagccaagccccatattgtgtttcttgacgtgggcatgactgcggagctcacacgagctgaccgggataacttacagcagttcttcaaggcggtggctactagagatggtcttactgctgctaagtgtacccttcagttgtcaaagaatcagagctgtccaaatccagtggccttcactgaggaactggacaagacgtttacattctggggtacacctgaaggggacgttttccatcctgttgaatgcatgcatcaattgcttgatacagttcgccgccacaaagtcaacattgatggcaacatctgtactgtaatggttaccattttggtcctcgaggggtgggcaacgcaagctggacccaggctttgatatcatgcacacattgaagactttactactagagaaggatgtcaagcaaccagttgattttttctcgtaaacaaacagtatcagaccgctctttatgtatagcagcagctgaagatgatgggtggaatagaagccaaaacatctaactggaagcaacctgccaatggcaatattaagctaatagtattatgcactatgttctgtgcgtctttttgaaagtagcactagcagcaactctctgcgcggggtttcttgtttgaaaaccttcacagtgaaaattttgcccaccgccttggtggagtcagccatggggttctttaaaattcatggaaagctcctgtccacaaactctatggaggaacaaa

SEQ ID NO: 40753 - DNA, 537 bp, Setaria italica
  Peptide Sequence Number=SeqID_106727
aacaaatttacggtaggacatactcatttcattactacatactcttaatcttacaacatcatcacctcaactcttggagctcactatcacaacctcaatatgatctgagagttgaggtgaatagtgaccaataaggcaagtgaccaaaccatcaagccaaatcccaggaaaaaaaaaagaaaggccctaaagggaaagttcccactccgtttcattttgcagcggtctaaagtctaaacggacatcatttttttcacaacaaccacaccataaacacgaaagatagcacaggtaaatgacagcagcttaaagcacgcaagatcacggtggttggtgcagcagcgtaggtgaacgtgcgatcaaactcgaaggaggtagatgctaagctccgggccgccattgccgccagtgctgctgtccgggttcatcatgtagaacgcctccgagtcgcgggagccgacgacgcgctcgaagcgcgcgcgcatgtacatgaacgtacccccctacgaccaaccgaccgactagaagaactagaca

SEQ ID NO: 40754 - DNA, 429 bp, Setaria italica
  Peptide Sequence Number=SeqID_106728
gtcagtcaaagctaataagttgttgcatccttttcactttatcttgttagtgctgactgcttgcctctgtttttgggtacactgcacaccccgttctgcttcattcttagaatatgaaatcttacttagtgcttcacaggcccgtaatctcctcaagaaggcaggggaggatgttcctgttgagttgctcaatggaattggacttcttcattttgagaagggagagtttgaggtttgcttactgcacactcgaatattatgatctatcattgatacatggcactacccttattaattgtactttcagatggctgaacaaagttttaaggaagcactaggtgatggtctttgggtttcaattatggatgggaaagtaggtagctctatggtcaactggagtggtcagtataaggatcagagtttctttca

SEQ ID NO: 40755 - DNA, 3421 bp, Setaria italica
  Peptide Sequence Number=SeqID_106729
aaaataaaagaaccggaaaaaagaactaagacgaatacaatttacaattaaagtagaagacagaaaactgtacaacactagtcccttacaaagcttatgtctactgcaccacttaagtaataagaatgacctgaatttgttcagtatttcgctgtctttatgctgattgctcagaactaaaccataatattttatagtaccggaggtcacttaagtgctaatgttgctcactttggggatttaaatatatcttctaggtgtttacagctgtagtgtactgtacatcttatttcatactttgaatagggtgctatgtggccaagggtgagttgcaaatggcgtctgactcaatgaagattgtgttggatgaagatggaaacaattttccggctctacttggtcaggcctctgttactttttgatgggtgaagcagagcagcagcacaaaaaataccctggagcattataggaacgcactagacctctacaagcgagctctgcgagcatattctgattgtcctgctgctgtaaggcttggcatagccttttgccgatataaacttggacaagtagaaaaagctcggcaagcttttcagagagttttacagctggaccctcaaaatgttgatgctttagtggcagtagcaatcatggacttgcaaacaaatgaagctggtgggattcgcagaggaatggagaaaatgaaaatagcatttgaaatttatccttattgtacattggcactcaaccaccttgcgaaccattatttctttactggccaacattttgtggttgaacaattgactgagactgctctctcttcaagcaatcatggactactgaaatcacatgcttactataacttagccagatcataccacagtaagggggacattgagactgctggacgatattacatggcatctgttaaagaaatcagtaaaccacaagactttgtgttaccatatgttggacttggtcaaatacaattaaaatttggagacttcaaaagttcactaactagctttgagaaagtgctggaggtacaccctgaaaattgtgaaagtttgaaggctattgggcacatacatgcaaaatctggtgaaactgaaaaagctatagaaaccttcaagaaagttacccggattgaccccaaagatcatcaggcatttgtggaacttggtgaattgttggtagaatctgactgggctgctgctatggaatacttgaagacggcccgtaatctcctcaagaaggcaggggaggatgttcctgttgagttgctcaatggaattggacttcttcattttgagaagggagagtttgaggagaagggagagtttgagatggctgaacaaagttttaaggaagcactaggtgatggtctttgggtttcaattatggatgggaaagtaggtagctctatggtcaactggagtggtcagtataaggatcagagtttctttcaccaacttgaagaggaaggtgtgcctcttgagttacattcaaataaggtcaccacactgtttaattatgcaagattactggaagaacgtcatgattctgtcagagcaagcctcttttaccgtttcattattttcaagtaccctgactacatagatgcctacctgaggctagcggctattgcgaaacaaagaaacaatgcccaactgagcattgaactggtaggtgatgctttaaagatagatgagaagaactcgaatgcgttgtctatgcttggaagtcttgagctccagagtgatgaaacctggcttaccgcaaaggagcatttccgtaatgctaaggaggccaccaagggagatgcctactctttgcttcaattggggaactggaattactttgcagccaatcgccctgagaaaaaggccccgaaatttgaggctactcatagggagaaagccatggaactctatcagagtcaagtactaaagcagcatcgtagtaatatgtttgctgcaaatggtattggaatcttatatgctgaaaaagccaaatgggacgttgctaaggagttgtttacacaggtacatgaagctgcatctggaagtatatttgtacacatgcctgatgtatggatcaatctggctcatgtatattttgctcaaggtcattttcaacaagcagttaaaatgtaccaaaattgcctgcggaagttcttcaacaacacagatgcaactatccttttataccttgcccgaacacactatgaggctgagcaatggcaagactgcaggaaaactttgctgagagctatacatttggctccatcaaattatttgctaaggtttaatgtaggtgtgtcaatgcagaaattctcagcttctactctgcaaaagacaaaacgaacagttgatgaggttcgtgccacagtcagtgaacttcagaatgctattagagtgttcagtctgttgtctgttgcatctacgtaccattcccatggttttgacgagaggaaaatagaaactcatgttgagtactgcaaacatttgcttgatgctgctaaggttcaccgtgatgcagctgagcaagctgagcagcaaaacaagcaaaaaatggaagttgcccgccagattgctttggcagaggaagctcgccgaagggcagaagagcagaggaaattccagttagaaaggaggagggaagaggacgagctaaagcaaataaagcaacaggaggaacacttcgagcgtgtgaaggaacaatggaaaacatccagccacacccctggcaagagaaaagatagatccaagaacgaagatgaagagggggtaagtgaaaagaggaggaggaggggtaataagaggaggaaggatcacaagacaaagatgcagtacggggaggagggagaagatgaatacagagatgaaccagaaggagaagatgactatgcaaacttgttgagggataacgacggtgacaattcagagagagctcctgatcaccttcttgctgctgctggtcttgaggattctgatgctgaagatgacatgggacatcctcaatctgcaatagaacggaagagacgagcttggtcagaatctgaagatgacgagccagtccagagaccagcagcacaagctagcccgggcacgaatgatttgagtgaatgaaagaaacagagtgagtgaagatgatgttgtacatcatgttgaattgtagcttagggttgtgtttggttggcttccaactcacgcccaaggtcaggcgtgccgaacatgaggtcagtgtttgtttagcttccagacttgtggcgtgccgcatccgtgtagtgattttgtacgccgaaacttgccgaatgtgcggcgctcgttttgatcgtctgtaaccgattgacagtaattctgtaatccaaaaaatcctatatcgattagtactggcagagatgacctaggtagtttag

SEQ ID NO: 40756 - DNA, 554 bp, Setaria italica
  Peptide Sequence Number=SeqID_106730
taatctactagagcattgattttgcgatgaaaagagagccggtgccttcatggctagagctactgcttgcaacacagttctttaccacttgcgcaagtcatcctctcgctactcgcaatgaatgtaatctattttgcattcagtgtgaggtgtcaccagctgcattttgctactattgccgttcatgtgatcattccacccatcgtgtaatccagataaggcgatcatcctaccataatgttgtaagggtttctgagattgaggacattctcgatatcagtgatgtgcaaacttacataatcaatagtgcaagggttgtattcttgaatgagcggccacaacaacgcggatgtggtgtctctctttgtaaggcacctacattatcagcacataattgtgagacatgtggtcgtggtctacttgatgcattccacttctgctctcttggatgccatctgagaagcacaaaaaaggatatgaataggacaaccatggttgaaaaacagttctcaatgtagcgaaaaggatgatgtgaccagaagtgatgatgttga

SEQ ID NO: 40757 - DNA, 611 bp, Setaria italica
  Peptide Sequence Number=SeqID_106731
ttttttttgtctacaaatattaaatatttatataaataaataaacataatgcaaagtacctctgatggcaaatctatcggcaccccggtcacgtactgattccaaagtattagcccgaatccggtcacgtacggtgagcgatcgatatactcagatactatacctggtatgaggacggagcgagactaaatctcatttacagattgtcccaaatcaaggggaaagaaagagaaaacgagcaattgatgcccaagaacagatcaaacaactaatcgtcctaaatgtacgagtatatatctaactaagctagctgatacttggagtacacgtactggagaagcaaccagatagcaatgtcgtcgtgtttcagttcagtgctgggagcgattgcccagcaagctgttggaggaaggggagctcctgtcgctgaaccacctctcgtgcacggacacaggtgactccgccgcgtccttggccgtctgatcttgcacggccgaggaattggccgcggccctctccctctccgtccggctcctgccggcgccccacgacctgtccgtgccgcgcgtcgacgccgcggacgacgagcagatcgacgacgacgtcgacat

SEQ ID NO: 40758 - DNA, 579 bp, Setaria italica
  Peptide Sequence Number=SeqID_106732
catatcttcaagacatttaatagcactaggcacatttacgagattttgaatggtttccttgatattgatgatagctagtgcttacatgatgccgatccttcatgtgttgaggaagaacatgataatttgaactgggagattcttcaatatcatgaattgccaccccatgctcagccttttgtctaagatcagtcaagactttatagcaaacattattgaggaagaaacaaatccccaacataacttggctgtgaaactctctggcagatctagatttcaaatcaacagggtttccatgcaatgcatcaataaattgcttccccgtagcaacaagggcaaggaaatgatcaccatgaaaacaattgatgcgccgaaggaaatcgacttcactgtttccttcagccagcaaccctaaagcaattatctctatggaaagggaaggatccattccaaggagaaaacaccaagcgaatagtaaagctaggcgcccatgcataatgcaagaattaatagcattaggtagatcgaaagtatccataggaattggagtaagagagacgggtgaagaaaggaggtgat

SEQ ID NO: 40759 - DNA, 570 bp, Setaria italica
  Peptide Sequence Number=SeqID_106733
cgatcttccgacgttcctgaccgatcccgatgaccgcgcgtacctggacctgctcgtgaaccagttcgccggcctcgacacggccgaccacgtcctcgtcaactcgttctacgagttgcagcctcaggaatcggagtacatggcgtctgcttggagagccaagacagtgggcccaaccgtgccgtcggcgtacctcgacaaccgcttgccggacgacacgtcttacggcttccacctctacacccctctgacggcgatgacaagggcctggctggttgcaatgccccaatggtctgatcagaccatgaacgctaagtatattgaggacgtgtggcaggtcggcgtgcgtgtgcgcccggatgaggaggtgtggtgaggaaggaggtcgagaggtgcgtgagggaggtgggcagagaagcgtggagtgcatgcaaaaccctgccaattggaaggagaaggccagggggccatgcgcgaaggtggcagctccgacaagaacatcctagagttcatcagcaaacttggttcgaaagtgtaaccaacaactcgctagacaaagttagcaataac

SEQ ID NO: 40760 - DNA, 489 bp, Setaria italica
  Peptide Sequence Number=SeqID_106734
tttgtttcttttagactaatattcttcaatgtagtcgtcgaaatccttctggggtgctgtcctagctccagaaagtggcctatcccttgacggggcctttgcataggcagataaccggtcaactgaatttctatttgctaccggagatgatgtatgagaagtcttcctccagtcccctcttgaagctcttgagacatcggactctatgtttggttgggagtattgctttggagggagagtactaaagggtgctggagctttggctgccttcacctggatggcttttgccttgtgtatgacatgcacagtgcaataatcgggtgccatcttcatcaagcatgttgggacatctggatttctaaatcttctgatgaatgtgttcttagttgatgcccaagacaatgtctgtgatggcgttgctagtggcataatcaaattatttctttggagatgtcattgccatccaagatgacctcttcagatgctacg

SEQ ID NO: 40761 - DNA, 863 bp, Setaria italica
  Peptide Sequence Number=SeqID_106735
cagagcaacacagatcaagctattccttgtgctcatatgaacatgctacaagtgaggtcagttgttgccttttcactagcttttaatctaatgccagcccttgggacattcaaagttctgcgtgtactggatttaaaaagctgtcatctttcacaagattgtgatcttaagcatcttggaaatctatttcacttaaggtacttgggaataggaaggacatatagtgatcagctccctgatgatgtaggaaacctacgatatctacaaacattggacgtagtgggaagtagttttttaagttgccatcaacagttgttcagctaagacatttgatgtgtctatgcatcgaccagaatacaagagtgccaaacgggattgggagcctaacatcccttgaagacctctcaaccctgtacatttgtgatgactccatgaatattttagaagagctatgccatctgaccaaactcagggtgctagaaattttcttagtccctgcagggaatgtcaccttggggaaatctctggtgatgtccctatgcaagttgcaaaaagtccagagtctgactatctggaccactggtggtgaatgcaacttcgatgcatgggttgcccctcgacatctccgtagattgcaactacaatactgctggttctcaaggcttccagattgggtgaattcatcacttcaggacctctcctccctatggatctctgtgagggagctacatcaggatgatcttgaaattcttggaaggttgccagccctccgttatttgtatctgatggtggaccatgagaatctcaaaatccctcggagattcgtcattggtactagttcattcccatgccttgtaggatgc

SEQ ID NO: 40762 - DNA, 640 bp, Setaria italica
  Peptide Sequence Number=SeqID_106736
tactctcagctgctacatcagtgcctgtgagtgggaagcaaggagcagagccatggcctctgttccaaagcttctcctcctcctcttcttttgcagctgtcactctctcattgctcacgcaggagatgatcgcagctacacggttctgtcccttgactctctgaagtctgacgctgtatgctccgagcgcaaagttccgttgcccggcgccgccacggtgccgttgcaccaccgccatggcccgtgctcgccgttgaacatcactaagatgccaaccctgaaggagatgctccggcgtgaccagctccgggctgcttacatccaacggaagctctccgccggcgccaagggcggcgctggtgacgtccagcaatcggacgccaccgtgccgacgaagctgggcacctacctcgacacgttggagtacttgatcaccgtcgtcatcggctcgccgggcgtgacccagaccatgctcatcgacaccggcagcgacgtgtcatgggtgcagtgcaagccgtgctcgcagtgccactcgcaggcggacccgctcttcgaccccagctcgtcgagcacgtattcaccgttctcttgcagctctgccacctgcgcgcagctcggtcaggaagggaacggctgctca

SEQ ID NO: 40763 - DNA, 1287 bp, Setaria italica
  misc_feature (1258)..(1287): n is a, c, g, or t
  Peptide Sequence Number=SeqID_106737
tacgtaactttcctagtttcgggttgtctagtcctaggttggggttcgggtctacccaagaaccaatagactacaatacgaacaaccggcagcgacgtgtcatgggtgcagtgcaagccgtgctcgcagtgccactcgcaggcggacccgctcttcgaccccagctcgtcgagcacgtattcaccgttctcttgcagctctgccacctgcgcgcagctcggtcaggaagggaacggctgctcgaactcccagtgccagtacattgtcaggtacggcgacggctccagcacgacggggacctacagctccgacacgctcgcgctgggctccaacaccgtcacgaacttccagttcgggtgcagccaggtggggtcgggcttcgacgaccaaaccgccgggctcatggggctcggcggcggcacgcagtcgctggtgtcgcagacggcggggacgttcggcacggccttctcctactgcctcccagcgacctcgagctcctccgggttcctcactctcggtgctggaactggaagctcgggcttcgtcaggacgcccatgctcaggagcagccaggtcctcacgttctacggcgtacgccttcaggccatcagggtgggtgggaggcagctcaacataccctcctctgccttctccgccggggagatcatggactccggcacggtcatcacgaggctgcagcggacggcctactcggcgctgtcgtcggcgttcaaggccgggatgaagcagtacccgcgggccccgtccagcggcatcctcgacacgtgcttcgacttcagcggccagagaagcatcacgataccgaccgtcgccctggtgttctccggcggcgcggtcgtcaacctcgacgcgaacgggatcattctgggcagctgcctcgccttcgctgggaacagtgacgacagctccttcggcatcatcggcaacgtgcagcagcgcacgttcgaggtgctgtacgacgtcggcgggggctctgtgggcttcagggctggggcgtgctgatcgccgcgcgcaaggactgaaggacactgtcactacttgttggtggctcatggctgcgaggtaacagacgtgaagtgggcaaccatcaactgcagcacttcgatctcaactatctatatcttcgcgattgcaataacgcgcgatgcaagtgcgcaaactacgaaccgaatgataattgtaattttctccggatatacagttattaataaagattgataattactattgctacttnnnnnnnnnnnnnnnnnnnnnnnnnnnnnn

SEQ ID NO: 40764 - DNA, 880 bp, Setaria italica
  Peptide Sequence Number=SeqID_106738
cccggctccaccaacatctggatcgaccgctgcacgctcgccgactacgacgacggtctcatcgacatcacgcgacagagtacagacatcacggtctcaagatgccactttgcgcggcacgacaagacgatgctcatcggagccgaccccacgcacatcggcgaccgctgcatcagggtcaccatccaccactgcttcttcgacggcacgcggcagaggcacccgcgcctacgcttcggcaaggtccacctctacaacaactacacacgcaactggggcatctacgctgtctgtgcgagcgtcgaggctcaggtcgtgtcccaatgcaacatctacgaggcaggcggaggccccccaaagaagacgacggtgttcaagtacatgccggagaaggccggcgaccgagaggatgtggtggccggattggtcaggtcggaaggggacgccttcctcaacggcgcgttgccctgcctgatcggtggccctgcacctggagcacaagaagctgtcttcaggccagagcattactacccgcgttggaccatggagccagcgtcgccggcgctcaaggacaccatccaactctgcgccggatggcagccagtgccaaggccccctgacgagtgctagacttcgttattctgttactccacggcttgcttctgccaaggaagtattcagttctcagtattgcactgcatttgtatgtaactatgtattccatccctaggaaatttaacttttgtcacttgagtctccttcctctcactcctcttccttcacacgtggccctcactgagatgtagacatattgatgttttcctatgcgtatgttcatttgtggtacaattatcaacgttacagtaaattttctcccaaa

SEQ ID NO: 40765 - DNA, 538 bp, Setaria italica
  Peptide Sequence Number=SeqID_106739
taacctaactattgtaggtccctaagtattgtcttgctcgtcacgctggccgtcgtcgccgtcctcgcagctctgccactcggcaaagggcacggcggagaggagggaggaggagcagcgcccggcaacgacgcgaacgcgcgcgcctggccgtgctgcgacacctgcggcgtgtgcaccaggtcgctcccgccgatctgttcgtgccgggacctgtcgccgggcgggtgccacccggcgtgcaggaactgcctccagtccaccaccggcggcgtccgcgtagcgcccctcttccagtgcacggacttcatcaccaacttctgcaagcgccgctgcacgcctgcagcagctggtgcatagtacttgggcggtcggctgaatacttgctcaagatgcagagaccagagaggaaataaaagtggtgattgctcatcgtttcttactgtaaactgtgtttctggaattatgggctgtggtatgctcaaagctatgtgctggaatgatttagtgtaacatttggtcaggcagcctatttgca

SEQ ID NO: 40766 - DNA, 436 bp, Setaria italica
  Peptide Sequence Number=SeqID_106740
ggggtgctggctggtgagctgctcttcttttgatctttctcgggtgttttcttcttgaacatgagtgtcctccatatgaacgtgcgggcctttccagttggagaattgctgtttgcttccttcgggatagcctcatctttttcactgcggtttttgggcttttcaactttcactctgagtgtattgttacttccttcactgtgctttcgataggcaatcatcttcggcatttgcaaccgctgattgagggcgaggaagttgaacaggccttccaggcagcctgggctcttcgtgtcgaaccgcttgctctccgccattgttccagcaaaagcaggggagaagtgaaagattgctctttccgtgggatacgcatgcggaggaggaagaggcgaagggaatggagctcctcccctccatgggctaatgtttatttcct

SEQ ID NO: 40767 - DNA, 494 bp, Setaria italica
  Peptide Sequence Number=SeqID_106741
cgggggtggatggatggatggatgggatgcggcgcggcgcggcgcggtgcggtgagcaaagcggggcgcgccggcaacaaaagccgctgccgctgggcgctgctgatgcccacaaaaaagaagagagatggggacgtgagtgttggatgcggccttggatttatacccggctcgcatcgagtctatatttgccctcgccacgcctcgcctcgccggcctgcgtttgctacttgcttgatgtcacggcacggttcaccattcacaccaagcgaagccagccggcagacaccgggggaggggaagccggccattaatggtggattagatgactgacgatggtggattttctggataggcctgccggctattcaagaacagggtaaagtactaaagaggcctctttccttgctcgatcgggtgaatcttcaccagggatgggatacacagggttgtctacaccattcgttggctgaaaagatctgaaacgtcacagg

SEQ ID NO: 40768 - DNA, 757 bp, Setaria italica
  Peptide Sequence Number=SeqID_106742
gttgcacttgccaccatccctggagaccacaacaaatctagaaagagtctgaagagactgtaacttgtcaatgccacttggcatggacctgaaagcagtaactctatcccaatcaagatgtaagcagaggtgccgcatgttaactaagcggctcatgccttcaggcaaatccatgagccagtagcagtacctgaggtcaagtgtctgcaaattgaataggttgcagactgtttctggaagagtctttatcagagtattccgaaggttgaggtatctgaggtgtatagagcacccgacggaatctggcaagacttcaagctcagtgtaactcagatctagtgcacgtagacaagttaagtttgagaaaggtgctgatggaacctgatttgagggtagtttcatagtgggatataatttcaggagcctcaacttttgatagtgataaatcctgtcgaatgcaagaggctcatcatttgggcataatacagttgcatagcgaaccaactcaggatgctcaggaacctgtgaatcatcaggactgagagtcagagattcatatttagaaactcgcagtgctagatcaagcatcaaattcggcactctgaacttctgatgattagaaaggctgcgggaagtttcaaagagtgacctccataggagttcatcaaaccatctacctgcttccatctcaacccttttcctccgttgctcttaactaagaccatctgccatccagagtctaaccagctcatcctta

SEQ ID NO: 40769 - DNA, 521 bp, Setaria italica
  Peptide Sequence Number=SeqID_106743
cgcgcgagcagcttctgcagcccgtccacgttggcgcccagctccccgaggttcccgatcgccgcgctccaccgctcccccgacgcgtttgcacttgcgcctgtggattaggttcttgaccagagggttcagtctcttgaacgcgaactcgatgctgccatttctgccgcagctcgagctcgtacagagaaacggcaggctgaagccggccaacgagccgcagagttacgtgcacaggaggtcacaaaggagctggagaacactgcaagtatgtactgtcctgtttctacactagcatgcctagcattttgataggctaagcattttcgagaactgaatgctttctttgatcacgattacatcttgtaggagtgtttgagttacacatggaggagttgcggctgaagcaagaggagattgcgaagaaagatagtgatatcaaggtgctagaagcgataaatacgaacccttagtagcaaagatgacaccttagtagcaaagatgatgatggatccagcgaa

SEQ ID NO: 40770 - DNA, 847 bp, Setaria italica
  misc_feature (842)..(842): n is a, c, g, or t
  Peptide Sequence Number=SeqID_106744
gggaaggaagcgactccgccgagatcggcggcggcggcggcggggatcatcatggcggcgcagagggagaagtccgcggccgcggtcgcgcccgcccccggcgccgcggctgcttcgggatcgccgtctccttcgtcgtcgtccggagccccggcggcggcggcgtcgggggagcggtggagcgcggcgatcgggaacctcggggagctgggcgccaacgtggacgggctgcagaagctgctcgcgcggaaggccgtcttcgtcgacgacgacatcttctccaaggcctcgctcgccgccgaccaggcgcgcaccatcaaggttcttgaccagagggttcagtctcttgaacgcgaactcgatgctgccatttctgccgcagctcgagctcgtacagagaaacggcaggctgaagccggccaacgagccgcagagttacgtgcacaggaggtcacaaaggagctggagaacactgcaagagtgtttgagttacacatggaggagttgcggctgaagcaagaggagattgcgaagaaagatagtgatatcaaggtgctagaagcgataatacgaacccttagtagcaaagatgacacccttagtagcaaagatgatgatggatccagcgaataaataccatacacagggagcaggctaacatcaagtatctccccttgtgcttatgattatatttcctttctgggtttaagcccttctactcagatggctgtaaattgtgtttgacaagattgaaatccagggagctgtcggatgaacatatgcaccaatacgtttatgccctgtttatagcaataccaatgatatgtgcacctccaaaaaanaaaaa

SEQ ID NO: 40771 - DNA, 511 bp, Setaria italica
  Peptide Sequence Number=SeqID_106745
caaggatcatgctgagttcacctccccacgctgacatcgatcgcatcctatacatggagccaccactccaccctcactcgtcgtacccactgatggaggcattgatggaggagctcattgaagagattctcctccgcatcccaccggatgagcctgcatacctcatgcgagctacccttgtatgcaaggcctggcgcatcatcctcttcaatcgtggcttcctccgtcgctatcgtgagttccacaaaacaccgcccctgcttggctacctattctactacaacaccagcattgttccccaatttgtccctatatctcttgcctccacgttctccccaccagaggcttatgatgaccggacatgcctcgattatcgccatggtcgtgctatctatatttacgcccgaaggagttacatcatatgggaccccattactggcgacaagcacctaattaaatagcctgccacataccatcactcctactacactataatggagcgcggctacgg

SEQ ID NO: 40772 - DNA, 362 bp, Setaria italica
  Peptide Sequence Number=SeqID_106746
taatttatttatgtgacaaccagaaaaggcagtggctatttttaacagatggatctaaatttatctctgaacaaatgtctgaagagcaagattgtcttctagcagttagtttttcttccccaaccactggcgaagactctgcattatttagttacaccctctctggaaacacagttggttttagtaatctggtcaagcgacagaaagaccagatgaggcaaatatgggtagctgaggcaacagagagctctacctacactctttcccatgaaattcctagaaaatctcacctaaaagaagctgcagcttctgctgagagatgggcttcaagatcttgtcgtaaaattgaagagctaaaagaa

SEQ ID NO: 40773 - DNA, 756 bp, Setaria italica
  misc_feature (1)..(30): n is a, c, g, or t
  Peptide Sequence Number=SeqID_106747
nnnnnnnnnnnnnnnnnnnnnnnnnnnnnncttatcgcagtatctcaccacatatatggacgtgtcaggtttgttacatggtagtatatggtacaccgtacttgtctactgactaagctgcttgctaggtacattatctgcactgaagaagactgaacagaggagtgtgaagaacttgcaggatctacagcttaggccattgctcgccatcgacgaagctccgactgaggaacggccgcaggatggatctacagcctgagccactcctcgccgttgatgaagctccggccgaggaacggccgcgcctcctcataggtgagctagaagacgaccgggacccgctgcctcgtgctcgcccctggacccttgcagctgtactccccgaacagcaccgtctttgttcttgtccgatcgccccagtcgctccagccctggggcacgacgatgccgctgaggtcgcagtaggagtagaccacccgggcgtaccggccccacgccctgcccaggtacagcatgccggagccggtgagcctgcaccccacgaaggagaaccccggagtcctccgtcggcgagctccgctgcgacgccgcgatcgcgccgtagctcgtcgccaccgcgtgcagcgtgcacccctggtacagggaccttgcgttcccaaaaatgaaatcgatggatccctggatgtcgcagttgtagaggtagtgccggccgatgttatcgaacagcgtgtcctgcgtcccaggatcctgcacctg

SEQ ID NO: 40774 - DNA, 627 bp, Setaria italica
  Peptide Sequence Number=SeqID_106748
taaccgttacttttagtttactttgttccgtattcgtcccctagttcgtcttcctagtcccttggggtctacgtacgtattgtccgtctgaggtcgcagtaggagtagaccacccgggcgtaccggccccacgccctgcccaggtacagcatgccggagccggtgagcctgcaccccacgaaggagaacccggagtcctccgtcggcgagctccgctgcgacgccgcgatcgcgccgtagctcgtcgccaccgcgtgcagcgtgcacccctggtacagggaccttgcgttcccaaaaatgaaatcgatggatccctggatgtcgcagttgtagaggtagtgccggccgatgttatcgaacagcgtgtcctgcgtccccaggatcctgcacctgtacagcatggtcttgtcgccggacagccgcagcgccaccgcctgctgccccaaccgccccccggcggcgccgccggcgcggagttctcgaaggtgatgtggctggcgcagaagtagtcggcctcgacggcgacggaggcggagtagaaggtgccgacctggtggccggagcggtcgatgtccgacgccctggcgttccacgtgatcaccgttcgcccggtgcccatgccgattg

SEQ ID NO: 40775 - DNA, 430 bp, Setaria italica
  Peptide Sequence Number=SeqID_106749
ctgccctattttctagaacaccaaagctcttttttctaccaagacaaaaaaaaacaaaaataagcctagtaactttgtgatttagaaaaataatggaagaggagtaaggctacggctctgaaaaggaatgtagggaccatgtggctggcctacagacttcccatggaaagaagggtatccgtgctgctatcctgctattcaagtgaagctcgtgtccacccttagccatgatgaaggcaaaatccaaaggatcatactcatctccacttacatatttaaaacataaatggaaaaacatttaaagcacctgattcgcaagacatgtacaagatagcaagagaataaaaagaagacaaagcaaccttaaaatcattttggccataaaagaatgtaatccctaaattatcctagttctaatcacagttctgca

SEQ ID NO: 40776 - DNA, 398 bp, Setaria italica
  Peptide Sequence Number=SeqID_106750
aatcaagaggtcgttctggaactggaatgatgtccgacttcaccacgtgtattgcaaaatagtggaagaaactttggtctgtgaaagttccaagtaaaatgaaaattatacttcggcatatagcatatgattttcttgctacaggttaccagctgcagaggcgcaatatatctgctatgcctggttgttgtttctgtggcaaaaatgaaagagtagaacattgctttgtgatgtgccagtttgctgcttctatccggaaaggagtgaaacatcattttgatattaatcttggtaggaaacatttgataaatgcaaatcaatggttgtttgatctcctgcaccgatgcaatgaaatcaagcaatagtggttgctgtagtgtgttggcatatttggaaag

SEQ ID NO: 40777 - DNA, 384 bp, Setaria italica
  Peptide Sequence Number=SeqID_106751
cggatgcctaagactagttttggagaatgacttgtatgcccacatggataaaagacttattggcacttgctatgtcatcaggttcacaaccaaaggtcagctatttgcagccactaatcatcaaacattatataatggattaagcttgttcatgggaggactgaatggcagccaagctactatattggcactttagccatgagagatacataatattgatctttcatgtctcaaatccaattgcaagcaaggctacttggaaatggtatgataaaccggacgttgtaaaaaatgttacaataactcaagcagaacgctttataccaaaaaaagaagtacctaagtaaaaaaggaaagagaaacaagtttgacatacaacagttg

SEQ ID NO: 40778 - DNA, 263 bp, Setaria italica
  Peptide Sequence Number=SeqID_106752
agaaaaggtaaaagaaactagcccagagggagagagcagagcgcaggcgccggtattcaggggaggtagtgcgtgagggcgtaggcgacggtggatccgtagaagatgagcccaccgacgacgagcacggagagcccgaaggtggcgccgacggcgagcggggtgccgcaggagacgatgccgaatttgagctggatggcgtcgaccatggacagcagcaggaagaaggttcccatgatggagcacccggccgccagcagcat

SEQ ID NO: 40779 - DNA, 360 bp, Setaria italica
  Peptide Sequence Number=SeqID_106753
tgtcatctgtccactaccatacctgattactgaatggtcagttattctgttttgcagggtgacatcctgtttttgcacatgaacaaggaccctgtccgagcgggagaaatagttgttttcaatgttgacgtaagtcgtaccgaattcttatatgttgcttgccatggtccatacatcagtatctgaaccatgatggaaccagtttgttttctattaatgtgtgatgcgtgcttgtacatgatctgctggaaagcaatttctcattttgcctcttctattgtagggacgtcctattccaattgttcatcgtgtgatcgaggtagcaagctttgaataaatccttgtgtcagttatacattt

SEQ ID NO: 40780 - DNA, 1549 bp, Setaria italica
  Peptide Sequence Number=SeqID_106754
ttttttttaggaaattttacaactagttactacaacttcttcacaaatcgtagaaaagcattaagtgtcacagatagatcactttcgtcagaagaaaagaggaggaaaagatcatatagctttgacggtagattcacaatgcaggtgaatactaccacccatttatttgcgattaaccatggtaataataccaccttccctgaatatacaatgcaacaaggtgcaggatactacagtgagctacgacagagaatcccatattatgtttctcatttggggaaatggcctactgcccatgaaaatgcggtaatccctgcttgtaggcatcactcatcatccatacaagtctcggccacatctgtcacagactggtttctctgcctctgattctggcttcttgatctccttctgcatctgtggcaagtcatgctccagcacgtcactgagtgccttcgatgcttctgcaagctcctccggactgattgaaaggggaggggctaatcgaattatagtgtcatgtgtgggttttgctagaatgcctcgctccttcaacttgatgcatatgtcatatgcagaggcaggagatagtgcgtcgttgtttaagtccaccgcattaagcaaacccctcccgcgcacttctcttatgatttgagggaatttctgctggaccttctgtaactggtccctgaactcctgtcctaactttgctgccctttcaacaagacattcatctctgaccactttcagtgatgcaactgccacagcactagccaatggattcccaccaaatgtacttccatgttcccctggtctgatacacaacatgatgtccttatctgcaagaactgcactgactggaacaactccagcaccaagtgctttgccgagaatcaccatatcaggccttatgccttcccaatcacatgccaacattctcccagttctagctatgcctgtttggatctcatcagcaatcatcagaatgttgtgcttagaacacaagtctctgacagctttcaaatagccatctggtgggattactacccccgcttcaccttggataggttcaaacaaaaagccacaaatccgatctccatgctcttcaaagactttcttcaacccatcaatatctccaaaatcaactttaagatggccaggaaccaaaggaccaaaaccacgagtagcatcattgtcacagctcatggaaatgacgcccagagttcgaccatggaaacatccacagcaagagacaagcatagcctcattctttggtatctttttcttctcataaccccacttcctagccaacttgatagcagtttcaactccttcagctccagtgttcattggcaacatcatgtcatatccaaacatgcttgtcagatattccgcaaagattgggaatttgtcattgtagaaagctctagaactgagcgtaagcctttctgcctgttctatcaaagctctcaggacttttggatggcaatgaccctgattgactgcagaataagcagagagaaaatcaatgtatttgttgccttcagggtcc

SEQ ID NO: 40781 - DNA, 533 bp, Setaria italica
  Peptide Sequence Number=SeqID_106755
atggcaagagagctgaggcgcattgggcacatcccagctacatcagaggttctccttgatcttgatgaggaggataaggaggggtgcggcttcagtggcacagcgaaaagctggcgattgcatttgtgttgctgaggactcctcctggtacacaggtccgggtggttaagaatctccgagtatgcttggattgtcatgcagcaataaaatgcatttcacaggtttataaccgggagatcatagtgcgtgatcgcagccggttccatcgcttcaagaatggctcctgctcatgcaatgatttctggtgatggaattgcttttcaccaggttatcctgttcctcagttctcatggtccactgaagagtgcgttgaaattccatagaagatgctggcggtgataatttatctctgcggagcttctgcaaatctataaagtgagctatggatgtctgcctctgaactacccaccatatctccatcattgccgtctctgtcgatgccttgaaacttccgcatggcctactctctatca

SEQ ID NO: 40782 - DNA, 350 bp, Setaria italica
  Peptide Sequence Number=SeqID_106756
agctgttcttcagcttctccgcttgcgccgccttcttcatctccagctgctcgtggatcttcttgagctcggcctccatctgcgcgaccttggagttctcccaggaggtgacgttcgccagcctcctggccgccctgttctcggctttggccttctcgctctcctcacaggccctgatcagcgacgtcctctgctcggtggcgacacgggtcagaaacgcgtctctttcctgtgacgcaccagcagctgcaggcttctcgtcactctcgacgacggcgagggccttggactcctccggcggcgccggcaccgccgccttctcctcggcgaggtcctccgccggcgccgcc

SEQ ID NO: 40783 - DNA, 337 bp, Setaria italica
  Peptide Sequence Number=SeqID_106757
caaagtctcgaaatctagtaaacaacaatgaacctctgttgcagaacttgcattgtgtgttagtaccatcagtaatttcccatcagcagcacctagcatgtcatacttatatgagggagaaaggggtatttctttctccagcagccactcgctggcacagccaccatgaatttccctgcttgcactgaagactcagagtacgcagccttcaatgttattactggccaacatgaacatcccacgtctaccttcccctaactcaacaatggcaaatcgctcaaggttgtgggtaggcggattcttggcagggaagaacttcattttgtccatgtcgagc

SEQ ID NO: 40784 - DNA, 596 bp, Setaria italica
  Peptide Sequence Number=SeqID_106758
accggcgccggcgccggcggcatcttagggagcgtgcaggagggcgccaagtccttcgtgagcgccgtgggccgcaccttcggcggcgccaaggacgcggccgccgacaagacctcccagacggcgcaggccacgggggacaagctcggcgagtaccgggactacaccgccgagaaggcccgggaggaccaacgacagcgtggcgcggaagaccagtgagacggcggaggccacccggaacaagctgggtgagtacaaggacgccgccgtggagaaggcgcgggagaccaaggacgccgtggcgcacaagacgagcgagaccgcggaagcgaccaagaacaagctcggcgatttcaaggacgcggcagccgggaaggcgcgcgaggccatggacgccaccgcggacaaggcgagggaggccggggacgccaccaggaacaaggcccaggagacgagggactacaccgccgacagggccagggaggccagggacgtgaccaagcagaaggccggcgagtacaccgacgcaaccaggggcgccgcgcaggaggccagggacaggtcccgggccaccgctcagactgccgcagacaggt

SEQ ID NO: 40785 - DNA, 445 bp, Setaria italica
  misc_feature (410)..(445): n is a, c, g, or t
  Peptide Sequence Number=SeqID_106759
ttctggaggttatgccgtgcagtgctctctcttacggctcgtgggcggcaaccacgtgagatgatctgtgacctggattggggatggggaaactgcgaagaagcatcgcctcggcaggtcggcaaccaatcaaccaccggaggctggtccgcgttgctttgctttgaggtgtagcaaagtgtcgtcactgtcgggcgtaaaactagtgggttgaatcaggttctttccgatcatcggtggtgggatgctctgaattaggctcatcctctccctttctctgagtgccaggaactaactgtagttttgtgaaatttggggatcctgtacatgctttggtatagctgtgaagatggtgactatagcatcgattactggatagaatgagtatagacttgaccctaaaaaaaaannnnnnnnnnnnnnnnnnnnnnnnnnnnnnnnnnnn

SEQ ID NO: 40786 - DNA, 375 bp, Setaria italica
  Peptide Sequence Number=SeqID_106760
ttttacagccaaatgcgctgtgatcaatcagataaacatctaggatccagatcagccttggcctggtacataagaatacaagggaaccgtggctggcgtataatctcagggtacaaatccatccgcttccatgggtacaagactacaagagctcacagctcaaaacagaatgtgccagaaaggaaatgttagaatatgaagaaagagtctggaaatgtttctaatatttggcactgtaaaacgttaacaacactttattaaaatagtaacatactttttcccggcaaaaaagtttcagtagtcaggcagtgcgaagaaactagggcaccgattcatgttagtagggtaaattgtcggatgaaagattttcaaggc

SEQ ID NO: 40787 - DNA, 647 bp, Setaria italica
  Peptide Sequence Number=SeqID_106761
tttctaacaaggatcaatttgcgtcctcttttaaaagaacaggatcccatctgcatggcctgaagtacaagcacaacatacttgtagcagcctagcaggcatatgcaaccacgccgggcagctacatgtatcaaagaactaataatattggacaagcattccctcattatccctaggatatgtaagacctgcaaattcatagtttcaaggaaatcacaaactaagttctacaagtcggtttcaagctctaatggaacaactattagaagctgagttccagagcatcctacattgagggtacggatagatactcaagtcacatcattccctccaccgatgaccacaatcagggctgcagcacacaaagaacagggtcatcccctcctcccctcttgccgtagcctggaagaaaacagcctctccatgcccacagagagcacatcggacggtcttggttctgggaagagttgggtcagaagctacatcctgcaagacctgtgttcgctctccagcagtgtggtgcacctcgttccgatagacacagttatagtcagagacctcctggtgctcgcagttgcgacatgcgaagaagagggtgcgcttgtccctgtcttccttgggatacaggatgttgttgcactcacggc

SEQ ID NO: 40788 - DNA, 336 bp, Setaria italica
  Peptide Sequence Number=SeqID_106762
aacaataaaaattagagatcagtgcagctccaagcacagtaaaaatttctgaagaagttgcagacgtggtccaactttctattttcaatcaccggttcatgggtattgcagaacagatgggtcggacacttcagagaacttcaatttccactaacataaaggaaaggctagacttttcttgtgctctctttggtccagatggtggccttgttgcaaatgcacctcatgttcctgtgcatctaggagccatgtctagtacggttcgctggcagcttaattattggggtgataacctgcatgagggtgatgttctcgtaacaaacatccgtgttcagg

SEQ ID NO: 40789 - DNA, 779 bp, Setaria italica
  Peptide Sequence Number=SeqID_106763
ggatatgcactgtaggtgcagtgatttggctaggatattgtgaccttggagaggctgatgcgttgtctcctccgtactgaatctcatgctacacatacaagcgattcataagcatctgtagtcattctttgcctagaaatgtgcaaaacgaaaaacaatggtgtaacagtttgctaggatgcttcggctggagattaaataggtgaaaataatagccagtggacaggaaaaggatcttaggtaagtatgcaaggacagtaagttcatcttatctgattcatcataaatcattatccattaattgtaaggtcagaagccagcaacacttagcgcatatttcagtaatttacatgatgtatgaaatggtgatatctccaagtttttactccatactttaactctaacgagctcctttttcagattggatagcaatacaaaagggggatgaatgcaaacttacctggatgtgggaggctatatcagcaactgtcagcctcaagccattttcgtgctgcctcaagatccactcataaagcttttccatggcgtgccgctcgcaggcgtggaaggagcccttctgcgcgcccatggcgagcgtgtagagctgcgagagcgagttggcggcgccccggaaggccccgtagagcgcccggtccgtctcctcgagccgcgccgcctccgccttgcgcttcttcccggccatctgtcccgatccgtcggcgcccgcccccttgtctctctctccctcgcgagtgttgcgcctcccccctcccttcgcc

SEQ ID NO: 40790 - DNA, 1212 bp, Setaria italica
  Peptide Sequence Number=SeqID_106764
ttttttttagtatgttaattgtttccaataggttggcccctgcactcgtcgcttaccaacagcagtaatatgcacagataaatcaaatggtacagtataacacatgcaaattacagtatcctggcaaagcaacaggtggtaagcagtagtagtaacagcaacacaagacatcacacgcttagtgtaagaggaggctaggcaaggtgttaaattgaatagacctacttgacctgtgacagtggcaccgacttcttccactggaagtgctgttcttccggcttttctggtgcgagcgagctgctcattcagtaggagtcatgagctgggctgtctgagtgcatgtccatggacgagtcgttcgatgccgtggggttggcgtcgcggcttgcgccattcgcgaagtaccctgcttccccgccctgttctaggtggtatggctgcaggctccgccggatggggctggacaacgcattcgaaaagaccatggagttcttagactgtgccaacccaggatttcctggcacgaatgagcttggcgatggttgctggttacttgtgttggggatatgcactgtaggtgcagtgatttggctaggatattgtgaccttggagaggctgatgcgttgtctcctccgtactgaatctcatgctggatgtgggaggctatatcagcaactgtcagcctcaagccattttcgtgctgcctcaagatccactcataaagcttttccatggcgtgccgctcgccggcgtggaaggagcccttctgcgcgcccatggcgagcgtgtagagctgcgagagcgagttggcggcgccccggaaggccccgtagagcgcccggtccgtctcctcgagccgcgccgcctccgccttgcgcttcttcccggccatctgtcccgatccgtcggcgcccgcccagtcccggcccggaggagaagggaaggaagggagcccctaccctacctagggacgaggaggaggagacccgctgcgagatggcccccggcccccggcggcgaggtgacgtcgacgcgcacgaagcggcggctttacgtctctctcgctctatccctgcgtttctctcttttactttttcgccctctgctctcgctcgtctccgtggggttggttgagacaaggactaccgaccggaataaggggacttaaggtaaactaaaacgttaacttaaattttttaacgttttaaaaa

SEQ ID NO: 40791 - DNA, 841 bp, Setaria italica
  Peptide Sequence Number=SeqID_106765
ctttgtgaacctcttgaaccattatctagctgatttcctctaacccctgccgagcccctatcccgagaccggcccaccacgatgcatatcaaaccgttaaattgttcattccgttttgttctattataacgatcacctctagactgtctatcattcatgtcatggctcctgccacggaagttaccactgatgtttgaggaagacttagtccgcctagattggaaccgatcaaccataccagaatccatatcatcagcaaatggttcatcatcactgtaggcaagtgcattgtgcctaacagaagctctgtcaggatttccatgactatggcttcgtctacttcctagacctttgtcaatgtcctcgtccagatcagaattcatcccctcatcactctctgatcctaaagatgcccttctatatctattagaaccactccgacttctggttttatgccaagaatcagcaagatgactcgatctcagggaaggctgatcctcaaattcatcctcatcagcagacactgttgtatcatctttggctgcatatcttgactttctaccgttatcaagttcatccaaaccttctgaatcagaagcattctcaagatcagaataactcatccttgacactccacctgtctgacttccctttgataagtcaagttcatagctgtcaatgtcatcctcttcatcatcaaaatcatcaaaaccaactctagaagatggcaagctctctctttctgacaacttatcatctcttcccttgcccattgtttcagccattctgaattcctcatcctcggagcccctagtagaatctctataggatatgttgtcca

SEQ ID NO: 40792 - DNA, 446 bp, Setaria italica
  Peptide Sequence Number=SeqID_106766
cgatgtcactcctccggagatgccgatgtcgtagccgaagatggctcccccgacggcggcgacgaggcaggtcatggcgacggcgagcgtcatgcggcccttgtactgcgccgcccctcctccacgcgcccgcgctcgatgaggctgttgggcgtctccgggaggagcagcccgcccagggtcatcagcatcgccggcgccgccgccagacccagcgacagccgccaaccccacggcttgatgttctgcgtgccgtagttgatcaggttcgccgtgaagatgcccagcgtcgtcgcgagctggaacatcatgttcagcccgccgcggaggtgcgccggcgccatctccgacaggtacagcggcacagcctgcgtgcgacaccaagaacacacactgttattcggagtccaagcacgcattgctcagtcaaccaagcgatacaaaaa

SEQ ID NO: 40793 - DNA, 417 bp, Setaria italica
  Peptide Sequence Number=SeqID_106767
agacgccgcgagggaggagacgaggccggcgaggtacagtgaggaggtgaacgccgccaggccctggttgtcgtacttgcagtagttgttctggctgccggagttcttcctatggtacaccgccgggaagaacttcttgagaaatgggtccatcgatgtcactcctccggagatgccgatgtcgtagccgaagatggctcccccgacggcggcgacgaggcaggtcatggcgacggcgagcgtcatgcggcccttgtactgcgccgcgcgctccgtgttcacccccagcgcggccaccccgccgcccgccatctctccgccttttaccgcgagctcgctcctccgcctctcctctgctctccaagaactggcctgctggctctggaccgaggatgaagaagcgagctaccaaccgcg

SEQ ID NO: 40794 - DNA, 1175 bp, Setaria italica
  Peptide Sequence Number=SeqID_106768
cgccacgatcacctggcagacgatcatctggatcccgccgctgatgaggagcttccggcggccgaggcggtcgacggtgccgatggagatgagcgtggaggagaagagcacggcgccggtgagcacggaggagtagagcgacgcgttcccgccgaagcccatgctctggaacaggacgggcgcgtagaagaggatggagttgatgcccgtcaggatctggaacgccggcatgcacacggccatcaccagctgcggccggttgcgccgctccaggatgttccggaacgggtgctcgatggtgttggccagctcgctcgcctccaccatgtccgtgaactcggcgtccacgtcggccgtgccgcggatgcgctccagcacgcgccgcccctcctccacgcgcccgcgctctatgaggctgttgggcgtctccgggaggagcagcccgcccagggtcatcagcatcgccggcgccgccgccagacccagcgacagccgccaaccccacggcttgatgttctgcgtgccgtagttgatcaggttcgccgtgaagatgcccagcgtcgtcgcgagctggaacatcatgttcagcccgccgcggaggtgcgccggcgccatctccgacaggtacagcggcacagcctggttgccgaaaccgattccgacgccgagcatgatgcggccgaggatgagcatggccaggttcacggcggcgacgttgagcgtggcgccgacgaggaagctgatgccgccgcagacgatgctggctttgcggccgtagttcctcgtgacgggagacgccgcgagggaggagacgaggccagcgaggtacagtgaggaggtgaacgccgccaggccctggttgtcgtacttgcagtagttgttctggctgccggagttcttcctatggtacaccgccgggaagaacttcttgagaaatgggtccatcgatgtcactcctcctgcagcattcggccagtcagattggcagaccttcagagttcaaactgctagatttgtgttctcatggcatgtgaaaatctaccagtggccccaagcacgtaattcttcaaaaaaataaaccttctgttgtatcagataagtgttaatctcattatgaattcgcgtatcacaaagtgccaaataatttcaaccctaaactttaccctacttctaaa

SEQ ID NO: 40795 - DNA, 524 bp, Setaria italica
  Peptide Sequence Number=SeqID_106769
gcgccgagtcgtgggaggggaatatggcttcgaagggtggtggggagtaccggggccgcatcttccaagaattagatgagaaggttcgggatgcactccatctttacattgaagcccgtggcataaatgagaagctcttcccttttctacaagcttggctttatgtaaaggatcaccgcaacctcatacgttggttcaagagtgtggccacattcatcagtgagccaaagccataatgtgaagaaccccatgttgaagatcatctgaaatgcggttgcagaacagttttagccaggatggagaatagtgctaggataagggaatcaagtgcaaagtatcgccagcgaggagtttttgcttctcttcagtttttgtgccctgggggattaggggttgataatgccactggtgtgcttaatgtgtttgggggcagtggttgcatgagttgtcattattcctttgctttgctgcctgaccttgctaggttgtcagactctcaatcattcagactcaaaataaaaaaa

SEQ ID NO: 40796 - DNA, 602 bp, Setaria italica
  Peptide Sequence Number=SeqID_106770
caactaggtggaagtaaatcatacagcatattaattccaagaaaacattatattcaacttggttactctatgattcttaagcgatgatcaagttcattcacaactgagaattgcggcaatccagatcgatatacatcctgcaagagatacctaattaccagccatgcacaactgatcggtttgtgcataacgacctttcgattagctgtacccaacgatcaaaaatataattacccgaacctagggacgcacccccacatgggaccccacgtctagcttgatctccatgtgagttttaggttgcacccatgcctttccactgcacgccaagcacaggtaaaaaatatttccaataggagagccaactaacctaccaggctttgctggtcccagagacagtaagcaactaggtaatatcacttgatcattggttaaaacaacgaacgatccttaaccagattaacttagtagacagaactaccatctctagcttctgtccacatttcaaaattccaaactatttccttgattaacatgtatgacaatattaaccttaagtgttcagtaacagaagttacttaaaaaggggtatttaagcattg

SEQ ID NO: 40797 - DNA, 1270 bp, Setaria italica
  Peptide Sequence Number=SeqID_106771
gcagtctcagggcttctttcgcatcacctcgctctcagctgctcggtgtcctcctcgtcaccgtcatcaccttcacggccgtcgtcgattctgcccgtgtgtcgtcggcgccgacggcctccaagccggtcgtcaaggtatatccatcctgcagcaagacgttgatgcccaagaggtgcagcgtcatgctatcggccttgtccaagagcttggccgataataaagcggcgattgccgggccccagctcgccgccggcaagttcaagggcgacccctgcatctcgaggtgcgccaaggtcctcgacgccaccacgtccaaggccaccgccgccacggatgcgggcggtggcggagatgcgctctaccagctgaagaactacctcgtcccgctggtcatctttgatttatatgagaaggccccttgcgagtgcaactgcccggggccttgctcgcccgacgaggccgccgccgtgaagaagctgggggaggccacccacgccatgcgcgccatcgtgggcctgatccacggtatgtccagccaactcaccgatgaggagaagaaagccaaggtagagccgatggagaagtccgcggacagcggcatcctccacgtgtcctgcgggctgacgaaagagcctcaaaagtgcgccgacgagctgtcggcgctggccaagacgatggaggaggccaaacacgtggtctgggagctgacgagttccgacgcggcgactaagctcagctcgcccatcgcggactgcgaagctgccatgcgggagctcgaggaaaaggtctactcggcggaggagaaggcggtcaacctggcggagatacgcggcgccatccattcctacgtccagggcgatgggaagcagcctccgcgctgcaagtgctcctgcccgccgccgccggagaagccgtgctcggctaacgagaccgccgttgtcgacagcctcaatggcgtctacgatgcatgggttgccgtcgaaaaattcctcacagaattactgcctccaaactaattaattatatggtgcatcgctaataataccctaaatggcaagcctagcagctgcatgtttcgacagtttcttttgataataacatttttaatagtatgtttctcattccataattaatgatgtccgcgatccgacacttgcactgtagtttatgtgagctgattcgaatgagctcattttgatcaatgatattatatatttattattaatggtattattaaaggtttttctgtacggtgaaaccaaaaaag

SEQ ID NO: 40798 - DNA, 418 bp, Setaria italica
  Peptide Sequence Number=SeqID_106772
tatccgcaagcagcttgccacccttcttgacatacagattaatatacgtccatctatctgttatatcctatcagctagcctcgatgtaattgcaacttaaataagcaaatggaaagaatccttccaaaagacagaggaagccaccttaacaagaaaatttcaacccaaaatttatcaaacgaaacaaaagatatgatacatgcaggaaaaggaagacagtgaaccataacaattcctgcttttttcaagtaggataaattcaatagccacattataactgcagtcctctgatgttgtcaaaagctatctccttatggcacaagacatagaaagtgtgacaaggccttagtgcaaacaagcacccacgatcatagtagtttcgggaaacggtaggcttggcgtaaactgggtcaacagg

SEQ ID NO: 40799 - DNA, 803 bp, Setaria italica
  Peptide Sequence Number=SeqID_106773
agttcatctctggagcctgcatccctagctcccactgaactgccatttagttctcttgaactagaaagtgcagcttcttcaactgtggcctccatttgtttgatctgttcatggaaagacaaaagaagtggctgctttgtcatagtggataatgacttccgatggcatgggaacatgtttctcaagctctttccggtctttgatcgtagatactatgcaatccagtttactctcaagatttcgtatcttgatagcacaatcttcttggctagtcactccctttaagttaacaggtgaagcagtcatgccaaacacaactggcctcttgtcctttggagtggtgtgataaaattctgacatgactagagaatatgggtgctttttcactgcatgatggcactcatctaaaatcagaagatgtatggcatccattttaataatactgtgcctaaggatgttcaacaaaatttgagctgtcataacaagtacctgttttgactcaaactctcgctgccactttctagaatcccagaaatcctgccccatctccccacagtagtgcccaacacgatagccagtcctctcgcgtatcacttcagcttgctgatacacaagaggcactttaggcaccaagaaaacagcaagcatctttttgttccccttgagcattttgtcacaaatacttttaatgagtagcacagctatgagagttttcccggcaccagtctcaaggaaggcaattgtgttcctgctctttgcttgctcaagcacctcgagctggtactgcctcgcctgctcctcgg

SEQ ID NO: 40800 - DNA, 467 bp, Setaria italica
  Peptide Sequence Number=SeqID_106774
gagaagaacatcttcgcatacggtcagaaaccaatatcacttatcgaacaaggccatgaggtagacatgacagacttcgctttgaaccctgtttctcccattcacatcataccatgtactagtagcagtagcacgacttacgtatacgctccagtgaaagaattaccaaaggtgacacttggagaactggtattagatccttctgttaggccaaacagacaatttaatttagtgtcatgggaatcaaggttacccccttatacttcttttgttcactttgttccaaattgcaccgaaggtatgcctgaaggtactcatgtttcggaggaagcgcagatgagcggctttctaagaacatgatatatgtaattatactagttagatgtaccatttttcagataagtggcaatattgtatttgtgtggcacttttatttgattattgcaaactattggagttttaggaag

SEQ ID NO: 40801 - DNA, 332 bp, Setaria italica
  Peptide Sequence Number=SeqID_106775
ttagttgtgagaacaaccaaaaaaagtaggtccatcacaggggaagatgtatctctcggacttgaatggaaaatgcgctaccaaataatcaggggaatttgtgagggcttgcatcatcttcatgataagcgtattgttcacttagatctcaaacctgggaatatattgttggattataacatggtaccaaaaatttgtgactttgagaactcaatggtttttgatgaagatcgaacctattcaatttgtgactttgagaactcaacggtttttgatcttcttcatgaagatcgaacctatccaggagatattattcgatctcaagagtattt

SEQ ID NO: 40802 - DNA, 953 bp, Setaria italica
  Peptide Sequence Number=SeqID_106776
gcggctccggtccctggcctccgaggcccaccccgccgacgtgccagcgcgcgtcgacgagcgcatgctcgtgaccgtctccgtcaacgtgctcccctgcggcggcggggccaatagcaacgagacgtgcgatggccccatcaacggcacccggttatcggcgagcctgaacaacgtcagcttcgtgagcccggccgtcgacgttctcgacgcctactactcctccatcgccggcgtgtacgagccggacttccccgacaggccgccggtggccttcaacttcacggattccgagccggcgcaggagctctggttcacgaggcggggcaccaaggtgaaggtggtggagtacggcgccgtcgtggaggtggtgttccagggcacgggcatcctcggcgccgagccgcaccccattcacctgcacggctacgccttctacgtggtgggcagagggttcggcaacttcgacgagagcaaggacccagccgcgtacaacctggtggacccgccgtaccagaacaccgtctccgtgcccgctggcgggtgggctgcaatccgcttccgggctgcaaaccctggggtgtggtttatgcattgccacttcgatcgtcacacggtgtggggcatggacactgtcttcatcgtgaaaaatggcaagactccggacgctcagatgttgccgcgtcctcctagcatgcccaagtgctaaggaatcaaggacgcatgggccatacgaccgccgatgaacgagcaaaataacttaaactttgttgattgatttatttagttatttgtggtacaaattttaagtagagttgttcttcaaatcagatgtactgtcgaaaaaaaatgggctcagttgagatccgtgtagtataagtgtaactagtgtcgtttgtgccttgtatttcggttgatttggaagagaaaggaatgcattcgttgttctgaaa

SEQ ID NO: 40803 - DNA, 915 bp, Setaria italica
  Peptide Sequence Number=SeqID_106777
caggctacagaatgaatgtcaacttgagctccaacctgaaagatgaatgcatacctgcaactgagcaccttcactccagaatgattgcctggagcatgtagttcatcatctgaactgagctcttcagactgtccagaaggggatgcgtatatcaagttcagcggcgcatcaccgcagccaccaagctcaattgaagggcaagtaatgctgccatcctcatggacagactcttgctgaagcaacctgttcttgaatttatcttcaggggtgctgtctgacatgtttccttcacgtatcttgtgacagcaacttaggcacagcttaaatgggcatgccgggcagcatctcaggaactggctcgctgagagcttacagttattgcagtacagtgactcgctctggccattttcagcaacctggactcgaacatcagatatctttgttccttgtattttagcttctaattccaattcatcaagctgttcctggtcaagttttacaggtaaaagcttgtaaaattgatggttggaaatttttatgctgagtatcttcccctcaccacttggtgattccttacgcatagcacccttggtttgaccaagggcacattttttacagtcgcagagaccacggcaaactggacagcgggtctttatatccttcctagtgatcccagaataccatttattaatgcagctgttgcagaagttcttctcacaattcttgcagttggcaacgcgtgctgccttcgtcaacccgcagcggtgacatgttcttggtattggctttgtcatactcatcgcacgaggaacaaccttcgttgtcacaggcgacgatagtgctgcaggtccactgctacctggagagatcgtcatcaatccatttgggagatccctggtctgacggtcactttgt

SEQ ID NO: 40804 - DNA, 1283 bp, Setaria italica
  Peptide Sequence Number=SeqID_106778
taacaagaatgtaaaagcacacagactaaaaccaatgatccacatgtcaatgaaatgcctatccctcattcaggtacacctcttcaatcactacaagctaaatagcatggaacgtgaaactaaaaacaatctcctatttattaaattgcaatcaaccaagttctcatcgcctgatagttgaaaagttgctaagcataacttaatcgtaacttcctgaatcactgatgcagcaatatgcaagaagagtatgcatgctaataacgcagcagcaacgagtcaacgactaaccatttattaatgcagctgttgcagaagttcttctcacaattcttgcagttggcaacgcgtgctgccttcgtcaacccgcagcggtgacatgttcttggtattggctttgtcatactcatcgcacgaggaacaaccttcacaggaccaacaggcaatggctcagcattcttggaacgatagcaccggcgaatcggtgcaggaatttctacaccaaccttcgttgtcacaggcgacgatagtgctgcaggtccactgctacctggagagatcgtcatcaatccatttgggagatccctggtctgacggtcacttgtagttgcctgaggcgacgccggtgtattaatgctcttcctgcccttcctcttgttcttctgcctctggagagcaacagcaaggacctccccatccgctggcagcttcttgctcttgttggccttcgcgtagtggtactcacagaagctgacagttggcagagctcggcctgagcagcgccacttcttcccatcgctccggcggcaccggaggtggtctggtggaggcggtggagagtcgccacgctcccccgacttccgccgacgtcggcggcgcgaaggcgtgggggtctcctcctccgcttcatcatcctccggagtcgggtccggagtggccgctcgcttacggcggcgaccgcgtgacggaggggatggaggagggggactcctccgcagcatcaccttcggtgtcggagtcctccgccgcgtcttcattctcgacgccggcctcagcggcttcctcttcactctcgccgtcggtctcggcggcttccgcttcatccccgccgtcagactcctccgctttcgccttcggatcaggaaccttggcatctgcttcgcgctcggagccagtctcgtcgccttcgtcatccgaggcatccgaggcgtcagctttcacctccgcctcggcggctggcgcttcagccttggcctcgccggctttcgcttccggttcggtgtcca

SEQ ID NO: 40805 - DNA, 369 bp, Setaria italica
  misc_feature (315)..(369): n is a, c, g, or t
  Peptide Sequence Number=SeqID_106779
tgttcgttactattgtacttcggccaacgacgtgtcagagatcttggaggggtgggtggcaaataaggcaatatagtttagtggaagaaatgggagacgccggcggcgatgatcggagggcatacatgcatgtaatacgggttgcagtttcagcagcctgatgccctgatcagactgtcagaaaaaggaataggtgtgtggtgtgtggctgtacctgtgcgaggagtgctctagcagggtctcgtggtgctattggattactgtgcttgcgctgcttgggtgatctgattttgtttctctccgttcattttaacnnnnnnnnnnnnnnnnnnnnnnnnnnnnnnnnnnnnnnnnnnnnnnnnnnnnnnn

SEQ ID NO: 40806 - DNA, 319 bp, Setaria italica
  Peptide Sequence Number=SeqID_106780
ttattcctactaatctctatcagcataaggaggattagaagaagaagagcaagtagcaagggcttcaacaatacatggttacagacaaaaagcctccaagaactagctagagaatacacacttggtgacttggtgttgttgtggtggtgctctgtctctgtgtgctgtgcttgattgaatgatcgatcacgacgccgccgacatggccgccgcggccttcttcttcttggcgggcttgtcggcggcgctgcgtgcgcccttggcgatcttgatgtcgagcttgtagtactgcacgaaccagtcgacgaagtgtcggagg

SEQ ID NO: 40807 - DNA, 250 bp, Setaria italica
  Peptide Sequence Number=SeqID_106781
cccgcggcgacggcgtcgtcggcctcgacaacttcaactcttactacgacccgtcgctgaagcgcgcccggcaggcgctcctggctagccggggcgtcgcggtggtcgacgctgacatcaacgacggcctgctgctggagaagctcttcgacgtggcggcgttcacgcacgtgctgcacctggcggcgcaggccggcgtgcgttacgccatggaggcgccgcagacctacgtggcgtccaacgtggccgg

SEQ ID NO: 40808 - DNA, 372 bp, Setaria italica
  Peptide Sequence Number=SeqID_106782
ccggccttcttggtggccgcgtacagcgacgccgggcggtcggtgcggtggtcctcggagaagggcgcgtcggtgttgagcccgtacaccgacgacgaggaggcccagacgatcgccggctgcgggtcggcgtgcttggccgccacctcgaagacgctgacgagcccggccacgttggacgccacgtaggtctgcggcgcctccatggcgtaacgcacgccggcctgcgccgccaggtgcagcacgtgcgtgaacgccgccacgtcgaagagcttctccagcagcaggccgtcgttgatgtcagcgtcgaccaccgcgacgccccggctagccaggagcgcctgccgggcgcgcttcagcgacgggtcgtag

SEQ ID NO: 40809 - DNA, 1328 bp, Setaria italica
  Peptide Sequence Number=SeqID_106783
ctagcctccaaggacaagagaatgcatgcacacttggtggaggacggccgggccggggaacatgccgcggccgcggcggcgcggcaactcacgatgcggcagacatggccatggatttcctcttggtggtcttgccggcgaggacattgcttcccttgatgtcgagcttgtagtactgcacgaaccactcgacgaaatgccggaggccggcttcgagcgaggtggtggggcggtagccgaagtcgtgggcggcgtggctgacgttggcgtgggtgaagggcacgtcgccgttgctgggcatggtgacgatgcgcttgttggccttcttacccaggagcttctcgaggatggcgaccatccgggtgacgggcacgggggaggtgttgccgagattgtagacgcggagcggcgcgggcccgctcttcttgccggacttggagccggtgctcttgccggcggtgtcgagagcgccgaggcagcccttgacgacgtcgtcgatgtaggtgaagtcgcggcgcgcgtcggagccatcggcggcgcggaagagcgtgatgggctcgccggcgacgatgctgcgggcgaagaagaagtaggccatgtcggggcggccccacggcccgtagacggtgaagaagcggaggccggtgatggagaggccgtagatgtggttgtaggtgtgcgcgatggcctcgccggccttcttggtggccgcgtacagcgacgccggctggtcggtgcggtcgcgctccgagaaggggaccgttgtcgttgaggccgtagacggaggacgacgacgcccagacgatggccggctgcgggtcggcgtccttgcaggcctcgaggagcgtgacgaggccggcgtgcgctacgccatggagaacccggcgtgaagggcacgacgtcgaagagcttggccaggaggcggccgtcgttgatgtcagcgtcgaccaccgcgacgccccggctagccaggagcgcctgccgggcgcgcttcagcgacgggtcgtagtaagagttgaagttgtcgaggccgacgacgccgtcgccgcgggccttgagcgcgagcgagcagtgcgtgcccacgaacccggcggcgccggtgaccagcacggagatcccgccgtcgcggctcggcctggcgctctgccgcatctccttctcccacgcggcgcccccgtagacgccgacgtcgaagaggacgacatgaggaggctgcggtgcgaggcagagtgggcgccacctgggccgccgccgccggcggagaggtggaaggagcggaaagaggagggacgggtagtgcagcgtgaagaggaagacgagcgcgagcg

SEQ ID NO: 40810 - DNA, 1993 bp, Setaria italica
  Peptide Sequence Number=SeqID_106784
tacattggaattctgacgatggagggggaaaagtttcatggagaaccaccaatttacacaaggggagatgaagaaagaaaaagaaaaaggctgctctccattgctttcttcttcctccctctcctcaccaagaaaagaattttcccccagtatttttctctgatcaaggaacaccctaaaacatattttccaaccaaaaatccagataagaatgtcaatgtttgatccgggagtggtggccgcggccgggccaaagagggaaaaaaaatcaagaagaaagaatcagacgaccaaggattagcacggactattgtcgaaagttcttggatcccctggtgtagccgtagtaggacaggtaccacttgacgaacttcttcaggccgacgtcgaggttggtggtcggcttgtacccgagctgctccctcgcgagggagatgttggcgtgggtgaagggcacgtcgccattgccgggcatctcgaccacgttcttcttcgccttcacacggaggtgcttttccaggatggacaccaggttgggcaccgtcacgggcgaggtgttgccgaggttgaagatcctgtagggcgccggcccgcgcttcttgccgccggtgcccgtgctcttgccggccgtgtccagggagccgaggcagcccttgacgatgtcgtcgatgtaggtgaagtcgcgggccagatcgacgtggtccttgccgcggtacaccgtgatgggcttcccctgcaggatgttgcgggtgaaggagaagtaggccatgtccggccgaccccagggcccgtacacggtgaagaagcggaggccggtgatggagaggccgtagatgtggttgtacgtgtgggtgatctcctcccccgccttcttggtggcggcgtagagcgacgccggctggtcggtgcggtcgcgctccgagaaggggaccttgtcgttgaggccgtagacggaggacgacgacgcccagacgatggccggctgcgggtcggcgtccttgcaggcctcgaggagcgtgacgaggccggcgatgttggagtgcacgtacgacgccgggttctccatggcgtagcgcacgccggcctgcgcggcgaggtggagcacgtgcgtgaagggcacgacgtcgaagagcttggccaggaggcggccgtcgttgatgtcgccctcgacgacgaacaccccgtgcgaggagagcagcgccttgcgggccttcttgagcgaggggtcgtagtaggcgttgaagttgtcgatgccgacgacgccgtcgccgcgcttgcggagcgcgagcgagcagtgcgtgccgacgaagccggccgcgcccgtcaccagcaccgacatccccgccccggccgcggaccccggcggcctcctcggcgcggcggacgcgcggatctgccgctcccagtggaggcccgccccaggaggcggcgaagtacttggaggaggtgtcgacgaaggactggaagctgaggtaggacgcggtcatggcgacgaggaacagcgcccacaggaacatggtgctggtggacgcgaagcagcggtgcagctgccggttcatggtgcccgccctctcgatcttgaccttcccgggggtggaggggaagaggtcgtcctccagcacccgcatcttcaaggccgccgtcttgccgtgcggcgcagcgcaaccccaacgaggaagatgccaatccaagagcccctcctcctcctcctactcacagattcttcctccgcgacgcaagcacagcaaagacgccgccgcgcggcagggccggagacgcaagggatcaacccgcaccgcgctcgcgctggattcctgctctcctccgattgattgactgactgactgattattccttcctctccctggacgtacagacggatcggccgccggacgaacggattgggtaggtttcctcgggagggtgagcccgggggcaggaaattttattcggagaggccgtagatgtggttgtacgtgtgggtgatctcctc

SEQ ID NO: 40811 - DNA, 310 bp, Setaria italica
  Peptide Sequence Number=SeqID_106785
gcaattgcaatgtggcggaagacttgagtgagagctgagtagagtacagtaggccgaccatggaggtatcctcgaggctccaaagcctcctgaggcccctcctccgcctcccctcccgcaccacaggcagagccctccaaaccctagcccttcgccccccgccgcctcctccccgcgtcccatcctccttcctcctcctccgcccgcgccgcctcccacctccccatcctgccagcgccccgtcgcgcctcctcctccgccccttcgcctccgtcgccccggtccccgggagggaccacctcgactccaa

SEQ ID NO: 40812 - DNA, 604 bp, Setaria italica
  Peptide Sequence Number=SeqID_106786
tttgggtaggtagttgttggcgcttgcacattttcacgcttgcaactttatctggagaaagacatacactgtacatatccaagatatccttcttaacctgccagcggttatgggtaaagtcagctatctcccgaactctgttcttcagttgcaacttagagacacatggaaatctctcatgtaataagtccaccaatttgcccatcccatgagagcatgatgtaactagtttggcaaattcaggcatgtctgactctgaaatggatttggatggtacaggtgttctagggctctttttgtttgattggcgaaattcttgatcttctattgtcactttagcaaccacaggcacatcaatgatagggccgctggggtatttcttcatacaaagagcttgcaaacagactttctctgcagtgataccttcagctttcttcaggtcaagtttcctatgatctaggttcgatatgactaaaggcatgtctatcttgagagcatcttctgtggctctatgaagaaatctctgctcatctgtaaccccacgggttgctcagcatgctgcaggattcatcatattttgacagatacaggctcatattgcatt

SEQ ID NO: 40813 - DNA, 336 bp, Setaria italica
  Peptide Sequence Number=SeqID_106787
ctggggcacagatgtgctcaaatggaagtgacagggccaggaaccacttcgcaggaccattgcagcttgcatcctctgctataatgcatgtttcagtaaaacttcggtagcagtggtcttcaaccttaaaccattggtcggcgaataggtggaatcttgctgcacaagaggaagcatgtcccctaggcctgcactctgcagggaagcagcctacacatacacgcagagtatcaacaatggtgcctgtcgagagagagaggcacacacgagaggatgacgtgaccgctgcactggatagatttcccttgtggcttcagttatcaacgtatagtcttt

SEQ ID NO: 40814 - DNA, 422 bp, Setaria italica
  Peptide Sequence Number=SeqID_106788
gtatcgctttaatacgtccagtaagtaggctcttagagctgcagctagagcatggttgaccagaccattcttgaaatgtgacctggactccacaaactggcttaccagcacataatcctcacacaatgggaagattcggcgagtcaattcctggagggcaaggtccattgaagaatcaatctggaagacaacatagccctcctttccacggactctcttaatagaaatatatcgtccctcaatacccaacagagctgatagcaaatcatctataccaaaagctcctgcaccgaaactgcgtacgatccgattacactcccggggctagcgccggagccgcggctgaaggagtcgagggaaaacggcttggatccaggcgcctgcgccgccgcagctgccttggcctcctggtggaagcggcc

SEQ ID NO: 40815 - DNA, 564 bp, Setaria italica
  Peptide Sequence Number=SeqID_106789
atgaagtgaacatggaagaactactgaatgcacaacgcactgttgggctattctctagactgaaatgttctgtttatttgagagcattggccacacaaacgagatgcagttcattgagtttcttatgtcaaaagcaacagtacttcaagaaattgaaatttctgtacgtgatgatggttcaaagtctccggaggttgtgtttgatgagttatcacagtataaaaaagacttctccacaggcagaggttattgttaatcgttttactggctattattctgatgatgaaaccgatgatgaataatctcacaatggatgatgatctgatgtggtcgctgagagattgatgaatatttgtttgtctgtgaaattaaagcaagaagctggcattgcagaacatgctgtcaagatttcctatattaattgtattctatctgatgtagatgtatgagacaattggttgtatgctgtgtaaactttatattgcttgtggagcatttgtaaactttcattggagttgttgatgaaagaagttttcatgacatttttgatatattaaaaaaaaa

SEQ ID NO: 40816 - DNA, 401 bp, Setaria italica
  Peptide Sequence Number=SeqID_106790
actaaaaaggagcaaagatgccgaaaagatagagccgcgcggccgtgtgttgctaagctctgcttccaaacaagtagtatccaagaatgaaagataacaagaagataagcagcacaaacgtggccgaaaagcccccaggagacggctttgttttccgaaggagttcctgaaaacgaagcaactttgaccggttagtgaccacaaaccaaagctgaaatagcaaacagagttggaaagggacttctggccatagaaagttatgctgcgaagcagccaaaaaaaaaggacaagaggccatgaaaacttgttttcactgtgtaaatatcttttttagaagtatcatatcgaaccccaaggcatactgctggctgctgctcttggtgattcgtttattgcggcat

SEQ ID NO: 40817 - DNA, 1115 bp, Setaria italica
  misc_feature (1)..(87): n is a, c, g, or t
  Peptide Sequence Number=SeqID_106791
nnnnnnnnnnnnnnnnnnnnnnnnnnnnnnnnnnnnnnnnnnnnnnnnnnnnnnnnnnnnnnnnnnnnnnnnnnnnnnnnnnnnnnnacaacaagacaacaaactagttcccgagcacacacgtatatttcaaaactgaagattctgttataatatggacacttcaaaccccaaaaagaaacctatctgtattatagactaactaatataaattttctgtactaaaaaggagcaaagatgccgaaaagatagagccgcgcggccgtgtgttgctaagctctgcttccaaacaagtagtatccaagaatgaaagataacaagaagataagcagcacaaacgtggccgaaaagcccccaggagacggctttgttttccgaaggagttccagctctttctgcatcttcttgttttcctctgcatatctactttcctgctctcctgacttggataccatggagacatcctcattatgtgaagttggtgatccagatgtatgtccatgccctgatatatagttggacgtggatggtctttccacttcgtggtccacgtctgaatcaagggaatcctcctcctctgcttcctcaggcacaggcgatggaggattcgcagggacgtagatcaccctcaacttgaactcctcgaccaacttacctggtactttactgaacatgtcagggacaatgtccttcagcgtcgtcccctcctccgcaacgatgctctgaacgaggaacttgtccttgcagtggtaatccggggggatctccttcggcgcttgcatcgtaattgagacgccgcacgatcccctggggggcacgaaaccggaggcaggccgcaccgcgtacttcctagggttcgtcgtcttcaccttgaaagccacgcgatgatcggtcttgttgacgagctccagacacgccgaattctgcttcttgagctcgaatggcatcttcaagtcggaaggggagactcggagcagagtgttactcatgacggcgatcaagaaacaacgatcagaaggggaaattcaacgccctcctcttctcctctaccctcgagaaccgagaatctggaagatccaagcaactttgaccggttagtgaccacaaccaagctg

SEQ ID NO: 40818 - DNA, 575 bp, Setaria italica
  Peptide Sequence Number=SeqID_106792
accatatccttacactgctatggcggcgacggcggcggcctctccggcgagggcttcgtggcggtccgcgattccggcgacctctgcatccgcagccggaagctgcttccgcgtcggagctaggcgcttcgcagggctccaaacgacgagcacatgtccgcaccaagccacaaggctcccagctgctcacgtcaagagcggggaagccgaagggcgtccgagcacggagagcgccgccgccggcaccccggacgaagagtccctgcgacgtgagctcgagacggcgatccaggaggaggactacgcccgcgccgcggcgctgcgggacgagctccgcgtgctccagcaggacggcaggtcggcggtcctggcggcgaacacccggttctacacggcgttcaagaacggcgacctcgtggcgatgcaccaggcctgggccaagggcgaccacgtctacgtggtgcacccgtcggcggggaggatctccgggtacgagatggtgatgcagagctgggagatggtctgcgacgccgactacgagttcccgctgcagatcgacctgcaggacgtggagg

SEQ ID NO: 40819 - DNA, 448 bp, Setaria italica
  Peptide Sequence Number=SeqID_106793
ttttttgtcgtagtaattttcgagaagattaccttgtacaataaggtttaatctggatagtacatcacattagtcgcttctacttcatgtggccaaacaaacaaagattacggcggacagaatagtctgttgtagcatccaaatgttttggattctttcagtgtcgaccataaagtgctcttataactcggaagaaccagatgaaaaatctacaactgtacaatttcaattcattgaatcgatcctatataaagaaaagaatataaaggcatccatttatagccttgttcattagtgaatggcgctataacattttggatatgaagtacactatggccaaccaaccaaccatatactttagtgagatcttatcctttgacatttttgcccctgcatttgctccaaagagacataaagaacgatacggttgaaagcaatctgacgaaat

SEQ ID NO: 40820 - DNA, 431 bp, Setaria italica
  Peptide Sequence Number=SeqID_106794
ggatgccggatggtcgaaatgtcctgcgccgagcacgacgcgcacgccgccgagacccagttcctcacccactccgtcggccggatgctcgccatgctcgagctccgctccacgcccatcaacaccaagggctacgagacgctgctccggctcgtcgacaacacctgcagcgacagcttcgacctctacaatggcctcttcatgtacaacaagaactccacacgctgctcgcccactcccggaccgatcactcggcgctcgccgccacgctgggcgcctccttcttcaccgacccgcacgacctctgcgagtgccacccggacgtggtgctcctcgccacctccatcctctccgccgaggccgtcctccgctcgctcccgtccaccgcctccgccgcaacaccctcttcgtcgacgtgctctccgtcaagg

SEQ ID NO: 40821 - DNA, 1281 bp, Setaria italica
  Peptide Sequence Number=SeqID_106795
ccggtcggcccccagcgcatccgggcgctggacgccgcccagccgttcgactacgagtcccgcgcggcggggctgctggaggagcggcagcggctcaagatcgccatcgtcgggttcggcaacttcgggcagttcctggcgcgcaccttcgcgcggcagggccacacgctgctcgcccactcccggaccgatcactcggcgctcgccgccacgctgggcgcctccttcttcaccgacccgcacgacctctgcgagtgccacccggacgtggtgctcctcgccacctccatcctctccgccgaggccgtcctccgctcgctccccgtccaccgcctccgccgcaacaccctcttcgtcgacgtgctctccgtcaaggagttccccaagaacctcctcctcagctccctcccccccgacttcgacgtcatctgcacccaccccatgttcggcccggagtccgcgcgcgacggctgggacggcctccccttcgtcttcgacaaggtccgcgtcggcgactgccccgcccgccgcgcccgcgccgaggccttcctcaacatcttcgagcgcgagggatgccggatggtcgaaatgtcctgcgccgagcacgacgcgcacgccgccgagacccagttcctcacccactccgtcggccggatgctcgccatgctcgagctccgctccacgcccatcaacaccaagggctacgagacgctgctccggctcgtcgacaacacctgcagcgacagcttcgacctctacaatggcctcttcatgtacaacaagaactccaccgagctgctcaaccgcctcgaatgggccatggactccgtcaagaagaagctcttcgacggcctgcacgacgtgctccggaagcagctcttcgagggcacggcgccggccccaaacaccaccaacgtccgcaagtaaccatggagaatttgtctgagctaaggtagtaattcagtgcgtcggtgcttgctgctcgtctcatgatcgtcgagctatacatttgcattgtatcagtctgtatctgtattctccccaattgagatttgagaggggttcttcctctctccctctctggaagaagaacaccatagtccttgtcaattctgctacattccaagtgatcccctctttgggtggatggggaaaaaataatcttatcttatcttggaaatgtggtagattgacattgtgaaatttgtgatatgatgatgaaaaaagtgaataaaggagcaatcttgccgctgtgagcttgtgatatcaaaaaaaaaaaag

SEQ ID NO: 40822 - DNA, 1069 bp, Setaria italica
  Peptide Sequence Number=SeqID_106796
aaataaaaagataaagatccaggatgtaaacaatcatctgggtgtaggacccaagattagatgtattgaaatgttacgcggcctttcgacgccctcagcagctcaacttgcaggaggtgcatcctttctacaaagctcctggaatcagatacctactggattcttcaactgaggcagctttgaacagcaccaaatgagaagatccatggggatgttccgcgacaaagcataataccaatggaccttgtagaggattcagtttctgttagtaatagacgaaggttggtctctaacgcaaaatgtatcgtcgatggaacagcttattctggcatcaaacttcttttccaacaacagtgacagggaataaaactgcaaaagagacctcctgaaagcattgtcctgatttggaagtatatccgcagcagcagcatatccagattttggttgcccatctcggccctatatatttgccatggcagcatacggtgcaaggcaagaaacagagtgagcacaaaaataagaatatgaagggcaagttacatcagagtgatggactttctggagaaataagaaatggaagagatcaaagatggatagggagcattcagggtgagaatcacagtgcggttctcctctggcatggaggccaaagtagcaggcatggacaatgcacagtgctatcgccatccctgccaaaggagaattgccctgccattcggtataaccctgcttcagttttgctctcacatcaggatgctatttgcaaaccaatgatcgaaatggatgatgcaacaaaggtattccatatgagattcaagcttctttgtaaatgacttttataggaaaaattgcttttaatattatcagtttgtataccacacacctacaatgttacaatgagagcatcatttcttacatggcactgtgtatgaaaaaagcacaacatgtcaaacaagcaagggtaaagtttatgctacaaaataattgctcaaatagaagaagtaaaagcctcagtgacttaaagcagtattttatataccctagctgtttgttcatctagctatccatc

SEQ ID NO: 40823 - DNA, 886 bp, Setaria italica
  Peptide Sequence Number=SeqID_106797
gcaactgctgtaatgtccacctgtttgtagcacttgccatctccaggctctcagtgtgttaaaggatggtccttcctctttccttctatacttcagaaaagttgctgtcttccactctgtttaaggtgtgatgctattgtgccattttcttgtctaccttgctaattttcactttcctgaaattagcaaaatttcaatctattctcctcaccctgggatctcctagcaattcattccccaatgatgttataattcaggctaacactagttggtccgttatgttcacccaggacctaatattggtgacatggacatggcgcaacggtgatttgatgactcctgtgtgccattttcttgttgcttcctacaatttttagtagttacaataaaactgtattataacttagtcaatggtagttcttgagggggcaaactgaaaaaaaaaacgtagtaaatgaaaactgttgatcagactactcaatctgcaagaaaagaatcagcagaaacaggtggcttatttatgaatcaatattttaataaaagataaagatccaggatgtaaacaatcatctgggtgtaggacccaagattagatgtattgaaatgttacgcggcctttcgacgccctcagcagctcaacttgcaggaggtgcatcctttctacaaagctcctggaatcagatacctactggattcttcaactgaggcagctttgaacagcaccaaatgagaagatccatggggatgttccgcgacaaagcataataccaatggacctaatagagatggtaaccagtttgtacaggaataaccttgtagaggattcagtttctgttagtaatagacgaaggttggtctctaacgcaaaatgtatcgtcgatggaac

SEQ ID NO: 40824 - DNA, 420 bp, Setaria italica
  Peptide Sequence Number=SeqID_106798
tagtccaaactcaagttaatatttgtcccaaaaagatgactgctgtccatctctgagaagagatctccattctgcaacttcagactggtcctaagaatggtgaaagcttaagtggttttcggatgtgtctcggcacattgcttgacaaaaataattcttgagaatcattgacatcaataattttagtaagtttgctatgctttaaaagttagaaaaaaaactatcacttcagaaacccatcatttctttctcaaaatcctttatgcaataactgctgaatattcacatggcatcacaattattcactgatattcactgatatgtttccttctgaaaaatttgaagtgagcatctctacccctctgcatatatacacaacttgaacccataaatttctcataaattctattccatatcttt

SEQ ID NO: 40825 - DNA, 424 bp, Setaria italica
  Peptide Sequence Number=SeqID_106799
caaaatcaactgagctagatgcaccaatactttcaaggcaatagctgtatgcagtaagtatagctaaatatcagaaactcacatagaacatgtaaaatgcctagtaaaaacataatgccatgcccactgggaaattagccgttctctctgctgcctccatgtaacagtccatatgttgcttggttggcaaagtgctaaaaggtagtcaactgaaaaaagcctggtaaagtagtttaagagaatcaaatcaatcacaagctaaatacatcgctaaaagtcatgaaataaggtgttatctaaacatgaacggagtaacttaaatggcaataatatacacttcgtatatgctagctatatgctcagatgacttcctttataatttaattattatttgggtaaattgttgcctacttgttctaattta

SEQ ID NO: 40826 - DNA, 1708 bp, Setaria italica
  Peptide Sequence Number=SeqID_106800
atccaagtgtatcaaagatgtaagtcgatgggcaatggactactgggtggcctaacatattatcagattcagacatttaggcagggactgctgggttcctgaaaaaaggttggacccagttgaaggttcagtgaggctctaggcaaaattcttggtttgcatcagcctagccccagggagatgctgtttggttggctgccctgagcctctgagacaaacacacccttcaaatcaactgagctagatgcaccaatactttcaaggcaatagctgtatgcagtaagtatagctaaatatcagaaactcacatagaacatgtaaaatgcctagtaaaaacataatgccatgcccactgggaaattagccgttctctctgctgcctccctgtaacagtccatatgttgcttggttggcaaagtgctaaaaggtagtcaactgaaaaaagccatcaaataatctaaatattggcattgatgaagaagcactagtcattgcggtcaggtagcaccggcaatgaatttgctggaaatactgcatgacgcaaccctttcgccttcatcttgatctgctctcgaagcctacaagcttctctgaggtcatctgaggaatcagcaccactagtcttgtaagcatgtctgacctgttcttgaaagtccatagcaagattgtagcttcccatcacgccgtatgcatttgcaatggactgagttgtgtcaatggaatcctcatgcgttggcccaaatgtagcatgtataataccctttgcaagcatgaggaacttcacagctgattcaggtcggtccatcccgagataggcctcgcccaaattcttataagcaaaacctagcccaaagtgctgcggcccaaagcaattcttcaacttctcaactgcagtctccagataaggaacagcctcagcaactctttccgaatgcaggaggagccaccccatccttgcagagatgctgccttcaatgtgctgcatctccttggcatccttgagaattgcaagtgttttcttcatcaagcttaaagacgtttcaaactctgccattgcctcgtgtaacaatgatatctcagcatatgcctcagcaactcgcccagggttcatggaatcatttgtgtcgataatcccacgagcaatttccaagcaccgttttgagtccgagatcctctcctgggaggtcaagatctttgccattgcaacatatgctagtgcacgttcctcgctctccttgtcggcccgcttcatcaccctcttaaggtcattcaacgcctcctccgatttccccaacaaaatacggatattggccccatcaatttcaacctgggaaagctcgacattcaatcccaattgctcatacaccatcttaaccagctcaatttgctccagtgcatccacatggcgacctaacccagtatagacaactgcaagaagccgccggaccttagccacttcttttgagtccaaaccgaatcgcccctctgcaatccccaacgccttggaacacaacggcagcgccttgtcaaagtccagcactcccgcataggcctcggcggcatccctgtaggcgtcccccagctccgcgctcccttcatccaggcagccgctcttcagctccagcgcgcgccggaggtcgcccaccgcgtcccaccgcctccccacggccatcttcgcgcgcgtcctagttctttgttctttcgttta

SEQ ID NO: 40827 - DNA, 1099 bp, Setaria italica
  Peptide Sequence Number=SeqID_106801
taggagctgaagatgacgaagacgacgacgatgctgctgagctggatgcgacgttgctactagaaccagcgatgatttctgactctagccacaggtgggacagaacttggcagatgccctcttcaaccgccatactaagatttcggaatcctttcagacgaagatatgcatgcatcatctcgtgggctagaatggaaccagtttgtaatcttggtagaccatataatataaggattgcagtcacttcacaccgccgagacagcttgtatggtcctgtaatcatatctaggattctgtttcctggcccaatctgtggtctttttaggatcgttctgacaatttgctcttcagaaagacatagacctctggtttcgggtaggtggtgcccatttttctcagcctccaatgcttcattcagagcctgtctctcaaccaaaagtaatggaatttgctgttctactttcatgttcaatccttcaaaaaattcttgaatatccatgtaaaggtgttgacattctggagtatccattatcgaagaatttaggcattccaagcagagtttcctcccatcatctaatgttatgtacttgatctccctaggctccattcgttcacaactgcagcacctaggagtgccatcatcttcatgggaaggacagtacttctgcatccagaaaggatgtgctcggtattcgatgaggccatctctattcgttggaataaagttgtcacaaacatcacattttggatgaaaaaactctttgtagcaggatctgtggtacggctgatcatcatgcatagcaaactgcaccactcatactcggatatgggcttgttgcaagcaaaacatctgaagcagtcgggatgccaaactgaacccatacaactaaggaaacggccatggccaattgggttatggcatccagcacaggtcctacacaaataaaaggatttctgaatccacttcctgggtaaacatgtggaggtggctcctttgctggaacatactgttgaggaggaacatcctcaataggaacattccgtcgaggaggcacattctcaacaggaacattctgtcgaggaggagactcggcattca

SEQ ID NO: 40828 - DNA, 1757 bp, Setaria italica
  Peptide Sequence Number=SeqID_106802
tttttttgttgagcaaagacacagttcctcattgcttcatcttatgtgtctgctgtgacgagaaacaactacagaatttccttatccgaagacttacatgtattatttgcaatcaagtacccaacatgtttccctcctttggtatgtatatgtataattcaaagtttcaaaccaaaatccgccaatgtgcagcatcctcgcaagtcgaagaatgggcccctcctttacttccgctgcttcaataggggaaagaccctgtcagcttaatatgatcgagggttcttctcaaaccgtagcgctcgacagccggatagccagctctgaacccatctccatacgcctccgaagaatccgtctcgatctggttcttgatgaatgccccgagcttcttctcgaattcggtctttgcgcccttcttggaagaggtaggagctgaagatgacgaagacgacgacgatgctgctgagctggatgcgacgttgctactagaaccagcgatgatttctgactctagccacaggtgggacagaacttggcagatgccctcttcaaccgccatactaagatttcggaatcctttcagacgaagatatgcatgcatcatctcgtgggctagaatggaaccagtttgtaatcttggtagaccatataatataaggattgcagtcacttcacaccgccgagacagcttgtatggtcctgtaatcatatctaggattctgtttcctggcccaatctgtggtctttttaggatcgttctgacaatttgctcttcagaaagacatagacctctggaaaactgaacggcttccacccaggaaccgaccagggcctcccatcatctaatgttatgtacttgatctccctaggctccattcgttcacaactgcagcacctaggagtgccatcatcttcatgggaaggacagtacttctgcatccagaaaggatgtgctcggtattcgatgaggccatctctattcgttggaataaagttgtcacaaacatcacattttggatgaaaaaactctttgtagcaggatctgtggtacggctgatcatcatgcatagcaaactcatactcggatatgggcttgttgcaagcaaaacatctgaagcagtcgggatgccaaactgaacccatacaactaaggaaacggccatggccaattgggttatggcatccagcacaggtcctgaatccacttcctgggtaaacatgtggaggtggctcctttgctggaacatactgttgaggaggaacatcctcaataggaacattccgtcgaggaggcacattctcaacaggaacattctgtcgaggaggagactcggcattcaggctctcctgcagcgctcttgcaagttgttcgtcttcctccaaatcatagtgagtatcaatagctgcttttcccttattttgatcttcctctgctagcgataatgcaatagcacgatctatatcctcattatcactgtcaccataagtatctctgttgtaatcagatgaatggccttcatgccagtctccatcatagtgaccccttgaaactctattgtttactgaacccttgaaaattttatttaaccaactcatgatctcgaccttatgtgatgatcagatttcctttagccttagggagagtggaaggatgaaagcgccaaaaagttacgaacccagtatgttctcaacaattcaaacactaagagaatgaagaatcacggacatcgatccttgagcttgcgattaattacggt

SEQ ID NO: 40829 - DNA, 499 bp, Setaria italica
  Peptide Sequence Number=SeqID_106803
tttgtcagcacacaaatcttgattggacacaatgagcctaagatgatgctatttttccttggccatttgacaatgtgatcactactaggactacatactgatttgtatcataggccaaaaccaaaaaccacttctgtgtagcaaatctattttgctggtgatgtcagacgccaacaagaatttgtacaacgaagctcgttgaggctccgcaatcacttggaagagcagcttctaaggggataagttagaagagtggaagcatccaaggtcctatctatgacagttcaagtaaaaggagtgtaggtgagcactgcagcatggttcgattcatccttaaactcgctataagagagaagcgccattattgtgctgtaaagtttcagctgcacgcaaaaggatgttctttatagataattgaggtaatatctggcctcttaaccaacaatggacacaaggatgtttgattcccacgatacctttttaataatattgctagtgt

SEQ ID NO: 40830 - DNA, 511 bp, Setaria italica
  Peptide Sequence Number=SeqID_106804
taacctgcaatcctgccgtttaccactggatatgctggggtatgagacacaggcatatcactacaatgcgcgaattgagtctgttttggtaacggtatagggttgagcttaggcattactgggttattgccatttgaagacggtataggattgagattaggcactactgggttcttgctgttgaagagggtttctcgtgaccagcaatgaatttaagtgttttaccattgacccgaacaagtcctgaaaaaagtttacagcatactgggcaatttcctcagtttcatactcagcaaaagcataacctttgagacgattgttctccttgtcacagggtatatgtaggtccattatgggacctgcctgaataagaatctcatacaggattcttttagataccttctcatccaaattacctatgtagaccgtgcggccggggttcctcgccatgcggacacaatctcgccgcgggggcgggctaggggctacgagcacttctcgcacggtcgcc

SEQ ID NO: 40831 - DNA, 750 bp, Setaria italica
  Peptide Sequence Number=SeqID_106805
atggctgcgcctgcctgttcaacatagtagggtagtaggttcggcaggagagtaatggaatggcatggtttagtgaagcaacgatgaggagacaagttgcttgtcatcacttagcacaagcttagttggtggtagttcagacaatgaccttgtcacttacgagcatcacacataaactgataggtggaacagcactaggtcccctttggcacggcttaggccaaagggctccgggcaatctcgtcttcctatctcaccttgagggtgaacaccatatggataaggagtgggagagaaaccataacctgcaatcctgccgtttaccactggatatgctggggtatgagacacaggcatatcactacaatgcgcgaattgagtctgttttggtaacggtatagggttgagcttaggcattactgggttattgccatttgaagacggtataggattgagattaggcactactgggttcttgctgtttgaagagggtttctcgtgaccagcaatctgtgaaaagtattgagaaaatagatatatgagcctgcttatatctgaacaaataatcagaccactagcacatttgaaaaaacaatggaagtttactatgaactcataaaaattttaatgtttcagcagatagtgtgactgataacacgaacagctataactgtcctacaggaaggtaaatcacagtgatcctgtaagtacacttgaccattgtagactattaataaattacatgcaacc

SEQ ID NO: 40832 - DNA, 402 bp, Setaria italica
  Peptide Sequence Number=SeqID_106806
cgatgctgagtaatggtctgattgacacttacgctaaatgtggaagtttggatgatgccaacaaactctttgaaataatgggcacaggccgtgatgtgttctcttggagcagcttgattgttggttatgcccaatttggttatgcaaaggaagcacttgatttatttgccaggatgagaaacctaggaatcaagccaaatcatgtaacctttgttggagttctcacagcatgcagccgtgtaggacttgttgatgaaggttgttattactacagtattatggagcctgaatatggcattgtcccaacaagagagcattgttcatgtgtcattgatttgctggcacgtgctgggagactaagcgaggcggcaaagtttgttgatcaaatgccattcgagcctg

SEQ ID NO: 40833 - DNA, 348 bp, Setaria italica
  Peptide Sequence Number=SeqID_106807
gcccgcctgcttgacggaagcggtgctcccgcgcgcctggacgagcgacctgccggtggggtcagcggccgcggtggcgcgtgaaggacatagagctcgggcacaaatggcggagcaggggcggggtgatgagggggagaaaaggaccgacgacagggagacggctgcgcggtcgcggcgctatgggaaggcgacacagattgagaaggcgcagaggtcccgaggtggggaggattcgggaggggacggaggaagggggagccaggagatccggagcagcgccgagccagcgagaacggcggggttgcgaaagaaagaaaaagttacccgtgtttggtatgggcggat

SEQ ID NO: 40834 - DNA, 357 bp, Setaria italica
  Peptide Sequence Number=SeqID_106808
tattgaaattttgtggttatggctccaaaagaatattccaccaacagagtagacaaaggaagtgctctcaaaaagctaccttgatatttctacgcagcacagcaattgctaacacattcagacaaatgacccaattgcagaatagcaatgcagatgttgctgaagaaccataatttcagggaaacattgatagatactgaacattgagttagcatttgaccatacaaagcaaacaacttctcggtggacttgagaacactaagtccactgaaatctgaatcaacgggaacatatcgaacctgtttgatcaattgcagtccgtgtccctgttcaagcaattgtattggcacaaaagca

SEQ ID NO: 40835 - DNA, 1656 bp, Setaria italica
  Peptide Sequence Number=SeqID_106809
tccggcgaggcgcccaggccgcgtcccaaggttccgcaggtgaagcgcgtgtccagcgccgggctactcgtcggctccgtgctcaagcgcaagacggagaacctcaaggacaagtacagcctggggcgtcggctcgggcagggccagttcggcaccacgtacctctgcgtggagcggagcacggggaaggagttcgcgtgcaagtccatcctcaagcggaagctcgtcaccgacgacgacgtcgaggacgtgcgacgggagatccagataatgtaccacctcgccgggcaccccaacgtgatctccatccgtggcgcctacgaggacgctgtcgccgtgcacctcgtcatggagctctgcgccggcggcgagctcttcgaccggatcgtgcagagggggcactacaccgagaggaaggccgccgagctcgccagggtcatcgtcggcgtcgtcgaggtgtgccactccatgggcgtcatgcatcgggatctcaagccggagaacttcctcttcgttgaccagaaggaggaggccgccctcaagactattgactttggtctctccattttcttccggcctggtcaaatattcactgatgttgtcggtagcccttactacgtcgcaccagaggtcctcaagaagaaatatggtcccgaggcagatgtttggagtgctggtgtaatcatttacatcttgctttgtggtgtgccaccattctgggcagagaacgagcaaggtatatttgaagaggttttacatgggaaacttgattttgagtcagagccgtggcctagcatctctgaaggcgccaaagatcttgtgagacggatgcttattagagacccaaagaagagattgactgcccatgaagttctacggcatccatgggtccaggttggtggtctggctcctgataagccgttggattctgctgttctatcccgtatgaaacaattctcagccatgaataagctgaaaaagatggctcttagggtcattgccgagaacctatccgaggacgagattgccggcctgaaagaaatgttcaaaatgatagacgcggacaacagcgggcaaatcaccttcgaagagctgaaggtcggcttgaaaaaggttggcgccaacctccaagagtccgagatctacgccctgatgcaagcagcggacgtggataacagcggcacgatcgactacggcgagttcatagccgcgacgctgcacctgaacaaggtggagcgggaggaccacctgttcgcggcgttccagtacttcgacaaggacggcagcgggtacatcaccgccgacgagctgcagctggcctgcgaggagttcgggctgggcgacgtcaagctcgaggacatgatcggggaggtcgaccaggacaacgacgggcgcatcgattacaacgagttcgtggcgatgatgcagaagcccacgctggggctccccaagaagaccggcggcctgcagaacagcttcagcatcggcttcagggaggcgttgaggatgagctagatacaatatagcgcctgtttgtacgtgctccggagagagttatactgcctgtagatggagtgagcgagtacagtttctgtagagacgggtgatggtaacagataactggtaaggcgattggtttcgtaggactgaaaaaaa

SEQ ID NO: 40836 - DNA, 843 bp, Setaria italica
  Peptide Sequence Number=SeqID_106810
aagtcttttaatttcttcagaggtggacgtctcatcacgctttccaataactgaaaaccttgcctgtatggctgtatcgctggtgttcacattagttgggcccggtgaggcctgagacagcaacaacactaaatgctgtattggttactgtcttactgaatcgatcgactgtggaatcattaaaatttggtccattaaagtttgggttaaaatttctacatccaaggcttaaatattactgtgttcttcatacaagtttgaatggtaacatttactgctcaaatttccttgttcaagatagactttgagagattctttcttaggtaagctgaggcttttcagacagctctaacctttgatttggaaggcctttcaactgctctgacgtcatattgacatgttcacttttcatttgtcagaaagcttaatcatatttcaggtgtctgtcttgcaaagatatttgttgcctgcctttattagtattcagttttcctttttgatgccgacctcctacctatagttctgtcctgacctatatatattgcaaggtactttgtgattatgacctagatatacaaagaccaagctattacttgcaagtactatcactgcatccaacaggtaatatacttgataaattttttttcaaccatgactgcttaacaaccatgcatctatcacttgaaacaaaagaagacaacaacatgctactgatcagcaagcatgcatggggaaactttcagttgcacaacaagtagaatctgtcactaatgtactgaacaactatctcacacatcacattgttcaaaacatctgtcaacaactttgcagattaagaaaagg

SEQ ID NO: 40837 - DNA, 937 bp, Setaria italica
  Peptide Sequence Number=SeqID_106811
ccaagtgcagcaaagcttaagtgtatgcttgaaagtttagaaacaaagattcaagatatgagggagttcgtcatactacttgccagctgccctcgactgcctcatcagccttatagtacatatctgttcatggataggtgcatgtttggtcgctactctgagaaacagcaagtcatcagtttcttgttatgcaatgatactcatggctgcccaaatctagacatccttccggtcttgggtccgcatagagttggaaagaaaacacttgtgcaacatgcttgcaaggatgagagggtacgcaattgtttcacggatatattgttcttcaaaggacatgatctagagaatggagaatttgcagcgaacttaaaggttaactcacggaagtgcttatttgttattgagttcagttggggtgtggatgaggtagcatggatgaactttaaatcctatttgcagaacgtggtaggtgctgttgttgtagttatctgataggaagaactcaggaggttgctaagtttgggacggctcatcctatctggatgaagagtttgtctgaagaagagtactggtactacttcaaggctctagctttcggaagcatggatcctgatgagcatccaagacttgcatctctgggcatgcagctggctactgaactaaaaggctcattcctgggtgcaaatattcttggtgagatgttaagatctaatcctaaccctcaattctggcacgccatcttgtcaagtgtcagagcgctagtacaggaacacctattttcctctggcgtacactcggaagaccttctcgagagaaatgctcctgttgattttccaatggcctttgtgggtgctcatggtcagcgatgtctggtgtatgatcttagggaggctgaccctggacaagatgagctgccgttaccgacttctcaagaagt

SEQ ID NO: 40838 - DNA, 318 bp, Setaria italica
  Peptide Sequence Number=SeqID_106812
gtctccctttcacaatacaaacactcatcaccactcgagcactccacacgcaagagttaagcacgcaaacgacaagctttttttcatatctacaggaaagcttatctttgggtcaaggctggggatttctgtatacaccagctgcggcgactgcaggtaaagagggggccgcttctatgggttgatatgcactcaaaaaaaattacatgaatcagctacacacttgtagatcagtttgcctcgccacgttgggtggtcactaacatcacacggcctcgccttttctcaccggagacttgttgtgctacaggtaataaa

SEQ ID NO: 40839 - DNA, 1405 bp, Setaria italica
  misc_feature (1)..(24): n is a, c, g, or t
  Peptide Sequence Number=SeqID_106813
nnnnnnnnnnnnnnnnnnnnnnnnaaattcaggataaacaacctccgtgttaattttgccatgaaaacaccctgtatcaagccaacaaaatgtctccctttcacaatacaaacactcatcaccactcgagcactccacacgcaagagttaagcacgcaaacgacaagcttttttcatatctacaggaaagcttatctttgggtcaaggctagggatttctgtatacaccagctgcggcgactgcaggtaaagagggggccgcttctatgggttgatatgcactcaaaaaaaattacatgaatcagctacactcggtgaggtcgatcgagcagattaggacacgcttcacacccaacaaatggttacatcttttttattacctgtagcacagtctccggtgagaaaaggcgaggccgtgtgatgttagtgaccacccaacgtggcgaggcaaactgatctacaagtgtgtcgggcactgcttttggtttcgttgcagcatgtgggcttgcaaactacacttcttgacatgtattgctgcaaccgtggacaagagatccttcgattggtccaacaacatttgttcttgtgtggcgagtttagcaagctcagacactacagagcttgttccctcaaccttagacagcagattacatatcgaggatgtcattgtgtgcattacatccacagctgagttaacagcttccttcacaccttgcacatcaccctttgcaccatcaacaaccggaagacgaagagtactagccttcagtgctttaattgctgctgataaagcacttgaatgatgtttttctatatgagaccagtcctctagatacgacatctgacccctaagaatagcaaacaatttaagtttttgtttctggagttggagtctgcatcttttggaactgacattgtcacgtaatcttgatatttctttccatgcgctgtgaagggttttctcggcagtgaagctctgcaccagaagtgatgcgtctgtccgtgcattgatgcaccgccactgcaaatgccggttgtccagcagccgcagcctgtgtgcttcctcgattctgttctctcccttcttcgccctcctcacctccgcagcaaagctgatgatagatggcgcatttgctggagcttgcatcatatgcccatttggcgatgcttccccaccacgccctcttgatggactcgcggcgcccctgcttccacggcatggagatgggggaccgacccggcagccttggcgacattggactgtctgagaacgacctccggccagacgatggtagtggcagcccaggctctggaaggcggcgcaggcggctgttggtttcctgccagaaccttgccggcacgctgatgccgcggcgcgggggatcaccggcgcccgagttgcttc

SEQ ID NO: 40840 - DNA, 780 bp, Setaria italica
  Peptide Sequence Number=SeqID_106814
acgatcacatcaaatccgacttaatttcaacacacaaaaattgaggaaaatgacgagatcacgacgacgttgtgcagctggtctcctgatcagttttcatcgtggcgacgtcgtacaagccgactacgagctgcctgcagtagtatttgacgacccgaggggtggtgttgaacccgaacctgatctcggtgacgagcgtgccgttcactagcatcgttacgtccttgatgctgcccccggttttgtgcaatgcgtcgaaggcgaacggcatgatatcattaggattcctctggacagtccgctgtatcaggctgtccgtgaaccgcatctgcatcaccgacatgtctggcatctggaaggagaccaagcagtcggccatcggctccggcgtggtcgccggcgtgctgctgttgaagaggaacgtgttgatgttgaagtagtacatgcggacgcggccgctggggttccgagcacggagagtgtaggagaaggacagggaagggtccgtcgccggcggcaacgagttcgtggacacggagcctccgaggaccgagagagtcagggagtcggggcggaacaccacctggatggcgtggacgacgacggcgatgatcaccacggtcaccacggcggccaccgcgtaccttgccaagtctagccaccggaaccctgatttctcgccgtcacctgctgctccggccgctgccatgctcttacgacgacagccggcggtcagatttaatttttttggccgccgtgtcctggcttatgatttgcttg

SEQ ID NO: 40841 - DNA, 3564 bp, Setaria italica
  Peptide Sequence Number=SeqID_106815
acctcccaagtagtaaatggcaagcaagaaccacatatcatggggaatttaaagtggatgtctgcctccagtgtaatgaagatggcgcacaaatcaggcataccttcaattttggccatctgcctattatgttgatgtcaaaactgtgtcatctgagagatgctgatccacacaaattagttttccatggtgaagaggctaccgaaatgggcgggtacttcatatgcggcgggatggagagacttatacgtattcttatattacaaaagcgtaactatcctatggggttggtgcgtggttcttttgttaaacgtggtgctggatacactgacaaagcagttgtcataagatgtgtccatagtgaccagtccagtgtgacaataaagttgtattacctccaaaatggaagcgcaaggcttgggttttggttggggggtagagagtttctgcttcctgttggtattgtcctcaaggcccttattgatacaagtgaccgggaaatctttacaagcttgacatgctgctacagtgataaatatggaagaggaaagggagttgttagtactcaactaattggtgaaagggcacaaataattcttgacgaagtcagagacctgtcccttttgactcgcatgcaatgcttggtgcatattggaaagtacttccgatctgtgatggaaggatttgaacattatgactatgaaacggttgctaaagcggttctgaaggactatatctttgtgcacctggaaaacaaccacgataaatttaatctattgatatttatgctgcagaaactttatgctctcgtagaccaaactgcttcgcctgacaatgctgacgcactacaattccaggaggctctcttgcctgggcacttaatcacaatttttctgaaggatagacttcaggattggctaagaaagtctaaacgtttaatcattgaagaggctacaaagaacaaaagttttgatctcaacaatgcactggaggtaagaaaatttcttactaaacatacaacatttgttggtagagctattgagagtatgataaagatcgggaaagtgaattcacaatcaggattggatcttccacagagagatggaatgaccattcatgctgaacggctcaactttcatcgctatatctcacatttccgttctgttcataggggttctgcttttgctaaaatgcgcacaacatctgttagaaagttacttccagaatcctggggtttcctgtgtccagttcatacacctgatggagagccttgtggtttgttgaaccatatgacttccacatgccgtatttcatcggtctacaactcagaaggtgtggttaaagattttgggaaaataaagaagtcactttcttttgagttggttcgtgttggaatgaaccctgtgttgccgaagattgagcgaactggtcccccagaagtactacatgtccatttggatggatgcattcttggtactattgcttctgctaggattgaggaagcagttaattatcttcggatgttgaaacttctggcacactcagggattcctgaagatctggaagttggttacgttcctcttagtcttggtggagcttatcctggcctttacctttttacaaatccagctagatttgttcgacctgtcaaaagtctttttggtctacctgatggaaagcaaagtattgagcttattggaccatttgaacaggcatttatggagatacggtgtcctgatggtggggatggtgggagaaaagaaaagtttcctgcaactcatgaagaaatccaccctactgctattcttagtgtggttgccaatctgacaccttggtccgatcacaaccaaagtcctaggaacatgtaccaatgccagatggcaaagcaaaccatgggtttttgtggacaagctctaaaattccgtactgatgtaaaagcattccacctacagacccctcagacaccaattgttcggacagctacatatggcaaatattgtatggatgaatttccatcaggaacaaatgctattgttgcagtgctagcatacacaggttatgacatggaggatgctatgatattgaataaatcagctgttgatcgtggaatgttccgtggacatatttaccagactgaatgcatcgacctatcaaaaaaaacagagaaaatgttccagaaatctttgcaaagagtgtattatctagggatacaagcactgctattgattcagatggccttcctcggcttggacagacagtacatccaaatgagcagtactatagtgtctataacagactcacaggcgcgataaggcctgtcagactaaaaggcacggagccagcgtttattgactatgttgctgtcaatggggcaagttcaaaaggtgactttcagaaggctaacattcgtctgcgtcgtgtaagaaatcccataattggtgacaagttcagcagcagacatgggcaaaagggtgtttgctctcagttgtggcctgacattgacatgccattctcggcaaatactggcatgaggccagatctgatcattaaccctcatgcatttccttcaagaatgactatagcaatgctcttagagtctatggcagcaaaggctggaagtttgcatggaaagttcatggatgcaacgccttttgcaagctcagtcaaaaaggagggcaaggatccccgtaaacctgattcgattgtggatgaactgggtcccatgctcgcatcttatgggtttaattatcatggaacagagactctttatagtggattttttggcactgagatggactgtgagattttcattggacctgtttactaccagcgtctaaggcatatggtctcagataaattccaggtccgcactactggtcgtatagaccagataacaagacaaccaattggaggaaggaagcatggtggagggatccggtttggtgagatggagcgtgatgcgctcctcgcccacgggtcttcctacctcttgcacgataggcttcactcctgctcggactaccacatcgcggacgtgtgctccttctgcgggagcttactgaccgctacggtgatcaagtccgatacccagaagaaagccaagcgtgagatgcttgggctgcctacggtcagacctcagaagaacttcgcatgccaggcctgcaaaacaagcaaggggatggagaccgtggcgatgccatatgtgttcaggtacctggctgccgagctggctgccatgaacataaagctggagctccggctgagcaacaaatcagaattgcctccgagccaaggatcatgaagttctgcattcaccagagctcggaggcacctggcaggagaaagcttaaacgtagcctgtttcaatcgcaatgtcctgccggagctggacactgcaaaggtttgttcgatgagggaactgtatctttgatgggtcagttgagacgttggttcgctgttgcattgtttcatgcgtacgtgggcgtggtatgtcgttgtaacatgtaacaaatcatcaatgtcaatccgagctataactttgcgtggtcgctcttttgcaaaaaa

SEQ ID NO: 40842 - DNA, 764 bp, Setaria italica
  Peptide Sequence Number=SeqID_106816
tacggtcgtgatccagggccggccgctgtggatcgtgttcgcgcgcgacatggtggtgcggctccgtcaggagctcatcgtgagcgacaacaagaccatcgacggccgcggcgcgcaggtccacatcaccggcgcgcagatcacgctgcagagcgtgtcgcacgtgatcatccacaacgtgcacatccaccactcggcgccgcactcggggggcattatccgggactcgaagcgccactacgggctgcgtacccggagcgacggcgacggcatctccgtgctctcgtccagcaacgtctggatcgaccacgtgtccatgtaccggtgctccgacgggctcatcgacgtcgtcaacgggtccacggggatcaccgtctccaacagccacttcaccaagcacgaccacgtgatgctgttcggggccagcaacgacaacccgcaggacaggatgatgcaggtcaccgtcgccttcaaccacttcggcaaggggctcgtgcagcggatgccgcgctgccgctacggattcttccacgtcgtgaacaacgactacacgcactggcagatgtacgccatcggcggcaacaagaaccccaccatcatcagccaggggaaccgttcatcgcccccgagaccccaagccaaggaggtgaccaagagggagtacacgccctacagcgagtacaaggattgggtgtggaagtcgcagggggacgtcatgatgaacggggccttacttcaacgagtccggcggacagaacgagcgc

SEQ ID NO: 40843 - DNA, 2137 bp, Setaria italica
  Peptide Sequence Number=SeqID_106817
ttacaaaataagggaacatgcttgttgtacagctacaaacgagcacaggttagggccagaacgtgttacatcacttgtaaaattatccgccatatgtgcgggcagctcttacatacactgtacaaaaaagtagatacacctttgcattggcttcgtatgcacatgaacctaactagcctctctatcctagtgtctactttcaatattattctgtagtggtagcaggaaaaagaaatcatttcactgtaaaacgaatggcaaaaccgggctcagtgttggtccgtatctgaatgttacacggcagaaagctttgagggcatcaaccaaatccatggaaaccggcagactgatacgagtttgacagcttcggtagcttgagaactgcgagcacaccagctgccagggagaagatcgaagccaaggcgaatgcagggatgtttcctcccccatagagagcatcccatggacctgctccgagtgacactactatctggggaacgacaatagcaagatttaggactcctgtagccaaaccttgtccacctcctgtcccggcagtcagctcggcggttacagaaaatggaacactgtaagtgatggagagtggtaatccaagaatagagaaaacaaccaatgcagcaatcttgactgttttatttgctccaatgatgtgatgcagtttactcgagtatagatcagaagagatccaacttagtatcgtcgtagccatcatgcagatgaacactgtgaagttgctgattgcccaaaccaatcttgcaccaaacatccgacataatggatcaacaaggaaggaaccaataccaaggacaacagaattcaatagcaaaccaaatgcaccttctcggacaccattttcataagctttcctctcactcaagtctccatttggatccccatggtaaacttcacgccccatccagtcggtgtcaaaaaggaaaaagggaaaccatgacaaccatgttaaagccataactacaagcactgaatgcattcctggaggtagatgcctcatgctggtcaaaatgttgaccaaaactgctcctggtccatcattgaaaacttctccattgtccctgttcaagttggaattcacatccgtaaattcctcggtgttggagttggctgagacattgtttctatccacatggccgttaggaagtctttcattattttgttcattcaatgtatggccatcatctctagacccattcagtagaggagcagaatcagatagtccttgtgcatcctttggttctagtgggatctcttcagcgaagtacagggtaacagacatgcagaacaaaagaaatacaactgcaattaagaaagccgctttcaaattaccacaagcttcgcagcaggctcttgttgttagaaaaggaaaccatctgtgccaattcccactcgcaccagctgaaaagccaagaatatttccaacagccatccatgaacagaatattgcatttgcagaattacactgatcaggacctgaaagatcagctaggagggcacgagcggggccctgcaccgtattatttgcaaggtccaacatccagaatccaagtatgaaaacaatagcagctcgaaaccttgaacctttatatgtactgcagtgctcagtggtatctcctaagatgtaaccaaggtctgcagaaaatccgactaaagttacagcagcacatatcattaggcatccagccaatataaatggtcgtctcctcccatactttgaacggcatttgtcactccacacaccgacacatggttgaaccacaaaaccggttataggtccacagagccaaataaatgacgccatggcatgatctattcctagggtctggatgtagggggtgaggagggagagctgcagcgcccagccgaactgcacgccggcggcgaccatgcaggcgagcacgagcttggtcctggagctgccgcggctcccctcgtggtgtgccgcgtcgccgttccggtgttccgggtccttgggcggtgcgtccccggcacgcggggtgccgttgaggctgacgagctccatctcggcgtcgcggaggtggcggtagggcacgcggatggccgtgaccccgccgcccccggcgccggagtccatggcggg

SEQ ID NO: 40844 - DNA, 268 bp, Setaria italica
  misc_feature (1)..(22): n is a, c, g, or t
  Peptide Sequence Number=SeqID_106818
nnnnnnnnnnnnnnnnnnnnnngtggggttagtgattagagaacttatttgtgaatccaagtacagcaattggtgctagaccatgaatgaactcaatttggggaaaatcagagatagcaaaagagaaacgagaggcagtaggaaagatgacaggagatatttgacctgaagaactgagacccatacagtatagcagagcagcagggacggatcaccgtggagtcacgcgctgcagctgcgtcgtcgcgaacccccggcgccgcggcta

SEQ ID NO: 40845 - DNA, 379 bp, Setaria italica
  misc_feature (22)..(22): n is a, c, g, or t
  Peptide Sequence Number=SeqID_106819
cccctcgaggagctctccgtcncgggggcccgcctctcctcgctcgcgggcctgccgcgcctcccggcgctgcgccgcctctcgctccccgacaaccgcctctcgggggctgccgcgctcgccgccgtcgcggaggcctgcggcgccacgctgcgccacctcgatctggggaacaaccgcttcgccgaggtcgacgagctcgagccgctggccaagctcggggtcgaggcgctcgacctgtatcagtgccccgtcagcaagatcaaggggtacagggagaaggtcttcgcgctgattcccagcttgaagtatctggatggcgtcgatgccgaaggaaacgagcgtttggagacggatgacgaagaggatgttgaggagg

SEQ ID NO: 40846 - DNA, 538 bp, Setaria italica
  Peptide Sequence Number=SeqID_106820
ggatggaaatcatcacttgtgccttgacaaaacaattatttcattagttgctagatttgattaattattgcaacgtggcactagcagccctggtttttgttccatgcaccatttcacgggtattcaattctgtttctattgaatagtccatgtttccttgcacctattgataaactgaaatgtggaggttatagctgaactgggtagtagggagtattgttttgcaagagaatataacatatgctagaatcttgtaaatattgtttcgttttcttgatttgatttatcccttcagatggtaacattaccactttacaaattaccttgtttgattactctcaggtgttgaatcattgccatctatgctgcaccggaactattcattaatgcgagagttagacaaaagtttgcaaggtgtgcaacttgaaaatgaacagcgctgtcagcaagaaatagaggatattaagcatggacttgaatctggaagtattacatatgacccagcaaactgaaatttctgaagaagctattgaggagc

SEQ ID NO: 40847 - DNA, 1185 bp, Setaria italica
  Peptide Sequence Number=SeqID_106821
tgtgatggaaatcatcacttgtgccttgacaaaacaattatttcattagttgctagatttgattaattattgcaacgtggcactagcagccctggtttttgttccatgcaccatttcacgggtattcaattctgtttctattgaatagtccatgtttccttgcacctattgataaactgaaatgtggaggttatagctgaactgggtagtagggagtattgttttgcaagagaatataacatatgctagaatcttgtaaaatattgtttcgttttcttgatttgatttatcccttcagatggtaacattaccacttttacaaattaccttgtttgattactctcaggcgccggccggcgagcctcttcctctctcctccggtccttccccttcccatcgcatcgatttcctggttgtgtttgggagggcctgcgagagggtgggaaccggagagatctgtgccgcggcaaccgatctccggcgctatggggttcctcgaggacttccaagccagtgttgaatcattgccatctatgctgcaccggaactattcattaatgcgagagttagacaaaagtttgcaaggtgtgcaacttgaaaatgaacagcgctgtcagcaagaaatagaggatattaagcatggacttgaatctggaagtattacatatgacccagcaaaactgaaattttctgaagaagctattgaggagcagaaacattgtgttagaatcgctgacgagaaggtggctttagccactcagacttatgacctggttgatgctcatatccaacagctagatcaatttttgaggaagcttgaagaaattcgacaagaaaaggaggcagctgcagctgttgctgcaggcactgttgctcctgctgctgctactccagctgcgagtgctggagtgtcaactgctgatgctactccaaaaactggaagatctggcgaaagaggcagagggggtcgtaagaaggctaaggtacccactgagccaccagcaccgcctattgatttagagttgcctgtggatcctaatgaaccaacatactgcatctgcaaccaagtcagctatggtgagatggtcgcatgtgacaatcctaattgcaagatcgagtggtatcacattggcttagtgggtgtgaagagctgcccaagggaagtggtattgcccaagttgtgtc

SEQ ID NO: 40848 - DNA, 860 bp, Setaria italica
  Peptide Sequence Number=SeqID_106822
catccgcgccaggctcgagtccctggaccgcgccaacgccgcgcagcgcaggctctccgcggggtgccgcgagggcacgccgctggaccgcacgcgcaccgccgtcaccgcggggctccggaagaagctcaaggacctcatgcttgacttccaggcgctgcggcagcggatgatgtccgagtacaaggagaccgtggagcgccgctactacacgctcaccggggagggtccccgaggaggaggtgatcgagcgcatcatctccgacggccgcggcgaggaactcctgggcgccgccgtcgcggagcacggcaagggcgccgtgctcgccgcggtccacgagatccaggaccgccacgacgcggcgcgcgaggtggagcgcagcctcctggagctccaccaggtgttcctcgacatggccgtcatggtggagacgcagggggagaagctcgacgacatcgagagccacgtcgccaacgcctcccactacgtgcagggcggcaacaaggagctgggtaaggctagggagtaccagcggagcagccgcaagtggctctgcatcggcatcatcatcctgctgctcctcatcctcctcgtcatcgtgcccatcgccaccagcttcaggaagtcttgagcgaattgtgatgggaggaacaacgccggggttgtgaatttgtgatgatgaaggggttcggattcgattcgttcattcgttgggtgggtcatgggtaggttcgaatgatctggacactctgcggttgtgtctcgtgttgtttgatttcgtattcgttaatttcagcctgaatgtttctgtatccatcaggatttagctgatgaaatcacctctaactgatcaaaaaaa

SEQ ID NO: 40849 - DNA, 326 bp, Setaria italica
  Peptide Sequence Number=SeqID_106823
ctattccaagagagagatccagcttttatgaagttaaagattctgcacaggtttatcggggatatcaccaagactaccgaagagcccagggcctcggtcaccgaagtgcaattcaccggtagtgatgagacacatgaaagaaacaatgacactgatagtgattgtggggatgatggcaacaacgatcattctgattacggtgacagtaacagtgatggtgatactaataatgatgatggtactgatacattatgtgctttatgcgatgatggaggaagattgctcagctgtataggccagtgcaagaggtccttccatcccaggaa

SEQ ID NO: 40850 - DNA, 527 bp, Setaria italica
  Peptide Sequence Number=SeqID_106824
tgtacttctagttgttgtagttagttgtagtattaaactaattgttgtaagtcagcaggagcataaaccatacaaattctagtgctatacaaacacaatttattccttttggacacctctctgcattcttcagttcatcctattcgtaccgactaccgtacaaggaccgagtatgggcgtggtgctacgcgtgccaacagtcgattcagatccggcctatacgtgattcaattgtcggtgctattatctacaagcagcttccacacggtacaagagttcctggactaaggcgtgcctcaaatgaagggatcgatccgggggtcatgctcgcttgccattgccatcccagtgcagaggcatgtcgggcacatcacctgaaatgtacacaagagattgatttgcgtccagaatcagcactgagaattggatcaacgtcttcttcttcgtacaaagatatgtggctctactacgtgtttgagaaaaagaattggatcagggtgtaagagaccaactttacctttcccgca

SEQ ID NO: 40851 - DNA, 1143 bp, Setaria italica
  misc_feature (1010)..(1010): n is a, c, g, or t
  Peptide Sequence Number=SeqID_106825
ttttttttctcgaaaccgaatccattcgtgagattgaatcattagcgttgataaaccatacaaattctagtgctatacaaacacaatttattccttttggacacctctctgcattcttcagttcatcctattcgtaccgactaccgtacaaggaccgagtatgggcgtggtgctacgcgtgccaacagtcgattcagatccggcctatacgtgattcaattgtcggtgctattatctacaagcagcttccacacggtacaagagttcctggactaaggcgtgcctcaaatgaagggatcgatccgggggtcatgctcgcttgccattgccatcccagtgcagaggcatgtcgggcacatcacctttcccgcacctgagcaattcgggcatctctctgtccttggagcggataaaggctgatcgccatcactgaacgttgaaaccggctctgtgagcacaagggcgcctgtgcttgaacagcgggcacaggccaggtatccggttcctaaacaatatttgcaccgtttatgctcctgctgcttcacattgtttatctcaacaaccattagggcggagataactccaactgctccacctgagaacgatgccacaatgggatctacctgactcaactgcatgggcagatgaacgctgcggatgaagtcttcataagatgttccgcctagaccgagtttaagttccaggattggtgcaagaaaaccaccaaacaccattatcccggcaatgagggtgaaacacgtagcatagtagacctttagatttgctgcactcaggggaggcaggaatggaatgaatgatggaaaatcaggaagctcccgatcaggttcgtcaactgaaattccgagttctgcattttttattctttgttgtattctcaaccggcgaatctcctccatatgcaagaaaatcttgtttcggcggcttctaatgttatcctgaatctcctgcaaatccagctttgcaaaatcttggactgtctcaggcccctnaatgatgcaaaaccctggcgacccagcggcctggtcttcccgacaccgaacggtggggtaggcggcgacgaggacgaggacgacggcagggtcgggggagccaccggacgcggctgcgggaggccgccacgcg

SEQ ID NO: 40852 - DNA, 386 bp, Setaria italica
  Peptide Sequence Number=SeqID_106826
cagccctccaaggtcattagggtttgcaactagagatggttatcggggagatggcagtaggaggtaataaacttgatgatggaatcgacaggagcaatggcattgagaggtttgtgctagcattggttgcgagccgagttccatccgtgcagaggcagatgtgaagatgcgaggtagtgccaataaagtgcttgacttgagagacgaagaagatgatatcatggagccagatattggagctaggaagaggtaggaggccacaagcgggccactccactactagaaaccatcgtaggggcaagagcaagagacaagcttgttattcatgctagagaagacgaggcacctggataatatttccttgtcttctcttatgatgaatccaa

SEQ ID NO: 40853 - DNA, 492 bp, Setaria italica
  Peptide Sequence Number=SeqID_106827
gtgggctgatgtgttgtatgctgtgaataccaatgattcagtttggtccaataacaatgaagtcaataaattttcatcaaaccagagccttcacatgatagtttacacctttcaagttcagcttggctcttacacgcagaaggtaacgacaccgatggttttcactattaattcaagctcctcaagtgataagattcagaagttgactatgggcgactaaatctctcagactaatagggtttgaaataatctcaagaaactttaggctttgggtcactatcatcgatcaacttttccttgcgcctacaaatgatacgtgaggtacaacaaagaagcacacagaggcaatgcgctgtacatgctataatcctcatctacttctgttgcacagggtaactctgttttaaatacccgcaaaaaaaatatgttttaaagctcctgaagtagtcttcatttatttattgttgtagttttgttgtaccttattcgtta

SEQ ID NO: 40854 - DNA, 1204 bp, Setaria italica
  Peptide Sequence Number=SeqID_106828
cccgttcaccgccgcctcaccgaccatgtccgccccccccgttcccctcccttagccggctgccgccgtctgctcccaactgagcggtcaggatgcgggtgaagaagcggtcgaagaaccgcaaagcggtcaagttctattccacctgcttcggcttccgcgagccctacaaggtcctcatcgacggcaccttcgtccaccacctcctcacccagcgcctcctcccggccgacgatgctctccgcgacctcctctcggcttccaggacgccagccctcttcacctccaagtgcatcgtcgcagagctcaggcgacttggcaagtcacatgccgaatccttcgactccgcgcagcttctcgccacaaccaagtgtgagcatgacaaggttgtcagtgcagtgaattgtgtcctatcactgataggtgataaaaatcctgagcatttctttgttgccacccaggatgctgatctccgggaaaagctaagagagattcctggggttcctgtaatatacggactgaagaactccttgtttatagagcaaccctctgttcagcaacgcaaatttgctcaattggacgaggagaagcgtctcaatatggacatatctgagtataagaagttaatgaaggctgcatcagaaggaaagacaacagccagtgaaaatggaagtgacggagaacaacatgagaggcctatcagttctcttgtaaaaaatgcacttggtgttgcagataaaagcaagtttaaaaggaacagagcaaagggtcctaacccactctcctgcaagaaaaagaaaccaaagccccagccctcagctattcaaaatcagggggctacggctgatggcgaggcaaagagaaagagggttcggaagcggaagagaagccagaaagataacaagcaagcagagatggcgagctagaaggatgggcttgcttatgaagttgcagtgctcttgccgtgcatccatcctgaccccagagccagaactccatagctagtcaactagggaagatttcctttgaaaaaagaaaaactatgaagatgtttgtctcacaagatgctgatggtgttccttgcaatgtagtaatacttgattgtctgcagtaatcatgatatccagagcctgtaggtggaattttttcgcagcaagatgcaacattgaagttgtctttttttcgttaaatttaacttaaaaaa

SEQ ID NO: 40855 - DNA, 831 bp, Setaria italica
  Peptide Sequence Number=SeqID_106829
tttttttttttaaccttatctgacaaagtgatcaccacatataccacatctttcataatctaataagcattttcacattaaaagaaaccagatattcgaaagtctcaatcacaataactcaatgagaagtcatgaattgtagagatgatgtgcacttccttttgttgcacatatgcatctaccaggattaccatcacaaattccacctgaagatattggctcagcaatttgtggaagagctgccatgctattacggtatccaaagacaggcatcatgtcaaatcggttgctcaaacccttcccgatatcttccaccttgccactgtccaagtcataacgtaataaaaccatatccattgccctccatttctcagtcacccctagatacagtcatctctcactttctaaaccaagtggcttcaccaaccaccgctcatagaacctggactgccagccattgcgcagcttcatcgagtggcagaactggaatgcatcgccactcacctctataatatctgtccatcctttcttatgcttcagcttccaatagacacctccttccacaagctggtagatggccaagccattcgtaccagtggttgtgcacatgagtatgccatcactggaggtgtcaatgctatggtggtcccactccttggattttgatccttgtagcatccatggcattttgatgatgccacctgcacttttagcaacatcacaccacagcaaatcctcctgatagtcccaatataggacaccacttgcatagaccaccttgtcgtattggtttgcttgatgatccattaactgtagtactagacatgaccc

SEQ ID NO: 40856 - DNA, 473 bp, Setaria italica
  Peptide Sequence Number=SeqID_106830
aatgcttcaactatgaatattcaagttcttgtctagatgccaatagatctgcatctgttcacatctgttcaattatacggtgatttaactgtgttagcaatagatccatgttaaactccataatctgatatggcaagtcgaaatcagtcatacactacctatcttcacatcaaagatagagaagacatatcaaggttagcctgcttgagtaaggatctaccaactatgaatataacatgtacaaagtaaaaacttttaaccaagtgccttccgcggcaatagcactggaagtacttgttggtatattgaacgatcacgaataaatccgcaagtgcatagatataccgttgtagcatttcacccaagagtattcccaaggatatcgtatttaccaaaggaaggcgggtaggtcaaaagagtttactatgcatatgagtataccatagatggatagagacaatactcaagacaga

SEQ ID NO: 40857 - DNA, 585 bp, Setaria italica
  Peptide Sequence Number=SeqID_106831
cttccctagggactgtcctctttacttcaaccgttctgccatctataacgtgctcatcctccaaaaccttgtctataacagatggatcagaaaatgtaacaaatccaaatccacgaggcatcttagtatgcttgtccttcataattacagaatcagttattgccccatacttctcaaaatgcttggagaaggtttcttcagtcgtctcccaagcaacgcctccaacgaaaatcttccccgacgagtcgccgccggctcccctcccgtcctccccgcctacatcgccgtacccggagcccccatcccggcctccccgcctcccggggtggccctcctcctcgtcgacctcctcctcctcgtacccgttcagcgcgtgctggttgtcctcccgggtaccccgccatgccgccgcaagctctctcgaagccgccgcctcggaatcggagcgatcggagggcggggttcgggggcggagcaaaccctaggagcgccgctgcgggtgcgggtttagggggagcgcggtgggattgcaggagggtataggagaggaggaagaggggatgagagaagacgggggcggcggcg

SEQ ID NO: 40858 - DNA, 489 bp, Setaria italica
  Peptide Sequence Number=SeqID_106832
tggctacgaatgtcaaatacttgcccatacatagctggttccatggctggaaccatacatgaaactttccttgcaatatacaggtatgtacataacatatctcctagccctttcttcctctgatgatgtagtatttctgcctttgtgtggtggtgcccattgtggtgaatttgtgttattaaactaatatgtagcacctattagcactttaggtgcaacttttatcatgttatatctgatttactttttcgtgatccgtttctcgtaattgttcattgattgttttcgtagtcgttcattggtttgtcaattagcttgttctatacctgatatgctcttgtttataatatatgttttggtatgcatgttcttttttaaatcgacaagtcatgatgtgcaacctattccttgctattttgatatgatcaactgagcataaacttcaaaaaaatagagctgttgtaagatatatttcctgtatctcttctt

SEQ ID NO: 40859 - DNA, 3071 bp, Setaria italica
  Peptide Sequence Number=SeqID_106833
tcatagcaggctacaagaatacaagagtttagccgcagcttctacagaaagccctgggggtagttcagagttcagtgactatagcctacaatgccggacatagacacagtgcattgctaagttccagaaaaaaaatgttctgacgccgcggattcgacaaagtgaatggaatgttccatattcttggtagctggaatgaggtgacctataggactctttattagcagatccaagaaaaccgctatgaatcgacgatcattttccataggggtggtatctgcttgagccccgaccgccagtgccaccaccaccaccaccaccaccaccacccatgcctccagccccactgtagccaccatatcctcctgcaccgccgtatcctcctggtgcaccatatgcaccacctccataggcacctccatatgccccataggtgccgtatggaccaccgtacatggaaccaccataaactgagccataaccagacccatagccagcagtattgccatatccataacctctgccataggcgccataagctgtgctgccataataggctgcagctgatcggtagccacctccatatccatagccaccaccaccactgctcccagagccgccaccaccaccaccaccaccaccactaccacggtaagaatcacggtgaccaccgcccccacgactatatctcccatttgagcttgaatcacccccgccaggtttctttggttcagcttttttaatttcaacctgtttccctccaagatcatgcattctcccctgtgacataaccctttcaacagcatcttcactttcaaatgtgacaaatccaaagcctcgtgaacgcccagtgctatggtcaagcataatctgatgctcaaccaccttcccatacgaggagaagtgctccttcaactcatcttcagttagagatggtggtagaccaccaataaagatctttcttgtcttaggaccatctttggtggtcatctcctccctagggactgtcctctttacttcaacctgcataaacaagacgttgagaggggtcgagacaaactaaactattcaattgcagaagcttgcaaatgagagtaaactgcaatcttaggtcccacattacggccgatctaaattttagatgtcctaccgttctgccatctataacgtgctcatcctccagaaccctgtcaataacagatggatcggaaaatgtaacaaatccaaatccacgaggcatcttagtatgcttgtccttcataattacagaatcagttattgctccatacttctcaaaatgcttggtgaacgattcaactccgaggcgtcaccgcctccagaatccacatccctcccttcctcgccactggcgtcagcatcccaacgacctccgctaggccttgacctccacctccgcttctcctaatctcagcagccccagccggcgcagccgcctccgtctcctccggggccgcggccagccggccccgtcctccgcctccccgtccccttcctcctcctcttcctcgtacacctcctcgacctcctccacctcttcctcttcctcctcctcctcgtagccgttcatggcgtcctggttctcctcccgtacccgccatgccgcgtcgccgcccgctctctctctccccgagtccgctccaatgccgttgcctctctcctccacctccgtatcataaacgcctccggcctccccgacccaaaccctaggcccgctcatccccgaccacgccgagctcgccggaacccgcccggcccgagccaaattccgctcgggtccctgccgatccggcggttccccacccgaacagcccggggccgcgtccccccgcggatgctagcctgatcgcgtccccacggtcgatgggttcgccggggtccgccaatggcagacacggcgagtacgtgaggatcccggaggaggtggaggtggcggtcaagggggaggccgacgccgcgacggccgtcaaggcggccgcggcggcggagtgcccgacggtgctccggtggcgcgcgatccggtggtgggcaaaggtcgccgtgctcgggatcttcctcgcgggggccggagctgctgcggtcgtcttcctcggcccgctcgtcattaagaaggttgttgcacctattctttactgggaatcaacaactttcagcagaccagctattgctctaatatgttttggcgcaatcgccttattcccaagtgttttgttaccttcttcacccttcatgtggcttgcggggatgacttttggatatctttatggctttttgataatcacagcggggatgagcataggcatgtcattgccgtattttataggctctgcatttcactgtaggatacatagatggttggaaaagtggccaaagaaagcagcttttgtaaggcttgctggtgaaggagattggcatcatcaatttaaggctgttgctttactcaggatttctccatttccatatatagtttttaactacgcttctgtggctacgaatgtcaaatattgcccatacatagctggttccatggctggaaccatacatgaaactttccttgcaatatacagtggaaaacttcttcaaagcttggctttggcaactagccaaggctccttcttgtcagtggatcagatcatctacaacggaatcggcttcacaatcgctgcagcttccactgctgcgatcactatctatgcaaagaaagcgcttcaaaagctccaagcggaggatgagatattctgagctcaagagcctgtgctctggatcaaacccgagaagctagtttccgttcaggtgtactatgtataaacacttgctactaatctggtttcctgcgtcgactacctgactacaaccatcagaggggagggtgatgcagcaattgtaaagaaaatagacccagaaaacacttacgttttccgttctttttcttgttttgttttctgtagagagaaccatcaacttcatcaatgtattgctttgcgcgatgtatattaactaaaaaaaaaatctccttccataaaaaagagactgccaaggcaaacagggatagg

SEQ ID NO: 40860 - DNA, 808 bp, Setaria italica
  Peptide Sequence Number=SeqID_106834
ttttttttttttgtaaacagagaacaagctgggcgaaataaagactgcaacattacccatgtcattgctcacaagcattcagatcatgaactaaacatacgacataccaaactatttttttaataaaaattagttaagtattagtcccatcctttttaaaagcttttctccacatgcaagcagagatagcaacagtcagccgattagtgagcgaacgttacaccgacatacatttgttccaccaccatatttttactaccacaaagtttggttttaagggtctaaggctcatagcaggctacaagaatacaagagttttagccgcagcttctacagaaagccctgggggtagttcagagttcagtgactatagcctacaatgccggacatagacacagtgcattgctaagttccagaaaaaaaatgttctgacgccgcggattcgacaaagtgaatggaatgttccatattcttggtagctggaatgaggtgacctataggactctttattagcagatccaagaaaaccgctatgaatcgacgatcattttccataggggtggtatctgcttgagccccgaccgccagtgccaccaccaccaccaccaccaccaccacctgacgctctaagcactattctactctactatctgcaccgatagttaccaataattacttaggtaagactaggaaatagaaggtagaacctaataaggaactactttaattaagacaagaataccaaagaaaaaccgactaatagaaataacgaaacgaaataacaaattttaaccaaataagggtaaga

SEQ ID NO: 40861 - DNA, 1988 bp, Setaria italica
  misc_feature (1)..(27): n is a, c, g, or t
  Peptide Sequence Number=SeqID_106835
nnnnnnnnnnnnnnnnnnnnnnnnnnntttttttttttttgaaagactaaaaccaaatcctttaatgagttcctaattataatcaccacagatggcaattgttaattgctccaaaaagcaatgttacagcacaaaatatagttctaccgcaccaaatactgttcctaccataaagcgtttgtttctcagggttctaagctctctgcatattaccaaactaaagaatacaacacaggtttcaagtgtagcttctgcagcaaaaggcaggcgggcgggctcagcaactgcaattacacagttgctctagtagcgactaagttcaacccaacaatgttccattgccgctgattaggtgtggcctcacatgaaaactgaacttctagaaggcacgaggaacccccgggccctagaaaaccagattaaacttgtcgcttattttccatatggatgatacctgctagaaccccgagcacctgaactcccaccaccagcaccacctgctccacctgctcccccataaccgccatatccgctggcaccatagccacctggggcaccaccataggcaccgcctccatatgcaccccctccataagcaccccctccataggcaccaccaccgtaggcaccatatgcaccataagcgccaccatacatggaaccaccatacccaccgccaaaaccagacccaaagccagcattgcctccatagccataccctctaccgtagccatatcctgctgctcctgcaccactgtcatatccatagcctgccgcagcagacctataagcaccaccatacccataaccaccaccaccgccagcaccgccaccaccgctgccaccgctgccgctgccagctccaccactacggtaagaattgcggtaaccaccacccccgtggctagatctaccgttactgctgtgatcagatccatgcttctttggttcagccttctttatttcaacctgcttcccaccaagatcacgcattctcccctctgatatgaccctttcaacagcatcttcactttcaaatgtgacaaatccaaagcctcgtgaacgcccagtgctatggtcaagcataatctgatgctcaaccaccttcccatacgaggagaagtgctccttcaatttatcttcagtaagtgatggtggtataccaccaatgaagatctttcttgtcttaggaccatctttggtggtcatctcctccctaggaactgtcctcttgacttcaaccgttcttccattaatgacatgttcatcctccagaaccctgtcaatcacagatggatcggaaaatgtgacaaatccaaatccacgaggcatcttagtatgcttgtccttcatgatcactgaatcagttatagctccatacttctgaaaatgtttagtgaacgattcttcggtggtctcccaggctacaccccctacgaaaatcttccccgaggcgtcaccgcctccagaatccacatccctcccttcctcgccactggcgtcagcatccccaacgacctccgctaggccttgacctccacctccgcttctcatctcagcagccccagccggcgcagccgcctccgtctcctccggggccgcggcagcggccccgtcctccgcctccccgtccccttcctcctcctcttcctcgtacacctcctcgacctcctccacctcttcctcttcctcctcctcctcgtagccgttcatggcgtcctggttctcctccccgtaccccgccatgccgcgtcgccgccggcccgaaccacccgaagcggagattggaggcgagtgaaaccctagctcccgatcgaagcggggagcaagcgtagcagctagattgctgggtattggcctgcgctgtaggaggggagcggtagggtttagggtttgcggctggcggagcaaaccctagcggcggcgcttcggtgtgcgtgaggaacccagcagtgggcgtgggggaagagaggtgggagatggcggcg

SEQ ID NO: 40862 - DNA, 405 bp, Setaria italica
  Peptide Sequence Number=SeqID_106836
tcctgtcaagcaatccaatttggcaatcttctgtaagcttcacaagtattgacatcaactgtttagcgtaagctgttgcagcttatagcaattgttcagcgccataagcagttgcagcttataactgcaaaaagcctgtcttctgcaatctctttttgcctcatgtgtcaacatctgggattcagcgtggctttgtgtgttatcctccattctgctagcattgatcttttcttcacccactggttgcttgctccaattagatgtttctacgtcctcggagatgcatgggtatcctaagtatttaggtgagttttctgcttggcaaccttcattcttctttcatagttctacaactagcaagaatgcaatgcttaaccatctcatggactctctctgcaacagcaa

SEQ ID NO: 40863 - DNA, 351 bp, Setaria italica
  Peptide Sequence Number=SeqID_106837
ggaggggatcggcggagaggaggagctcagtattcttttttctttgcgtcgacgacgaacaaccgccgagctagatcgagcccgggaagaggggagaagaagcttattcttagctagcccggccggcaggagtagagaggatcggaagaagagagggatccaacaagggggattgattggtcgtcggccggcggtagcttcgttgccttcggatcagattcttctctcccgcgcgccccaaatggtggagtcggagggcgaggcggcggcgtgcgcggcggcggtgctgacgccgccgctgtcgctggagggcggcctcgcggcggagctccgcccggccaacctcgtccg

SEQ ID NO: 40864 - DNA, 908 bp, Setaria italica
  Peptide Sequence Number=SeqID_106838
ttttttttttttttattttaagtacttaagtagtagtatcactatggttcattcatggctactaaaatattgtaggagcacagttgtgaaattcttatgaatgattcattatacaccttttaaatttgatgttaggtaaaatcctactggactcgtagtaatggtatggaaaattgcagatgtcaagttccatgttttcttgagttgcttgatatgatatatcatagctagtgaagatatgcaataaaattgtgaatagaacaagcccatctgcccatctgcactcacccacaaagactagtgcgccattttgctcatgagagtattcagatggtttgcccgcacggtcttcacgtagtctatgttctgccccgcactcatgctttcgtacttggggtcatagaggttgtaatagtgcacatcaagaacacattttttgaacctactggcgaagtcgaccatctcagtagcaccattctggattagtcgtcctgacatgatcacataaacatcatcacgctgcacatgcctgtggactgcttcataaccagctttgtagtacttctttagggcatcgaactgcacttctattgatggctcattgagaagctcaattgctagaaggctttttcttgaagcatacctggctgcaagggcttcaattacttggacagtctggtcaatatttccatcactagtgccccaacccacagtaccatctctggatccactgtgttcatggccattctgtgaccatggtgcagcatgaaggtggtcaattgacacctatgttatacttatctgcccaatcaaaagccttatccaaaaccgcttgatagcgaggataactagggaaggaataagaaacaaaggaaataaggaaagtaagtttaagaacttaacaaata

SEQ ID NO: 40865 - DNA, 753 bp, Setaria italica
  Peptide Sequence Number=SeqID_106839
ttttagttttaccttttagtttaaattgtccctgaatacaatagaagctgcagctaatgctgcagccatttcagcagcaagatccgaacaagcgtggcactcgaccactggacgtgggtagtcgatgtcctctggcctcatccaacaataatgatcattgggctgtgtagaaccaggtgacgttgcagcacttcccacctgcgcaatgacacgatcaatgctatcggctgaggagttaaaggtcttcaagaagtagtctgctccccacttgataatgtcacggacatggccaagttctccaacagcctcgtacttagcactgtactcaatgacactccagctgaggagggtcatggagaaggcagctgggaagttgaacttgacggcattgccagcgtcgtagtacccgccgaccaggcttctccgtactgccgggtccgagagcccatccttcatgcaagagttaccacgccatggtacattgttgtgcttcggaagcttgccagatctctgcgcgttgaagaacatgagcgccttgtgcagcgcgacggtgtagtcgtctggcggcggcggcgggcggtgcctccttgggatggccttggcgatccccgccacgacccccgcgaagacggcggcggcgaggagcaccccgagcgtccagacgaagagcttgcggcttatggtacggcagccgatgtcgacgtacttcttctttttgcggccctggtccccgggccccgccagcagccagct

SEQ ID NO: 40866 - DNA, 2325 bp, Setaria italica
  Peptide Sequence Number=SeqID_106840
gtcggaacggcggccaccccctcccaacgaaatcccaacccgcggcgcaaaaccctagaagcggcggcgcggcgcacgtctcgggttccgcgatggaggtagaaggcggcggtgccggcggcggggaggaggtggtggagctggaggacgcggtgaagctgctggtggatcacctcgtgctgccagctctgctccggcgggaggaggccctgaagccggagaatcaggagaccgtggcgcgtcagatgcacgcgacggttctcttgtacaactattaccaccggaagcagttcccgcagctcgaattcgccgaccccgagcggttctgcatgaccgcctccctcaccgccggggacgctctgctcgtgtacctgaaccaggtccacgaccagcgcggcaacggcgcgggggccgggctctcggtcaccgacaaggcagtcgtcgacgcctgcgacattgccgaggcactcgacgccacgaaggactcccccgagatgactatgtggccaatctccaaggtcgctgttctgcttctcgatcgggcaaagaagatgtgcttgctcgagcatggatctgaaaccaagggcgtcttttcgctcttggagaaagatatcaagtctgcattaggtggctcgcgtagcagtgacttgtctgtgcaggagtcaactaataaatccgtagcacttccttcagagccatacgtgctccagcagattgcatattcagaggtggagctcaaaaacaggtatcaagcgcacaagcttgcgttttctcgaagaacatcgtgtgtactcactgagtaaaaaggggacagctacgatgttgttcgttctgcagtatgagcaaaatgtcaatagcaagcttaaggaaaggcctttagaagttctggtcgacaggatgagtggtcctatatttagacgtgatccgtatcttgcaacgacatatgttgttgagtgttatcattcaacaacatatgaggaggttctgttaaacgtccggaacagggaatggcctttggattgttcactgagtgtgccaaaggaacgattatttcaaaatagaaacccttcatcccactctgaaatagatgaaagtttgaaggaacaagaagccaatagcaggtctaaaatgaagaaaatagccacaaacatttcaactccaaagaaaaataaacaggtagtaaaagcagttggtgatagtggcaacagcaaaaataaaaaaacagcaacacgaacagcaaaagaaaacctgaaaccttcaggtctacacttgctacctacacggagcatggggatggtgagagccccacaaaagaaactgattcacttgctgctccagatgtggaaaatttaaaattcgtgagtgcaaaacccacaaaatcaacaaatggagggtctgtagacttacaagcgagagtccagatggacaaggacagaacagagaagcactctaagagtagaaacatgccccaagatatctttccggcgctagatgttgatcctgtaactaagaatcatgctttggagagccaaaaggagaaagtctcagaaaagtctggtggcatcacaggtagcatgaatgttcaaaagtatgcgacactgcagttacttcggaagatgcgggatgatactctccgtgagctttgcatgcttggagatcgaagtgctcagtatgaaatggaaattcaaacaatcttgacagaaggggagatgacacctaaagtggcatcaatcctaaagaaatatgagaatagctggaacatgatggaagctgccaatccaacttgctctggagaaggatgccaaaccatgaacataaagaggaagaaactgaaagaagccatccttctacgcagcaaatgccaggaactggatgatatatgccgtgacagcaactggattcttccaagatacaaagtacttccttcagttacaggtgatatgtaccaggccagtgtctaccttacgggcccagatttcaatttgagtgccgatggtgacaacaaggtcaccccccatgaggcacgggactctgcggcgtccaacatgctgtaccagcttcagcagaaggcaatggaaagctagaagtcagaagaccagcaggtcttcacaggtcacagcaccccctgatgctgcagcattaccgggtttcaggctggaaagaacagccaccacagctcagaactgaaacatccaatgagaaatgtcgtcttgttatgtagttttgctgttgtaacatccagaggttactggtgtctggcactgtgttttaaatttctagctgcaggatggattattcgatttaagtaaatgaaaaatgtttgtg

SEQ ID NO: 40867 - DNA, 352 bp, Setaria italica
  misc_feature (15)..(15): n is a, c, g, or t
  misc_feature (331)..(331): n is a, c, g, or t
  Peptide Sequence Number=SeqID_106841
taaatgaggtcctcngttcttcaggcttggaaaatctgccgttggcagaggttgatgtgctggaaccacttgaatgggccggactataggtgaattgtcaccagagctaccagacctgaggagcttgctgttgtattctgcagtctgaatcttcccatttgtcaaggaaggagagagctcatcttgccccctggacttcaaactaggtaaactagaagggtaaaaactcaacccttatgactccgtgcttgacaggtctgaagatgccgactaagatggcttcttccccatacttattgcactgaggcgcttgtgacaatgcacgcagtcngcagcctggagctttccccct

SEQ ID NO: 40868 - DNA, 900 bp, Setaria italica
  Peptide Sequence Number=SeqID_106842
ttttttgcatcaacttggtaaccatctcactatcagcaaatttggccatgtgacagtaaaaatctcacaacagaacttgataatctgatattgcagaccattataatcgcttaatttgatcatacttcaaactacatagccaaaggcagtacagaatcgtcgtcgaatttaaccactgtgaaccaaaagtcaccacagatacaaaaacgatcgaagctcgtcagattcagttttcgagtccgggcacctgtatgcgccggctggcctcggacttcttgccgccgaggaactcgtcggggacgaccttgagctgcttgcgcttcttggacttggcgatcttctgaatggtcttggggttggtgacccgctgcagcttggtgcccgtgcgcagcacgttctcctgcttgcgcttctcccgctcctcgcgcgccttccgcttcgccaccttgttctgccggatctcctccttgagctccgccttgcgggcctggtacgcgcgcttcagcgacttctcccggacgcgctgctccagcggggtcggcttccgcgacaccaccacggccgaggcgcgccgggtgcggggctccttccaccggcgccccgacacgcgcccggcgatgacgccgtcgtaggtgggccggccgaaggaggccggcttcgaggggtccgacagggaaggcatggcgcggagcttggacggccggggcgcgtcggcgtccaggtccatggagtccgcggccgccgcctcagcctcctccgcctcctcgcggcgcttgcgcttgccgcgctcgccgccgaggccctcatcgaggtagcggaaatcgaggtgggaggccatggtgggtgggatcgacggggcgcttgaggcgcgggattgagagagggagaactaaggcggag

SEQ ID NO: 40869 - DNA, 406 bp, Setaria italica
  Peptide Sequence Number=SeqID_106843
aaatgaccagtcaacattgttcaattgatcctcaggatcatcttgttcggccagttcgacactgaaaggcaaggtctatttacaaaatttggatccttatttctagtggcatataaacctacaaagtactgtacgttgcaaggggcagcccaaccgagcatcagcgactaaaattatacggagcaattaacaggttggagttcccatcggtcgggactggagaactcccgttaggcgaatcagaggaagaacttcaagtagcgctgttgtcctctgtcgacttcttgtattcaggcttgagctcgtgcgtcccttgattcggtcctcttttattgttagacacagaggtcgttcagtatctactttcaggaattgttcaggttggtctgtctcttgcataagctgc

SEQ ID NO: 40870 - DNA, 712 bp, Setaria italica
  Peptide Sequence Number=SeqID_106844
gggatgtggcagcctgagctcgctcaacctctctggcaaccatcttgttggtgcgttcccagcagatattgcacacctcacatcccttactgctctcgacctatcaagtaacaatttctcaggcgacattcctggaaaagctactgtcaatctttctcagctcaggacactttccctctcattcaactatttcaatggctccattccagaagcaatcaccattcttccagagcttgagatacttgaactcagctccaacttgttctctggcaagatcccatcaaccctctgctcctcaaacaccagcagcaagttgcaagttctttacctgcagaacaactacctcaccggtcgcatcccagaggccatcaccaactgcactggtctcgtttcacttgacctcagcctcaactatattagtgggcacattccctcaacccttggcatgctctctagccttcgtgacctgatcttgtggcagaacgcgctggaggacgagatacccgcctctctttccagaatgcttgcacttgagaatcttattcttgattacaatgctctgactggcaccatccctccaagtttggcaaactgcacaaagctgaagtgtatgtcacttgccagcaaccagctttccggtccactaccttcctggctcggtcagcttgtcatgctccaaatcttgcggctggggaataactccttcactggg

SEQ ID NO: 40871 - DNA, 604 bp, Setaria italica
  Peptide Sequence Number=SeqID_106845
cttctgcagttgtttcggctgttaatttccttataccacaaataactttctttggttgaaagatcacatcctttaagtattttgttttcgtaatctacattttagcttttgagttgaaggttggatatgcttggatcatttggaactctgtgtgtgtaaagaaagtgctgtatctgtgtccttaatgtgtcctttttctgaatctaactcagaccgaactgccaacatatgaaggtgtttcatgatgaaagtaattgtaactcattagttgatatacacatggtggttgaatgggagttactttaactgctatgatattgtacatatgctgattttcatcttaccactatgattttgtagtgttaaatttcttctttctgatctcattattccaattgctagtttgcatcctaattgaccatggtaagcaatttagcagcattgtttcactataggtcaaatactgaggagtgaagacagtgatttttctttacatgctaatacgcttcacaaaaaaatgaattgtagatatactgtttcttattttggcagtcattttcttcaagcatgtggcttagaaagagttaagcctttttcaaattct

SEQ ID NO: 40872 - DNA, 1111 bp, Setaria italica
  Peptide Sequence Number=SeqID_106846
cttcagatgctgcctggtcttgagagaatggtggattcggtgcagatgttggtgttagattgctaggtggcggtttatcaggagttaccgcagcttctgtgacatatccattggacttggtgcggacacgtctcgcagctcagacaaatactgcctactacaggggcatatctcatgctcttttcgcgatctgcagagatgagggttttaggggattgtacaagggtcttggtgccactttactgggagtgggcccgagcattgcagtaagcttctctgtatatgaaactttacgttcccattggcaaatagagaggccatatgattcccctgtcctgatcagtttggcttgtggaagtctttcgggaattgcatcatcaacttttacattcccgttggaccttgtgagacgccgcatgcaactggaaggtgcaggtgggagggctcgtgtctaccacactggactttttggaacctttggacatattgtccgcacggaaggtttaaggggcctgtatagaggaattctgcctgagtactgcaaagtggttcctggtgttggcatcgtatttatgacatatgagatgttgaaggccatcctcacaggactggaatcagatgattagatctccgctgtactttcacgctcgacaattttgatatatggtggcataataacttttgaggcttattagggtgggagaagtatgagtatgtagcatatggtaggatttagaacatgctgagttttgcagttcgtgtgacatggttacaggttttcttgtagtgcaccttgaaagatgccataggccttccaacttttttacaacgtttgtgtaccttcatgactttcacattgtgatgatacataaggcagtctaccgcatgactaccttcttcgcacctccaagagaagatctccaagtctatcaatgttatggcgaggttatggatagtagttgcaagagaactgtgaatagcctttggcattcatttatcctgatatgaattatggatctgtttcctgtataccgaattaccgatattgtatctcaatttaagggatgggagtatgggacaataacgagatgtgttacacgatacacattag

SEQ ID NO: 40873 - DNA, 319 bp, Setaria italica
  Peptide Sequence Number=SeqID_106847
tgtatgtcactgacactacgcatcaaaatgtaatcttctcatcagcagccaagaacacaggccaatgccatacgagcttagccaccacggtatacaatagctagcagtacaggacatgatgataagcatagatacatgcaatgtgcaggacaatgttgggttcgagacagaaggaactgatcaaagccatcgtggaccgctctgatacgatctctgcactccgatcccgttccgacgacctgatcggatgcttcgggttgtagaacgccctctacggctctaactagagcatccgctgacggcggcggcggccagcggc

SEQ ID NO: 40874 - DNA, 254 bp, Setaria italica
  Peptide Sequence Number=SeqID_106848
catatggaagtgtgtctattagttaaatctggcttttccgaagccagatttaactaatagacacacttccatatgcgaccaaccaatcacataggggaggcagtggcacaatatgctactactttggtgggtggtagggaggagttgaacagagatggccatggcaagaaatgtagctaggttctctcttccctcttacatctacggcgtgtagagcgagctctggtgaaggcagtcgatcgtttgcatgccaa

SEQ ID NO: 40875 - DNA, 688 bp, Setaria italica
  Peptide Sequence Number=SeqID_106849
acaaagacaagcttaatacaactctccacttgctacaaccagagagagagagagacagagagagagaatccatggtgacacaaggaaagagcatcaaatttagcagaagaggaatggtgtccctgagaaggaggcggccgttccagctcatggtgctgaggcgcctccgggagctcaagaagattgtgccggtgggtgctcgtcgcaaggctgacgttgacgcagtgctccggcaaaccgccgagtacatctgcgcgctagagctgaaggtggccatcttgcggaggctctcagacatctacggcgtgtagagcgagctctggtgaaggcagtcgatcgtttgcatgccaatcaccactgcacatgtaagagggaagagagaacctagctacatttcttgccatggccatctctgttcaactcctccctaccacccaccaaagtagtagcatattgtgccactgcctcccctatgtgattggttggtcgcatatggaagtgtgtctattagttaaatctggctggaaaagccagcccttttatccagctgattgcaagaaaatgctttgattggtggttgtcgataggctagctggtctgcatgcatggttcatgtatttcatttgtttgtatgtgtcggtgtgtgtacaatggatttttgcatagctcttaccggttttctttgcca

SEQ ID NO: 40876 - DNA, 452 bp, Setaria italica
  Peptide Sequence Number=SeqID_106850
gccgccccgttcttggtgaggtccagcgtgatggtcgggccggaggcgttgatggagatggagcacggcacggacccggtccgcgtcgccgcgctgccggggagctcggcggcgcgcgtcgggcacgggtggttgtgctcgccctcgtacgtggcaaccagcatcgagctgaaataggtagaaaattgcaccttcttcttgacggggcaggagggcgcgaaggcgcagcggaagtaggctctcggggacgggttgtcgcgcgtcaccttctggccgtacttccgccactggtacccgtccttgacggtgagcgtggtgtccgaggggtcgatccgggtgcagacccttctgaccttgatccgcctgcacgagccctcgaagccgtcgctcagggggctctcgtcggcgtgcgcggcctcggcgttgccgctgccgttgttggcgtcgccccg

SEQ ID NO: 40877 - DNA, 416 bp, Setaria italica
  Peptide Sequence Number=SeqID_106851
gcgatctacagagacatagagaaacatatttcgatcataacgagccagacagtggcacttatgcccaggacattgtaacagcggcatgtttcatattcatccccttgtaggactccccctgccttcttcaagacctgtcgggcccagcagtcaggctcagagcgctacttcctcggctgtcagttgaaaaccaaacaggtgttgctgccctctgactgcgattggcttaattttaacggcgagtccagttgcatggcaagaaaaatagcatatggagcagattccccatgcaccgaaacaagtttgatatgcggtgtctattcttgtaatctgtgtatatattattgtacttctgcacgaacaggttttacttcctcatatttggtaaatataggttcagggatagttcatagttg

SEQ ID NO: 40878 - DNA, 1592 bp, Setaria italica
  Peptide Sequence Number=SeqID_106852
tttgtgggcttctgaagtcaaaacacaacttcattaggtggggattcctatatgtgctggataaatttctgatgcgctgcaaattattattggatgacagtgatatgcaagaccacacagctactgatcatagcaaaaactgtcttgataaagctttcgcggttatagacattatgaatagtgctttattactagtagttcaaaacaatgagactgaccatatcaacatcttaaagatgtgtgacatgctgttctcccaattatgcctgagaattccttccacaaatgcgatgcatgcagggggactccagtcccttggtcaactttttggttgtacaaccaaaaacattgacagtcatttggaaacccttgcatcacaccgaagtgttggaaacaagaatctttaccggagtgagacattgcaagatatcagtatggatcaatctgctcaatccactttactctgcgaagcatcaatggcagcactacttctgagagggctcgcaatagctcccatgcaacttgtagcccgtgtaccaacttctttgtttttctggccattgattcagcttgaaggggcagccagtgatgacattgcattaggtattgctgttggtagcacaggaagaggtaatctccctggtgctacatcagatattcgagcagcacttcttttattgttgattggtaaatgcacagctgatcaggaggcactgaaggaggtagaaggcaatgagttcttcaggggtcttctggatgatacggattcaagggtagcatattattctgctgcttttcttctgaagagaatgatgacagaggaaccagagatctaccagcggatgcttcaaagcctcatttcaaaagctcaacagtgtaacaatgagaaacttctggagaacccataccttcaaatgcgtgggatattgcagttatcaaatgacctaggagtgcaatgataaggccatattggcatttcaatggataaagctctaagttagcagtactctaggctgtgtttattgcagaagaatctgaaactgcattcctctgctccaaattaagaaaagatgcaatgtgaatcatgtaaattactggtttggctggatgcatgtacaggcctttgaatttcttcgttctttgctagacttggtgaatatcttttcatgggagtcactgtgccaggtaaacacctacctggatgaattaccaaaggttaagagactctacaattttgtaatgctgaaccattgagatcggggcagcacaactttttcttttgaagcatgctcggttcaataagtagccagtctccctttcctgtgtgtttgccctcctttacctttccatatatggcaaccagaggcgtgtagatttgtattgcggagtaacaatgtaaatgtgtagggtggaagagattaatttggagctctgtcctagctgtcatgttggttggttggttaattgtaacgaggagcaccgtacgtgcaaatcatacttgattgtgcatatggaatcgaacttgattgtgcaatggtggttgtggtttttggtgcaattgcaaggtcggatgagaatgttaggggtcctaa

SEQ ID NO: 40879 - DNA, 342 bp, Setaria italica
  Peptide Sequence Number=SeqID_106853
gccgcacgtagcatttgaattctgggcaaggaatggccacccgcgtagccgccgccaccctcgcgttcctcctcctcaccgcggccgccgccaccgtctccgccgcggcgtcgcccgcgtcgcgcaaggtgctgcattggaaggactacctcggctgcccccgggacgccgtcaagctcggggcctgcgtcggcgcgctcggcgccgcgggccttcaggccggcgcgcagctcggggacaagtgctgcgacgtcgtgcaagggctcgcggcggcggaggcggccgcttgcttctgcaccaccatcaaggagagcgtgctcggcatccccacggagtggaccg

SEQ ID NO: 40880 - DNA, 747 bp, Setaria italica
  Peptide Sequence Number=SeqID_106854
gcggctcgacttgcaggggcggcgccgcgcggcggcctggcacctgggggagatctaccgcatcttggacggcataatcgagcgcaggctggccgagaacgccgacggcaggcacggcgacgacttcctccaggtgctcctggatctcatgtccacgggcaagatcgaccgcgacaccgtgaaggccatcgtgttcgagatcttcttcaccggcggcgacacgatcacgatcacggtggagtgggcgatggccgagctgctccgcaacccgagcaccatggccaggttgcgcgcggagatcgccggagctctgggcggcaaggagaccatcgaggagccggacgtggcgggcctgccgtacctccaggccgtgttcaaggaatccatgcggctgcacccggtggcgccgctgctggtgccccacaaggccgtggaggacggcgtcgaggtctgcggctacgccgtgcccaagggctgcacggtcttcgtcaacgtgtgggcgatcatgcgggacacggcggtgtgggacgagccggacaggttcatgccggagcgcttcttgggcaaggcggcggaggtggactacaaggggaaggaattcgagttcttcccgttcgggtatggacggaggcagtgccccggtatgcccatggcggagcgcgtcgtgccacacctgctggcgtcgctgctgcacgcgttcgagtggaggttgccagagggcatggcggccgagcaggtggacgtcag

SEQ ID NO: 40881 - DNA, 400 bp, Setaria italica
  Peptide Sequence Number=SeqID_106855
tagagaaggagcacgaaaaggaagtgattaatgcatcgcaaagtatattgctggaagagtcaatgtgcattaacgagtcaagattagatggcaaaaccaaagaaaacaaaataagcactccagcagccacagtaaacaactcaaaggaaacaacaatagagagttcagaacctgagggggtgcaatccatatgtcaaaaactcaacaataatgattggagaagaccgcttcagaggtataccgaagcctcctatcaagcatgtattcaaaagaagaggtaagaagcagcaggttactgaatcaacaaacaaaagcccatcgaacaaactggatatgtaatgggtccagagagcagcaatgccacatggattggagcttcagaaatggaaacgcaagaggg

SEQ ID NO: 40882 - DNA, 593 bp, Setaria italica
  misc_feature (166)..(166): n is a, c, g, or t
  Peptide Sequence Number=SeqID_106856
gaaccaatacaacaatttacaataatagacttaggacggtagaacaaatggtggtgggaagcttgcatacaagtaatcgtgactagtttcaaatttcaacacacacagcctctcaaacagcaatgtcttgagctgcagtgtgaaatattgcgcatctggtttttcncaggaaatttaccggagtggtattgatctcgtggaatccctgtacgagtacatagccctcggatgcacctccatttgagatggaccagtaacagttgggcaagggaattgtattgtcgtgccgccactcttctgtgccaacaccattgtcttgcctagtcttactatagaggtggaactcaaaatcatgaagaattagcaaaccaagcctgccatctgctgcccccacaatgcttttatctttccctttgctttcaggggggaggtcaaccacggagaaattcatttcaagcgtgtccagcacgagcataaccctctgacaataatctgtccagtagaagcagctgtgcgcgcaatgacaattcatcaatatagggtgtcttatccattcatgggttccaatgctaaaagatgcgacggctttgcca

SEQ ID NO: 40883 - DNA, 432 bp, Setaria italica
  Peptide Sequence Number=SeqID_106857
gccgcgatccatgccgacgagcgcgcgcgccgccgtgtgagggtgcatgggcggcgcgcgactccgttccgagagcctggggatcgatcgagctaaaaaatacgtggccacacgccacacataatagtgtcaaaacggccggccgtttcactgtcatgcgggtatcgagttttaccacctgcatgtgtaattttttttcttttttactttcctcgtccgtgataatcgatctcgatatatagggtcggtcggtgaggagacgagataaacaagggcttgttgtggttgcagctaattaagcccggacctcctgtgtatctgtctactatctgtctgcgtatgcatatatgcgtatgaatatgatcgagatggagtggtaaattttgcacattaatttcaaggaaaaaagtgtacttttcatctcttaaaaaa

SEQ ID NO: 40884 - DNA, 549 bp, Setaria italica
  Peptide Sequence Number=SeqID_106858
ggaataagccagatctcatttagtgctgatggaagtctttcaccaaagaagccatcatcgatacctgaggtggctaagcagcgagagcttagtggtactctggaagatgctgattctaaaaccaataagcagctttctgaagccaagaccaaagagcttagtgggagtgacatctttggtccgcctcctgagattcctgccaggccattggctgctcgtaacatggagctacaaggaaatgtggacttttcacttccacagcgaagcgtccacacatcggttaaagtatctaatgtaagtggcattaaaagatgaccttcctgttgatgttgtgacatacatttgacctattacagaaaattatctcgaaatattttatggaaacagatatcagctccaactttatatggtttatacatgactgaacatggacaatgtagcattccattttgcacagttctttatatggttttatatgaacaacattgttcgattgatgtaatcgtttgagtcgctaactattttaattctaattttttccttcattaa

SEQ ID NO: 40885 - DNA, 283 bp, Setaria italica
  misc_feature (259)..(259): n is a, c, g, or t
  misc_feature (261)..(261): n is a, c, g, or t
  misc_feature (263)..(263): n is a, c, g, or t
  Peptide Sequence Number=SeqID_106859
aacttctcggccgaggcaggggcttcctccttgaatatgttgttgcctgtcagctcctggtggtgagagcagcatcgcactgatctaattgttatcggctgcttgaatccggactggctagctcccctcctcactgaagcgcacagtgtctgcatttcttgaccttgcatgattcaaggaccagtcctgagattcgagcatgctttggggatcttaatttacgatgagtatctttagtctaatataatgtagagtcagntnanctgactctacattatattag

SEQ ID NO: 40886 - DNA, 349 bp, Setaria italica
  Peptide Sequence Number=SeqID_106860
gctccgcgaagaaatcgcaggggagcgcgtgcgtgcctgccgagctgagcaggggcaggcgcaagtgccgagcgaaagcatccctcaagccgtcacctcccggctcccgccgcggccgctccgtaggaaggaaggaaggaggggcaatggagagggcggtgccggtgcggaagccgcacacctccacggccgacctgctcacctggtcggccacgggccccgacgcgcccgccggggcctcgcccgccgcctcctcccgccccagcctcaagccggccgcggggatcacgccggcgatgttcggcgcaccggtgagcgagcaggaggccgaggatctgagcaagagtga

SEQ ID NO: 40887 - DNA, 1672 bp, Setaria italica
  Peptide Sequence Number=SeqID_106861
ttcgaaaccggggcgtcagcctgtcactgccattccgctccgcgaagaaatcgcaggggagcgcgtgcgtgcctgccgagctgagcaggggcaggcgcaagtgccgagcgaaagcatccctcaagccgtcacctcccggctcccgccgcggccgctccgtaggaaggaaggaaggaggggcaatggagagggcggtgccggtgcggaagccgcacacctccacggccgacctgctcacctggtcggccacgggcccgacgcgcccgccgggcctcgcccgccgcctccttgtcttaagtctagtcgtagtagtctttagttggttacttcttggtaagtattgtcttgtatttcttaaaacctaattaagtctagtcttttcttgtaagtcctaagtacctaaagtagtcttcctcccgccccagcctcaagccggccgcgggatcacgccggcgatgttcggcgcaccggtgagcgagcaggaggccgaggatctgagcaagagtgaaaggaaattttgttctggttcgaagttgaaagaaatgagtgggagtggcatctttgctgaaaagggtgaaaatggtgattcagaggattcaaaatctgctaacaaaacttccttgaggatgtaccagcaaactgtgactggaataagccagatctcatttagtgctgatggaagtctttcaccaaagaagccatcatcgatacctgaggtggctaagcagcgagagcttagtggtactctggaagatgctgattctaaaaccaataagcagctttctgaagccaagaccaaagagcttagtgggagtgacatctttggtccgcctcctgagattcctgccaggccattggctgctcgtaacatggagctacaaggaaatgtggacttttcacttccacagcgaagcgtccacacatcggttaaagtatctaatcctgctggaggaccaagcaacatctcattcagtgaagagcctgtagtgaagacagcaaagaaaatccacaatcagaagttccaggagctgacaggcaacaacatattcaaggaggaagcccctgcctcggccgagaagtctcttagctccgcgaagctgaaggagatgagtggcagtgacatcttcgctgatgggacgcccgctcctcgagaataccttggtggtgtccgaaagccccctggtggtgagagcagcatcgcactgatctaattgttatcggctgcttgaatccggactggctagctcccctcctcactgaagcgcacagtgtctgcatttcttgaccttgctcgaatctcaggactggtccttgaatcatgcatgctttggggatcttaatttacgatgagtatctttagtctaatataatgtagagtcagcagaatctgactcggtcacttggctcgtatctgatacgcctgtgtgtgatctcatctttggtttgtgctactcattatgtattagtctctccgcactgagaacttgtgaaataagtattttggactcaattctgttcttattgcataacaaaaaaaaaaaaaaaaagataaccttcctgttgatgttgtgacatacatttgacctattacagaaaattatctcgaaatattttatggaaacagatatcagctccaactttatatggtttatacatgactgaacatggacaa

SEQ ID NO: 40888 - DNA, 546 bp, Setaria italica
  Peptide Sequence Number=SeqID_106862
ggatcgtcagagaacagtgaacttaggcgtctcatgagcattaacgttatctgaatgtgctggattattctgaatatttttttggctactgcatacaggcaccatgtaagaggagccagaagctgggggacaagatcacggcgcttcagcagctagtctctccttatggcaagacggataccgcgtcggtgctccacgaggcagccacctgcatcaagcacctccatgagcagatccagattctgacggtctcctaccctgcgattagctcaccagcgtcacagcaggatactggcgaggaagaaggcgcgacggatctgcgccggcgaggcctctgcctggcgccgctgtccccggaggtcgtgcagcttgcggtgacggtcgaggcggcgctccgccaccgcgacacggccgacacggaggatcgctggcgcttgctcggcaccctgtagccggctgtctcccgtgggttcagttcgtaggagtatgagacattggcattttgcccgttggcagttgctaccatcaggcccttcagttacggca

SEQ ID NO: 40889 - DNA, 505 bp, Setaria italica
  Peptide Sequence Number=SeqID_106863
ctcctgcccacataatatgaagtcgagatgcagtagatgtgcttgtgcagatctatcgataatgacaagcattaaaaagaaatactagagaaaggaacacgcatttatatataggccactgaattatcagaacatgctaaggtataagaacaaacttcctgaatttatctcaaatgacgattttactggatcccaagaatatatatacaggtcaagcttataggaaagtaaatgaagataaatcaaataggaccaatgaactttaacatcattattaatttggattaatcatgaattccaaaaaataaattgttgcatgtgccgttctcgaataatttacaccaagtatattacatatatatgactgtactactgattagtctttcaaagttgttttgacacaagctaaatgtgcactatatacccacataaaataaaatggtccaaattttcaagggtactctaaatggtactaaaattcagtcgctagactgagtcggagaca

SEQ ID NO: 40890 - DNA, 274 bp, Setaria italica
  Peptide Sequence Number=SeqID_106864
cccaccgggaaaaaagggggaaacaaaaaatacgaacccgcacgcaacgcaacgcaacgcaggtcgcagcgcgtgctcgacgggacgcctccacccgcctccagatccggcgtcgcatctgctgccatgagctgccgcggcgggtgcgcgtgctagccagctaagggcggaggcggagggtgagggagagggggcaggcagatccgggggcggcaaatctggcaggcgccgcggtggggctgcgggcgcgggggaggacggggccctgggcgga

SEQ ID NO: 40891 - DNA, 331 bp, Setaria italica
  Peptide Sequence Number=SeqID_106865
ccgccgccgccaccaccacctcctcctcctcctcctgcctctcctccaccaccaccgcgtgcggggaccagcagggaggcggcggcggcggcatggggcgggacggcggcggcggcggcatgtcggagtcggtgctccggaaggtgctcctctcctactgctacgtcgcggtgtggatcttcctctccttctccgtcatcgtctacaacaagtacatcctcgaccccaagatgtacaactggcccttccccatctcgctcaccatggtgcacatggccttctgctcctccctcgccgtcgcgctcgtccgcgtcctccgcgtcgtcgaccc

SEQ ID NO: 40892 - DNA, 324 bp, Setaria italica
  Peptide Sequence Number=SeqID_106866
gcggaggacttgaagttctccttcttgaagaggaccccgatggagtagacggcgacgggcatgagcgccttgagcatctggatgaaggagacggagaggtagatgtaggcggagttggagaaccagagcgagagcgagtagagcgcgccgatggggagcacggaggcgacggcggcatgtcggagtcggtgatccgcaaggtgctcgtctcgtacatgtacgtggcggtgtggatcttcctctccttctccgtcatcgtctacaataagtacatcctcgaccccaagatgtacttattgtagacactccctgtcgttgccgcct

SEQ ID NO: 40893 - DNA, 598 bp, Setaria italica
  Peptide Sequence Number=SeqID_106867
ctcagatctccctcccgctcccgcgcgagatccaccgcctccgcgcgcgcccccctcaccggaggagcgctcgcgagctcgggggacagaaggcggccggacaggagccacagccatggggaaggagggcgccggcagcggcggcggaggcgacggcggcatgtcggagtcggtgatccgcaaggtgctcgtctcgtacatgtacgtggcggtgtggatcttcctctccttctccgtcatcgtctacaataagtacatcctcgaccccaagatgtacaactggcccttccccatctcgctcaccatggtgcacatggccttctgctcctccctcgccgtcgcgctcgtccgcgtcctccgcgtcgtcgacctgccctcgtctcccgccatgacgccgcagctctacgtcgcctccgtgctccccatcggcgcgctctactcgctctcgctctggttctccaactccgcctacatctacctctccgtctccttcatccagatgctcaaggcgctcatgcccgttcgccgtcttacttcctattcggggttccttctttcttaagttaaggttagttaactttttctttaagtttccttt

SEQ ID NO: 40894 - DNA, 781 bp, Setaria italica
  misc_feature (759)..(781): n is a, c, g, or t
  Peptide Sequence Number=SeqID_106868
gccggatctcttcgtcttcggcaccaactcgctctgcgccttcgcgctcaacctcgccgtcttcctgcttacgggaccgacgtccgcgctcaccatgaacgtcgccggcgtcgtcaaggactggctgctcatcgccttctcgtggtccgtcatccgcgacaccgtcactcccatcaacctcttcggctacggcatcgccttcctcggcgtgggctactacaaccacgtcaagctgcaggcgctcaaggccaaggaggcgcagaagaaggcggcgcaggccgacgaagaggccggctcgctgctgcaggagcgcgactcgcacggcgaccgcaagactgacaaccaggcctagcgagtgtgacggatctgaagatccaaccgctctcgcccgattcggtcggttctgaatccactcccccctagtgtactccaaatgtgtgatccgatccttacaagtttgatgcaaaatttgttcatttcttgtcttggtctggtggtagcaaggcaaataagcacgggaaagatgcaagctttgtgtcgaacatgtagaaaaaatatatgagcaatttttgtctttttgtccagctgtagtagttacactgcattgacagtagctatggatgaatcatcaaacattggatccactcgtgtaaaacgaatgcaaatcttgctcagtctttagagtagttaatttgttattgaataggtaaatctttaacttttatggttacaactaaaaaaagagaactagaccaaggnnnnnnnnnnnnnnnnnnnnnnn

SEQ ID NO: 40895 - DNA, 748 bp, Setaria italica
  misc_feature (663)..(748): n is a, c, g, or t
  Peptide Sequence Number=SeqID_106869
ctctgctcgttggcaagacctccgcgctgaccatgaacgtcgccggagtagtcaaggactggctgctgattgccttctcatggtcggtgatccgggacacagtcaccccgatcaacctgtttggctacgggatcgctttccttggggtggcctactataaccacgtcaagctgcaagcgctcaaggccaaggaggcgcagaagaaggccgcgcaggctgacgaggaggctggttcgctgttgcaggagcgcgatgggcacggtgatcgcaagagtgacaaccaggcttagagtgccagatctgatactggcttccccatattggggatatggtgcaaggtgcaaaggctgtagtttggtctacggttgctttcatgaaggtgtatgccagattcttgcacttctttaactttagttggatatgaagaacgaatcagaagtatttattggattaggaaatatgcacctgcttcctggagagctttaccctgttatttatttagctgtttttgttccacagaaaggcatgccttgctacctctctcttgcccattgcctaaatttatttgttctaagtagcttagcgactaaagatgtactgctgcagattggtattttggtggttattttctatatataatgagcttactgtactctaaacaannnnnnnnnnnnnnnnnnnnnnnnnnnnnnnnnnnnnnnnnnnnnnnnnnnnnnnnnnnnnnnnnnnnnnnnnnnnnnnnnnnnnn

SEQ ID NO: 40896 - DNA, 701 bp, Setaria italica
  misc_feature (681)..(701): n is a, c, g, or t
  Peptide Sequence Number=SeqID_106870
agcctgggcagctcgacgaaagcccagggcacgacgaggaagcagaggcagcgcgccgtgggaactttccagccagatttcttcatcttcgggaccaactcgctgtgcgccttcgcgcttaaccttgccgtcttcctgctcgttggcaagacctccgcgctgaccatgaacgtcgccggagtagtcaaggactggctgctgattgccttctcatggtcggtgatccgggacacagtcaccccgatcaacctgtttggctacgggatcgctttccttggggtggcctactataaccacgtcaagctgcaagcgctcaaggccaaggaggcgcagaagaaggccgcgcaggctgacgaggaggctggttcgctgttgcaggagcgcgatgggcacggtgatcgcaagagtgacaaccaggcttagagtgccagatctgatactggcttccccatattggttggttcttgatccatttgtgttatcactgtctattgcatgtgaaagaagtgtttgttcttgcttgaattgtggtagaagaggtcattttgagaaagatgtgatttttgcagcagattatatgtgtgagatatattttgttgcaacaaaacttcaatcttgcattgtggaccttgtgaaattaaatgcatgtttttgctgcaactaatgaaatcaaatgctgcnnnnnnnnnnnnnnnnnnnnn

SEQ ID NO: 40897 - DNA, 654 bp, Setaria italica
  Peptide Sequence Number=SeqID_106871
ttttcttttagttttcggtttcggtttcggttaggttcgttacggttcggtctatgtcggagtcggtgatccgcaaggtgctcgtctcgtacatgtacgtggcggtgtggatcttcctctccttctccgtcatcgtctacaataagtacatcctcgaccccaagatgtacaactggcccttccccatctcgctcaccatggtgcacatggccttctgctcctccctcgccgtcgcgctcgtccgcgtcctccgtgtcgtcgacctgccctcgtctcccgccatgacgccgcagctctacgtcgcctccgtgctccccatcggcgcgctctactcgctctcgctctggttctccaactccgcctacatctacctctccgtctccttcatccagatgctcaaggcgctcatgcccgtcgccgtctactccatcggggtcctcttcaagaaggagaacttcaagtcctccgccatgctcaacatgctctccatctccttcggcgtcgccatcgccgcctacggcgaggcccgcttcgacgtccgcggcgtcgcgctgcagctcgccgccgtcgccttcgaggccacgcgcctcgtcctcatccagatcctcctcacctccaaggcatctccctcaaccccatcacctcgctctacta

SEQ ID NO: 40898 - DNA, 2045 bp, Setaria italica
  Peptide Sequence Number=SeqID_106872
accaaacagcacgggcacaccactccccgcgcaagcacatccagttccccatgggcgccggcgacgacaccgcgccggccaaggccgccatgggaggtgtcctcgtcgtcgatgtcaacgtccacggcgccagctccttcgccggcgccgccgccgtcggtgctcaggtccgtgctcctctcgtacgcgtacgtggcggtgtggatcttcctctccttctccgtcatcgtctacaacaagtacatcctcgaccccaagatgtacaactggcccttccccatctcgctcaccatggtgcacatggccttctgctcctccctcgccgtcgcgctcgtccgcgtcctccgcgtcgtcgacctgcccacctcgccggccatgatcttgcgaagcctggaacgagaaaagaatggagaatagtacatttggtgtgttcagacgccgcagctctacgccgcctccgtcgtccccatcggcgcgctctacgcgctctcgctctggttctccaactccgcgtacatctacctctccgtgtccttcatccagatgctcaaggcgcttatgcccgtcgccgtctactccatcggggtcctcttcaagaaggagaacttcaagtcctccgccatgctcaacatgctctccatctccttcggcgtcgccatcgccgcctacggcgaggcgcgcttcgacctgcgcggcgtcgcgctgcagctcgccgccgtcgccttcgaggccacgcgcctcgtcctcatccagatcctcctcacctccaagggcatctccctcaaccccatcacctcgctctactacgtcgcgccatgctgcctcgccttcctcgtcgtgccctgggtcttcgtcgagctgcccaggctgcgcgccgtcggcaccttccagccggatctcttcgtcttcggcaccaactcgctctgcgccttcgcgctcaacctcgccgtcttcctgctcgtcggcaagacgtccgcgctcaccatgaacgtcgccggcgtcgtcaaggactggctgctcatcgccttctcgtggtccgtcatccgcgacaccgtcactcccatcaacctcttcggctacggcatcgccttcctcggcgtgggctactacaaccacgtcaagctgcaggcgctcaaggccaaggaggcgcagaagaaggcggcgcaggccgacgaagaggccggctcgctgctgcaggagcgcgactcgcacggcgaccgcaagactgacaaccaggcctagcgagtgtgacggatctgaagatccaaccgctctcgcccgattcggagatctggtgtcaatgcaaacaccctgtgaattggtaacttggtgtgtggttgctttccatggagctggacccgcatttggtgcattttcacgctttgtccaattcgtgggatccaatcatcctatggggagtctgaagtctgaagaattggttgtttgttgagcatcagtcagcaccatcatctacctgcaggagcaggactaggagaaacttttatcttatacactgctactgttgttttgttgtcatatttttccattccaacccttaatgccctaggtcattcatttagtgtagtgaaactctacagtagcgcaaatgcctaatagcgatttctatatatattgatttactgagagttccaactcagagactgttccttccccgatattggggatatggtgcaaggtgcaaaggctgtagtttggtctacggttgctttcatgaaggtgtatgccagattcttgcacttctttaactttagttggatatgaagaacgaatcagaagtatttattggattaggaaatatgcacctgcttcctggagagctttaccctgttatttatttagctgtttttgttccacagaaaggcatgccttgctacctctctcttgcccattgcctaaatttatttgttctaagtagcttagcgactaaagatgtactgctgcagattggtattttggtggttattttctatatataatgagcttactgtactctacacaaaaaaaaacttaaaaaaaaaaaaaaa

SEQ ID NO: 40899 - DNA, 592 bp, Setaria italica
  Peptide Sequence Number=SeqID_106873
tacggaatctcaccgtcatctatcgtctggcattcctctccgttttcttgttgtcgtcgtctacggtattagttttataccaagaagaagggacaaccagctaccagccatgtcgacgacggcgcacaaggtggcgacacacgcggcggcgaggacgaagacggcggggaggcggccgccgagcgtgctgagggagatcgcgtacggcatgggcctgggcctcttcgcgggttacctgtggaagctgcaccactggagcaaccagcgccgcacccgcgagttctacagcctgctcgaccagggcaagatcaccgtcgtcgccgacgagccgccgcgcaccggagccgacgactgacggtgcgcacgcttcagcagttcggtagctcatcgccgtgctagctgacctccagaatgcatgttgtttaatttggcatgccactttattcatcagttcagtgcactctcgtcagtagtttgctttgtcgtcacctctgatcatgtcacttgttgacagtatgctattgccaaaaaaaaagaaatacaatagaataggtagaaatactagaacttaacgtaaaaaaaaaaaaaaaaa

SEQ ID NO: 40900 - DNA, 1495 bp, Setaria italica
  misc_feature (1457)..(1495): n is a, c, g, or t
  Peptide Sequence Number=SeqID_106874
cgtctcgcagtgcgaggctggtgcacgttcagggtgctcaatcactgcatcacgcaaatgcaaacccccctggtggaaaggcttattgggagctgcccggagtctcagtgaagaaagagagagatgtgaagagcgagagatggccgcttgtctcgaggcagccaaggaggcttgcattaagtttgcaaagggaaaatgcattggaccattccgagatgcaaggatcgcctctgggggtctcctggaaaatacagattttgatgtctggggtgctggaggtgacaaaacagcatcagcatcatcatgtgctctgaacaatcagcagttgttcaaccctgatcacagtatgacaaactacagaggaagtgacttgctagacagattgtcagctaaagacaatgataacgcttgatggcttcccaacaaaagtgtaacactggtgaagacatcatgatgggatccagaattgaagcaataatcaaataacggcgcacataagtctgaggctggtggtttcatgccatattgaagttggttcagtggctagagatggtgaaaaactaacttctgggaatgggtgcagaagataagagaagattccagttatgagggcccagaggaagtgcagtaaccgcggagtggatatcaaaagactactgtttattgtgcgtgttgacctattattcgagttggtgctcggggcaacacatcaggcataccgtttctcagtacgtcaattgccggaaaacacaattaacttttctggaagcaactgcaataatgtgaatagttttctgagttgtggagccatggaggagacggcaatctttatgcagattctcgcagcttgaagatcaatctcttcttttgtggtattagccaagtgtacttgaagatctgtgaagcaatctgttcttttgggatattagccaactttacttgaagatctgtgaagcaatttatccttttggggcagtagccaagtattcttgaagatctgtgaaactttttatccttgcctcttttggcgtatacgctggaagtgaatcgattgcttccatattcgatttgcagtagcacccacctgtgtaataactgacgatgtggaagagtagctcgctgcctagtactggcagttgtacatcatctctatgccaacatgcgttgtgcttgtatggtttcacgcgctgcagagtctgtaagcaataagtaggatcagaaatgcacgggcgatttcagcctcaggggccggtgccaattaaacatcgctgctgctcagacttgacagtgaatggcgaaggggccatgcatgaagcgtggtcagcccaacagcgctcctccaccggctggattatttttcctttctatttcttcctcgtagtttacctttcattttgtgctgcaacagaagcaatctttgcaaagcaaggaggaagtaaaaatagcagacttaactnnnnnnnnnnnnnnnnnnnnnnnnnnnnnnnnnnnnnnn

SEQ ID NO: 40901 - DNA, 398 bp, Setaria italica
  Peptide Sequence Number=SeqID_106875
gtactaacatgagtatgatccaatggaccatcttttgaaataccaaaatctgccatctttgcaacaaaattgtcatctagcaaaatattggtagtcttaacatccctgtgaattatgcccctgtcaagtccagtgtgaaggtagtaaagccctcttgccgcaccaatgcagatttcaagcctttgcttccatgtcagagcaggaaggtcacttccataaaggtggctcctcaaggtgccatttgccatgtgctcataaactaagatcatctcattttgttcatcacaatagccaatcaaggacacgaggtgccggtgtcgcagccttgagagcatctcgatctcagtttcaaattccttcacaccctgctgagattgtgcatcgccccctcttaattg

SEQ ID NO: 40902 - DNA, 600 bp, Setaria italica
  Peptide Sequence Number=SeqID_106876
tcggggaatacacgtccatttctattattcacgagcggaaattagtctattaagaccacaagttgagacaacataaagaaaacggacaagatcccaggaagtgggtgggaatgggaaaattaaaccgggatgaccataacagatagaccatgagtcgatgaccacacatttccatcactacatgcctacaagagatgagagacacacatataacataatttgtgaatacatgaaactatgagatctctgtgattgaatccaaggccataccacgtgcaaaatctaaattctagtgcctgcttcactgctaacttcagaggaacaaggaccctctgcctcctgttcaagaaacccttgggagatccactcttcgcatactttcacaaaatacaccaaaccattggcttcctgcaagcattgaagcactagacaaccattgactgctgctcaagcaattgagctgctccagcaattgtcaaccacagcccctcccttccatcgtctcagtaacagcagtatgacaacacacatgaagcaccactcctgcaaggctgcaacccgagaaagtgatcaggactcgaattcactgtacgaaatccc

SEQ ID NO: 40903 - DNA, 257 bp, Setaria italica
  Peptide Sequence Number=SeqID_106877
ttttttaaaggaacaggtccaatggcatattagatctagttgctcaagtacttagaatatacaataaagaccttagacgaacaattaattccactgccttcccacaaaagaatctctggttaacgccacgatcacagcagaagtatccaacagcattagtcaaacacacactccgcctcacgaactccattctggaatcgcactaacaacacagttccaaccacatcagcattccagcaagatacagtgaatggggg

SEQ ID NO: 40904 - DNA, 648 bp, Setaria italica
  Peptide Sequence Number=SeqID_106878
cagtactaactccagtcaaaccatggtaataatccgcgacgacatagtggagatcactagctagcggtcatattcaggaagcgtcagtgtcttgatcctgtcacacttggccctcagggggtcgtcagctatgactttgtagcaatcacgcaagcagagaatttccaggcgggggcagccatcgacgatggctaccagctcttcattggtgatgttgctgctgatgaggctgaggcttcgcagctcggacatcgtcgctgcgattccgagcgcttctgcgacacgccgagggtagttcaaggagaacctaaagcactctctgcgcaggctgaaacgcttcagctggcggcatgctttgccagtagactcgtacacgttgcgaccgccgacctttggacagagctcaagtgagaggtcctctagcagaggtgatttcgtaaccaggtcggtgaatcctttgttagagacctcgtggcatgatgtaaggctaaggatcttcagagatgctgacctgcggacgtggttagattaggagggagcaagaatatgcaacacaaacgtctgaggaagaaatagattaaaagggttgctgattaaatattggcagagaaaattaagaatgggtactactccatctgtcaagaagct

SEQ ID NO: 40905 - DNA, 436 bp, Setaria italica
  Peptide Sequence Number=SeqID_106879
ttaaacggttaaaatttaaacgcaagaaactatacggagttgctcacctcactcacaccgcagagttgttctcatggcgctgagccttggcgccgccacgcccaccgcgccgccgcttccccgtcgacgcgtcgtgccgtttcgcgcaaccgcctcccctccggcgctggaccggcggcggcggccgcagaacgtgcccggggagttcttcgtggaccaccggtgcatcgactgccagacctgccgatggatggcgccggaggtgttcaagggggtggatggcaaggccgccgttgcggcgcagcccagctcccaggaggacaggaccaaggccctgcaggctttgctctcctgcccaacatcctcaatccacacacacaaacctcctaaagacattcttcaagtgcaaaacatgtttcctcttgaagacgacgag

SEQ ID NO: 40906 - DNA, 422 bp, Setaria italica
  Peptide Sequence Number=SeqID_106880
atttattgataaggcatcccattcacaatttgtaaaataaagagattcatactgtaatgaataaaatttgttctctccctgggatacagaaaattccttatttacacatcatttaactgattatactcagatcttttactagtcataatatgtggctgctctaatattcaaagattagatttgaatccaacttcctcttatgattatagattttcttttatcatttagagacaaaaagaagtctccaatagtagctgaaagttttcagaggttcctcacttgtcctatgggtttaaattagggtgaagatggtctaagcttagctatagaccaagctttaggcaaagcgattttagaaggtgcatattattcctttagaaattaaatcactaattcgtgtgtgtaagactatcattaaaaag

SEQ ID NO: 40907 - DNA, 339 bp, Setaria italica
  misc_feature (327)..(327): n is a, c, g, or t
  Peptide Sequence Number=SeqID_106881
tgatgatgtttgagacaggatcgaacgggccaaaacagtagcctgccttgagaaggccgcggtggtgatgggtctgaagatctttcattggaaaccgagacaccgccttgagataatgttcatggactctatccataagaacccctcgaagtgactctgtcagctcacctggcacatcctcaatgcttgcagcgatttttggttctgggtcatggaaccgtttggcaacaagatccatgggcttgtctgacctcttgagcttgggcggtttgccagcaattgggacaagaaggagatgtcatgagcagtgaggcggcaacggccctntgctgacaagtc

SEQ ID NO: 40908 - DNA, 404 bp, Setaria italica
  Peptide Sequence Number=SeqID_106882
ggacttctatcgcctcccctgctcctctcctcccctccctcgcagcccgcgccgcgcccggtggagttccgagtcctcggagggcggagcagcttgttctcgaacttgccgagcccacccgaggagggggagagagagggagggagggagggggacggacccagacccagggcccggcaagattcggctcgatctgcggcgggccatggagctggacagcatcgagtgcgtgtcctactccgacggcatggaggacgacgacgacgccgcggccgtcacgtccgcccagctcccacgccccttcctcaagtccgcctcctccgctggcagcgccgccgccgcggccgtcaacgtggtcgtcgtctccgaccgggccgggggcccggtgccgggcgggacgggag

SEQ ID NO: 40909 - DNA, 458 bp, Setaria italica
  misc_feature (384)..(384): n is a, c, g, or t
  misc_feature (403)..(458): n is a, c, g, or t
  Peptide Sequence Number=SeqID_106883
tgatcagaggccgcccgtccctccgtccgggccgtccgaccagttcaacggcgatgtgagcggcgagaagccgtcgtcgtcgagcggcatcgacggccgccgcctcgtcgagggcccgtgacgcggcctcgggcggtgggttcttgcttgtcccggcaaaaagagggtgccttgaggagggcagagatctatctcaaggactttagctagctatcgacttcgtctctctacgagcagtgattccttcccctgttagaaaggaatttgcgtggattcatggcgtctgtgagtttgtgttaatgtatttctatgagctagtcgcctagctggctagctctagtgtgagctctatgtaagatctactaaattttccttccagtgganaatggaagcgtttaccctnnnnnnnnnnnnnnnnnnnnnnnnnnnnnnnnnnnnnnnnnnnnnnnnnnnnnnnn

SEQ ID NO: 40910 - DNA, 1311 bp, Setaria italica
  misc_feature (1282)..(1282): n is a, c, g, or t
  Peptide Sequence Number=SeqID_106884
cattctgttctgttctgttctgccaccatcaacactaatccatatctgcagcagtcgtgcagtctcagaagaatagcatggggcctgatagcaagcagatatacaggaacacagatcacaccatagtttgtgcaaagtatgaacccacacatcatatagttaaccctgtctctattgcaacttgtgatgtattgcttcacatttccgccacacgttcgtgctgatccagagccaggtcgaatgacgtgaaggagtagggagcgagcaaggcctgcatctcttctcccgcattcggcagctctctgctaaccggcaccacattatttgggttgctgaacgaattttcatccatcacattgctggatgtcagaacagtgactcttgatcgcattgtatcaacaccaacttggagttcttgtgcacttattgtcaggctcacagcatgaggcccgaagtttacgatctttaccctcaggaagctattctcagtgtccctccaggtaattgcggatgctgccaatgaatcagagtagctggatgcgattgtaattggatggatcacagcaccacttgattcacggaaaaatgtctgcatccagtaactgggagttccgtactgttgccaggagttgaagactattgcatctgggttccatttccagccaggatcgttgtcattgacgaagagtggcgcataactagccatctgaacgatgtcactgttcttttctactccagtgaggaatgcagcctctgccagtgaagcaaggaggcttccattaccagcatccttttgttctgtaactgcatattcgctgacaaacacctttggtcctgtacgtgatgtcctatcaaacttacttttcatgaggaaaatatcagtagaactgttatagatatggaagtcatacaaatctgcaggatggtcaagtgcctcagatgagccgtcacagtttgaaatcatttgaatgtctggatatgcttctcttatagcattataaaatttgaggtagtttccttggtaaaattccttctgacagtcttcattcccaatcgcaacgtacttcagtggaaaacgttttcgatgtcccattgcagctctaacagaaccccaattcgattctgcactccccttggcaaactcaagactatccaatacatccttgacaaaaaggtgcaatactattggtgtcaactccctcattgtggctgattccggcattaaaagacccagataggggcagcaccccaggtcttctgcaagctggagaaactcaaaatntccaagtccatcatcagtccagtaattcc

SEQ ID NO: 40911 - DNA, 485 bp, Setaria italica
  Peptide Sequence Number=SeqID_106885
tccagaaattagcccaaaattaagcggaaatatacgacccgaatcgcccgatctgctcccgcgccgccagtcgcgcgcgaaccctaggagaatgggggaggcggcggcgccggaggggctgctgcacaggaggatagagttccacgccgccactaagcctcctcctcctcctcctccggcggcggcggttgtggccgtgccgggaggatttcgaatggagacgagtctattcgcgggcgctgataagcgcgtggcggcggcggcgcggagcgggcgcgagggcaggaggttcgagactggggagagtagcgggagcgggttcgatccggagctcagcgccgcgagggtctacctgcggagaatcggtgctggcttgcacaatctcggcaatacatgctacctcaactcggttctgcaatgcttgacgtacaccgagccattcgtggcctacctgcagagcagcaagcacaattcctcatgtcggg

SEQ ID NO: 40912 - DNA, 340 bp, Setaria italica
  Peptide Sequence Number=SeqID_106886
cacttctcttttgctgtgctattaatttctcggcatcacgggacagggtagcgggctcctgaaaatcccctccggaggttgcgtactccggcgggcatttgatatgccgtaggattgcgaatcaaaggtgagagagtagtggaaagattagtgcaagaatggcagattagaaactagattaaactttcctcatttaatttctctccccacgcctcctcgacctgccccctccccgatgcacgttctctctggttctctctcctccttcatccatcctttcactttctctctcctttctctcacgcggtcatgaggtgatgccagaggagaagccgaggga

SEQ ID NO: 40913 - DNA, 464 bp, Setaria italica
  Peptide Sequence Number=SeqID_106887
tcaatgtatgactcctatgatagtgcttaattaagagaacccatacagcatggaccaacttttagttaaaaacattatcactagcaaatgtagagaatcagatcaaatgatcttttcaaatttatgaaacaattgattttgtagtttggagaaaccaaaaacagaaatagaacagtggaaaaaatacaaatcactgtacaaacaagaaattgtcgtttttctgttgcacacaattgtaattaagtttggtaaaaagatacagtcatctgatacaatataactcttccccacaaatttagagatcttttgagaaattttcagacacatgtagcttagctcacaagattctcaattaaaattatccttcacatatacatcctagcttagctcacaagattctcaattaaaattatccttcacatacacatcatcctaatacacagattcttacaacaactagaaga

SEQ ID NO: 40914 - DNA, 705 bp, Setaria italica
  misc_feature (1)..(18): n is a, c, g, or t
  Peptide Sequence Number=SeqID_106888
nnnnnnnnnnnnnnnnnntttagacaatactcaataataatttttacaatttctttcagctacagactcctatttgaaggtgaagaattttcttagcaccgtcctgcctaagttatgtcatagctcgtcgcggtaatcaccgtcaacttcttcgctatcgtaatggtcatccatataaacgatgttgtagaaggatgtgtaatcgttgagcatctcgtccagggatagcttgccatctccatcgctgtcagccttcatcaaaagcttggcttgtgaggtagcatacgaaaactcccctgtaaggaggctctggattacagggcgtgcctcttccactgtcagatagttgtccatgtcggcatcgaggtcctggaacttcttttcagcttgggcacgcgcgagtccatggtcacccaggtgatgtgcaatggagatgtgatccagagcgtgagataggtggacgaactcctccaagctcaatctcctgtctccgtcgtggtccatctcacttagcttatccttcagtagccagagctgcattgtctcatggctgctgtcttcagggtgcaggaagtcgttcaactcggcggcgttgagcgagccgtctccatcgccgtcggcggtcgcaaacttgtgcagccacccccaaggttgccggctctctgtactcgctgagcgcgacggcgccgtcgccgttcctgtcgt

SEQ ID NO: 40915 - DNA, 593 bp, Setaria italica
  Peptide Sequence Number=SeqID_106889
aatacaagaattcgcatgaaattaggtgaaaataatggtagccactacgcaaatcaatcttagtgaaaataatggcaccactaagcttgatttgcgtagtggctaccatcagattcgcatgaaattaggtgatgaatggaaaacggcttttaaaacgaaatttgggttatatgaatggttggttatgccgtttggtttgacaaatgcgcctagcacatttatgcgtttgattaatgaagttctgaggcccttcataggattgtttgtagttgtctattttgatgatatcctcatttacagcaagtctatggaagagcatttagaacatttgcgtgctgtttttgatgcgttgcgtgcggcccatttatttgctaacctcgaaaaatgcatgttttgcacacaacgtgtctcgtttcttggctatgttgttactccacagggcattgaggtggatagcagcaagattgatgccattcgggatggcctacaccaacgacggtcacacaaattcgaagctttcttggccttgcaggtttctaccgccggtttgttcgtgattttagctccattgcagcgcctctacatgagcttac

SEQ ID NO: 40916 - DNA, 2132 bp, Setaria italica
  Peptide Sequence Number=SeqID_106890
attagcactgaaccaaaagctctcccccctcccgaaaattgaacaaccagttctcccccctccaaaagttgaacaaccaaaaccagaagtgaagccagtaccagttccagttcaacaaaaaggtgacgataggtggattaggcctcccagagttcaaaatgctgatgaagtggaaaaggctaaggcttgtcaacttgaatttgggagttactgtctctggtccatagagcacaaagaagttatgagggataccatcgtgaaaaggctgaaagatcagctatttgtagctcgatcatactacccaagcattgcgaaacttaaaggaaaggaggcactgactcgtgaattgaagcaaaataattcaagaacatgagagggttctcagtgaatccattgttgatgctgatctaccatcctttataaaaaagaagatagagataatggaccaatcaatagcaagagccaaatcgtgcactgtggattgtaacaatgtcgacagaaagcttcgtcaaattcttcatatgacagaggatgaagctcattttcatatgaagcagagcgcatacctgtacaaccttggtgttcacaccatgcccaaaagtcatcattgccttaatatgaggttgacagtagaatattttaaatccacaccattggatccagatgactctcctgcccataagttcaacattccagaccacaggcactatgttatattatctaaaaatgttcttgcagcttctgttgtcatcaactcaactgttagtagctgtgaggatactgaaaatgtagtctttcatgtactaaccgatgctcaaaatttctatgccatgaagcactggtttgcaagaaattcctacagggaatcagctgtcgatgtcataaactatgaacaaattattttcgagaatttccctgagttcggaacccagccattgtatttgcctgaggaatttcgtgtcttcatcagtagccttgagcggcctattgaaaagagcagaatggagtatttatcagtgttcagtcattcacatttctttattgcggaaatattcaaagatttaaagaaggtaattatattggatgatgatgtggttgttcaacgtgatctctctttcttgtggaatcttgatatgggagacaaggtcaatggtgctgtcagattttgtggtttgaaacttggccaattgaggaaccttctgggtaggacaatgtatgatccacagtcatgtgcatggatgtctggggtgaacatcatcgatttggacaaatggagagagcataatgttaccgagaattacctgcaactcctgagaaagtttggaaaccatgatgacgaggcctcactgcgggctgcagctttgcctattagtttattgtccttccagcatcttctatatccacttgatgagagattcaccttatctggactcgggtatgactatggtattaaagaggaagttgcccagagttccatatcgttgcattacaacggaaatatgaaaccttggcttgagttgggtataccagattataggaagtactggaagaggtttcttacacgagatgagagattcatggatgagtgcaatgtaagtccatagtgcacttgaacttgggagacggaacgtttttgacagtagattttcagtctacctgtactatagactaagaggacgaacacttccattgagaaaagacctgggaagcagtcactagccatcaattttgacagagtagatccagcaccatctgttcattgaattagtgagctcgatggatggttttttctgcagttagaggagttagtcttaagtttgaaggataatgcagtagacaagacgacggcagatgtgtggtggttcggctccaggtaaggagcatcacactcagcatctagattacgagacaggaatgatcgatgggggattgaggcgccttaattgaaattggtgccttccgcctcattgatgaaggttaattcttttctttgttgatttttttgaccctcatgctctgtccttctgtcaataaggacatacacaagttaagattcaaaattctttgttcttagttgttgcacattgattgttctaccattattatgttgatgcaaagtatattatgatgtc

SEQ ID NO: 40917 - DNA, 477 bp, Setaria italica
  Peptide Sequence Number=SeqID_106891
agagaggtttcggctcgcctatgtggagagggaagcaaggctggcgcccaaaagagccaagcgagaaagacagcagcggcgccgcgctgaaagggactacatgatgaatgatatcgacgccaggtcgatcgcacttgcttctcaagcaagcaggaatttgcgcaagagctgataccaaactttgctttgcttcgcttgtttttggtgttgtatgtatctcaacagttttgttgaaaaagagagatgtggagaggaatgatgttcaatcttaaaaagtgtaaagataggcagaacacagctttgtattagcaagtagcagtggcgtttatcatgtacgaagatgttaataaaccaaaatgcaggtaaagtgtgcctgatcaggtcatgagtgaatcgccacgagccagatttgtgatcctggtaatacgaactttgtagaatctggccagatttgtgatcctgttgagacgagttttg

SEQ ID NO: 40918 - DNA, 513 bp, Setaria italica
  Peptide Sequence Number=SeqID_106892
aatgccacataatagagggccggcgcgcgcatagagaaatgaagaaatttgaaaagaggtgcatattttacattgcatcgatgaacaaaggccatacacaagcctcatactttcatagatgcagatcgtctcatggagcgagggaagcaccggagaaggctctgatgatggttgtggtggtggtggtgatgatgatggttgtggtgtggtggaggcggtatgtacgacaagacgaacgatgggtcctcatctagggcttctttgtagctctcgaggatcgccacgatgtcgtcaaactgaggtcttttgtcggggttggtcgcccagcactgcattataaggtggcttattgctacagggcatgaagcaggcagtggtggcctagtattcttcagggcaacagctacagcagcctgctcaggagtcatatcactgaatggaaccaaagcggtcaaaaatctcccacatgacgattccgaagctgtacacgtcaactttcctagtatgatgctt

SEQ ID NO: 40919 - DNA, 1284 bp, Setaria italica
  Peptide Sequence Number=SeqID_106893
ttttaggttttaggttttaggttttaggttttagtttattttgtttattttgtttattttggttgtggtggtgatgatgatggttgtggtgtggtggaggcggtatgtacgacaagacgaacgatgggtcctcatctagggcttctttgtagctctcgaggatcgccacgatgtcgtcaaactgaggtcttttgtcggggttggtcgcccagcactgcattataaggtggcttattgctacagggcatgaagcaggcagtggtggcctagtattcttcagggcaacagctacagcagcctgctcaggagtcatatcactgaatggaaccaaagcggtcaaaatctcccacatgacgattccgaagctgtacacgtcaactttcctagtatgatgcttctctttgatcatttctggagccatccacctgtaagttcccgtaaaccccttgccacttccacactgcgattccaagcatgaaatcccaaaatccgccactttgactgacatatcttctcccagaagtatattctctgatttcaggtctctatgaagtataccctgagagtggaggtagctcatcccgcgagcaatatctaaagataatttcagcactagttcaatgggaactgaatgaggttcctgctgatgcagatatttcctaagggacccccctgccatgtactcggtgatgatacagaatactggtggcttcttgcatgctgcaacaaacgagatgatgttggggtggtggaggcggaggaggagcgcgacctcggaggcgaactggcgctcgagctcggtagcgagcgcagcgtcctcctccggctggctgaccatcttgatggccacctcacggccggcgtacctgccggagtaaacgcggctatggcggcctgaggcgaacttgccccggatctccagcttggacaggtcggcactccagagctcctcgccgccgccccggatcctggcgcccggcggagctatcaggtacttggaccacgacaccgccttcttatagtcgcccagcgacagacgccgctccagccgcttccccggcccgcaaccattgccgccgccgctgctctgcttgaagcactgcaggctcttcatctccctccaagcaacaccgcagtttcctcgcctcctcggggcgcgaatggcgtggagagtttgaatggatctttgaagcaatgcgaacgaaccgaagcgtctgtgcagacaaaccggttcctggagatttaatggcggtaatctcgcacgtcggaaaggcttcttaaaat

SEQ ID NO: 40920 - DNA, 599 bp, Setaria italica
  Peptide Sequence Number=SeqID_106894
ttttttgacgcttgatgagcagaactctttgatcatttgcagtattattacagagtttatgttcttgagtcttgagtttatgttccggccctagcttattaacaatccatactggggcaactaaacaacatcacaccactacatcatgagcgatggcttctacttggcgactttcctcttccacctcttggcttttgtactccctaccaactttgatgtctggtcagctaaacagatgcaggtcctgccaaggtttctgtcttctctgcaagcctgtccacttcatgagaaggatcttggtctgcttagtacaccacaaaagcctcagaatataatgagaatattcactcgtgcgcagctttctatgctaataatggagatccgtagaagtacaatgaaaggttctagtccctggcaatctctgcagatctgagcatagatttacattgatagattgaagagtttaaaaaaagactatattagagaatagcccctaattccaactattcattgagactaaaatttccaacaagtccaacaagacgacagttgtcttgttgagctgcagacatgatttaaggtatgcagatgtctaggca

SEQ ID NO: 40921 - DNA, 529 bp, Setaria italica
  misc_feature (66)..(66): n is a, c, g, or t
  Peptide Sequence Number=SeqID_106895
atttcctgctaccatgctcttcgcctgacctttctgcaaagtgaaaaggggtgccagcagcaatgngttaaaacagaaaccgggccagtaaaatcaagctcatcacaccaacattgcacagaaatttgtggaaatccactcgagcgatccaattgcaatatgaaccaaacagaactcagcactacgacatatattgtttcttatgtgcagtaatttacatggaaattcagcactgtttcaggacccccaacacttgacagctgtaaggtcatagagccgctgccccatggctagcatatgcccctgcagattatagacaattaattggtctcacattaagataaggatgctgatcaaaatacctgccaaggtttctgtcttctctgcaagcctgtccacttcatgagaaggatcttggtgtactaagcagaccaagattcctttctactataggaagttggaactacgtcttcgtgcgcagctttctatgactaataatggagatccgtagaagtactgactattataa

SEQ ID NO: 40922 - DNA, 616 bp, Setaria italica
  Peptide Sequence Number=SeqID_106896
ggcgcggagcggggaactgccgaagggcacgtccgcggggccggcgccggccgcggccgcggtgaggcacgaggggtggctggtgcggcacgggcggaggaagatcgggaggtccttcttccacatgcgctacttcgtcctcgacaacaagcttctcgcctactacaagaagaagcccagggacagcatggttccgctcaagtcaattcttattgatggaaattgcagagtggaggatagagggcttaaaacacatcatggtcaaatgatttatttcctatgcatttacaacaagaaacaaaaggagaatcaaatcacgatgggtgcatatgatattgaagatgccctaacctggaagaggaagctggagtttctgattgatcagcaacaggatagtatgacggctaaaaaccgtaaagcttttgcttcattggacttcgacatagatcttggaggaccattttcgttctctgatcatgacagtggtcctgaagatgaagaagagccccggcccaccttgcttcgcaggacaactatagggaatggccctcctgattggtgtcactctgatttgacagcccaatatcaggctctttggtccagtcaagtacagaat

SEQ ID NO: 40923 - DNA, 453 bp, Setaria italica
  Peptide Sequence Number=SeqID_106897
caaatctgacaatgaagctaaacacacagatgagcctccagaaaaaattgatttatcttgcttttctgggattcttcatcatgatccggatgagaaaagccgcaactgttggacagtacctgacagcaagcttttcaaagttcgtagcaagaactttccacatgacaaatcaaagatacctgctgcaagttatctcatggagcttgcagccatagattggtttaaggataccaagcgtatggataatgttggaaggcaaaaaaattgcgttgctcaggttgctgctgacaaagggatgcatacatttgtagtcaacttacagattcctggatcaactcattacagcctggtcatgtatttcgtcacgagttccttgaaaaagggatcattattgcagcgtttcttgatggcgatgatgacttccggaatagcagactgaagctcataccatct

SEQ ID NO: 40924 - DNA, 2502 bp, Setaria italica
  Peptide Sequence Number=SeqID_106898
cccttaactacgaaaccgactaatgtccacatctgcttcatttttttgaaagttgagggtactaggtataaagttttttgaaagacttgtgcagcttgcactttttcatccttttgcagtctgccggattctcttgtttgaacctctttttctttgtggcaatgtatatttatatcactgatatgaatactatgccaatgctgcacttttcttcaaccagtgcacattttcaaatcacgatgggtgcatatgatattgaagatgccctaacctggaagaggaagctggagtttctgattgatcagcaacaggatagtatgacggctaaaaaccgtaaagcttttgcttcattggacttcgacatagatcttggaggaccattttcgttctctgatcatgacagtggtcctgaagatgaagaagagccccggcccaccttgcttcgcaggacaactatagggaatggccctcctgattctgtacttgactggaccaaagagcctgatattgggctgtcaaatcagagtgacaccaatcaggcttactccaggaagaactggaggcttcttagatgccagaatggattgcgcatctttgaagaacttgtggaggttgaataccttgcaagaagctgtagtcgagcaatgagggctgtcggcgtggtggaagcctcatgcgaggccatttttgggcttgtaatgggtatggatgtaacacgatatgaatgggattgtagtttccaatatgggagtttagttgaagaggtcgatggccatactgcaatattgtaccatcgtttacaacttaactggtgttcaatggttgtctggccccgagatctttgttatgtacgatattggcgtcgcaacgatgatggaagctatgtcgtgctgtttcgatctactgaacatcagaactgtggcccccaaccaggatttgtgagagctattatcgaaagtggaggtttcaagatttctcctctcaaaagcctcaatgggagaccgcgcactcaagttcaacaccttatgcaaattgatcttagtggatggggcgtgaactacttgtcatcattccaataccactctttgttgcagatgctgaactgtgttgctggattgcgtgaatatttttcccaaacggatgaagttcatacggttccaaggattccggtgatgcatgccatggttaatacaatctcaatgaaaaaggaccagaagcttcaagaacctgacacgaagaccaaacaaactgataaaatcttagatatggtagatgaagagtcggaagatgatgatgactatcaagttcctgacgctgacttggaggaagaacctaccaaatctgacagtgatgctaagagctcagatccaatagatttgtcttggttttcgggcattattcgtcaggatgcaaatgagaaaagtcgcaactgttggacagtacctgataacaagatctttaaagttcgtagcaagaactttccacatgacaaatcaaaggtacctgcagggaagtaccttatggagctcgtagcgattgactggtttaaggacaccaagcgaatggaccatgttgctaggcggaaaggatgtgcagctcaggttgctgctgagaagggaatgttcacttttctcgtgaacatacaaattcctggatcaagtcattacagcttggtcctttattttgtctcaagctccttgaagaaaggatcattgttgcagcgctttgcagatggtgatgatgattttcggaacagcagattgaagcttattccatctgttccgaaggggtcttggatagtgcggcagagcgttggaagcacgccttgcttactggggaaggctgttgactgcagctatttgcgtggtcctgagtacttagaagtggatgtagatattggttcatcagcagtagccaacggggtcctgggcttggtgtttggtgttgttaccaccttggtagttgacatggcgtttcttatccaggcaaacacatacgacgagctcccggagcagcttctaggcgccgcgcggctgtcacacatcgaaccctccgcagcagtgaaccctgagcttgataacatttcctgagtgtgggatgaatcaagctgtgcagattctttcattctttcccccattacgctctccatttgttcagccactgcagcatttcgcagtttgatattggaggtgcatactggagacagaccctgcagcagtctacaagttcatgtgcctcgccttcatacagttttgtcttttcttttttattcttctttactggtgtagtttctttacagttaatgtgatgcagtagatataccaaagactatacagcatggtttggaaaccaattcatgtacatgttgcagccctgtcatcatatacatgcagcagtgttagctcgattattcatcgcctttttctctccttgagaggaacgagcatgcagcagtgttgcagtatattggctgaacaatatacacctggcctggccgatgat

SEQ ID NO: 40925 - DNA, 476 bp, Setaria italica
  Peptide Sequence Number=SeqID_106899
ccaaataatattccactaaacaccaaagctccaaaccacttgttggacacaaacttcctgttgcaatcagagcggttagaaagttccacagttgaaatctgccatgctaactgtaccgctgcagcactcagaaaaggatagtagggccatccaaggtcagcattgtagccactgagtgctaagctgcatatgcaagcggcaccgaagccactaatccagtacttggtcaaatctccaaatcttaatgctgtggacttaactcctactttgaggtcatcttctttgtcctgagatgtacatggatagaaatatttgtataagacatcacatcaacctaaaacaaacacttcgtcaaggataaatatgaaagaatgagaatattgaaacacctgatgtgcatatatggtatcatataccagtgtccaacatataccagctgtatacaatggaaggacgactgcagggtctaagctttc

SEQ ID NO: 40926 - DNA, 666 bp, Setaria italica
  Peptide Sequence Number=SeqID_106900
ctgatcaatccatcatgatacaagacgcccaaataatattccactaaacaccaaagctccaaaccacttgttggacacaaacttcctgttgcaatcagagcggttagaaagttccacagttgaaatctgccatgctaactgtaccgctgcagcactcagaaaaggatagtagggccatccaaggtcagcattgtagccactgagtgctaagctgcatatgcaagcggcaccgaagccactaatccagtacttggtcaaatctccaaatcttaatgctgtggacttaactcctactttgaggtcatcttctttgtcctgatgtgcatatatggtatcatataccagtgtccaacatataccagctgtatacaatggaaggacgactgcagggtctaagctttccttaatagcagcccatcctaataaagctccccagttgaatgtcaggccaagataagcctgaggccaaaatgtgaatctcttcatcaggggatatgagaagaccagaagaagtgaagatgccccgagaatacggctgtagttattcaactggagaagaatgcccagtcccaaaagaagctgaaacccgaggaagccaactccctgtgaaggagtgagagcacctgatgcaaaaggcctgcttttggtgcgctcaaccttgttatc

SEQ ID NO: 40927 - DNA, 609 bp, Setaria italica
  Peptide Sequence Number=SeqID_106901
tttatgaatgtgtaatcaactgattgtgtgtctggattcatacaaaaattgttttgcacagctgtttctatctagaggtgacaaaaggaggatgctctaactgatcctttaatataaaacggtacacaatgatacaaaaaatgtactgtacatcaatgtattttcctacccctagtctgataactgtatacaggaggtggagagcaccaccatgaaatgctcggaaaatagcaaagtccattctgcaccacgctgcaattgctaggccacaaagtgaagggctcaaaactgtttaggtttctgttgaacccatcagtttatggaatgcagcacgcctgatcaatccatcatgatacaagacgcccaaataatattccactaaacaccaaagctccaaaccacttgttggacacaaacttcctgttgcaatcagagcggttagaaagttccacagttgaaatctgccatgctaactgtaccgctgcagcactcagaaaaggatagtagggccatcctgtccaatatgatttgaggtctggagtcaatataagtaaacataatactattcttcactaaagcatgacactataaaccaaccaaggtcagcat

SEQ ID NO: 40928 - DNA, 213 bp, Setaria italica
  Peptide Sequence Number=SeqID_106902
ctattattcatgataaatatatgaagatcctgaattcttagttgcattgtttgatgcttgcttgctgaatgggcactgagtttgaatggacatcaagcaccttagtaacatcatttcattgtgaaaaacatagctgaaatcaaatgtataaaattgaattatttaaggataatttatcatgctgcttgttcccatgctagctaccaaggcact

SEQ ID NO: 40929 - DNA, 609 bp, Setaria italica
  Peptide Sequence Number=SeqID_106903
atagtacttatttggagtagccaggaccagagggggcacgcagaagaagcaggcgcaaattaacggaagcggtttctcaggagccgaggcgcgaagagaaacagagcgagcgggagatgaggagtccggtgtcggaacgcagcctcatcatcgagagctccgacgacgaggacacccactccggagccgccgtggccaccagcgggcgaagacgcgtcgtccatgacgaggaggagaagggcgctggttcggactccgactcctcgtcgtcgtcctcgtcatgcgccaccccacgccgcggcccctgctcctcctccccctacgcccagcaatggccgcagagttacaggcaatcaattgacattcttagtaacgtgcagtcacccaatctgagtttcttggggactccatctctgagcagattgtccaactctttcctcgccgtaaccgattcttttcgaagcaaaacccctgaaataatctctaactttgtcaagccacttctgagccccacgacaagtgatgagcagcagcaacacgaagatacccgaaagagttcccagtacattacgccctcaagaaaaccatctttgcaacaaatccctgagg

SEQ ID NO: 40930 - DNA, 263 bp, Setaria italica
  Peptide Sequence Number=SeqID_106904
tgacttcgctccataagtctggctgtgatcctttggaacattaggaaaggatgaaatgctctggtctttgaacatgtccatctccatcggaggcttttgcttcaaagaatgtctgttgaccttactctttggcagcatagagctgcctctcctgaagacttttggtcatgtaggcctagcgggacagattttgtattgtaataatctagtttctgctttcatttcccttatttattcacaaatctattataaccaaaaaaaaa

SEQ ID NO: 40931 - DNA, 691 bp, Setaria italica
  misc_feature (681)..(681): n is a, c, g, or t
  Peptide Sequence Number=SeqID_106905
ttctaagcggatcggcgtgcagccgcacgtcatcgagctcgaccatctcggcgctcaaggaccacaactacaaaaggttttagagaggctgactggacagtctactgttcctaatgttttcattggtggaaaacatgttggtggctgtacaggtattatacatgtgctctatgttaaatactaatcagtctttacagttatatatacataatggcaattgatgtatgtgcacctgcaacaagagattagatgagagtgtattctgcatgctaaccttacaatacttttccatgctataactaataagctatctcagctaatctgctacatgacacgtgaggtaattgagaggccagctgctgtgatttggttcagccaaatatgcatattcttgtacctctatctaggaaaataataaaagaaaacaggccatcttgaatttctgctatgtataaatacctgcgccatgactccatctgcattacaaggtgagaattgcatatgttttctgagcagctggcatctgcccagcatgatgcaaaagaccattgatgatgtgcatgcatgtttcccacttccgctagtctgttagtaatgtctattgtagaaaagaaaggaacgctaataccagcatgctctcgtcttatgttgtagatactgtgaagctgcatcgcaagggtnagctagctag

SEQ ID NO: 40932 - DNA, 795 bp, Setaria italica
  Peptide Sequence Number=SeqID_106906
gtagagagagacaaacgagaagagtcgagagagattccgatgccgccgccgattccgatgccgccggacatgaccctccgccgcctccccacggccatcctgggcctctccccttctctcccgtgtttgctgtctcgtccccgcctctacctcgccgcacgtcggcccagggccgtcgccgcccgggcctcctcctcctcttcctcaccggactcgtcctttggcgcgcggatggaggattccgtcaagaagacggtggccgacaaccccgtcgtcatctactccaagtcatggtgctcatattccatggaggtgaaggcgctcttcaagcggatcggcgtgcagccgcacgtcatcgagctcgaccatctcggcgctcaaggaccacaactacaaaaggttttagagaggctgactggacagtctactgttcctaatgttttcattggtggaaaacatgttggtggctgtacagatactgtgaagctgcatcgcaagggtgagctagctagcatgctgtcggagctggatatcaacattaacaactcatgacgagatggagcgcgtggttcgcggaggatggatttgaggcttgagagacttgtattgagttgttttaggctttttgcagatccattatgttgccgtgtggcaaaactgtagtcatttacacatttttgtttggttattacaccgagtgagacacggaacttgactttccaacaatgcaatgcctgcggttaagataagaaaaaaaggcctagaaaaaaactaacaaaaaaacgtagaacgtaa

SEQ ID NO: 40933 - DNA, 625 bp, Setaria italica
  Peptide Sequence Number=SeqID_106907
aacgagacttggctggcctttcataattgtaacctgcatgttcactgttgtgtttgatgttcagcttcagcgctatcaattgcaagcccgtaacatacaaacacacatcaaacagttgcttgaaccaatgcatataggctgctgggatttataagtacttcttgattcctaacaaatctacatgtttatgttcttatgcaactgacagctgatccatttcaggcgctcaaggaccacaactacaaaaggttttagagaggctgactggacagtctactgttcctaatgttttcattggtatgtcaggtttttactctacctagcttagcttttctcatttgttcatgactcattgacaaaattccctcaatgatctttcatattaagtagggatactgcagttgttttccttaaagtgcaaatcctgatacatatgggtaaccttcgcagtttgtcaccgcacagaaatgaatccgcatatgtgcatcagttattttgatttacattgtatgactcgcatacatctaactaagtaactatttctttttttattccaggtggaaaacatgttggtggctgtacaggtattatacatgtgctctatgttaaatactaatcagtcttt

SEQ ID NO: 40934 - DNA, 672 bp, Setaria italica
  Peptide Sequence Number=SeqID_106908
tctccattgcctcaagcttatgagattcagcaccgctatagtactaattctttttctgctctttacgcttctggtcataaagcccccttatcttctccatagccttgacttccttaagaagcttgttttcccatatgtacagcttctgcagtgaagatgaaaggttgccagattccatagccttttcctcctcatactgcatgatcgccttggccttggaaggctgtccgcaaatcaccattgagggcacttttagtcccgagttcttcttcttgtagtaaggcaccttgtcaacctcaagcatcttgctaacgtcaccagctgacttggaggcggtgtcaaactgcaacttgatctcctgcgccacctcgacgtcgctggtgtaggtcttaatctcaggcacagcaggaggctcatcagcgacgcctgaatcatcattcagctgttcttccacctccaccaccacactctcctctactccatccatcgtgctgcttctgaactcgacgtgcccctctgtctcctcctcgctgcttccactgccatccgacgactcggacttcctgtgcacctactcaaacttcgcgttcacgcgggtgcactcatccccggcgtgagcgtccctgacgaccactcccgactcctcgtcctctaggtcgggaatgccctcat

SEQ ID NO: 40935 - DNA, 1229 bp, Setaria italica
  Peptide Sequence Number=SeqID_106909
gtatttgtgtttgaaaaacactattctctcatggtttcggtgaaagggcaacatattggcaaaggggagaaagaaaaattaggttttgtaaaagtcaaactccccggcctataacaagccctagaaaaagacaggtctctgattttctttacactctactccctccgaaaaacatggagtgaaaagatcaaaccatgtaaaaaatggagggagagaaaataggagagggtaggtaactaggtaattcatctgcacccatgcagcaaaaaccagtggaaatggctatctttgtgggggcactgtggggggactgcaagcaactctcttcggaagcatggcaaggaagaacctgagaaactaaccattagcctcgaatcctcgaggctgatgggaaaaaagttggcctagattaagctttgtctgatcaggaagctaaacccttcagaaagatgatttgaacgcttgatttagcttcttgacaatatccttggcagacaagcagaagtcgtcaccagccatggccatgatggtgatgtcgagggaggaggtggtgaaggggagcacattggtgttcatgatggtaaggccgaggcgctcgacctccgacagcgcggcgatgagcgcgcccttacggttctcgcagtggatcctgaccagcaccgtgcggtccgacacccgggcctcgatctccggcagcgtgcctgcggcctcagcgcccacgaagttctcgtcgcaggatgagccgtcgtcgtcgtcagcggacagctgggacttcttgaccagcaccgccgcctccaccggccgccggcgagcctcgtcctccaggcccttcacctggtcctgcagctgcttcacgtacttgatcgcgtcactgagcaccgacgccttgtccatcttcttgaggccagggacgatcttggagagggcgatgaagcgctggctgagcttctcgcggcgcttccgctcggccaagatgtggtcctggttctgggaggccggccgggtggtcgccggcaccggcaccttcgcggcctcggcgaccatggcgtcgtagctccgcttggcctggcgctcctggtggaacgacggcgcaccggcgtccacaacctcctgcttgggcgccttcgcgggcgcgccgtagtagggggcgctgggcacctggtgcgcctcggccttggcgaacgcggccgcggcggcgtggccgccgaaggagaggatggtcggggagg

SEQ ID NO: 40936 - DNA, 364 bp, Setaria italica
  Peptide Sequence Number=SeqID_106910
gttaacaacatccagagtgtgcatgctggaaaggttcccaatccctcgaggaaccttgacgccattatgagagccatcatcaagttggtgctgctgctgctgtatgaacaaccagtttagcaccagagttgcacccggcctgctatctgctggtggtggatgatgttggatgttctgatgatgatgggttatccgctgctgctggttgatgtctcactgatatccagagtttggagctgcttcaaatctcccaaggaatccagcagatgagtgatttcaattgttttgtagttacctcgattaccacgtattttaatcaatgtttatatatacctaatcattaaattgtctttgtagttttgtg

SEQ ID NO: 40937 - DNA, 318 bp, Setaria italica
  Peptide Sequence Number=SeqID_106911
attatctggagcgatgcttctggtcaacatagatgccgtgttgttccagctggacggttttatgaggttacaaggaataagggtgttggtctgacttttgctgcaatgggaatgacttcattttgtgatggcccagcagatgggactaaccttactggtgtaggcgagatcagacttgtaccagatatgccaacacttctgaggctcccatggtcaatgcatgaggaaatggtgatggctgacatgcacataaggcccggagaagcctgggaatactgtcctagaaatgccttcattgtcacattgaactcatctaac

SEQ ID NO: 40938 - DNA, 413 bp, Setaria italica
  Peptide Sequence Number=SeqID_106912
aattcagtacattaaacataaacgatttatataccagctctgaagaatggttttatctgtttacattgttttgtgccagaagcaatatatgtgaacagattggccaggcaatagagagttgaaactctttggtacttgaatggagctgaaatgagctatatttgatttgaaactagtgtatctggtaactgatccttccttttgcctcaacactttccaggcctgatttgaatgatattggatctggttctcatgtgcatctgagtttgtgggagaacgaccagaatgttttcatggggtcaagtacagataatttccatggaatgtcaaatactggagaaaagttccttgctggagtttatcatcatctttcatcaatcttggcatttactgctcctcacccaaatagctac

SEQ ID NO: 40939 - DNA, 2880 bp, Setaria italica
  Peptide Sequence Number=SeqID_106913
tcagacgcagccaccgcttcggtcaaacgaggctgtctccgccgcgctgcctgcgaagatccttttgagcaagagaagcggcggagaccgcgggactgaggaggggagggagagagatggaggctaggtacgcggcgctgcggcgcgcgacggaggaggtggcggcggtggacgcgcacgcgcacaacctggtggagctcggctccgcgttccccttcgcccgctgcttctgcgaggccgacggcgacgcgctcgcgctcgcgccccactccctctccttcaagagaagccttagggacattgctgcattgtacaactgcgaagcctcacttgagaaggtagaggagttcaggaaagctgaaggattgaaatcgattgcctcgaaatgcttccaagctgccaacatatctgccatccttatagatgatggcataccatttgacaaaatgctagatttggagtcccacaaggcatttgctcctatagttagcagagttctgagaacagaaaggctagcagaaacaatcatcaacgacgagtcattcagtggatcaagctggacactggactcattcattgaaagctatgtaactaagcttaagtcagtgtgtaaccaaattgttgcattgaaaagcatagctgcatatagaagtggcttagagatcaatcccaatgttagcaagactgatgcagaggatggtcttcgaaaggagctaacaggtcctaggccaattcggattacaaacaagaacctgattgactatctatttgtctgcagtcttgaaattgctgtgtcgtttaacctaccagtgcagattcacacaggttttggagacaaggacctagacttgcgaaagtgcaacccactacatttgcgtgatgttcttgaggataaaagatttgctaagtgccaacttgttcttttacatgcttcttatcccttttcaaaggaagcttcttaccttgcatctgtttactcccaggtctatcttgattttggcttggcgtttccaaaacttagtgttcaaggaatgacatcatcactgaaagagcttctggagctagctcccataaagaaggtcatgttcagtacagatggatatgcttttccagagacatattatctaggtgcaaataggtcgcgggatgttgtttatcgtgtcctagctgccgcatgtgaagacggagaccttagcattcaggaagcgatcgaagcagttgaggacatatttagaagaaatgcattgcatctatataagttaaatgttgccaatgggtcaattaatcatgaaactgccatagctggtgacagtgtgtcattgtcttctgttgaggaagacattctcttcgtccgaattatctggagcgatgcttctggtcaacatagatgccgtgttgttccagctggacggttttatgaggttacaaggaataagggtgttggtctgacttttgctgcaatgggaatgacttcattttgtgatggcccagcagatgggactaaccttactggtgtaggcgagatcagacttgtaccagatatgccaacacttctgaggctcccatggtcaatgcatgaggaaatggtgatggctgacatgcacataaggcccggagaagcctgggaatactgtcctagaaatgccttaaggaaagtcacaaaagttctgttagatgagttcaatgtgacaatgaaggcaggttttgaaaatgaattttttcttcgcagaaaattagtaagtgatggagttgagcaatgggttccatatgataataccaattactgctcaacttcagcatttgatggcgcatcatctatattacaagaaatatattcttctctcaaagcttcaaacattgtggttgagcagttgcatgctgaagctggaaaaggccagtttgagatagccttaaagtatatcttgtgcactcttgcggctgacaaactgatatatgcccgtgagactattaaatcagttgctcgaaagcatggactgctagcaacatttcttccaaagcctgatttgaatgatattggatctggttctcatgtgcatctgagtttgtgggagaacgaccagaatgttttcatggggtcaagtacagataatttccatggaatgtcaaatactggagaaaagttccttgctggagtttatcatcatctttcatcaatcttggcatttactgctcctcacccaaatagctacgaccggattcagccaaatacatggagtggagcttatctatgctgggggaaagagaatagggaggctccattgagaactgcatgcccacctggtgtgcctcttgatttagtcagcaactttgagatcaaatccttcgatgcatgcgcaaatccgcacttgggtcttgctgccatcgttgctgccggcattgatgggctaaggagaggccataagttgccagaaccaattgaatcaaaccctgcagattacgcttccaaactcaaaaggctaccgcagaacctacaggaatctgtagaatcgcttgctgcagataaggttctgcacgaattaattggtgataaacttgtcacggccgctatagctatacggaaggctgagatcgatcactatgcgaagaatcctggggcatttaacgatctcatctaccggtactagggcaaaagaatgaaaatgggggactacgtttttagacgtcacaagtggtttaaccgtatgaccaactgagagactacgtggaagaattaatattgtttgatttcgaactctcttgtcatgtcactgaactttctcttatcgaataaacttgtgttaaaatcaaggaaaaaaaggataggcgcatgcaaacccttcactatttgagtgaagggacggagccttgtgcagttgtgct

SEQ ID NO: 40940 - DNA, 752 bp, Setaria italica
  Peptide Sequence Number=SeqID_106914
ctatacctgggaccgaagttgaaagactctaaaacaatggtaagtccactttgggaattcttgagatccagaacggcttgaaaggtttattcaattactcatcgagacccaaggttcaacaaaaatgttttacatattaattggagagtataatgccataacaaagaaaaagggagattagagagctcaatgaggaattatatcagcctaccaggtagctctccactgcaacacaaactgtaaaacaagcaaaaaccacaaggcacataacggttgtacactattatatcgcttgcccgtgaagcaagaagttgccgaggctagggggccagcatccaagctacttcatcaagtgttcttctctaggttccaagaagagattatatggtgtgccctagtacgtcggtactgcactactgctccatccatcatctatgcaccttttccgtggcgagacgaggaggccatgcatgggcccattgggccccacgtgttcacggttcgtgaggccactcatgtgccgaggttgcccacagaggcacacactactcacagatcataatgggggcctaatccattgggggcagctagtgagaaatgtgagagctacatttaagctgtagcaaatggttcgtttggcagaacaaagatgcagatacagtttgtggaaacggacaacaaaggaaaggctctttgagccgactctgattttgtgattgattgtgcaggcacaacgcatacgggacaggtaa

SEQ ID NO: 40941 - DNA, 495 bp, Setaria italica
  Peptide Sequence Number=SeqID_106915
cctggactctcatatagatcaatgattacaatgcccctcctctttttagaaaatgtacctgtgcacttgtttgcgtctgtagttctgcatgtcctgtttgtcatcagtggtggcacatgatgcccttgtttccagtattttagagatcaggataatcagaccatgaaatttgtaactagtttgggcagcaaactccctcatgcttgctcatatattttaactgaaatgacctctttctgtatttttttattgcacttctaatatttccccactaagatggttgccatcaaatagtgattccagtatggtgttcagatttaaaattgttccctcagtcacaagaaagtgataattgagcaccaacatgttcttcaaaatactgctctagccaccccaatttaaaatcttcaatctgtttgttggatatgtataaattggcttatttgctaattcaggtgttcactagttatttattcctcataaataatccacagc

SEQ ID NO: 40942 - DNA, 457 bp, Setaria italica
  Peptide Sequence Number=SeqID_106916
taaggaaactgctaggtagagagagaggggaggaggaggagcggtcgggcggccatggggcaccactgctgcagcaagcagaaggtgaagcgcgggctctggtcgccggaggaggacgagaagctcgtcaagtacatcaccgcccacggccacagctgctggagcgccgtccccaagcacgccgggctgcagcggtgcggcaagagctgccggctccggtggatcaactacctccgaccggacctcaagcgcggcaccttctccgaccaggaggagcgcaccatcatcgacgtccaccgcatcctcggcaaccggtgggcccagatcgccaagcacctgcccgggcgcacggcaacgaggtcaagaacttttggaactcgtgcatcaagaagaagctcatcgcgcagggcctcgaccccaagacccacaacctcctgccggcgtccaggtctctcct

SEQ ID NO: 40943 - DNA, 764 bp, Setaria italica
  misc_feature (1)..(43): n is a, c, g, or t
  Peptide Sequence Number=SeqID_106917
nnnnnnnnnnnnnnnnnnnnnnnnnnnnnnnnnnnnnnnnnnngttttactaggatgtataattgaaatgtcagtatgctagcgcgaaagattgttatcttatctgtacatgctcctggtaccctttgtcttcacaaatagtaatgtgatgtgcaatgaatttaagttgccttgcttcatggatgctctatccatgcttctctcccccattttcaaatagtagcaaataaaaatctgtgttgagcacactatcctaatgctagtttcacttattttcatcacttcagtatctactaatatcatattccaaattattaagtgacaaaatttacgaaacttttcccatgttacgggaaatgttctgaacttgagttcatggcgtttcttcatcagcattaaagggcaatccctttccactgagaagcataaaaggtctagcggaaatatgttccagtcatcatcaagtgagaaccaaaaacattctagcagaaatatgttccagtcatcatcacgtagttagtggttgcattggtatatcactgagttcacgtcagtggcttgagatcaaatcaacaataacgacttctggttctagagtgccaaccatattatgccataacagctcgcctcgcaagttggagctggagacttacaggcgaaggatattctgatagccattcctgtttgatccacgcccatcattggattagttggaaagcaccgcccaacagtctgatttgccctcactcaatttcaatttgttg

SEQ ID NO: 40944 - DNA, 553 bp, Setaria italica
  Peptide Sequence Number=SeqID_106918
aattagacaagcaaggagcgaacatgggagctgaaaatgctaatgggtatgtactggccagtcaatcataaaatttgttcctgcaccaaatcagttaaataaacttatcttacaaaaaagtttaactttaaaactgccacagcaagattatgatctttgctatcacaaatgtgttgtgaaataagatctctttacatagtcatcttcataatttttactctgctattttatattttctattctaaccagtgttaagttttaaatctagttaaaccacattttcctttgaagtttactcaaatcctgaagctatttttaacatttgttacttgtaatgaattccgatgtcgtatgctcttgtatctcacaggaaactttaagcttttgttttcccattaagaaagagtgattgggatggagtatgttaatcccttgttagcaaaagacttccatgctacttgtttggattacttacttttccaatgcaatttacttgaaggtatactccctacatgtggctcgttcgtggtcacaaaactagtgttgaaggcat

SEQ ID NO: 40945 - DNA, 488 bp, Setaria italica
  Peptide Sequence Number=SeqID_106919
ggtggcagtcgggcgtagtacgacagcattgggagtacaaaagctgcagtcttgccagaacctgtctcagcaataccaataacatcacgctgctgtagaccaagtggaatggcagccatctggattggtgatggtttttcatagccagccttgtcaatggcacgaagcagctcagtcccaagcttgctctcaatccacttccgcattggacgcggtatgcgagaacccttgtaggagatattgaagtcctcacggaaaatacgccaatcccgctcggtcatctcctcaagcaccttctcagaccagtgcctgtccacacgcatgtcaaatgcatcatacatttcagccgcagcagccttcttcttatccaccacatcatcctctgggcggtcctccacaccagccttgcgccgcagctccgcacgggtctccttctcgtgcgcggctgccgccttcttctgctcaacggcacgaaacggtaacgtaaa

SEQ ID NO: 40946 - DNA, 2680 bp, Setaria italica
  misc_feature (1)..(82): n is a, c, g, or t
  Peptide Sequence Number=SeqID_106920
nnnnnnnnnnnnnnnnnnnnnnnnnnnnnnnnnnnnnnnnnnnnnnnnnnnnnnnnnnnnnnnnnnnnnnnnnnnnnnnnnnagttttttttttttttttttgcaatatgctacctaaatataccaaaagcatttataaaatacacagggaatactataattcagccatgtcaaagcttgcaaaatagcacaaaattatgataggatacacatggtccacagctaaatcatcaccaaaacatactaaagttatgacaatataaagccagctttcaaacataaattaaaatatctctaatcataatagtctttgtacctcttcaacactaatctagatccctctctttccagtagaaattgcgctcatactagtccaaaagatcttcaaccgctacttcagtaggtcgcttcaatgatttgcgaagactgtgtcatttctccttggaggtctatcaggaattgagcctggcttaaattttgatgcctcatgtcttgcaagttcaggaggcacaggactgttgctctgaatgagcatctgcttcagatcaaagaaaatatcagtattctccagcgttaaaaatgaagttgctactcccttctttccagcacgtcctgttcttccaatgcgatgtgtgtatgtgtcaattgaactaggcatctcataattaatcacatgtgcgacatcaggaatatcaataccacgccctgcaacatcagtagccacaagaacattgaaacgtcggtttctgaatccgtcaaggctaatctctctctggtcttgtgacttccctccatgtagggttgtgacacggaagcctgccttgtccagatccttagcacgcatgtccgctgtcttcttagtattgcagaacacaatggctgtcttgtctccaagatccatgagtatcttctggagccgtgacatcttctcttgctccttcaccatgatcacgttctgggtgatcagatcagtggccttgccagctgtaccgattgtcaccacaactgggttccggagatacttcctagcaagacgctctacagcaggtggcatggtggcactaaacatataagttgtcctgtagatcctcttctcatcaagttcctcatcctcattctcaggtttcaagttacttgatggcatcgcatcaaggacaccaacaacttgtggctcaaagcccatatcaatcatcctatcagcctcatcaagcactacataattgcactggttgagcacagcatacctcctttccaagcaatcaagaagccggccaggtgttgcaattacaatctcacagccctgcctaatcttgaaaccctgctcctcaatggactgaccaccaacaattgatacaactttaatgcccagataggttgcaaatttcacagtctcttcctcaatttgttgagcaagctcacgagtaggtgccatgacaacagcataaggaccctcagcctcgttatcctcacttatgggtggcagtcgggtaatgtacgacagcatggggagtacaaaagctgcagtcttgccagaacctgtctcagcaataccaataacatcacgctgctgtagaccaagtggaatggcagccatctggattggtgagggtttttcatacttcaaaccgactaacttacaagtaaggtacgacttcaaatggcgaagaaacttaagttaagttaatagccagccttgtcaatggcacgaagcagctcagtcccaagcttgctctcactccacttccgcattggacgcggtatgcgagaacccttgtaggagatattgaagtcctcacggaaaatacgccaatcccgctcggtcatctcctcaagcaccttctcagaccagtgcctgtccacacgcatgtcaaatgcatcatacatttcagccgcagcagccttcttcttatccaccacatcatcctctgggcggtcctccacaccagccttgcgccgcagctccgcacgggtctccttctcgtgcgcggctgccgccttcttctgctcacggcggtcgatgccagcaaggaagccccgcccaaagagcagccgggcctcgtgcggcgactggtagagggtgttcatgtcacggctggtgtcctcggtgttctcccagtcgaaggagaagcggaacttctccgagggcttgatgacccgcttcttgggcttcttggaccccaggtactgctccttgatcgcgtcgagctccttctcacgctcccgctccgccatcttctcctgccggtccctctcccggtccccgcggtctccacgctccctgtcccggtctcgctcccgctcccgatccctgtcccggtcgcggtcgcgccggtctcggtctctgtccctgtccctgtccctgtcgcggcgggaggagtcgtcccggtcgcgctcccgatcccgatctcggtcgcggcgggagtcgtcgtcgcggcggcggtcccggtcccggtcccggtcccggtcccggtcggaggagtctcggtgggagctggaggactcacgaggagcggagttggagccggacgggggagggccgcccggaggcggcggcggagggggccggggcagggactggaggaggtcgagcgcggtgcggcgctggtcggagacggcggcctggcggcgctcgagcgcaaggcgctcccgctcagccttggtgaggaacacgggcttcgcc

SEQ ID NO: 40947 - DNA, 444 bp, Setaria italica
  Peptide Sequence Number=SeqID_106921
tggttgggtaccttgagaagctatttcttcaagtctgagaagatgacctggtgtacatgctttagatgctgcaaaattcttgactaattggagctgctgagggtgtgcactagtgtccatcctgttgagaagatggtagaagttgaaggtatgaagaaaaagcaagttgttatcctccaattgatcagaggtcactggagctgaaggcaaagtcaagggtaatagcttgccagctctgctgagcatctcaacgccctttttaaggtcagagtctgataatggagatttgtttagctcctcagcaaggagcatggcactgacactcatgatcaatgatttgcaagccaagagacggttagcatcatcttcaccattacctgagctgaaaaattcagctgcaagctgaaaacctcagaaactacatcatgcttcttctcctttgcc

SEQ ID NO: 40948 - DNA, 553 bp, Setaria italica
  Peptide Sequence Number=SeqID_106922
tagtctaaaattaacaaaagcttgtggatgctagaacgaccacatgagctcagtagctgccacaggattctctttgccggcctctgtgctctccaccctgagctaacactggccaccaccacctaccctcgcgacatcctctgcgctttgctcgccaggcccctttagtttctcttcatgctctaccactgataagaaatccaagaagcagggaacatacggaacaaaccatccagggtcttgttcaagtgtgccaagagcacgcacttccttgctatccaagctatatgatatcagctgccgtttccagttcagaaaaatgaataccatattgctgtctggatgaatggcaaccacattgtagtcacaatcgcttgtgtaaaatctgctcccaaacagatgagtacggctcaccctgtgcttaagtgcccatttttgtgtatcatagtcaagaacccagattgacagtagatcacgatcatcattgaaatctcttgtataaacctgactgggtgttcatggatgcaatataggtgcccttgggattgaccaa

SEQ ID NO: 40949 - DNA, 195 bp, Setaria italica
  Peptide Sequence Number=SeqID_106923
gagggaaagattttgttcaatataggcaggagattccttattcatgccaggttaatgttgtcagttacaaaagcaggcctactgccaaggatttcattcaagttgagatccttgttgagaaagaatcacaaagaagcattatacttgggaaggatggcaaagccataaagatgttgtcaagccgtgatgcggttg

SEQ ID NO: 40950 - DNA, 1548 bp, Setaria italica
  Peptide Sequence Number=SeqID_106924
caaacccggaacgctagcgaacacctcactgcgcactgccactgtcgagaatatggagcttggcctcgcgctccggttcgtcgcgcctcctcctccctgtctctcccgtcgatgtcttgctcttccgccggatttgctttccccgtgtgtgctacgaggaagaagcgtccgcgcctcgagactagagcatggagttggggttgtgtccaatgcgagtatgacctattcaggagtagaagaggaggagatgttggaagaggaggaggaggaggaggctgaacctgcggtgaacgcgaggccgcgcttggagcttatcgagaagccagactggagcctggcgctgctggatgagtacgagtcggaggagttgagcacctctcattgcgacaatcaccgcagtggctatgttgctgtattggggaagccaaatgttggcaagagcacccttattaaccaagtggttggtcagaaactttcaattgtaacagataaaccacagacaacacggcatcgcattcttggtatatgttctgaaccagaataccagattatactttatgatactcctggtgtcattaaaaaggagatgcacaagctggacagtatgatgatgaagaatgttaggagtgctattggcagtgcagactgtgtgcttgttgttgttgatgctcgcaaagcgcctgaaaaaattgatgagatgctggaagaaggtgtgggaaataaaggaattggagtacctgttctgctagtattgaacaagaaagatctgataaaaccaggagaaatcgcaaagaaacttgagtggtatcaaaaattcactaatgttgatgatgctataccaattagtgctaaatttggtcatggggtggatgatatcaaggagtggatattgtcaaagctccctctgggtcctgcttactaccccaaggacatagctagtgaacaccctgagagattttttgttggtgaaatagtgagggaaaagatttttgttcaatataggcaggagattccttattcatgccaggttaatgttgtcagttacaaaagcaggcctactgccaaggatttcattcaagttgagatccttgttgagaaagaatcacaaagaagcattatacttgggaaggatggcaaagccataaagatgttggcaaccgcatcacggcttgacatcgaggatttcctacaaaagaaagtttaccttgagctagaggtcaaggtgaaggaaaactggcggcaagatgaacgtcttctgaagcgttatggctacggcggcgagattcaagcgctatgactctgggggtgctacaatatcaatatcggctgtcgagagtaggagaatggattcgctcttcctttttcttctcttttccttcttttcttgttggtgatgcgactgagaagtttactgaaggtcaaattagcgcagtttttagagaggtcctatcggcaaatcttgtggtcatgatgtgttgtgtggaactgatcacggcacgaggcacggctatgctctgctgtggcagatggtctaggacggtgaaacca

SEQ ID NO: 40951 - DNA, 1590 bp, Setaria italica
  Peptide Sequence Number=SeqID_106925
cgcgcacggtgccccgccctgctcccggcgtcgctacccgctaaccgccgcggacagacgccacgacgtcactggaaaaaaaggaacccaaatatccaatcgagacccaccaccgaacaggtccaaatccgctcgtctcccctcgaagcaactccgccgttccgccggcaacgccactcgccccgccggagcaggaggagcacccgacccgtccaagcggctcggggagcgccagggccggacgaggacgagcggcctcccaaatttagcaagccgcggagcgcgtgggcgtgggcgttggcgtggcgcgaggaggagaggagggtgcgatggggtacctgccggccctgggcagcaaggcggcgcacttcgtgtccgacctcaccaccgtcatcctcaaccccgtctccgagcgcgagacctcacacctccccgaggttgatgaagtgcaagaaaattcagaggatgataaagattctgagcacaattctgacggccttgatggccccgacacatcttcctttagagcgttcttgatctcatttttgtcgtcatctagctctaataataacgattcgatggagataattcctgagcaaaatgtggacacgagttatccaactttaacacccatggggaagggaagcaagggaaggtcaggtctgataagtagagggaagcattccattggaaaaatcattagcaaggcggctcggattggtggttttaaacaaggtactgcagagcctaaaattgacagggagacagtaaatcatactcaaccagttgcatctgtttcggagcttgaggaatcaaaggaagttgcttctgtcagtgctctgccaactatgtcggaaccatccattcttttgtcagaactgatgcaatcaattctctatgcctctctccctgttcttgcccagggaaggaactgggtcttgctatacagcacatggaggcatggcatatctttatctactttatatagaaggagcatgctttgccctggtttctcacttttggtagtgggggataaaaagggcacagtttttggtggtttagttgaggctccattgcagccatccagttcaaagaagtatcaggggaccaataattgttttgttttcactaatttacacgaccgccctgttatataccgaccgactggtgcaaataactatttcacagtttgttccgccgactatttggctctaggaggaggaggtcattttgcactttatctagatggagaccttttgactggttcaagttctaattcagagacttttaacaatgagtgtttgtcgcattcccctgacttctcagtgaaagatgttgagctgtggggcttcgtctatccttccaagtacgaggagatgctcacgctctgccggactgagaaaccaggaatttgtcgatggtgattgccgcttgaactaccaaacatagacgcattgcacatctgtacagtttttagtagaatttgtgagttgcgagtgtttttgtgagcagggcaaagtaggagtactggacttgcttttctcaagcgagtttgtcttctagtatgtagttactgtcacttttttcatg

SEQ ID NO: 40952 - DNA, 435 bp, Setaria italica
  Peptide Sequence Number=SeqID_106926
ctgcgagtggccgctcccgcaggtgctgctctccgccttctccatccacaacgagaccctcaacgtctggacgtacgtaacacccctccccttctcggttctcttgttgcttggtccaattgatgctagttgcctcgttaggggggaggaacgggagatcaattttgatgttacagattgcaatgcccggaattgaattgttcggtagatttgatttctaggcggaattgtgattcattgtttatgactgagatcaatatggattggcgaaatatctcgccgtattttgtttagctgatcccatcatatttgtgatggctcataaaaccgtagaattcgtcaatctctgcaactatggaaggtatgagtagcgtccctgccctgttcatctacccgaaaaggacattttctgaaaacaaattcttaatggaaaag
